United States Patent Application Publication US 2012/0017292 A1 - sequence listing, part 3

SEQ ID NO: 8262 - DNA, 519 bp, Zea mays
  Peptide Sequence Number=SeqID_51637
atggggtcgggcgaggcggagcttcctatgtcgcccgaggctggacttagctgctgtcagcctcactctgtcgagtggcacaatagtcggagcgatgcaggtggcgctgttttcttgtcaggggaccggcctttctcagttgcgtttcgttccagtgtgtgcgcgcgagcgcacccgccgggtgtagcccccgaggcctcggaggagtggtttgactccttcgaggtcttagcgcgtttcgtgatgcttcggccgggtttggttgttccctcatgcgaactggccatagtccgggtgcatagtcgagtcccaagttctcgggctggtatgttgacgctgtcaacggtttggccggagccgggtttgcgagagcagcccccgagcctccgcacagagcgagaggacggtcaaggacaaactcggcttttttcatacgcccctttgtcgcctttccgcaaggaggaggggggaatgcgccatgttgccctcggagggcgccgaacatggtgtctccagtga

SEQ ID NO: 8263 - DNA, 954 bp, Zea mays
  Peptide Sequence Number=SeqID_51638
atggagcatcgtcccaggttggaaaagttgctggagactacccatctggagcttgacgggaagctattcgtcaacacgcagcaggcccctacctggcgcgccaactgtcggcgtttcgaccccgggggtccctggaccgacgagctgactccgacccctggggtcgagcgaggcggagtccgtcttccgaggtcgaggtcgagttcgagccctaggtcgggcgaggcggagaccgtcttccgaggccgaggctgtgtcagagccctggggtcgggcgaggcggagctgtgtccgagccctgagtgtcgggcgaggcggactccgtcatccagcgtcgaggttgagtccgagtcctattcgggcgaggcagagaccatcgttttccggagtgaggctgagtccttgccatggggtcgggcgagtcggagtccatcgtcttccggagccgaggctgagtccgagccctggggtcgggcgaggcgaagtccatcttccgaggccgggacgggggccgaaccctggggccggccgaagcggagcatcttatgtcgctcgaggctgaacttagctgctgtcagcctcactctgtcgagtggcacagcagtcagagcgacacagcggcactgttttctagtcaggtcggtcagtggagcggcgaagcctttgcagctttgtgctgatgggggttaccagctgagattaggagtcttggggggtcctggtggacaccctgccatgcatgattcggtggagcagctcggggaggtccttgaggtagccaaagttggcgaggggggcaacgttgagggccagcgtgtgcgggtgccacgcgtggagccagagtgcagaggcatagaagccctcgcggttagacttgtcgctcccacacacgccgcggaggttggccacgagtcagagcgcggtgtccgggttggccgcccaggcgacgcctag

SEQ ID NO: 8264 - DNA, 303 bp, Zea mays
  Peptide Sequence Number=SeqID_51639
atgccgacggcggccctcctccccacgcttcggctattcctggtcgtggggtgctctcggtattctttaagggagcggtcgcgaagacttttcttacaaagtgggtgctacaccatccttgcattaaatgctcctgcgatacggtcggtcggcgtggcgattttgccaaggttgcttcttggcgtaggctgggcctcgggcgagccgaagatttatgctgatgggggttaccagctgaaattaggagtcttgggggtacccctaattatggtccccgacaataacgcaaacgctaacttgtaa

SEQ ID NO: 8265 - DNA, 267 bp, Zea mays
  Peptide Sequence Number=SeqID_51640
atgccgacggcggccctcctccccacgcttcggctattcctggtcgtggggtgctctcggtattctttaagggagcggtcgcggaggtacggtgaaggatatcgtcgccagaggtcacctttatacccagtacgggaggccgagtgcgcggaaatcggaaccgaggcagagcgaccggcgcaccgcgcgcgattcagttccgagtccgctgggttgaggacgcagctgacaagtcgggcccagacggaagcgacccggcgcatctaa

SEQ ID NO: 8266 - DNA, 1116 bp, Zea mays
  Peptide Sequence Number=SeqID_51641
atgggggggtcgaattgggcccaaaacccccggctggcccatttctccactcccgccgcctacttcagggctgcgctcccaggcgccgaccggtgggcccgcccaggcagccacccggggcgtgtgcggtcgctgttctgcggggcccagtcgtcatcttcttccccctccgtcttctttcaacagaacgcgattccgtcgtctccgctcggccgtgatctcatgcgaccgccctcctgctcggactcggtctctaggctgcgcctctgcctcagaggtctccttgagtccaagctcgtcgacgcactcaacctcgccaactccctcgtggaatgccgcgatggcttctactaccgcgagctcggcctccatggcgtgcggcacctcaaacatgctgaatctcccttcaacaccccgtcgtgcccagcctctctgcctagccccgcgaccaccttgacccgccaaacaaggtcggtctatctcctcgtggccggtgcggcggaatcgaagctcaccagatgtggaattcgcggcatggccgccattgccgctaggcatagaatttggacctcgccactgcacaatcgccgggctgcgctcccaggcgccgaccggtgggcccgcccaggcagccacccggggcgtgtgcggtcgctgttctgcggggcccagtcgtcatcttcttccccctccgtcttctttcaacagaacgcgattccgtcgtctccgctcggccgtgatctcatgcgaccgccctcctgctcggactcggtctctaggctgcgcctctgcctcagaggtctccttgagtccaagctcgccgacgcactcaacctcgccaactccctcgtggaatgccgcgatggcttctactaccgcgagctcggcctccatggcgtgcggcacctcaaacatgctgaatctccctgcaacaccccgtcgtgcccggcctctctgcctagccccgcgaccaccttgacccgccaaacaaggtcggtctatctcctcgtggccggtgcggcggaatcgaagctcaccagatgtggaattcgcggcatggccgccattgccgctaggcatagaatttggacctcgccactgcacaatcgccggtaa

SEQ ID NO: 8267 - DNA, 489 bp, Zea mays
  Peptide Sequence Number=SeqID_51642
atggtgaccaccagttcgatggtggggagaagcaagccgggctgcggcctctgccccgccctcagcttcaaggatcttcatcatccttgctggggcggggggcgagctgagccggagctctacctcccgtatgggccggcgggccacctcttccttcagcattcaggggagagggcgctcaccggcctagcggagggggtggacttcgacaacgcggggccggtcagccgcaagcgtcgtcagctccagcatgcctggctcgttggctcagctggctttggcgcagcttccggtgccacctcccaccgctggggcggagtgtggctgtttgcccgccgtacggacggctgttgcgtcgtgcgcaccgggcgaccgcccaagacgtcgcatgccgctagggcggcgttcgtgttcttgggttgtcctacccttgctccggcacgacgcctctgcacggaggtcggtgctcgtccgtccgggaggacttga

SEQ ID NO: 8268 - DNA, 435 bp, Zea mays
  Peptide Sequence Number=SeqID_51643
atggccaaggctcgggctacgctcccgagggcagggctgacaacagctaagtccagcctcaggcgcaacaggaagctccgcctcgcccgaccttgggtctcggtctcagaaggaggtctccgcctcgcccgacctcagggctcggcccccgcctcggcctcggaaggtggcctccgcctcgcccgaccccagggctcggcccccgcctcggcctcggaagatggactccgcctcgcccgacctcagggctcggcctcgacctcgggcggaatcgcgtcctcgctcggcctcaacctcgacctcggaggagtttccgcctcgcccgaccttgggctcggaccgaccacgccacaggggggatcatcattaccctacccctacctagctcaagttacggggaacaagaccggcgtcccatctagctcgccccggtaa

SEQ ID NO: 8269 - DNA, 570 bp, Zea mays
  Peptide Sequence Number=SeqID_51644
atggagagttgcgagttgtgtcttctatcgaagcttgttcgaatggacggagactctagccaagagttgcatgaaatctcatgtgggcaccatttccactgcacctgcatagataagtacctctacatcattgcaacatgcccccgtgcaattggaatcatgcaatcagtcaaaaagggttgggttaaagtaacagactacaatagctatcaaactgtaaaaggatcactcaagttcaaaagaaagggtcaagatctcttttatgaacacaccttgtctctgaccaaagctctatgttggttccaatttgttcttacacatctagacaactggcagcttctaataaaatcaattcctagcgaagttgttaaacccggccgattcaaggcgataaacgatgacgggatgtcgatcatgaaggggaagctctacattcatttcacggtgaagttccctgactctctggtactggagcagtgcaaggctctcgagtcggtacttccaccaaagctttcgtccaatctgatagacatggagatagatgaatgtgaggagacaaccatgcattaa

SEQ ID NO: 8270 - DNA, 1002 bp, Zea mays
  Peptide Sequence Number=SeqID_51645
atggtcggcgccggcgtgctcagcctcccctacgccatgtcccagctcggctgggaggtcggcgtcacggtgctggttctgttgtgggccatcacgctctacacgctgtggcagatggtggagatgcacgagtgcgtcccggggaagcggttcgaccggtaccacgagctcgggcagcacgcgttcggcgagcgcctgggcctctggatcgtcgtgccgcagcagctggtggtggaggtgggcgtcaacatcgtctacatggtcaccggcggcacgtcgctgaagaagttccacgacacggtctgcggcgacagctgcacggacatcaagctcacctatttcatcatgatcttcgcctcctgccacttcgtcctctcccagctccccagcttccactccatctccggcgtctccctcgccgccgccgtcatgtcgctttgctactcgacgatcgcgtgggtcgcctcggcgcacaaggggaggtcgccggacgtgcactacggcctgcgcgcgacgacggcgccggggaaggtgttcggcttcttcggcgcgctgggggacgtggcgttcgcgtacgcggggcacaacgtggtgctggagatccaggccaccatcccgtccacgccggagaggccgtccaagaagcccatgtggaagggcgccatcgtcgcctacgccatcgtcgccgcgtgctacttccctgcctcgctcgtcggctactgggccttcggcaaccaggtcaacgacaacgtcctcgtcagcctcagcaaacccaagtggctcatcgccctcgccaacatgatggtcgttgttcatgtcattggaagctaccagttgttggctccggttcggagacaaacactagggatgtattttgtggtggtgctttctgtgggagcatggacgttttacagtgcagggtccgcgacctcgctgcaggaacatctcctctctacgtcacatcgaacggtctgcgcgcagggctcatatgttctgcaatga

SEQ ID NO: 8271 - DNA, 1419 bp, Zea mays
  Peptide Sequence Number=SeqID_51646
atggcggcagtccagccgtccgtggagatgacgacgcagcaagggccgccagccgccagctattctccggccagggatggcggcggcggcaggagcgccgaggatgaggagaaggagaaggcggcggcgatcgacaactggcttcccatcagcgcgacgcggaatgccaagtggtggtactccgccttccacaacgtcacggccatggtcggcgccggcgtgctcggcctcccctacgccatgtcccagctcggctggggtgccggcatcacgatcatgctcctgtcgtgggtgatcacgctgtacacgctgtggcagatggtggagatgcacgagatggtgccggggaagcggttcgaccggtaccacgagctggggcagcacgcgttcggggaccggctgggcctgtggatcgtggtgccgcagcagctggtggtggaggtgggggtgaacatcgtgtacatggtgaccggcggcacgtcgctgcagaagttccacgacgtgctggtgtgcggcgacgcggcgtgcgagggcgggcgcaagatcaggctcacctacttcatcatgatcttcgcgtcctgccacttcgtgctggcgcagctgcccaacttcgactccatctccggcgtgtccctggccgccgccgtcatgtcgctcagctactcgaccatcgcgtggggcgcgtccgtcagcaaagggcgggtgcccgacgtggactacggactcagggccaccacgccgccgggcaaggtgttcgggttcctgggcgcgctcgggaccgtggcgttcgcctacgcgggccacaacgtggtgctggagatccaggccaccatcccgtccactcccgagaagccgtccaagaagcccatgtggaagggcgtcgtcgtcgcctacctcgtcgtcgcgctctgctacttccccgtctcgttcgtcggctactgggctttcggcgatagcgtcgacggcgacatcctcgtcacccttaacagacccaggtggctcatcgccctcgccaacatgatggtcgtcatccatgtcattggcagctaccagatctatgcgatgcccgtgttcgacatgatagagacggtgctggtgaagaagctgcgcttccctccaggcctcacgctccgtctcattgcccgtactgtctacgttgcgttcacaatgttcatagccatcacgtttcccttcttcgacgggctgctcagcttcttcggcggattcgcgttcgcgcccacaacctatttccttccatgcatcatgtggctcgcaatctacaagcccaaacggttcagcctctcatggttcaccaactggatctgcatcatccttggagtgcttctgatggtgctggcgccgattggagggctccggcagatcattatcagcgccaagacatacaagttctaccagtaa

SEQ ID NO: 8272 - DNA, 1632 bp, Zea mays
  Peptide Sequence Number=SeqID_51647
atgatgcgtcagagctgttccaaggattggatgatttccattcccccgctgccaattcgactaggctcgccgtctccgctccgccaacctggcaccaagcagccaatggaacttgaggaggtatgcacagatgcatggacgatgtattcgtttaaaaactctccaaacaaccaaccaaaatcatgcatctcacttataaagataatcagcaaaaggagttcagcaaagggagcaaacctggcccgaatagttgtcattttagtttctgggctggagaaggacgagaggagtggtgaaggtgcggaggatcaggcgatcgacgactggctcccaatcacctcatccaggaatgccaagtggtggtactccgcgttccacaacgtcaccgccatggtcggcgccggcgtgctcagccttccttacgccatgtccaagctcggctggggacctggcatcgcggtgctgatgctgtcgtgggtcgtcaccctgtacaccatgtggcagatggtggagatgcacgagatggtccccgggaagcggttcgaccggtaccacgagctcgggcagcacgcgttcggcgagcggctgggcctctggatcgtcgtgccgcagcagctcatcgtcgaggtgggcggggacatcgtgttcatggtcaccggaggcaggtcgctgaagaagctccacgacgtggtcgtctgcgacgctgccggcaggtgcagcgagggcggcggcgacatcaggctcacctacttcatcatgatcttcgcgtcctgccacctgctgctctcccagctccccaacttcaactccatctccggcgtctccggtctccatcgccgccgctgtcatgtcactcaggtacgtacttactcgaccatagcttggggagcgtcggtgcacaagggcaagctgcccgacgtggactacgaggttctggcggcggcggcgacggcgtcggagaaggcgttgagctacatggcggcgctgggggacgtggcgttcgcgtacgcggggcacaacgtggttctggagatccaggccaccatcccgtccacgccggagaccccgtccaagaagcccatgtggaggggcgtcgtggtcgcctacgccatggtcgccgcctgctacttccccgtctcgctactcgggtactgggccttcggcaaccaggtcgacgacaacgtcctcgtcacgctcagcaagccccggtggctcatcgccctcgccaacgccatggtcgtcgtccatgtcattggcagctaccagattttcgcgatgccggtgttcgacatgatggagacggtcctggtgaagaaactgcatttcccgcccggccttgccctccgtctcattgcccggagcacctatgtcgcgttcacgacgttcatagccattaccatccccttcttcggcgggctgcttggtttcttcggcgggttcgcctttgcgccgacaacctatttccttccctgcgtcatgtggcttgcaatctgcaagcccaaaaggttcagtctctcatggttcgccaactgggcctgcattgttcttggagtggtcctgatggtcctggcgccaatcggagcactccggcagatcatcctgtctgccaagacgtaccgattctactcgtaa

SEQ ID NO: 8273 - DNA, 1437 bp, Zea mays
  Peptide Sequence Number=SeqID_51648
atgcaggccgccgccgcctccgtcaagtcctccaccaccgcggccgcggccgcggccacctgcaaggcgggcttcaagcccctgcacctccctcccctccccgccgccggctccaggccgctgtccctctccgtctccgcgcgtccgctgtaccgccaagaccatgtcctcgcgacaaccgtggcgatggcggcggcgggccgcagcgaccgcgccgcgtcccccgcgcctccgtccgccacagcggacggcgcccggccggtggtggaggtcgccgcgccggcggagaccgcgcgccgcgccaagatcggggtgtacttcgccacgtggtgggcgctgaacgtgatcttcaacatctacaacaagaaggtgctgaacgcgttcccgtacccgtggctcacgtcgacgctgtccctcgccgccggctccgccatcatgctcgcgtcctgggccaccaggatcgccgaggcgccccagacggacctcgacttctggaaggcgctcactccctcgtctcgtggtcgtggccggccggccgagcaggttgcgatcgcgcacacgatcgggcacgtcgcggcgacggtgagcatggccaaggtggccgtgtcgttcacgcacatcatcaagagcggggagccggcattcagcgtgctcgtctccaggttcttcctcggcgagcacttcccggcgccggtctacttctccctcctcccgatcatcggtgggtgcgcgctcgccgccgtcaccgagctcaacttcaacatggttgggttcatgggggcaatgatctcgaacctggcgttcgtcgtccggaccatcttctccaagaaggggatgaagggcaagtccgtgagcgggatgaactactacgcctgcctctccatcatgtcgctggtgatcctcctccccttcgccgtcgccatggagggacccaagctctgggcggcgggctggcagcaagcagtcgccgagatcggccccaacttcgtctggtgggtggctgcgcagagcgtgttctaccacctgtacaaccaggtgtcgtacatgtcgctggacgagatctcgccgctcacgttctccatcggcaacaccatgaagaggatctccgtcatcgtcgcctccatcatcatcttccagacgcccgtccagcccatcaacgcgctcggagccgccatcgccatcctcggaaccttcatctactcccaggcacaggggagcatggctgtccctgacgggaagcgccgtgcaatttgcacactgagatcttcgcgatggattcagcgttggagcgtagctgatctttctttgtgcgcgcttgctgactgctcctttggctcggcacacttttgttgttcagcatgggcttttggcagagctgatatgccatcctcgcaggcgggtgcaacctttggtgctctatgggccgttgcattttag

SEQ ID NO: 8274 - DNA, 576 bp, Zea mays
  Peptide Sequence Number=SeqID_51649
atgcagcccagctgcagtctcctgccagtggtcatctacaaggatgaccaccagcctcgtggtgaagagaacatttggaggagaaggatgttcaccagccttgcggaggaggcaaacttcggctacgcggggtcggccggctgcatgcgccatcagctgccgcgtgtctggctccttggcttggatggctttggcgccgcctctagcgccgcctcccgccgccaaatggggcgcgactgtccgtccaccgcgcgggcaacggtcgcgtcgtgcgcaggtctaccgcatcagtggcgttctccgcgcaaccggccacactgctctgacgctggcacgtcgcctagggggttgtacaagacgtcgtacgccacggaggtggcggccgcgttcttggatgaggtggccgctatcgtcggtgctgaggtggttgccgccgctggtgaggctgcccgttgcagacgtggttgcctccactggcttgatgtgtcgaggttggataccagcgtatctgagagggttgtcaacaactctcgggaggcagcctcggccaggatctggatctgtacacagctttag

SEQ ID NO: 8275 - DNA, 507 bp, Zea mays
  Peptide Sequence Number=SeqID_51650
atggcggccgcctcactgcgtgcagaaaggtcctcgcccccgtcctcctacgggggtgaggacaagaccatccaagaacgcggccgccacctccgtggcatgaccactggcaggagactgcagctgggctgcatgatgaaaatccttgaagccgagcgatggcagaagagcgccaacccccatgaggtcgcgctcctccaacgacagcaagaagacaaaatcggcagcaccaccgcgcaggaaacgaagagcgcgagctccccggcgcatttgagaacaagtctccaacatcgtacaagctggcccgaagtgcgaagaaggcgaatcgttgcacagggagcgtggaaccgccctgcggttacacgcccttccaccttcgccgcaaccagcggtcaagaaggcgaaccgcctcacaaggagcgtgcaaccgtcctgcggttattcgaccttccatcttcaccacaaccagcggtgaaggaggcgaaccgccgcacaaggagcatgtaa

SEQ ID NO: 8276 - DNA, 864 bp, Zea mays
  Peptide Sequence Number=SeqID_51651
atgactcttgaattaggaacacagcaatcatgcgcggcaatcgcctgcaatacccttctcttcctgcgtctgcagtcacactacctgtatctgtatgtacggaaactaaccagtcgccagccttctcatctggctgaaacagaccatgccttgcgccgccaccgagctcgtccatggcgagggaggcacggtcaaggtaggcacaacgggcaccatcggctcgctcatgacaagggagctggactccaccaaggtggcggcgccgcaggcagccgcggccgcggccgcgggcgccccaccgctgaggcgccaaggcggcccggtctcggtgccgtgtggcgccaccactccccggaagctcatgctgaggaagagctcgtccgacgtctccagcagcagcagcagcaacagaaccggccgcgtgggcaccgaagaggcgtgcaagccgaggagggcctcgcggacgaacaccttcgactcaccgatgctgcggcccgacggcggcgcgctggtggaccgggccccgagcgccggcagggcgaagaagaaggggacgagcgtgggcgtgcacggcggcggggtccaggtggtggacgtcaagtgcggcaacccgatgagcatgagcagccggctcaggaagctcggcttctccaagctgtcgcagacgtttgcgtagcttcaattctgtgcagtggagcatggcgaggggccgagggcaaaggaccagcgccagcatcggaattgaagggtctgcttgctgctgccctttccttgagggcgtcttcggctttggaggacatctgccatgtgctggatttagtgcagcaatcattcactaacagtgtgcaagagcaccttgattag

SEQ ID NO: 8277 - DNA, 756 bp, Zea mays
  Peptide Sequence Number=SeqID_51652
atggcagccggaagaggtttctccgccgacgagatagccggtgccgcccacggactgacctccaactctacggccttctgctcgtcctcgccccccgagtggggatgtgggcgagggctttatggcagcagcatccgccctgaggtcatcgctgctgttgtttggccgctcggagcagaagtcgtcgtcaccgctgctggagcgggcgacgcgccacccgtcggccttctgttgctccgcaggccccccaatcgtgtggggttgttcgtacctgcggaggagtctctcagctcagtcagccttaccgcccgaggcttctcttgcttagttaaaggaaaccctcagccgctcttcgatgagccggagccggaggcagcggtatcagcgtggacagaggcagagttggctcgaaaagaagacttcgtcggccggagcctgaccgggccgtccgctggcgggaccgacaccggagtcgagttgccgaggccatgggccgggctgatgtcctcgggggacagccggctgaggcttcgaggtgaccggccgagccgtctgctcgagccggactcctggaagagaccctggcggcgatggcccgggcgtggtgctgatgtcgtccttcgaagtggagatcctccgaccgcgtcgccgtccgaggctaggtcggacctcgccaaaggtgtagttgacgccgagggtgctgctgctcccttcaaccgtcaaggtccgagcctgcaggatcgggttatcttgtag

SEQ ID NO: 8278 - DNA, 414 bp, Zea mays
  Peptide Sequence Number=SeqID_51653
atgagcaagaacaacaaatgcaagcgcgagccgactcctccatcagaggattttggcgactcggaatactcagaggagttctcctttgagtccgaggggtctccagctcccgtccctcccccagcgtcgtccaatgactcggacgactctcaagggattgccacggaggtctggacttacatccgggccgtcgagcgctctgggctcacgggctcggatgagtcggagtactcctcggacgaggaggactcgtccaaggaggacggtggcggcgatggcgaaggcgacgacgacgatgacgatgacgatgacggaggcgatggcggcgacgacggcggcaggggcggcaacggcggcggcaggggcgacaacagcggcggcagcaacaagggcagcaacaaggccagtggctaa

SEQ ID NO: 8279 - DNA, 518 bp, Zea mays
  Peptide Sequence Number=SeqID_51654
cccgagtccgagccctggggtcgggcggaagcggaagttcgccgtcttccgggtctttagccccgagtccgaggccctggggtcggggcggagcggagttcgccgtcttccggtcggagtggcgcaggcggcgctgtccttctgtcagactggccagtggagcggtggagtgacggcggtcacctcggctctgccgggggcgcgtgtcaggatagaggtgtcaggccacctttgcgttaaatgcccctgcaatttggtcagtcggtgtggtgatttagtcaaggttgcttctgagcgaagccaaggccttgggcgagccggtgatgtgtccgccataaaaagggggcctcgggcgagacggaagtctctcgaggtcggctgccttcggccgaggctaggctcgggtgaagcgcgatcgagtcactcgtgtggactgatccctgacttaatcgtgcccatcaggcctttgcagctttatgctgatgggggttaccagctgagaattaggcgtcttgagg

SEQ ID NO: 8280 - DNA, 774 bp, Zea mays
  Peptide Sequence Number=SeqID_51655
atgcccctgcgtcaaagtgcattcccaagtggtgcatcgcggtgcggggaccgaggggaaactcatggggggttggatgtcgatgttaagaacgagggaccaagcaaagatgcatgcacatatatcataaagaggggagtgaggcagacgaggtataacctgaaaaggaagtacttcgacgagtcactgacaaaagaacagttgttggccatgcaacctccacctaaaatgaagaaagaggattggactgggctggtagagtattggtgtgacccaaagaatcaggaaaaatctattaagaacaaagcaaaccgaggcaacgtgcagcttcaccaaaggactagagctaggtcctatatagcccatcgttacagcctggagcaaatggttgcagagaaggaaagagagctagaagaaggagaagcacaaaagtcaccctccaagattgttgctgatagtctcagccagatcagccgctcatccaccttccttccaaacattggtgtccctacaacgtccaagactggtcggtccacatcgctagctgcacaagcacgcatgcaagctcagtttgaggaaaaactccaagctgaaagagaggaagctgctaggaagcaggaagagttgcaagcacaactacaagctcaacaggccgcacttgaagaaaaccaaagtttgttgcgccagacccaagaggaagtgaaggggatgcataccaagtttgatgagaccaatgcactgctacgagctgtcctgaaacttcagaaagattga

SEQ ID NO: 8281 - DNA, 699 bp, Zea mays
  Peptide Sequence Number=SeqID_51656
atgcaggaatcccttgcaggaccgccatcacagcaaaatcctcccgagggcctccccaggaatcccttgcaggaccgccatcacagcaaaatcctcccgagggccttcccaggaatcccttgcaggaccgccatcacagcaaaatcctcccgagggcctccctacactgaccactcccctactgcccttgcccctttcggggttcatgtcaaaacagagacactaaatgatgaagaatattattacaaaattttagaaactggaatgccatcccttgcgccggagttctatctcgtgctggacaggatcaagagtgtgacggaacctcccaagtcattaggcccacctacagttgtccttgtccaaccgacctcagacaaccctgcaggtgttcctgaatcacttgacaagttcggtatctgctttccttaccttcccaagagcgttttacctgtcacgcagacattacaaatcattgagatacagaaatgtggaagcggttacataaacttacctttattcaaaaggaataaaaccctgagtatggaattactcagcaagacttacccgactaaagaaaagactctcaagggtatgctggttataagggagtcaagggattcaaaggaaagtaatcaaattcaaggaagatttcccaagtttcatagaaaaagaaaagggaaaaagcttgaacagtga

SEQ ID NO: 8282 - DNA, 192 bp, Zea mays
  Peptide Sequence Number=SeqID_51657
atggacttgccacttaatttaactaagcttgaccctaatttgctaaactgcaatctagctgaaggagagtacgtgctcatccccgagcaaggagttgtccacgaggaagaccaggagcaagctcccgagactgccactgaggatctccccgcagccccagctattgaaggcaagccccggttttatgcataa

SEQ ID NO: 8283 - DNA, 456 bp, Zea mays
  Peptide Sequence Number=SeqID_51658
atggcttactggattgctcggtccacgcgcggcggcgggcgaccgaagtccggcgagggcgatctcgggcctccggtgaagttctgccaggtccgaggacttggaaagcttcacgggctaatggtgaagctaaccgagtggttggcgcggcttggacgcgactggagggagctggccacggtggccgaggctcggaaagcttggcgggcggtggcacggcgtgctcggggcgaattccggctagggacagagagttgtagcgtcaccaaggtgccagtgtcagaatgcctggtcccgaggtcaaacagtgccaaaaccgtgccaaatgaatttggtttgagttcaaatttttccagagcgtgttcaaggaaatttggcactactttgatatttggacttcttggttttgagtttttaaaaacagagaacgcaattgatctttggaaagggttctga

SEQ ID NO: 8284 - DNA, 837 bp, Zea mays
  Peptide Sequence Number=SeqID_51659
atgaattcacccacccccgccagcggaggagacactcgttttagctctgacttcctctctcacgatggctttccttccatcttgtgggaagtgcttgacttcgccggttaccctacgccccctttgtacacggtgcagttgtatgaggagcatcgggtgcctcgttgccgcgtctggctgactttggaggctcatccccttcagccgggttggcgttctcttgactccgagacgattggattcagggcggacgacaccactgaagcagcagccatgaagactctgacgactttctgtggctaccatcccctggagatggtgatgcaccccttgggacttttccctgctgagaagaaggatgatcccatgtggtgtaaccgtgtgagccacgtgaaggacgtgtgggcaatgtatcctgacttggttgggagggtcactgttcagtgcatgagtgcgttgtaccgccttcaggccctgcagagcgacgctatggcacatcttgctaacatcgctcaaaccaccaagctcactcttgacagccgagaagattttgtggtggaaaggctgagccagcgcattaccaccctggagcagcaggtggagatccgagacaacactattgatgtcttggagaaccagctccacgatgtgcagagggaactcgaagaagctaatgaccacttggacatgcaccacttggagatggaagccaatgaagccagaagcgagggagaagaggcccccgaggagttaggacccgcccctggtgccaatgggactacctccgtgatgcccccttcacccgcatccagtgtcgcttccaccgctcagggttga

SEQ ID NO: 8285 - DNA, 300 bp, Zea mays
  Peptide Sequence Number=SeqID_51660
atggcttactggattgctcggtccacgcatggcggcgggcgaccgaagtccggcgagggcgatctcgggcctccagtgaagttctaccgggtctggggacttggaaagcttcacgggataatggtgaagctaaccgagtggttggcgcggcttggacgcgactggagggagctggccacggtggtcgaggctcgaaaaccttggcaggcggtggcacggcgtgctcggggtgaattccgagcgtgttcaaggaaatttggcactactttgatatttggacttcttggttttgagttttga

SEQ ID NO: 8286 - DNA, 636 bp, Zea mays
  Peptide Sequence Number=SeqID_51661
atggaaatgggaagacatctgtcggcgtttcgagaccggggggtccctaagccgacgagtgagtgtgccgcgtgccccagcccagatgggtcgagcgcgtgggcgagcgcgaaggggggaagcgaggtggccggagacgggcgtgagagaggtggaaatcccgtggccttcgtgcgtaaggagaggatccaggtgtacaatgggggtgtagcagagtgctacgtgtctagcgaggggagagctagcgccctaagtacatgccaatgtggcagccggagagatcttggcaccctgctgggcttgcggggcgccatcattgcctatctggcggagctagccagatgggacaccggtcttgttctctgcggcccgagtcagctcggtgtaggaggtcgtccggcagaggccagggcggagtccgagccctggggtcgggcgaagcggagttcgtcgtcttctggggctgagcccgagtccgagcgctgggtcgggcggagcggagttcgccgtcttccggggcttagcccgagtccgagccctgggtcgggcggagcggagttcgccgtcttccggggcttagcccgagtccgagccctgggtcgggcggagcggagttcgccgtcttccggggcttag

SEQ ID NO: 8287 - DNA, 450 bp, Zea mays
  Peptide Sequence Number=SeqID_51662
atggcacggtcggtccgagcccaaggtcgggcgaggcggagactcctcctgaggccgaggtcgggtgaggacgcgattccttctaaggttgaggttgaggccgagccctggggtcgggtgaggcagagaccatcttccgaggccgaggttgaggccgagccctggggtcgggcgaggcggagaccatcttccgaggccgagccctggggtcgggcgaggcggagaccaccttctgaggccgaggcgggggccgagccctggggtcgggcgagacggagcttcctgttgcgcctgaggctgaacttagctgtcgttagcctcaccctggtgggtggcacagcaatcggagcggggcaggcggcgctgttttcctgtcgggtcggtcagtggaggggcgaagtgattgcggtcacttcggccctgccgactgaggagcgtgtgtcaggataa

SEQ ID NO: 8288 - DNA, 306 bp, Zea mays
  Peptide Sequence Number=SeqID_51663
atgggtgaaacgctcttgggaaagctggccccaagacatgatgatagtagtattggaagtaatgatccgataggggatcttgaagcacaagttaatcggctccaagcggaactctgccgcaggactgatatatgggtcgcagatggcgacagaattaatgaattgagaagtggcgtccgccacctgcgagatcagctcgcggaccgaggatttagcgctcgactgggtagttcaatctcgttcgcttgcctgggccaaggaggcaagagctcaagctcgagtggcagagctcaactcggccattga

SEQ ID NO: 8289 - DNA, 357 bp, Zea mays
  Peptide Sequence Number=SeqID_51664
atggtcaacttggtcgtcgtgctcatcacagagttggaccacgcccttgacgagttgggcaaggttcgggcggaggttgcagaattgcgtgctgagtgcgcagcacaccactatctggatggtggttctcccgcccctatcgggattcagcacccttaccgttcaccgccccgtggtcgcttcgactatgtgaagatgatgtctgagaacaggcgcagaggtgcgaggcgtgctcagcctgaacagcaggcaccccaagaggaggcagctccgcagcagcagttgccaccgccaccaccgatgactatcgagcagatgttcttgatgcaaactcaagcagtccaggccattggttag

SEQ ID NO: 8290 - DNA, 306 bp, Zea mays
  Peptide Sequence Number=SeqID_51665
atgatgctggtagactacacaacgggtctcctccagcagccaggatgccctaaggtggtgcaaggggcatctctggctgaggtgcaggggaaagcgacctctcagactccacctcctgctgaggcaagggggaagagtcctgctactcctgctcctgctcctggcgtcggcgctcctgctcctcgtgcaggcgacgatgtagtctctctaggtgactggactgacctagcaccgtgcgacgcaggggacgctccgccaggcgagaaggcaaaaaggggatcacagacttacgtgcagtgcacctaa

SEQ ID NO: 8291 - DNA, 342 bp, Zea mays
  Peptide Sequence Number=SeqID_51666
atggccagaatggctcaccggagttgctctggcccgcccgagactctctcaccgtcgttctcccctctctgcccgtggattcatggcctcttccccgccattgagtttgccgtggcgtcctcttcccctctacccaactccggtgaccccggagccaccctagctcgcgcctgcctcaactctagcgacttcaccgccgcggagagtagcggcgccacttcgcgcacgactgttttccccggtctgatttccccgtccgatcttgatcgaacgactcggaccccctcggaccccctcgaaccccctcggatcccctcggacctcccccccgtccgatcttga

SEQ ID NO: 8292 - DNA, 333 bp, Zea mays
  Peptide Sequence Number=SeqID_51667
atgcggctggacgcctcgctacctacgggcgatgacccatctgatgagaccgcctcgcgccgcccctccacccttctcaacgccgtcgcgctccgcaacatcggtactagcaagtcggctgtgtggaacagcctcaccggccaccctgtgctgccacgagggaaaaccacgcgacgcggaccgctaggaacccaggcgcagaggagtctggcgtggtggtctgctggtaaggccggaatcactaaccagagccaactcgtcgccttgcacccgcgcgtatatcgtggccagcaacttctgctctacaatcgctggaaataccgccttcagtag

SEQ ID NO: 8293 - DNA, 66 bp, Zea mays
  Peptide Sequence Number=SeqID_51668
atggccgccggcgagtctgcctggctgtccggagaccagcccctcctcatccctgttgcgttataa

SEQ ID NO: 8294 - DNA, 1035 bp, Zea mays
  Peptide Sequence Number=SeqID_51669
atgcaggcggcatgcgaccgcgccaagtgggtgcaccccttcgactccaacttgcccagcatggaggcccaggcccacacgtcatgcaaccggcgcgccggttgctacgtgcgagcaactacaccgccactcgcgccactaccgcgcctcctcgactgcggaaccagtaccgcgactcgaggcaaccctacgtatgacccaacagtgccagccaggcacgtcggtcacgggtcagtcagctgcgggagaaggcgcgatggtcaatacggccaaaaatgggccggcagtaatggcggtggcaggcgggcggaagacaggcggcacctttggcaggagaagcgggcgacgcttcgccttcgccataatgaccgcgtcaaaaaagggatcgggaaaggggataccccgaaagggatccttccccgcgaaggaaacgggccccgagcccccctactgatcagaggttcgaaggctggcccctcggaggggttcaacagccgtctcagagcgctcgggctacgcgcccactactggtcagaggttcgaaggccggcccctcggaagggttcaacggtcgcctcaggccactcgggctccgcgcccactactgatcaggggttcgtaggctgggcctcgaaggactcgggctcagccccggaagacgacgaactccgcctcgcccgacccagggctcggactcgggctcagccccggaagacgacgaactccacctcgcccgacccagggctcggactcgggctcagccccggaagacgacgaactccgcctcgcccgacccatggctcggactcgggctcagccccggaagatgacgaactctgcctcgcccgaccccagggctcggactcagccctggcctcagccgacggtctccgcctcgcccgacccaagggctcggactcgacctcggcctcggaagacagactcgacctcgacctcggaggagcctccgcctcgcccaacccagggctcgaaccgaccgcgtcgcaggaggggccatcattaccctacccctag

SEQ ID NO: 8295 - DNA, 252 bp, Zea mays
  Peptide Sequence Number=SeqID_51670
atggctcttagctgccttggggctataaaagggacccctaggcgcatggaggagagacccaagcaacctaagagcattcttgatcatccacactcagtctttgcgcattcgtttgtcattctcagtgattcgagctccgttctaggcgagagactccaagttgtggagattcctcgcaaacgggaaaagatcaaagtaaagaagaacaccgtggtattcaagttgatcattggatcacttgagaggagttga

SEQ ID NO: 8296 - DNA, 87 bp, Zea mays
  Peptide Sequence Number=SeqID_51671
atggtgggatttgacggcgaggacttccgcgatccctccctggcggcggctgaaagaaaggggcacatgaagagatttcaaatttaa

SEQ ID NO: 8297 - DNA, 357 bp, Zea mays
  Peptide Sequence Number=SeqID_51672
atggcggggaaaaggccacgaatccgtggacagagggggaagaacggcggggaggaggcctcgggcagactggaggaactccggtgtgggattccggccacggggaggggcttgaggcgcgctaaggcctgggatagcttcagcagagggaggggtaccatagggactaacaccgtggcgctggaccgggctaaactggccgaccaccgcgcgggcgcggcggaccgccacggccgagcaccggcgatgccaaaattggccgagcacagagcgaagttggggaaattaagcacgggcaaaggtgtctcacctcggggtggagctcagggtggcttggcgcggtctccggctagatag

SEQ ID NO: 8298 - DNA, 963 bp, Zea mays
  Peptide Sequence Number=SeqID_51673
atggcccatatcaggtgcactgcacagcgtccactgcgttgcacggtgccaagtaagtccagttacctggagagaccgcatcgtcgcctgtacgaggagcaggaccaggaccaggagcaacaggactcttccccctcgcctcagcaagaggtggagtctaagaggccgccttcccttgcacctcagctaaagatgccccatgcaccaccacaggtcatcccagctgctggaggagaccctgacagagacaaagatagagacgacgatgatgccggtggcagttcgagccacggcacagagctcttggaggagccggagccggagggatggatcgctagacccatcactcgtgacgctgctagcgggtgtcacttccacgacgctctcggcaccctactgcgtcggtccttcgaccgacacacttggtccatcgagtaccattgtgtagtctaccatcatcgtcacgggctatacccggaccagtgggaggctacttgcttggtgcgccgtccggacgatgatctccggggtgcagaggccttctcagagcactattctattaccgagagggatattgccgaggcagccatgcaagatgcagcacgacgggcactttctcagtattgctcgttgttcagcggggtagctgatggcctcgacctgaagtactaccctcgtcgttcgaccgatagtgctgtaggtgtgattgtctcgccagttggtgagggaaatcctaggctgaacagcatggtcaacttggccgccgtgctcaacacagagttggaccacgcccttgacgagttgggcaaggttcgggcggaggttgcggaattgcgtgatgagtgcgccgcacgccactacctggatggtggttcccccgcccctgtcgagattcagcaccctacctttcaccgcctcgtggtcgcttcgactatggtaccccaaactgcaggacccgaatag

SEQ ID NO: 8299 - DNA, 393 bp, Zea mays
  Peptide Sequence Number=SeqID_51674
atgggtgctactggtatattatgtgattctacccatgatgcagtcacaaaagaatgcgttgctccagtatcaaataagacatttgcagaatggtactcgactgaaaacgaagacgggttgcctggttgctctgacgctggtattgatttcctccttgctggttgttcagatggtactactgctgttgctgaaaaaactgcctctagtactgctactgctagttctgacactgatgctagtgctggtgctggtgaacttgctttaatggttgagtttggttgcctgagtagcgaggacggctgctactcccaacccgaggtccaccaatcttgttgttggggaccttcggcgtccgaaggtcctcaaaaacagaatttaacagtatttctgtag

SEQ ID NO: 8300 - DNA, 306 bp, Zea mays
  Peptide Sequence Number=SeqID_51675
atgcagtacaatggatcaagcagtctcattagctgcgagaagcagacgattcaaatcgagtttttatccttgcaagtgatcgcacttgtacccaccataaccggaatgggagaccacgtctcaggccgcgtgaggagggcaatctgctgccaggttcaatcagggcttgccttccaaagctggggcaggcagatcctctggtgtaggctctggtgctggatccggggctacctcctgagcaactccttgctccggcacgaggatgtattctccgtctacgaggttacaatctatcgaatgcaatga

SEQ ID NO: 8301 - DNA, 870 bp, Zea mays
  Peptide Sequence Number=SeqID_51676
atgacttctcatggatcctcagacgaagggaatgcacagtcccacacagacggacttgcacgagagggttttccccgtatcttgtgggaggtacttcagggagctggttacacgacgcctccccagtacgcggtgcagcagtttgagaagcaccgagtgccccgttgtagggggaggatgaccctagagcctcatcccttacagtcaggctggcgttcgttaaattccgtgtcttttggatacagggctgaggatactatcgaggcgattgctcttcatggactgaccaccttctgtgatttccaccccttggagctgtccactcaccccgttggtctgttccccacggagaaggaggacgacccaatgtggaaggaccgagtggagcatgccaaggatatatgggctatctacccaggtcagactgctcacttgacggtgcggtgcatgaatgccctgtatcatctgcaagtgatgcgaggagaggaaatgtctcatctaatggcattgttggaggctaccaagatcaccttggataacagggagaaacttgtggtagacttgtccactgagatggtggaaaaagacctacaagtggaacaaatgtcaaatgagatccaagagcttgaggagctagtgggaaccagggagaacaccatcgaggttctcgaggatcagctcatcaacactcagcagcagcttgcggaggctaaccagcatctggatatgcaccaccaggagatccaggacatggaggccaacgaggatgtcgacatcgagggaggagaggagcctgcctccagcttggacactactggctcagggagaccaccttcccccgagtcgagcgttgcctcgtttgctcactag

SEQ ID NO: 8302 - DNA, 219 bp, Zea mays
  Peptide Sequence Number=SeqID_51677
atgccgagaaatatgataaatcgcagattgcccttctcacacggcctaagacgtggtctcccattccggttatggtgggtacaagtgcggtcactgcacgacggcagtcggggttctctggaggacatggttgctggagtgacttggccgtccatcttgccaccgggttggacagtcgagtgggaccctacctcggctgaggatgagcatgaggagtga

SEQ ID NO: 8303 - DNA, 525 bp, Zea mays
  Peptide Sequence Number=SeqID_51678
atgctgcttgcctccagcgatctcctcgtcgctcaactttgccaggactcacccaggcctgtgttccctccgcagttgctcgttcttctcgccaggtcttcttcaccctcagccatggcactggccgtgtgccccagcgccggtcgctcctccctgcttgccctccagctcgagctggccgcgcgccctccagctcggtgctcccctgctcggttttcactgcgtcgcgcgcgttccgtcatcccctgctgtgaccccgccgtggagctcccctgcagcgcgtccctgttcccttgttgctgctcatgcgatgggtcggcttgtgtcgcacgtttggtgctcgacgaaaagctcgaacatgagaccgtcatcgatcctgccgtcgtccatctcgccaacatcgacttcgtctcaaatatcatctcgactttgcgacaacagtccgatgtttctgatgtcgccctgagcttattccgtgtgccacgacgtcttgtttacctccacgccaaggcatcaccgaggtaa

SEQ ID NO: 8304 - DNA, 357 bp, Zea mays
  Peptide Sequence Number=SeqID_51679
atgaccgggaaaaagaccacgacttcctgtgacggcggcactccaaagaaagccaaggtggtggtggaggatgaggaagaggcggggttggaggatgaggaagaggcgactgtgacactatccgtggagaaggacgcgctagagctccaacatgatgttctgctctgtgtaaaatcagtgcaagaacgggcattctggatgtgcaaagtgctgcatccgcacggacggaaaaactacatgcttcggtttgtcggtgcttttattctcattgttagaaatgatctgttcagcatagaagacttgtgcagcacgattagcaaggatccatgggtcatctttgtaacctaccttacttag

SEQ ID NO: 8305 - DNA, 815 bp, Zea mays
  Peptide Sequence Number=SeqID_51680
atgccgaaggccggcagcggggtggcggacgaggaggacttccgcgccgaggtggacgagcgcctcatcaacgaggagtacaagatctggaagaagaacacacccttcctctacgacctcgtcatcacacacgcgctcgaatggccttccctcaccgtgcagtggcttcccgaacgcaccgagccgccggggaaggaccactgggtccagaagatgatcctcggcacgcacacctccgataacgagcccaactacctcatgctcgcgcaggtccagctgccccacgaagacaccgaggccgacgtgcgccactacgacgatgagcactccgacaacgggttgttcggcgcggccaccggcgaggtgcaaattgttcagcagataaatcatgatggagaggtcaatcgagctcgctatatgccccaaaattcatttataattgctactaagacagttagtgcagaagtatatgtcttcgactacagcaagcacccatctaagcctccactagatggtgcatgcaaccctgatttacggctgaagggacataattctgaaggatatggcttatcatggagtatttttaatgagggacatttgttaagtgggtctgaagatgctcaaatttgcttgtgggacattaaagcaaatagtagaaacaaaagtcttgatgccctgcagatttttaaggtgaactgcctggctttcaacccgttcaatgaatgggttgttgcaactggttctactgacaagactgtcaaattatttgatcttaggaagattcatacttctctgcacacctttgactgtcacaa

SEQ ID NO: 8306 - DNA, 255 bp, Zea mays
  Peptide Sequence Number=SeqID_51681
atggagcatgggatccacttgtttcaccactgcattgcaaccatcagtattgtagacagccttgcggagctgctcaaggacgaggagcggcggaggaccagcccgttccctgaagtcgtggatcaagcaggttgctacaccgcggctgtcggcggcggccaccgcatcgtcgctcaccacgacggcgcggacagagcgtcgtggaggccgtcgccggcgtcgtgggattctcgcggggtagtcgagtcaatctag

SEQ ID NO: 8307 - DNA, 594 bp, Zea mays
  Peptide Sequence Number=SeqID_51682
atgggcaacccggccgacgcggccatcacccacgtgctacacaacaagcaggagttaacgctcgccaacggcgtccacgacatcctcgtgctctccatcggcgccggcgcctcctcggccgcagtgtgcgacgggtccagtacgcccgtgcccgcgcgttccccgtcgccgcgggagctggcgcgcgtgaccgccgagggtgtcgcggatatggtggacgagtcggtggccacggcgttcgggaacgcgtgcggacgcagctacgtacgcgtccaggccggcaaggcgccggcgccgctccacgcggccaccgcgtccacggcagcggcggcgatgctcgcgcagcggaacgtggagtcggtgctgttccgggggcgaaggctgtcggagcggactaacgccgagaaggtggacgcgctggccgtggagcttgttaaggagcaggagcgccggcggcgcagcccgcttccgaacgtggccatcaagcaggtgcccacgccgcggctgtcgtcggcgaccgcgacgtcaggcaccgcgacggcaaggaccgcgtcggcgatgccgtcgccggcgtcgtgcgattctcgccgatag

SEQ ID NO: 8308 - DNA, 132 bp, Zea mays
  Peptide Sequence Number=SeqID_51683
atggaggagccgctaccgaagcccgccccctcggcagccgcggaggaggtggcggagcggttcaggtcgctcgtcgaccccgatgatgttgcctccatcaggcagacgcagcacctcatttgctgtgcctag

SEQ ID NO: 8309 - DNA, 237 bp, Zea mays
  Peptide Sequence Number=SeqID_51684
atggcttcttcatctaatctgtggcaccaacgtttgaaacgcatgtacgaggatgaacaagtggtacacatgcttcatgcatctaacgttgcagacgaggaagaaaagctacatgtgcatagaggatcagttccagatgaatcaattgaacaacaaaaagcacaacatgaccagacctgccacaaattagaaccgctagcatctacataccctagaaccaatattcgcgcaacataa

SEQ ID NO: 8310 - DNA, 1302 bp, Zea mays
  Peptide Sequence Number=SeqID_51685
atgcaggtagtcgaattggttccttgcgcccgcaacaagtggggcaactggaatgagttttggttttacgttgctgagggtgccgtcgaaggccatgagggactccccgtgtctgagatgtgttctcatttttactcagcgtacccgccctttgaagtggcggaggaggatgcggacgaaggggccctacggtgcgccgccggcctgagcagtgggcgcgacttggttgaagaatttgtggcgtacaggaaagttgatgaggacgtgcgcggccccggggggaaggatgtcttcgcccgagctccgggagtcttcggctcggatgctgaggggtcgggcgaaggccaacttgctatggttgcgcctgccgcggcgaccacgacggctgccgcagtgccgaaggcgaagggcggggctcttagcgtcggaggcgaggtgtcggccctcgcggttgtcagggatgaggcgggcgctgcgtcccgccggctgaaggaggtgacggaggcgctaaatcaggtggctgacttcgccagccgcacagcgtcgggggccctcacggcagctgtggctgccgaagtcgagagacttcggacacaacatgctgacgccgtccgtgaaaaatcggccgccgacagcaagtgtcgcaagctggcggacaaggtggccacgctggagggagagaaggctgacctccggcgccagttggcggaagagaggagggagaccaacgaggcccttgtcaaggcgcaggctgtgcagacggaggctaacctggcacgggcggagggcaatcttgccagggagcgcgccgagcagctgcaggagcggctcaccgccctggagagccgcgtggagagggccgaggccatgtcacgcgcggaggcagagcggacgcgccagctactcatagatacataccgtgggctgggcgcggggaccggtgatttcgaagtgccggaccgagagcccggacttcgctgcctggagtgggtgcaggaggagttgcaggcactccccactgtcgtggaggggtttatggcgtatgcctccctggtcacttgcgagggggcgatgaacgcgctctcctgcgaagggtgctggcacttcgaggtctttgaccaagccgatgaagattttgagcgagatatctttaaggttgaggaccctgtagtgaaggaatccgccggagccatctacgaccggatgtggggtctgcacggtcgcgaggtggtcagggagcgcgccgagacggcgagggctcaggcggcgcgtggggagagggtggacgactttgggcgttga

SEQ ID NO: 8311 - DNA, 2028 bp, Zea mays
  Peptide Sequence Number=SeqID_51686
atggaggtcgttgagttggttccttgtgcccgcaataaatggggcaactggtgggatttttggttttatgttgccgagggcacagtcgaagaccatccggggcttcccgtggccgagatgtgttcacattattactctgcgtacccgcagtttgaagtagcgaaggaggatgcagacgaaggggccctgcggtgtggcccttggcgcgtggcttggcgctgggcgaaagtcttcgagttgaaccgtctgccgtatgacggttatcccgggcaggacgatgtcgaccgccgcgggaaaaaactggcggccgagactgaagacgaccccgcgtcggcggccgccccgtccgccaagaagaggaggctaggtactgcgatgggaggactgggggtctccgatagttttgctatggagctgatggggacctgcgcggcccccgggagaaggatgtcttcgcccgagctctgggagtctttggcgcggatgctgaaggttaccgggggttggtggcctaagaacgttcctatcccccgcgtggcctacgaagacttttttacatctcgcatggttcatgatatgagagtgtttccttatgggcggaatattgctgctgttgtgtcggcagtgatggacaaggatcgtcaggaggctgcgcagaagcgccgggcagtcgtcaggctgcccgaggctaggccgaagagggcgcgggggactgcgaattctgccgcccccggcggcaaccagtcaacgctggcggcgaagactgccgcccctgggtctagaaaggtgccggaggtcttgaaggcggccggagtcggtggaaccaagtccgcctcggccggagccatgaagacccgagaattgccttcgccggcgaggcgtgtcgccgacttcgccaccaatattagcgtggacgattatcttgttgggtcgggcgaagggcaacttgttgttgttccgcccgcggtggcgaccgcggtgtctgacgcggtgtctgggacgaagggtatcgctcacagcactggtggtgagattccggcgctcgctgccgtcaaggacgaggcgggcgctgtgtcccgccggctgaaagaggcgttgcagcgactaagtcaggcggctgacttcgctgatcgcgtggcgtcgggttccctgacggcagttgtgtctgccgaagtcgagagactttgggcgcagcatgctgaggccgtccgggaaatgtcggccgccgatagcaagtgccgcaaactggcggagaaggtggccgcgctggagggcgagaggactgagctccggcgccagctggcggaggagaggagggaagctaatcaggccctcgccaaggcgcagtctgcgcaggcggaggccaatgtggcgcgggtggagggtagcctcgccaggcaacgcgccgaagaatgggaggagtggttcaacgctctgcaggcccgcctggagagggccgaggcttctacgcgctcggaagctgagcggacgcgcaagcagcttatggactcataccacgagctgggcgcacggaccgctgacttcgaagtgcctgaccgagagtcaggccttcgctgcctcgagtggctgcaagaggagttgttggcgctcccgaccattgtggagggatttatgtcctatgcctccctggtcacctgcgaaggggcgatgaacgcgctgtcccgcgaagggtgccgtcactatgaggtcttcgaccgatctgatgaggatttcaagcgcgagatttacaaggttgaggaccctgtggcggcgcgtgacgagaaagtggaggacttcgaggctttgaacagcgcgcggcctgaggcggagtcgaacccgatggcggctgggcccgaaggcgcctcggcgccgccccccagaaaccatcgaaggctccttcgatgcccccgcagctactgcggccggtggtgggtcgtcgccaaccgctgtgccgaggggctgaggatcccccgaagacgggcgacggagctggcagcggaggatcccacggcggctgggtcttcgtag

SEQ ID NO: 8312 - DNA, 471 bp, Zea mays
  Peptide Sequence Number=SeqID_51687
atgaccttcgtctggagatcattatacctgaaaggagataatgtgtcgaaggatgaaggtcttaacaattgtgttgctttgttcttgatgtatagcattcgagaacaaggaccaataatggcctttgtatatgtacttgaacatgtatttaacagccttgatgctcccacatgcctcaacattgatgtgatagttgaagagacgaaggaggtatgggttgtaagggacaacccatctattgtccaattcacaccctcagaccttttctttatattcatcatcacgacgtctgtaaacaggtttagggtactatggcttgggatctcggctgagatcaaaaggtcgtactgcttaggacataaaatggccatgccgcaaaccccgcttctgaaactccacgacatagatgttggctcggaccttaccaagaatatccttgttggggacttgttctcaaatgctaagagttaa

SEQ ID NO: 8313 - DNA, 624 bp, Zea mays
  Peptide Sequence Number=SeqID_51688
atggcctccgatccatatagaaggcggaaaggggtgaacccagtcgccctgcactcagtcgtgtttagcgcccagaccgcttcaggtaacaaattggcccacctgccctttttctcgtcgaggagcatcttcttgacagctgtgaaaattttgccattggcgcgttccacaactccgttggactgcgggtggtatactgaggcgaaggcaaccttggtgccaatggagaagcagaaatccttgaagtcttggctgtcaaactgcttgtcgttgtcaactaaacatggttattggtgcccgccagtcttcggtcataataaggttgactatgcggtggccctcgctgtcattggttatttggagcccttcggggcttcggacggctggcgtgctgataacgtggtagaatacgtcggagggcagggactcgcctctggcggcatccttggccaatgcgtcggcttcttcattcttagcccgccaaatgttggaacttgctctccggtgcaagttgatccaacgggggagtgtagcaatgcaatcagggtttttgcacgagatggcaatagctctgttaatctagcctctcaagggcaccgcgcgggggtatttataggtatctga

SEQ ID NO: 8314 - DNA, 846 bp, Zea mays
  Peptide Sequence Number=SeqID_51689
atggctcctaagtcgcgtggatcacatggtgtacggcttgaactaaatcgcacccaagtcgaacatccatacgatcaatgccacacgctagtcatccaacggctgggagattgtctcccccaacacagcgagcacccgcgcggcagcgcgtgcacccagcggtggcgcagccacggcgccgagccattccggcattatagtgccctaacactagtgctgacacccgcggaatggaattggcacgtcggcaaacatcggagaagggttcataccgatagtcgcagagcgaatgttccggtccacgacgcggcggagatggtgctcgtcggtgacgaaattgatgacggtcgaagctccgagtgtgcacggcgcagcggccggatgccccacggtgcccaattgcccgtgattcccgagcttggcggcggcggaattgtcccttcccagctaatggcgcgcggctgcggcgactggctacggtgtctgggtctgcgcgagaggatggaagaggggaaatactctcactctgcaacttccgcgccaaattgccgacaggggatcgatgcacaattgccccgcgagcgcccctggtacagacacggttcgtcgccggcagcgtggccgagaatcacctgcggcggtgatggcgattacgggcggcacacactaaaacctcaatcacgaaactctcggttggtggcggcgcttgcgaaaataaggaagggaggagagggaggttgcggccggctcttatgggcgcgcagggatcggcatgagttcaacgccaccacgccgctgagtacgcaacggcgcccgtggagttcggcgaggaggttgacgagctaa

SEQ ID NO: 8315 - DNA, 714 bp, Zea mays
  Peptide Sequence Number=SeqID_51690
atggcctccaatgtcgttagtctccggagcgccgcgtggccgctcctctaccatttcctgttgtttgtggcagagactgctgttgtagcatgcttttctcttgctgttcatcacaatgtgaatgtgatattacgagcaccaataaatcattccagcacagacctcttacgaaaaccaaattggttaatccaaatagaggagggctcagtatggttaaagagatctaagaattttggggacacttcgggtcttgctacgaatttaaaatctgaattttacttaatggacgtgttcattagtgttccttatgttattcatctttataatcattcatatgcatctggcatatcagatagactcacctctgcgacagtatgccctgcctttgctatgtacttaaatctgctggaggatgatgcatgggcatgcacgacattagattctattgttgtttgtttggctcacgataatgatcacagaaaagtggaacaagcactgttgaaaaaagaggccattcagaatttagtgaagttcttccaagattgcccagaacagttttttggccatatattggatgctttcttgaagataataacgaaatcttctaggctaaatacagcaatggctaccaatggtttagcaacattgctcattgcaagacttgaccattcaaatttggtggtcgcaaaagtgtggagacttaaattcatataa

SEQ ID NO: 8316 - DNA, 288 bp, Zea mays
  Peptide Sequence Number=SeqID_51691
atggcgaaatccgcccaattcggacacgaccacccgaccacaagtcccaggaaacccaaggtcaccaccacggtgcgccagtcgacggtgacccgaagcctgcgtgcggcggcgcaagactgccctggtggcaacaatggtgaatcgtggtcagggtgccaaacagtggagattttgggccttacaaatcctaccccccttaacataaaatcttgtcctcgagatttcttagtggagctggtggtggtggtggaggtagtggaagattgggagagcataggtatctag

SEQ ID NO: 8317 - DNA, 774 bp, Zea mays
  Peptide Sequence Number=SeqID_51692
atggactgtggacaacgatccatggggatgcttgtctacgagacggaaattggaataaggattaaggtgtgttatggtgggtacaagtgcagtcactgcacgacggcagttggggtcaatgaggcattagctgatgacactatagaggccacagctctgcacgtgctgacaaccttctgtggatttcaccccttggagatgtcgacccaccgcattggcttgttccccgctgagaaggaggacgacccaatgtggaaggacagggttgagcacgccaaggatgtatgggccctctaccccggatacaccgctcacctaacggtgcgatgcatgagtgccatgtatcgtctgcagggcttacgaggtgcggcgatgtcccagcttatgggcctggtggagtccaccaagatcacccttgataacagggaggaccttgtagtggatctatccactgagctggtggaaaaggatcttcaagtggaacaaatggccaatcacatacaagagctcgaggatcaggtggaagccagggagaacactatcactattgaggttctggaagaccagctccagaacacccagcaacagcttgaggaagccaaccaacatttagatctgcaccatcaagagatcgaggacatggaggcagaaggggccaatgaggatgtagatatcgagggaggaaaggagccggagcctgcatctagcttggacactgctggctcaggaagaccaccttcccccgagtctagtgttgccttgtttgctcgttag

SEQ ID NO: 8318 - DNA, 468 bp, Zea mays
  Peptide Sequence Number=SeqID_51693
atgcaagatgcagcacgacatgcactttctcagtattgctcgttgttcagcggggtagctgacggccttgacctgaagtactaccctcaccgttcgatcggcagtgctggaggtgtgattgtctcgccagttggtgagggcaatcccaggctgagcagcatggtcaacctggccgccgtgctcaacacagagttggaccacgcccttgacgagttaggcaaggttctggcggaggttgcgatgtctgagaacaggtgcagaggagcgaggcgtgctcagccagagcagcaggcaccccaggacgaggcagctccgcagcagcatttgccaccgccacccccgatgacaattgagcagatgttcatgatgcaaactcagccgaggcagggtcccactcgacagtccaacccggtggcaagatggacggccaagtcactccagcaaccatttcctctagagaacctgtaa

SEQ ID NO: 8319 - DNA, 447 bp, Zea mays
  Peptide Sequence Number=SeqID_51694
atggccacaggaaggcgcgagcgaggcctcaccgagatttggagcgcagatacaccgcccgccgcggagcgagactccatggcgagaaatcccggagtcctaagaaccacgcccgccagcctgttgaacgctaaacgttccagtcccaatcatgctcgcctgctacacgctgtgaaagggacgaaggttcgacagagcatcttaccggactacgcagccaaggccccgacgatgcgcgcagctggctttgtgattccggcgatcttctctagacgcagtaggctgaagacgctggtccctgatgcacgaccgagccagcgccttccagcgatcaatagaatgaggaaagaggctgagagaacacgtcttcaagaccctaggaaccccaggaatccggtcgcagtttgttacaagagttggccgtcaaaatctgttttgcttgcctga

SEQ ID NO: 8320 - DNA, 1056 bp, Zea mays
  Peptide Sequence Number=SeqID_51695
atggcgccggccgccctcatcctctacccatcgctcgtctctatcctccattgccgacgattccccagctcggacggcgtccatctccctattcctccatggctacgtcgcgcgtgttcagttcttcctgcgcgtgctgccgcgagctcctctgatcccggcgcagtcgaatcccgtcctcctctactcggcgatgacatgttcggtcgtaggctcgctgctatcctccgcgacaacggcgagcgcgagttcatgttctatcacaatccagcgtcgtgtagatctgtcctgcagcagcaccctgctggttgtcgtgtagtacgccgcgcctgtttagacataagttgtcgtgtgcccagtctccgtgctgcagtactccctctcgcggggcatggttccgtgctgcgctcgcctaggtcgtcgccgttaaatcgttggagtcgctcaactcgccaatcgcatcttggccgattgttaattttatattcgccatggtacaacacagctgttagatccgatctccaaaccgtcatggcgttcatcgtcctctggtcccagcccgacccatccatgcactcgctcttcgtccatcgggcttcacgcgtgctcgcgtttgtcgtcgagctattgaacccatcctcccttgctcatgacttcatcatcgccagagccctcactcgattcgtgtcctcgtcagctcgctctagacacgatctcgtcgtcgttctgtgcgtcatcaagcaatcccaagaatcgggtgaagacgaagctagcagcatgatattcaccaagtgctcgacaacagctcgaacaagttgtcgagcgtcattctcgtctacgccaagccgtgaagacactctggtgctggccacgcgtcaccagctcaacaaaaggaatcccaaggataactggtcaagaatagaaattgtgtacatcgctcgccagacgtgtgtgatcaatgacgtcaaccggaaatcgacatcgtgcttccgactatcccatcgaattagtcaaggattaagtaacatcgatatatctgtttcaaccaaaatctag

SEQ ID NO: 8321 - DNA, 249 bp, Zea mays
  Peptide Sequence Number=SeqID_51696
atgaagctgtggaaggagacttccaggagttccaagattacgacgagttctaggtgtgggttagcggcaacccccagtcggctgcctgtgaaggccgcgttatctacgtttcttttccgcactttgatttattggcatgaaccacaacagctaactctaggtcatgagttggataatgttcctcatgccggcgcaattgccttgaagcataagctattattcggccctcttgcattagaacacagctga

SEQ ID NO: 8322 - DNA, 291 bp, Zea mays
  Peptide Sequence Number=SeqID_51697
atgacccagaagcgatggtgtgcggttgaagggaccaaaacaccaaggactggagctgagccaccattggcgcggttgaggaagcaaggaagagagggggattccacggcgaggcactggagcatgggggtaaggagctccctgctgccctgcctaaagggggcgccaaggggagagatggagttgtcccctgcgccagctccctgggaaaagaagcagcaaggagcaaccgggagggagccatggctgttgggagcgcctgctccaggggagcccgaccatggctgctag

SEQ ID NO: 8323 - DNA, 177 bp, Zea mays
  Peptide Sequence Number=SeqID_51698
atgaggctttcacaaaatacacttaatacgaagcaacccgctaaggtttctaaagacgatggtggaggccccctgggtgagtgtgatggctgcgcggcatcaaacttcaacatggcgggactgagcaggggcatcggcgaattccagcaggccatggtcagcaaggttgcggtgtag

SEQ ID NO: 8324 - DNA, 1530 bp, Zea mays
  Peptide Sequence Number=SeqID_51699
atgaaggtcgttgagttggttccttgcgcccgcaataaatggggcaactggtatgagttttggttctacgtcgcggagggcacagtcgaggaccatctggggctccccgtggccgagatgtgctcacattattactcagcatacccgcagtttgaagtggcggaggaggatgcagacgaaggggccctgcggtgcgcggccgacctgagtagcgggcgcgatttggttgaggagtttgtggcgtatggggtgtggcctttggtgcatggctgggcgctgggcgaagtatgccctcgccagatgccttcccgtggtgggatgctggtgcgaagtccctccttcgcactggatcagcatagccgcgatcctaccgcatttgtgcgtgaggcggaggatggggcggtgcggattgttggtcgggtcttcgagttgaaccatctgccgtatggcggttatcccgggcaagacgatgtggatcgtcgcgggaagaagccggcggcagagactggaaacgaccccgcgccggcggccaccccatcctctaagaagaggaagctaggtactgctacgggaggactgggggtttccgatggttttgctaaggaattgatgaggacgtgcgcggcccccgggggaaggatgtcttcgcccgagctccgggagtcttcggcgcggatgctgaaggttaccgggggttggtggcctaagaatgttcctatcccccgcgtggccggcaaagacttttttacatctcgcatggttcgtgactggagagtgtttccttatggacggaatattgctgctgttgtgtcggcagtgatggacaaggatcgtcagggagctgcgcagaagcgccaggcggtcgtcaggctgcctgaggctaggccgaagaggtcgcgggggactgcgaaggctgctgcccccggcggcagccagccgacgctggcggcaaagtctgccgcccctgggtccagcagggtgccggagaccgtgaaggcggccagcgccggcagaaccatgcctgccccggccggagctgcgaaggcccgagaattgcctctgccgggcaagcgcgttgccgacttcgccaccaagattagcgtggacgattatctcgttgggtcgggcgaagggcaacttgttgttgttccgcctgcggtggcgaccgcgacggctgctgtgatgcctagggcgaggggtagcgatctcagcgccggtggtgagattccggcgctcactgccgtcaaggacgaggcgggcgctgtgtcccgctggctgaaggaggcattgagtcaggtggctgacttcgctgaccgcgtggcgtcgggggcccttacggcggttgtgtctgccgaagtcgagagacttcgggcgcaacatgctgacgccgtccgagaaaagtcggccgccgacagcaagtgccacaagctggtggataaggtggccgcgctggagggcgagagggctgacctccggcgccaactggcggaggagagaagggaggctaatgaggctctcgccaaggcgtag

SEQ ID NO: 8325 - DNA, 696 bp, Zea mays
  Peptide Sequence Number=SeqID_51700
atggatatagtggtggaggaaggaaataccgatgttggcaatactgttgaaccatcgtatgaggttgtggctagaagtggttgttcagcacaattgtcaactaatgacactaatgaacatgaattggatatagagagcgaggatagtaaggtcagtgttggtaatgctgcaaaacaatcacacgatgttgtgggagtaggcattgactgtattttcaatcatgtaaaagtgtcaactgaagccgatcttgggacacaaccggatgtgatacacctgacatctttggatgttccaaatgaatcaagtcaaataagttctgagcagaacaaacaagatgctttggacacacttattagaatatcacaacataagaaaccaaagaaattgaatgtagctcgagttgtctctgaagattataagtgcaccccagaagatgttcagcttattgaatacattaaaacattaccggggaaacaagttgtggtggacatcgacagcgcatggttaaatagaaatgatatggaatgtctttttcatggtgacatccaagtgtctggcgaagccctcagtgcatatatacactgtattaggaatgaagagcatttacttcatagagaaggtggaaaggtgttcattccaatgaatatagaaaattttcactggtacctggcagttctgaatgcaaaaaaaaatgag

SEQ ID NO: 8326 - DNA, 840 bp, Zea mays
  Peptide Sequence Number=SeqID_51701
atgtatgcccgcccccttctcgtctccttcctctatgcaaactgcaaagctgatttaagctatttggctatctatcttctgtacaaggactacaactttgaccaaaagttttctttgtcgacgtctagcggctctgccactggtgtaaagatcaacgaagacttcattggtgatatacggacacaacataaaagcagtagaactactattgatgtcaccgttgatagtgattctaaagtgtcaaccacagtcactgttgatgaagcactaactggtttgaagacttcattcgccttcaaggttcccgatcacaagtctgggaagcttgatctgcaatatgcgcacaatcgtttttcattgaactcgaccattggtttgacatcagcacctttggttgaactggctgcaactgtcggcacaagtgaacttagcattggtgctgaggttgggtttgacagtacttcagctgctgttactaagtacaactcaggaattggatacaacaagtccgatttctcagcttccttactactggctgataaaggggagactttgaaggcatcttacgttcatttgttcaatccgaccaatggagctacagttgcagccgaggtaacacacaagctgaagaccagagagaactatttcacagttgggagctcccatgcccttgatccttcaacattgctaaagatgagattcagcaactccgggaaggtcggtcttctctgtcagcatgagtggaggccgaaatctcttgttactctttcagctgagtatgatctgaaggtggtaagtgcgccttcaagaatcggcatggccatatccctcaagccttga

SEQ ID NO: 8327 - DNA, 267 bp, Zea mays
  Peptide Sequence Number=SeqID_51702
atgaccgagaaaaagaccacgacttcctctgacggcggcactccaaagaaagccaaggtggtggtggaggatgaggaagaggcggggttggaggatgaggaagaggcgactgtgacactatccatggagaaggacgcgctggagtgcgacatctgctgcctacccttccagtccgaagttttcatggcaagtcagattaccatgcattgcaagaacgggcattctggatgtgcaaagtgctgcatccgcacggacgaaagtcactag

SEQ ID NO: 8328 - DNA, 300 bp, Zea mays
  Peptide Sequence Number=SeqID_51703
atggcttgccccagcctcgggcgactactctgggccagcgacagcacccgacccctccacgtggatggttccgggaccgccacgtggccagagaagatgatatactccaaggtatcaatagtgagttcggacccccatgggaaagtgtcggacccctgtatatacagatcgggcctccgggtaaggtctaggacccccacgggcgcaaaccagacacctaggatggggcgatgtgccgcctccgcatttaatgagccctgtccattccgctggcaggcgatgtgtcgcctccgcatttaa

SEQ ID NO: 8329 - DNA, 159 bp, Zea mays
  Peptide Sequence Number=SeqID_51704
atgacgactgacaggccactcgagctcctacacatggacctattcggctcgatagcttacataagtatcggcgggagaaaaatctcatacccaatagaccctaaagggattcttgagacgggctcaaaacgagttcgccttaaggataaaaaagattag

SEQ ID NO: 8330 - DNA, 429 bp, Zea mays
  Peptide Sequence Number=SeqID_51705
atggctgccaacctcctctgcccccttgctgtcccacctcttctccctcaagccagcgccttccccgaccacatctccatgaccgagcagcagctctgctcgcccccctccttctttttccccttgtgcagcagcaagaagcccctgctcgtggccttggcgtccaacttcgctgcacagcggtgccgatccaaaacagcggccccggatcccctccgcactgcgtgcttcaccggatctgcgcagccccaacatcgacgctgttcacctcggagagaaccccgtgttttgcgtggagaaggcaagccgctcgacgctcgtcggatgtttggagcaatgcacaaatcggaatcaccgtcattcttgcaaacaccgtttgggtttgtttatggtgagctgatgcatgtcgctctcgatcgactcgattaa

SEQ ID NO: 8331 - DNA, 3516 bp, Zea mays
  Peptide Sequence Number=SeqID_51706
atggatccgcagtcggacgcgggcgcggcggtggtgctgggcgccgacccggcggcgctgacggcgctgctggcggacctcacctccccggccaacgaggcgcggtcgcgggcagagcagcagttccacgccttccgcaggtcccatccggacgcgctcgcgctgagcctcgcgcacctgctgctctccccggcgcacccctccgcgcccatcgccgccgtgctgctgcgtcgcctcatcgcgccgtcatcccagtccttcgtctaccctgcgctgtcgcccgccacgcagtcctcgctccgcgcgctgctgctctcggccgcttccgcgcctgcgctccccaggtctgtctctaggaagctctctgacgccgtcgccgagctcgcgtccttcctcctgcccgccaacgcgtggcccgacctactcagtttcctgtacaagtccatagattccacgtcctccccgccgggattgcaggagtcggcgctcaacatcctggcccggctggcctcccacctcgcggccagcttccccaacctccacgggctcctccacgccgctctctcccacccttcttccgccgatgtgcgcgtcgcggggctcaatgcggccatcagcctcatccagtcccttccttctgccgcggcccgcgaccaatttcaggacctcctcccggccatgatgcgcgctctcgccgagtcactcaactgcgggaacgagggctcagcccaggaggctctggagatgatgatcgagctcgctggcgcagagccgcggttcctgcgccgccagctgcctgacgtggtcgcgtccatgctgcagattgccgaggccccaggactagaggatggcacccgccaccttgccgttgagtttgtcgtcacccttgccgaggcacgggagcgtgcacccggaatgatgcggaagctgcctcggtacgttggtcggctatttgcggtgctcatgagtatgctgctcgatgtccaggatgaaccggcatggcatgccgcagtgtcagaggaggaagacgccggagagacgggaagctatgtttttgcacaggagtgtctggaccggctgtcaattgctgttggtggtaatacgattctgtccgtggcagctgagttgctcccatcgtttttctcctctgaagattggaagagacgccacgcggcactagtgaccatagctcagattgcagagggctctgctaagatgatgattaagaatctggagcaggttgttgggatggtgctgaattctttccaggaccctcacccacgggtgaggtgggcagcaattaatgcaatagggcagctttcaacggacctggggccagagttgcaaaatcagttgcaccatgttgtgctaccttcattagcttcagcaatggatgatgtccagaacccacgtgcacatgctgcatcagctattctgaacttcagtgaaaactgcagacctgatattttgacaccatacttggatgtaatagttgggaaacttctattgttactccagactgggaaccaaatggtgcaagaagctgctttaactgctttagcatcagcagcagattcttctcaggaacacttccaaaaatattatgatgcagtaatgccatacctcaaggctattctcatgaatgcaactgataaatccaacagaatgttgcgtgccaaatccatggaatgcatcagtttagttggtatggcagttgggaaacaaaagtttaaggatgatgctaagcaggtgatggaggtccttatgacactgcaaggatctcagatggaggctgatgaccctataacaagctacatgctgcaagatttcttaccatacatgagtgttgttatgccccctctgctccagtctgctcagctcaaaccagatgtgagtgtcacttctgctggaccagaagatgaaaatggtgaatctgatgacgagggtgtcgagactattacactaggtgataagaggatcggcatccgaactagtctactagaggagaaagctacagcatgtaacatgctgtgttgctacgctgatgagctcaaggaaggatttttcccatggattgatcaggtcacgactacgcttgtacctctcattaagttctattttcatgaggaagttaggaaggcagctatttcagcaatgcctgagcttctacgttcagcaaaattggctatagaaaagggccaagctcaaggtcgtgataaatcctatcttaagcaactgtctgattacatagttccagcccttgttgaggccatgcataaagaacctgagccacaaatttgtgcaagcatactggaatcattgaatgaatctatacagctatcaggaacacttcttgatcaaaatcaagtaagatctgcagtggaaggtgtcaaagaagttatagttgcaagcactaacaggaggatagaacgaacagaaagggcaagggctgaggactttgattctgaagaagaggagctactcagagaagaaaacgaacaggaagatgaaatctttgaccaaattggtgattgtctaggcactctcgttaaaaccttcaagacttcttttattccgttcttcgatgaactctccatgtatttgacacctatgttggctgcagtgtatggaattggcatttgtgccgaatgtggtggttctgcatttaggcctcacactggggaggccctatccagattatacaatgtaatcaaacatcctaatgccctggatttggataatgcaatggcctatgacaatgctgtttctgctcttggaaaaatatgccgatttcatcgtgatatcattgatgtatctcaggccaagctcggcgtgtcggccgacgaggccgccgccacgcgcgccgagctcttccgcgcgcacggcagctccctcgccgggctcatcgcgctcggctacgacgtgcacccggacgagtaccacagctacgtgcacggcaggctaccgtacgacaggatcgcgcgcgacccgcagctggcgcggctgctgcagagcatcccgcagcgcaaagtgctgttcaccaactcggaccgcgcgcacatggagcgggcgctggagcggctgggcgtggacgaggccgccttcgacgccgtcgtgtgcttcgagaccatgaacccgcacctgttcggcgacgacggtggcgaccggcgcccggccgtggtgctcaaaccggcggtggacgcaatcgtcgccgggctgcgcgccgctggctccaacccacgccggacgctgttcctggacgacagcgagaggaacatcgccgcggggaaagcgctcggcctccgcaccgccctggttggcaagagggcgaggagcaaggaagcggactacgcggtggagagcatcggcgcgctccggcgggccatcccggagatctggggcgaggccgctgaacgctcctccgacaagctgccggtgccggccgtgagcgtggtgaggtcgacgacgtccgacctggactccatcatcatccagcccacgtccatccacgcctaa

SEQ ID NO: 8332 - DNA, 837 bp, Zea mays
  Peptide Sequence Number=SeqID_51707
atggcggccgcgtcgctgctgagccgggcgcggtggctcctggtggagcacccggccgtggcctcgttccgctggcagccaggccgcacggtcggcgcgacgccgtccttcgcggccgccgtcatctgcggctacctcgccgcggtgctcgtcctccgccgcctcgtcctgccccgcctcccggcgctgcctccgccggcgctccgcgcgctctccgccgcccacaacgcggtcctgctggcgctctccgccgccatggccggcgggtgcgcgctgtcgacggccgcgacggcgccggcgccgcggtgggcgtgggccttctgcttcccgccgcggggcgccacggaggcgtcggggcccgtcttcttctgggcgcacgtgttctacctctccaaggtgtacgagctcggcgacacgctgctcatcctgctcgcccgccgcccgctcacgctgctccacgtgtaccaccacgcgctcgtcgtggccatgtgctacctctggctcgccacccggcagtcgctgatgcccgtcgcgctcgtcaccaacgccggcgtgcacgtcgtgatgtactcctactacctctcctgcagcgtcggcctgcgctggcccgggcggtggaagcgcgccgtcacggagctgcagatcgcgcagttcctcttcagcttcgcggcctccgtggtgatgctgtggctccacttcgccgctggcggctgcgaggggatggccggctgggtgttcaacgccgtcttcaacgcgtcgctgctcgcgctcttcctcaacttccacggcgccgcctacaaaggcgccgccaaggccaacaagggtaaagcggaatga

SEQ ID NO: 8333 - DNA, 174 bp, Zea mays
  Peptide Sequence Number=SeqID_51708
atgacgtggcagggggcaccggactgtccggtgtgcaccggactgtccgccgccccctccctcttcctctcctccccatttgcagccgccctctaccctctccacgacttcctcctccctctagatctcccccacgcagcaaggatcgagaagaggaggagcacgttgaattga

SEQ ID NO: 8334 - DNA, 612 bp, Zea mays
  Peptide Sequence Number=SeqID_51709
atggagcttctagagaagcaggagccagaaggatggattgcccgacccatcactcgtgacgccgctctcggttgtcatttccacgacgctctcgacaccttgctacgtcgggccttcgaccgacacacttggtccatcgagtaccgttgtgtggtctaccagcaccatcgtgggttatacctggaccaatgggaggctacttgcttggtgcgccgtccggatgatgatctccagggtgcagatgccttcttagagcattattcaatcactaagatggatactgtcgaggcagccatgcaagatgttgcacggcgtgcgctttcgcatgccggaggtgtgattgtctcacccgttggtgagggaaaccctaggctaagcatcacagtcaacctggtcgccgtgctcaacaccgagctgaaccacacccttgatgagttgggcaaggctcggacggagattgcggaactgcgtgctgagcgcgcgacgcgccaccatcaggagggtggttcccccgctcctgtcgggatttatcacccttaccgctcgccgccccgtggtcgttatgcttatggcacccctgactgcaggacccagatagatttggagccatag

SEQ ID NO: 8335 - DNA, 1239 bp, Zea mays
  Peptide Sequence Number=SeqID_51710
atggaccaccagcgcctaagggcggaccttccactggccagaccgtccgggcctcatggccggatcgtccgaccgtgcccagtgccacaaatggtgctcaacatatgcccctctcttttggggaagctgagcgaactaaaaactgatgacaacccaattaaaggactaacaagtgtgctaagtgttgaacaggtgcttaatgcaaagctaacagggttcaacacaaagacaaccgatcaagccaaggatggaggcaagaagagcttcgaggtaccgagtgcacgggagaaggtcaaggataccaagaacccaaagccaggggtgaagaagaagacttgcaaagtcaaagttgatcgagttaagaagagttatgccaagtccggcctcgggcgccataggaaactccgcctcgcccgaccccagggcccggactcggcctcggccccggacgacgacgaactccgcctcgcccgaccccagggcccggaaacggcctcgaccccggaagacgacgaactccgcctcgcccgacccagggctcggactcggccttggccccggaagacgacgaactctgcctcgcccgacccagggctcggactcggcctcggccccggaagacaacgaactccgcctcgcccgaccccaggctcggactcggccatggccccggaagacgacgaactccgcctcgcccgaccccagggctcagccctggccctcagccgacggtctccgcctcgcccgacccaggggctcggactcgacctcgacctcggaagacagactcgacctcgacctcggaggagcctctgcctcgcccgacccagggctcggaccgaccacgtcgcaggaggggccatcattgccctacccctagctagctctggctacggggaacaagaccggtgtcccgtctggctcgcctcggcaaagcaaataatgatggcgcctcgcgtgctccatgacgacggcagctctcagcccccttacggaagcaaggagacgtcagcaaggactcgacagccccgacagttgtccttccgccaggctccagcgctcctccgacggccacgacatctcatgaacagggtgccaaaacctctccagctgccacgacagcatggaccccccggggtcgaaacgccgacagttggcgcgccaggtaggggcctgctgcgtgttggcgaacagcttccagtcaagctccagatggacagtctccagcaacctttctag

SEQ ID NO: 8336 - DNA, 132 bp, Zea mays
  Peptide Sequence Number=SeqID_51711
atggccttgctctccacagtggaaacatgctctgtttccaacctgagctggtgctgcctgattgttctactgggctgttggggtgatggcgtcagggtgggcatgggtggcgaggtaagactcccaccatga

SEQ ID NO: 8337 - DNA, 435 bp, Zea mays
  Peptide Sequence Number=SeqID_51712
atggaccgaggctacgggccaagcaccgcacgacgctcgtgccgagttggcccaggcactattaaatgtgttgttcgccagacacgacccatctggcctccgcacgataataatgagggcataggagcatgcgcctcctccccgtattcgtccgacaccagccccgacaccgactcgcgcagtggttattgcacgtccacgaggacgtttcacatcatgtgtgcaccatcgttttcaccgtcgtcgggcgtcccgttcgttttcccggccttcgccatgttcttcctccccaacctgctgtccccgcccacggtcgcaaccgacgttcgtcgacgcgggtacggggtgagtcggtcatgctcctggcctttctccgtgtgtgccgtcgaggaggacatggtggcgcctgccacgcttaggttatcttggcgatga

SEQ ID NO: 8338 - DNA, 453 bp, Zea mays
  Peptide Sequence Number=SeqID_51713
atgcctgatggcgagtggggacccatggttgcgaagagcatccaatgccaaccgtacatggagcagctcagccaagaagaaatgacaccagaggcaaaaatggagggccatcccgaggtacccctcgtaaagtgcctcgaaggctgccatgtgctggatctcgttagggttgaggtgttgcatctaaatcttataatggtggagaagccctaccaaaatgcgatgatgaggcatcacgaaaccacactcgtggaagtggtcgaacgagaccaaaaatcctgccgacggctcagggatgcactcaggaccaggaagcctataattcctctcatgaagaagcccacagtgaatggaatggagcgtgactgtgagagcgggatggcaacggagcggttccgtccggttgattttttggaatggaatggttccggatctaaagagaatattccctaa

SEQ ID NO: 8339 - DNA, 327 bp, Zea mays
  Peptide Sequence Number=SeqID_51714
atggcggacaacataggttttctgaacctaaaggccatgttatcaaccatgtcctccgaagatttctcaaactgcctcgcctacacccatctaaagggcatgttcttgagcaaggccctggagaatagaaaaaatgtcgagggcgaagttgcccaaaggggaattgttaagcttagatccaaagtttctgagcttcggtataactgcggggaaaaggaaaaattctttaaaattctagaaaaagactttatcaaaagtcggaccaaagttcagactctatctgaagaaaaaacaaacataagaaagcaatggaaaataaagtattag

SEQ ID NO: 8340 - DNA, 390 bp, Zea mays
  Peptide Sequence Number=SeqID_51715
atgaccgggaaaaagaccacgacttcctctgacggcggcactccaaagaaagccaaggtggtggtggaggatgaggaagaggcggggttggaggatgaggaaaaggcgactgtgacactatccgtggagaaggacgcgctggagtgcgacatctgctgcctacccttccagtctgaagttttcatggcaagtcagattaccatgcatggcatcgaattgcgtgggatgcttcgctcaacgttccttatcttggttggatggaaaaactacatgcttcggtttgtcggtgcttttcttctcattgttagaaatgatctgttcagcatagaagacctgtgcagcacaattagcaaggatccatgggtcatctttgtaacctaccttacttag

SEQ ID NO: 8341 - DNA, 175 bp, Zea mays
  Peptide Sequence Number=SeqID_51716
cttgattcgtatccggggtgtagttcgcttcgccgtcgtgccgtcaatggggcacgggagatactttggtacaggtggctatgagatcgatggtttcagttatgactatggtgctggcgaagatgaagctgtggaaggagacttccaggagttccaagactacgacgagttctag

SEQ ID NO: 8342 - DNA, 447 bp, Zea mays
  Peptide Sequence Number=SeqID_51717
atgaaggaagagaaagtaaatccgaggtggttccttaccgacggcttgaccagccacaagcccacaacgcccccgatgagcgcatgcacaccgccttcgtggtcctgcccaacaatcgagctggcttggatacgcaatccccctgaccttgttggcgccgtgagggtttgtgagtctgggttagaggggcacgggagaggattttccccccatatatccaggagccccagggggaggtcgccgcgcaggtcctgcatggccggccggaggttactacggcgcgtcttccgcggggtcgttcaaggcgtgtgcgagctaggtgacagagtcaaagacgccggggctggatttgcgaccgtggaattaggaccggttgaaggagataactacaaggaaattccaggcgagatccgcggtgcgcgcgagaggctcggtgttgacgcgtga

SEQ ID NO: 8343 - DNA, 492 bp, Zea mays
  Peptide Sequence Number=SeqID_51718
atggtgtgttttggcctcggcggccgcaggagacacacgctacaagacaatccgaccctgcaggctcgggtcttgacgctggaagggggcagcagcaccctcggcatcgacgacacctttggcgagggtcttctccgggaacccggcccgagcaggcggctcggccggtcacctcggggcctcggccaaccgtcctccaaggacgtcagcccgacccgaggcctcggctggtcaactccggcgtcggtcccgctaacggacgacccggctaggctccggccaaccaggtttcattttcgagccaactctgcccctgttcatgctgataccgctgcccctggcctcggctcatcgaagagcggccaaggggtccctttaactaagctagagaagcctcggacaacaaggccgaccgagccgagggattcctacgcctccgggatacggatacctcactcgtcacctttacacggggtgactcacgcttggtga

SEQ ID NO: 8344 - DNA, 255 bp, Zea mays
  Peptide Sequence Number=SeqID_51719
atggctgatgaagccataaaaaagaacgagaaagagtctcatgacaccttagaagaggctaaaagagccgaagaagctgctgagtgggctaggcttatagctgagctttctccccctcccgagccatatgatcctgaaactgacccatatgtgaaggaggcgctcgatataattaagattgctaatgatgctattaatgaagctgtcgacaagctattaaacgaatctgctgacaaagttctaaaggaagactga

SEQ ID NO: 8345 - DNA, 306 bp, Zea mays
  Peptide Sequence Number=SeqID_51720
atggagcctggtggagggatagctgtcggagtggttgggtccttgctgacgtcctcttgcttcccttggggtagggtgatgatggcgcctcctgttgacgtggctggcctgcgccctaggttgggcgatgtggaagctcctccgaagccgaggtcgagtctatcttccgtggccgaggccgagtccgagcccctgggtcgggcgaggcggaggccgtcggcggaggccagggcggagtccgagccctggggtcgggcgaagcggagttcgtcgtcttctggggctgagcccgagttcgagccctag

SEQ ID NO: 8346 - DNA, 717 bp, Zea mays
  Peptide Sequence Number=SeqID_51721
atgtcttcgcgctccattatgcatcgtgtctttccacctcccaagcccccggatgggggatacccgccgtcttttcgcctcatcgttggaggaacgcaactccgtgggagttggtacctttcagccatcattcggcttcaaggattttcatcagccagcccggctgcacccctccaccggcggtcacccaagacggtgacctccagcccctggatggggagaggcaagccgggctgtgatctcggtcccgccctcagcctcgagggtgttcatcatcctcgctggggcggggagcgaggcgagccggggctctacctcccgcgcgggccggcgggccacctcttcttccagcttctggtggtggaaaacatcctccggccctgcggaggagacgttctccagccatgccagggagggcgaactgttgctgcccagctaggatgcaacattccgccctcttcctcgctttcgcggcgaggacggcagcgaggacctgccggtgcgctttggagcggcccgctctttggctttaatagctggttcgcgtcccttgagcgggaacgtgagcgagagccctccggcggccgcgtccgtcctgggaccatggctgctgctgcagaggtcactggcgggtcccccggcattcgtcgccccgcaggctcccctgtgcggaggttgttcgtacccgcggggacggaaccagagttctgtttgtaa

SEQ ID NO: 8347 - DNA, 321 bp, Zea mays
  Peptide Sequence Number=SeqID_51722
atgggttgctttatgttgtgttggcataaatcaccaaaaagggggagattgaaagggaaatgtgcctttgggccatttctaagtattttggtgattgagtgccaacacaagtgcttaaatgtgaatctatgcccatggatgaacaaagtgcaaatcacaagtaaagttgaactatctcctccactggaaccgttcgaccccctggccgacccagaaacgaagaaagcaatagagatcatcaatatggctgaatctattgttgatgaagttgttaacaagttattaaatgaagttgcagagaaggtcatgaaagaggattag

SEQ ID NO: 8348 - DNA, 573 bp, Zea mays
  Peptide Sequence Number=SeqID_51723
atgcctagtcgccgcagcagcgtgcgcgctcgccccagccacgacgcgaggattcctcggcaagggcaccatttgaaccccaacgttcccctcacctcgcgattctctctctcattcttgcacagccagcctagctccctctcatgctcgcctctcctcacaactgccaccgtcgcgccgcatgtccatcactcgcgctgtcgcgtcctcgcctgctggagcgtcgtcgagctcgtgctcgccgcgtgcgttcgtcgccgacgcgccgtgccaggccaacctcgctgcgccatcaccccctgcttcagagatccaccgttcactacgccggccccttcggagctcgtccccaacattcgtgtcctcgtccgtgcctcgccttgttgccttgacattcgtcgtcgtccgagtgtaatcacgacattcgttggtagctcacgacaggtcacccagagatacttgatcagagatgttcggattacaggtggtgatgagaatgatggttttggtattgactacggtaatggtaaagaaggagaaaaaggcgtcgatgcggatctccaggagttctag

SEQ ID NO: 8349 - DNA, 330 bp, Zea mays
  Peptide Sequence Number=SeqID_51724
atgccatcctcttcttcttcctccgacaccacgccgccggccgccgcctcgtctgaggagacgttgagtagcgtgatggtggaggagttgcgcgccggcgactctgttgattttggtgtgtcgcggatgacgtcagcccgcgttgaagatatgcagcggttgggctactttggcggcggagttgctcgtgctccggggacggaggaagtccccgagccggaggaagtggggggaggggacatttcatataaagccgccgtcaagctcacaatagcagaagcaacgcacgatcatgtggagggcacacatttgaattgttttcctccataa

SEQ ID NO: 8350 - DNA, 1644 bp, Zea mays
  Peptide Sequence Number=SeqID_51725
atgggcaccgaacatggtgtctccggtgagctgcaagcggcaactggcgcgctggttgcgcgacgcgtgggcctgggcctccaagccggcgtgtcagaagtcggagaagcgcgcccacctggcgcggttgcatgccgcctgcatggctggggaatcgcttgtaacagctgggcggttgtgtgcaccgcgcgcggcggtttggcttcttctgcttctgagctgggagagtcgcctttaaaaggagggcgacccctttcggaaggcaaccatgtcttcttcctcccttatgcgtcgtgtctttccatcttccaagcccccggatgggggtacccgccgtctttcctcctcctcgttggaggaacgcaactccgtgggagttggtacctttcagccatcgttcggcttcaaggattttcatcacacagcctggttgctcccctccgccggtggtcacccaagacggtgacctccagctcctggatggggagaggcaaaccaggctgtgatcccgtcctcagcatcgggggtgttcgtcatcctcgctgggacggggagcgaggcgagctggggctctacctcctgcgcgggttggcggaccacctcctcttccagcttctggtggtggcaatcgccctcccgtgctgcgacggagacgtcctccagtcatgccggggaaggcgaactgttgctgcccagctaggatgcaacattccgtcctttccctcgcattcgcggcgaggacggcagcgaggatctgtcggagcgcttgggagcggcccgctctttggctttgatggctggttcgcgtcccttgagcgggaccgcgaacgagagccccctggtggccgcgtccgcccggaaccatggctgctgctgcagaggtcactgacgagcctcccgatgttcgtcgccccgcaggcccgaggccgctcgtacccgcggggacggaaccggagttccgcttgtgatggcaccttgaatgccagctcctctagcttagttaaagggaccccttggccgctcttcgatgagccgaggccaggggtagcgatatcagtacgaacagaggcggagttggctcgaaaatgggaacctggttggctggagcctagccgggttgcccgtcagcgggggtcgacgtcggagtcgatcagccgaggcctcgggtcgggctggcgcccttggaagatgcttggccgaggccccaggggtaaccggccgagccgcctgctcgggccggattcccggagaagtccctggaccgcgtcgccgtccgaggctgggtcggacctcgctgaaggcgtcgtcgatgccgagggtgctacagccccctttagcgtgaagacccgagcctgcaggatcagatcgtcttgtagcgtgtgccttctgcggccgccgaggccagaaaacacaccctcgctgcgttgcaaagccgcgtctcctttcctcttatgtcgagcatctggactttccgtcggtaacagggatgtttgtgtgggcgagagttgcttctcgcggaaggtgatgagtgagaaggtgatgagtgaggtatccgtatcccggaggcgtaggagtccctcggctcggtcagccttggctgcttacgtgtactccgtcgtttccaggatccgcttttcgaagtag

SEQ ID NO: 8351 - DNA, 696 bp, Zea mays
  Peptide Sequence Number=SeqID_51726
atggggaaaataaatgggaaaagaaaaagaaaaaggcatttccagctagctgggccgggcgcgcttgcggcccagctggcccagctgcgcgggagcgacgacggggaacgacgtcgtggtgcgggcccgcatgccagagagagggagggggctgacggcgttgacggcaacagagggagggggggtctcgaccggagtccggccggcggcgaatcccgcggcggttctccgccgttggtccggtccttcggcgcggaagcggtggcgaagcacggccgggtgcaggggatcacgggggtggggttaattggaccggcgggggcctatggcggccggttcgcggcgcggtggcgagtgtccgtggcggtgtggtcgccggtgcggcaattgggcgcaatagggggcggggaggggtgcctcgtgaccatgatcgtgtggcggagctctagcgctagttcaattgtacagaggatcaccaggaaggggaagaggacctcaccggagcgacgagggaggcacggcggcgctagcttgattggctcgggggaaagcagtggagatggccagagctggtgtggtgaagacggggctcgggcgggtccttttataggcgcccgggggaaggagagggatggaggagacggcgagcaccggcgagctcgccatgatggcgggaatggcgctaacgccgattga

SEQ ID NO: 8352 - DNA, 1127 bp, Zea mays
  Peptide Sequence Number=SeqID_51727
gccccgcggcggcgcccgcccgtcccggccccgtggcggcgcccgcccgcccccgctcctcccctgctcgcgcgcagcgcggccccggcgcggccccggtggcccctgctcgccggcgcggccccggcgcggcctccggcccctggcgtgtccccggcgcggccccggccgactcggccgcccctggccggttcaaccgccccggccccggctcggccgcccgttcccccgtcccggcctcgcccgaccgtggttatgagattgatggttttggtcatgactatgatactgctagtccactacagccaaacaggatgcttgctgagtatgttgatatggctcgacttagacacactgcacgaaagtcagtcatccccttcttaccctcccgccttgctgagcgtccgcttcgccgtcccgtggccggacagtccagccacttggagagactgcaccaccgcctgcatgaggagcaggaacgtcgacgacaggagcagcagggctcttctttctcgctccagcaggagatagagtctgtgaggagctgctcccctgtgctttccctggaggcgccccctgcaccaccacagggcgccctagcccctggagtagctgctggaggagacctagacgacggaggtggcgacgacagctcgagccacgacaccgacttctctgctaaccatgagctggaaggatggtttgctcgatccatcactcgcgacgctgctcgcgggtgtcacttccacgatgcgctcgataccctgctatgtcgggcacttaaccggcatacttggtccatcgagtatcgctgtgtggtctaccagcactgtcgcggggtctacccggaccgctgggaggcaacctgcttggtgcgctgcccggagaacagtctccagggtgcggaggcctgctcagagcactattctatttctgagcgggactcagctgaggcagccatgcaagatgctgcacggcgtgcgctttcgcactactgctcggttttcggtggggcagctgacggtcttgacctgaagtattaccctcgccgtccatctggcagcacaggaggacaccagtcttatggcaatcccgcctgcaagaccaagataactctagaaccatag

SEQ ID NO: 8353 - DNA, 464 bp, Zea mays
  Peptide Sequence Number=SeqID_51728
atgagggcctccaggtcatccgcagtgacggtggagaaaggccacgggtcgcgaggcggaacaatggtcacccggtcgaccatctccaagcagaagaggtggcggcggaaggggctgggtgagcgggaccgggaaaggggataccccgaaagggatccttctccgcgaaggaaacgggccctgagccccctactgatcagaggttcgaaggctggcccctcggaggggttcaacagccgcctcagagcgctctggctccgcgcccactactggtcagaggttcgaaggccggcccctcggaagggttcaacggccgcctcaagccactcgggctccgcgcccactactcatcaggggttcgtaggctggccctcgaaagggttcgacaaccgcctcagacgcagagcgagggatgactctgggtacgttcgatacataaccaaggctcgggctacgctcccaag

SEQ ID NO: 8354 - DNA, 609 bp, Zea mays
  Peptide Sequence Number=SeqID_51729
atgacttcgcttgctaaggagaaaaggaaaatcaggcctcagatccgagctgaggccaaggcgggcagccatatcatcgtcttcatcgtcgtcttcatcatcgtcgtcgtcatcaggcgtctccggcgacggctccctcgggagcccatccctctcctgccgacgacagagcttttccaaggcgccccgagcccgcatccgctcgcgggcccgagccttcttcgcgtcctttttctccttcctcttctccgcggcaaccctccgcgcagctcggtctaccgcgtcctccgggaccggtggcaggaaaggcttgtgatgctctacctcctggagacagacgagaagtctcggctgcgggaaccaagggcaatccgacgcaaggagaaagaaggagcggacactcaccagggacacacacccgcggtcaggacgcatcaagggctgggaaagggcgccggcgtccggcttccccaacgtgacggctacccgcctgtggaggtcatcgacgggaagggatccgaggacatccgcaaaccttccaagtcggcctccggcgtcatctcccaaagcggcagccgctgctccatcaagggaagcaccctccggtga

SEQ ID NO: 8355 - DNA, 471 bp, Zea mays
  Peptide Sequence Number=SeqID_51730
atggtggggagaagcaagccgggctgtggcctatgccccaccctcagcttcaaggatcttcatcatccttgctggggcggggggcaagctgagccggagctctacctcccgtacaggccggcgggccacctcttccttcagcattcaggggagagggcgctcaccggcctagcggagggggcggacttcgaaaacgcggggccgatcggccgcaagcgtcgtcagctccagcatgcctggctcgttggctcagctggctctggcgcagcttccgttaccacctcccaccgctggggcggagtgtggttgtctgcccgccgtacgggcggctgttgcgccgtgcgcaccgggggaccgcccaagacgtcgcacgccgctagggcggcgttcgtgttcttgggttgtcctgccctcgctccggcacgatgcctccgcgtggaggttggtgctcgcctgtctgggaggacttga

SEQ ID NO: 8356 - DNA, 600 bp, Zea mays
  Peptide Sequence Number=SeqID_51731
atgcagcacctcgtcgtgcgctgccgtgaagccgccgaagccatcttcgtcaactccttcgacgctatcgagcctgaggccgtcgaggccgagcccaacggcggcggcagcgccgatgtcgatttcctccaacgcgaagaagcggagcgtcgggagcgcggtgacggcggcagagagagctacagggagagggagtgcgagagcgatgagatggtggatgatgagggcagcaatgacgagtcggcgtccttgaagtcacggagcacacgctctactccacagccgcctcggactcctggatctaaaggaggcgttgctcctccttggagtcgacgtaggtgcctccgcctcgaccgccgcacgagcacgcgccaagccaattggagagggagtgcgagggcgcgggatggcggatctgctcgatatcaagatttggtaggcgcgggggacgggattgacgaaggcacacggggcaggacaggagatcgcgtggcgggccagggtcgcggtgaggcgggggcactgtgccgctgtggcggtgtctacgggcgcgagatctcgacgcgcgggagcggggacgcgcgggcggaggcacgatga

SEQ ID NO: 8357 - DNA, 279 bp, Zea mays
  Peptide Sequence Number=SeqID_51732
atggctagggtgcggcgcgacatcgatgtggtgaggcagtgtagcaatacacgcccgaacaaggcgaggtcgtgggcaagggacgaagacgccgtcgaggtcggcctggcctatgcgcgtagggacgaacgcagggagagaagagcgaaagaagcatacctggtaaccgaagggcttgcgcgatctggatctgaggacgagacgaggggttatgcgacggctagggatatatttatagaaaagagaggatgtgaaaggcggttgcaaaatttgtcgtag

SEQ ID NO: 8358 - DNA, 681 bp, Zea mays
  Peptide Sequence Number=SeqID_51733
atggtcgtgcggtggggcacgaacgtgctggccggtgcctgcgtggccctggggcggcggcacgcaggggagaagggcagactaggtggaagggaagggggcggcagcggagcaagggagaagggccggcgagcttggagcagcgcgggagcagggaagcgcttggcgctggtgacggctggaggtgaggtggagggagcaggacgaggtgagggcggcctacagagggagctcgagctcgctggctgtggggtggcggcagctgggagtagagatggcaatgggtacccgaaatccaaaacccgatgggtttttaccccattagggtacgagtttgggtcaattttcataaccatgggtttgttaatgggcataaatctatacccgatgggtttatgggtacggtggctggaaaacgatggagaaacatcgcgcaatattcttactccacctctagcaactggttggcagtggcaatctaggccttgcccatttggctctgaagtcaagaaggatgatgctcctccatctagttctgaccctgaggtggagaatgttgatggcaacaatacatcagatgatgccgacgatgatttgagtgatgactatgattttgatgcaagtgagaaaagttttgagactcgaaaaatgaacaagtggttcaaagagtatggattataa

SEQ ID NO: 8359 - DNA, 1236 bp, Zea mays
  Peptide Sequence Number=SeqID_51734
atgcacccgggctacggccaggccgcatgggggaacgaccaggccggccaaggcaccacgaaaagcattaagacctcagaggagtcaaaccactcctccgacgcctcgggggctacacccggcgggtcaagacctcgtctaccaagggacgcaatctcgcctcgcccaagcccggcctcgggcgggaacagtagtcccggacgaattcacgcctcgcccgagggcctcctccggtggtcggcgcaccctcggctcgaccgaagctcagctcgggcaggcttcgtcgagaagcaaccttggccaaatcgcctcaccagccgaccatatcacaggcgcattcaatgggaagatcgcctaacaccttatcctaacacgcgcgtctcagtcggcaaggtcgaagacccagcctcagcctcggcctcgggaggaaccgcgtcctcgcccgaccccggcctcggccttaggagaagtctccgcctcgcccgaacttgggcttggaccgaccgcccgagccgcgccggggcgccacgccggggtcaaggcactgcacaccatgggcgcgccgaggcgaggacgggcgagcgtggagccggggcagggaccgcgcgcagaccaggggtccacgccgagccggtcgcgccgggcagcagcgagcgggccacgccgggccaccgcgggcaggccgcacgagcagccgcgggcaggcagccgagccggccgcggggcaagaggaggaggaggagggagagggaggcgagctcaccacaaggacgaagacgacgcgagcggggaagctccggggcgactccaggcgattcggaggagagagaagcgaacagcgcaagagagaagaaagcgggcgtcgtgggagagatgaatagggatggcttcgggacttacagacgggccccacacggggcggcggcggctgggcaaccgcccaacgcgcacgcgtgcggggagagcggggcgagctattgggggcggctgggccacgcgccagccggccggcccaagacagggggaggtgggccgcgcgtgggggggggctcggctgggcaacgccacaacgccgagctgggccacgagccggccagccggcccaggagaggaggaggcgcgagggggccacgagagaaggggtggcgccaaatgggccgccagagggggaaacaccgacccaagaaggagaggggagaaagagaagggaaaaggaaagggtttttcccattttaa

SEQ ID NO: 8360 - DNA, 312 bp, Zea mays
  Peptide Sequence Number=SeqID_51735
atgatgaaatgttatgggttagttgtacgagaagaagagtctgttccgccaaaagatgttgttgttgccgaagctgaaccatctgttgctgaagctgacagtgatgatgaagacaatgacgacattatgagtctgagcaagcctagccacattgagtatggaaaatacacaattaagacagaagatttggtttttgaaagtcgcatagagggggaagagcagcggatcgaatttgggtttaccgtggcaaaggtcaaactcatccaagagcaaatcgcaagccgtgaacgccagactgatatgacggacggg

SEQ ID NO: 8361 - DNA, 246 bp, Zea mays
  Peptide Sequence Number=SeqID_51736
atggtccgcggtaattggctgagtaggaggagggggaggaggagttggacggcggacgaggcagaccagcagcaggcgacacagcaggacgaccttgtccagcagcaggcggcgcctcaggtcgacgacgaccagcagcaggacgacaacgaccaggagcaggacgcctcaggttctggtgcctcaggttttgacgacgaaaaacttcagctccaatcagcacctgtcaccaacggtaatccgtaa

SEQ ID NO: 8362 - DNA, 660 bp, Zea mays
  Peptide Sequence Number=SeqID_51737
atgagcacaggaaagcagcacaacggagttacaactcagaaaagtggtcgaatctctatcacagggtccatttatagccccaaggcaggtaggagccgttggagcttcctttggaaggccataattgccttctgtccgtgggcgcaccggacagtccagtgccccaccggacagggaacagtgtgcgatttccttccttttctagcgaagctgactgttgcagccgcagcgctcgtggcacaccgaacagtccggtgcggcctggtgaccattggcgaagtccacgcgtcgcccgctaattgcgttgtcgaccgttggcgtgggcgctgctggctcaccggacagtccgccatcggcaaggacaagaaaggtcagggctcgccgcgtcgctccggcgacaaacggaagcgtgaaccgagtccttcgtcggaggacttcggtgactccgagtactcggaggaggagttctcctccgagtccgaggggtctccggaagggagcggcggcgatggctacgacgagggcgacggcggtgatggcgacgatggcggcgacgacgacagcaagggtggtggaggcgacggcagcggcaagggcggcgacgacggcaagggcagtagcagcagcagcaaggtcggtggcaaagcgcccctggcttaa

SEQ ID NO: 8363 - DNA, 984 bp, Zea mays
  Peptide Sequence Number=SeqID_51738
atggtgacctccagttcgatggcgggggaaagcaaactgggccgcgacctctgcccctccctcagcctcaaggattttcatcaccagggctggggaggggactgccgcgtgcctggctctcggacccgagtggcttcggagccactctcggcgctggcttccgccacggcagctggaagaggttcttccgccgacgagatagccagggccgcccacggaccgacctccaactctacggccttttgcccgtccttgccacacgagtttgggcatgggcgggggcctcctggcaacagcatccgccctgaggtcatcgctgccgctgttcggccccccggagcagaagtcgtcgtcgtcatcgcagctgccagagcgggcgacggcgcgccattcgtcggtcttccgttgctccgcaggccccccccatcgagtggggttgagtccctcggctcggtcggccttgttgtccgaggcttcccttgcttagttaaaggaacccctcggctactcttcgatgagccgaggccaggggtagcggtgtcagcatggacagaggcagagttggttcgaaaggaagacttagttggccggagcctggccgggtcgtccgctagcaggaccgacgccggagttgatcttccaaggtctcgggccgggctgatgtcttcgggggacagctggccgaggcctcggggcgaccagccgaggcgcctgctcgagccggattctcggagaagaccctggcggcgatggcccgggtgtggtgatgacgccgtccttcggagtggagatcctcggaccgcgtcgccgcccgatgctaggtcggacctcgccgaaggtgttgtcgacgccgaggacctcgccttgactgttggccagcttgtacgttccgggcttcagaactttggcgatgacgaacagcccctcccaggggggcgtgagcttgtgccgccctcgggcgtcttgtcgcagccgaagcactag

SEQ ID NO: 8364 - DNA, 495 bp, Zea mays
  Peptide Sequence Number=SeqID_51739
atgacggcccagaccactcacgaactcatcacagcatccttcatgcacctcatcctatggcgcacggctcaacttccctcagcccacgcgcgcggagtcgctgccatatgggcccactcgtcagcatacctgtttgctcaagccggctactgcgttgtagggtcagcgggtcagcttcttcctcgtgagaaccggagcgtgcgagagactaccggaatcgatcgcaacggcgctggctcaactgcgcgcgaaaacctcgcccggatccctattcctcagccgttttcctcgggcgtgagatccgctgttggctctgctttcaaccaccgtgacagactccaacgaagcttgccatggccgccgggatcggggcttacggttgtatcgcgagccgtggacggggagagattcagtgggaaggagatggtcgccttgtgcttcgattccgcgggccgcaccgagcgggagcggagtactgcctcggtgcaggatctg

SEQ ID NO: 8365 - DNA, 375 bp, Zea mays
  Peptide Sequence Number=SeqID_51740
atgaagatcttcggaaatagctggcagaaagcaaaattaatatgtgcaattgccgaagctgaccgagacgcaagtgattacttgaaaaattattgggagaaaacaattgtaaaacttcggtcttcaaaagaaagatgttatgaaaaatccatagaatgtgtgggaaaaattaagactagttttcgccaacgtcgacgcatactccagcgagtacaacttcctgaactatctcctcccccggagcccttcgagtcattggccgaccccaaagcaaaaaaggaagatgaaattactaagatggccgaagctattatggacgaagctgtgaatcaactattaaacgaagttgtggaagcagttttaaaagaagaatag

SEQ ID NO: 8366 - DNA, 345 bp, Zea mays
  Peptide Sequence Number=SeqID_51741
atgaggaatagggcaaggcctagcccactactcctcctgctcctttcttgctggaacagcatcccactcgtccgtccaacccggtggcagggtggtaggccaagtcacaccatcaaccatatcctgaagcatacctgcaaaaattatgccacaagcaaggctgagtatactaatactcagctagacttacccggttacaaggggtcaagcagtctcattagctgccagaagcagatgattcgaatcgagtttttaaaccttgcaagggctgtgggagatcttctgtggcaggctcgggagctggctcctgctcttcctcgtggacaactccttgctcgggaatga

SEQ ID NO: 8367 - DNA, 399 bp, Zea mays
  Peptide Sequence Number=SeqID_51742
atggccaaggctcgggctacgctcccgaggtaccctaagacatttccgagaccagcaggaacggaaaacaacactattcaccccgttccgactactgtgccaaccaccagggtaagactaacaacagtaagtcactgcctctcccgagttcagcctcaagcgcaacagggagcttcacctcgcccgatcccaggcctcggcctcagcctcggcctcaggagaaggtctctgcctcgcccgatcccaggcctcggcctcagcctcggcctcgggagggagtcacaacctcatccgacctcagcctcggcctcaggagaagtcaccgcctcgctcgacctcgacctcggcctcggaccgactacgctacagcggatacatcattaccctacctctagctag

SEQ ID NO: 8368 - DNA, 674 bp, Zea mays
  Peptide Sequence Number=SeqID_51743
gtcggcacgctataattcaccggactgtccggtgtacaccggacagtgtccggtgctccaaggaagcgcggcctctggaactcgccagcctcgggaacgcgcagcagccgctccgctataattcaccggacatgtctggcgtgcccatactggcgcaccggacaatgaacaggagatgtccggtgtgcaccggacatccaggcgggcccacaagtcaggagctccaacggtcagaatccaacggcagtgatgacgtggcgggggcaccggacatgtccggcacgatttcgaagaaggaagtatctgactcgatgaggtctttgagtgcgacccccaaggctaggagcgtccaggggaaggacctgtcggtcgttgaacttttgctgcctcttgttctcctgtgttccatgtcctccgaagatgacattgacctcccttgtccgtacgcctccacggggtgcaccacgggctcgagcgacgggtggtctggcggcttgtacctcctcacgaggcctcttctcccagcgcctgtcagtttgctggttcgtatcgcgccgtggcacgagtggtgcaggtttcgttcctccgatgaggtcctgggcccgctcgtcggtggtgatgtagaggtctgcctctcgaaacagttattcgaaggtggcgggcgctttctgtag

SEQ ID NO: 8369 - DNA, 267 bp, Zea mays
  Peptide Sequence Number=SeqID_51744
atgggaagtcttatgttgggtgctggtcgtggtcgacaggaacgggggcatctggcaagctcttatagttccggctcaatcagattggatacgggcatagttcccaaagctttaccctgtagtttggactataagttggttacgatcctggcacacatatgctatgcacccgactctgcccttagaaacgggtgtgacactcttgctttgattacaaatgtcttgggaacaagaaatggggaagaagaaaagcgatccaagcgataa

SEQ ID NO: 8370 - DNA, 1707 bp, Zea mays
  Peptide Sequence Number=SeqID_51745
atggctggcgccgcggaacgggacggtctttctgtcggccttgttggagctgttggcggttcaccgtcacggtactcctgctacattgtcgtgttttcagtgcaaccgtcgtcgcggcgcccgcatggctcggcggaggaaaaggaggctgaagcgggggacgacaacggctctccgatcgagcaggtggcgctgacggtgccggcgtgggacgacccggcgacgccggcgctgacgttccggacgtgggtgctgggcacggcgtcctgcgccgcgctctccttcctcaacgccttcttcgggtaccgcaaggagccgctcaccgtcaccgccgtgtcggcgcaggtcgccgtgctccccgtcggccgcctcatggccgcggcgctgccggagcgcgccttcttccgcggccgcccgtgcgagttcaccctcaacccggggcccttcagcgtgaaggagcatgtcctcatcaccatcttcgccaacgccggcgccggcaccgtgttcgccaagaatcttgtgacctctgtccgcgtcttctacggccagcacatgtccttcctcatcgccctcctcctcatcctcaccagccaggtacgggacgagaggagtttgttagttctcctccaaacaagcgggagcttgcatgaactggccggttgggtaccctcatcaggtgatggggttcggttgggcgggagttttccggcggtatctggtggagccggcggcgatgtggtggccctccaacctcgtgcaggtctccctcttcaggtgcagtctttgcaagcaagcaacaacggacggttaaaaattacaagctgcaaaaaagatcaggcacttcatgagaaggagcgaaggagaaaaggtagcatgacacgcaaccagttcttcacggtggcattcatctgcagtttcgcctactacatcttcccgggctacctgttccagatgctcacctccctctcctggatctgctgggtgtttcccagctctgtgattgcccagcagctcggctcaggcctccatggccttggcatcggtgcagttggactcgactggtcgtccatctcctcctacctcggaagcccccttgctagcccctggtttgccaccgccaacatcgcggctgccttcttcattgtcgtgtacataatcacaccgatcaactactggttcaatgtttacaaggcacgcaacttccccatctactcagatggcctctacacggtggctgggcagaagtacaacatctctagcatcatggactcccatttctacttcgatacagacgcctatgagaagagtgggccactgtacatcagcacgttcttcgcttccagctacggtcttagttttgcatgccttaccgcgacggtttcccacgttctccttttccatggaagtgaaatatggcagctaagcaaatcagctttcgaggataagaagatggacatacataccaagcttatgaggagatacaggcaggtccccgagtggtggttcatctgcatccttgtggctagtgtttcagccaccatgcttacctgcgagtactacattgagcaactgcagcttccttggtggggagtactgcttgcatgtgcccttgccattttctacacccttcctattggaattctcaaagcaacaaccaaccaggtatggactccaaacaaacatgaatgcaggtgcaaaactacatag

SEQ ID NO: 8371 - DNA, 822 bp, Zea mays
  Peptide Sequence Number=SeqID_51746
atggctgcggtgattgccagcactcaaaactgtcgcgttcgtgtgccagcactgatcgtgttcactgccgtgctgctggtgacggcggcggcggcaaccgtggagccggcatcagccacgggctggtccagtgtcactgacagccgcagcggcggttactcggcgttcagcctgcagggcgcaagaaagctactgctgcaggacttgtgcataccgcaaggggagagggttcttttcttgccgctactgtcagcgtgctgtgctgtgctagctttggtttcagtatggtgctcccgcccgccgccgccgatcgtgtggttccgcctgccgttgacgccccgtggcgtggatcccctcgccgtcctcggagtcgaggaggcagcgaccggctgtggctcagctggctcgctgctgtcccgcgcgcagaagaacgagaagctcggcatggaagccatgggcatcgggaaccctcctcctcctcctccgtcaagtggttcgcagggctcaccgaacgagaagccagagccacccaaggcggaggaggccgagcagggcggcggggccgggtcggtgatgaacgccgagaacgacgacctgcagacggcggcgaacgtgggcgagcagcaggtcgcctcgtcctcgcccccacccctccacgcgatggggccacgcgtgtcaaagctcacgtccctgctccgcgacgccaacggcgtggagaaggagcacgagccggcgccctcccgttggaggccggtctcgtggcactgcccgcacgagtcttgtgggtccgcgtgttcctgcatccacggatgctctgcgtag

SEQ ID NO: 8372 - DNA, 621 bp, Zea mays
  Peptide Sequence Number=SeqID_51747
atgggagacttgtggaccaacataagggctgatctagcaaagatgcaagccacgctccagaaggttgagcaagggctgctgcaaatcaaggtagcagtgcaacatgagcagcagcagctggcgttgtccacacagctccagacgtcggcagctgtgggcatacaagctgttgctcgtggcttccttgcacgacggagagtgcgggagatgcgccgacagatgctcgaggcagccttggtgacggttgacctcggcacacgggggcacgacctcgccctgtcggacgaccatcagcaacggctccgggccgctatctccaagtgcgagcatggtacgtgtcccgagggcgacgaacttcaactctacggcagcggcggtaaggaaggcactccccttgtcatcggcaagggcgcactatttagcgccaccacattccgctaccggccgccacgagggcgcctccgctggttattgttgcgacctattccaggtgcccgtccttgtgctcccctttcgtctagatggcgtccatgggatccaggtggctgcacacgtgcaagtccaatgcgcggagggtgtccgccttatcttatggggtcaaaaaaatcagattcggaataa

SEQ ID NO: 8373 - DNA, 1248 bp, Zea mays
  Peptide Sequence Number=SeqID_51748
atgccccatttagcagcgggaggcagcgtcggaggcggcaccaaagccatcaaagccaaagagatggagccacatcacgactcgcttcccaccccaaagacaccacgggtagagcctgggggccaagcccctccaacagctgcacgaagaaagatgggatcggtagagccaacccgttgggagtttggaaacaaaaaacacaaactcttcagcggaaatgtcaccgagaggagagaccccagcacaagtcctcccggcaaataccggcacattccatccaagcaggcggtataccgtttcgagcactcactcagtctgggtgtgctcgagatgaagtcacaaggccatggaaaactaaggcaacgcgaagtggaaaccttgaaggcaaaggggcgtagagagctcggagtcgaaaggacgccgcgagtggaagagaagcaagtcatggctgctactcgaggggtgaacccctttttaaaggcagatttccctgctcgcgccccgaagcgtcacgggcaaggtctcccccgatgcgcaccagggtttccaccctatgacatgggggtcaggcctcacatgtcatacaagctggcccgaagcgcgaagaaggcgaattgtcgcacaaggagcgtgcaagtaccctgtggttatacgccctttcatcttcaccgcgacaaggaggcgaaccgccgcacaagaagcgtgcaaccgccccgcggttgtgcgtcccctcggcttcgccgaaaccagcggtccaacctctggcatgagggcccaggcccacatgtcatgcatctggcgcaccggtttctccatacagagaagtcgcaccgccacccgcaccagtaccacgcctcctcggggccgccacagaagacagagaagttaaattttcaaaaccaatgcagcgactcgaggcaccccgtgcatggcccaacaaagccattaagtgcggaggtcacgggtcagccagccgcggggacaggcgtggcagtcagccgccggaccccaccacgtgggcggctcaaggggcaccacgtggcgagaaaagatgatacgtcccgggaggtctcagttggaccgaacctccgcgagggagcaccggacccctgtacgcacaacccggacccccgattacggcccaggactcccaagcaagcatgccggccccccttggatggggtccacatccctccaagtaaggtccaggccacaacgaggtcccgggacagggagaccctggcataa

SEQ ID NO: 8374 - DNA, 402 bp, Zea mays
  Peptide Sequence Number=SeqID_51749
atgggcaagagcaagaagggtggtagttcttcgcatcactctggcgacaaacggaagcgtgagccgactcctccctcggaggacttcggtgactcggagtactcggaggaggagttctcctccgagtccgagggctcaccggcccctgccccggcgccgtctgacgactcagacgactcccaggggatcgccgcggaggtgtggacctacatccgggccgtcgagcgcaccgggctcgagggcttggatgagtcggagtactcctcggacgaggagaactcctcggactcgtccgaggagggcggcggcgatggcggtgacggtggcggcaaaggtggcagcggcgacggcggcgacagcagcaagggcagcagcaggggtagcaacaaggccagtggctag

SEQ ID NO: 8375 - DNA, 354 bp, Zea mays
  Peptide Sequence Number=SeqID_51750
atgtccggtgcaccagggggactcgactcaaactcgccaccttcggaaatttccaagggcgactcggctataattcaccggactgtccggtgtacaccggacagtgtccggtgcgccaagggaggtcggcctcaggaactcgccagcttcgggaaactccaacggctagtccactataattcaccggactgtccggtgtgcaccggactgtccggtgtgcaccggactgtccggtgcgactccggagcaacggctacctccgcgccaacggctctctgcgctgcaataaatgcgcgcgcagcgcgcgcagatggcaggcgtgcccatactggcacaccggacaaggaacagtag

SEQ ID NO: 8376 - DNA, 138 bp, Zea mays
  Peptide Sequence Number=SeqID_51751
atggagtggctagccgaggcgtcctctcgggccgggacccttgcggagggcctggccgtggccatcgggtctgcccagtccgcccaagccgtggcttcacagcagcgtgctcgggccgcagggttcgatggctcttaa

SEQ ID NO: 8377 - DNA, 51 bp, Zea mays
  Peptide Sequence Number=SeqID_51752
atggcggtggccagactccttccgggtgcgtttgagaaaagtggtttttaa

SEQ ID NO: 8378 - DNA, 468 bp, Zea mays
  Peptide Sequence Number=SeqID_51753
atgggcgcgattcaggtcaaggctccgtccactcaagggacactatctcgcctcgcccgagcccagcctcgggcaaaggcagccgacccaggaggattcacgtctcgcccgagggtcccctcaagcaacggacgcaccttcggctcgcccaaggcccaggcttcgcggagaagcaaccttggccagaccgccacgccaaccgaccggctcggactcagccttgacctcggacgacggactccgcctcgcccgaccccagggctcggactcaacctcgacctcggaagacggactccgcctcgcccgaccccagggctcggactcagcctcgacctcggacgacggtctccgcctcgcccgacccccaggctcggactcagcctcgaccttggaggagcctccgcctcgcccgacctcgggctcggaccaaccacgtcacaaggggggccatcattaccctactcctag

SEQ ID NO: 8379 - DNA, 600 bp, Zea mays
  Peptide Sequence Number=SeqID_51754
atggctgggagtcgaagctgtcttctcgctgggtgcccaaggtggataaatgtgggcaagctgaggatattggtgacaggtctggttcgatgggcactgttattctggaacctgtgcgcagccctgctacaaccacgtgcaagtttagacagagtgctgacacattcccctagagttatcccgcacaatctgggcactgtgttaccggccagtaccccagctgtcttcacaaatgaggttgctgttcacaatcgtttagccagtgcactggtggatggctctggcgtgctgctgggagctgctctgccggccagcacgtcacctgggctgctcgctggtttcttagagcctcattgcgtaggggaggttaatgatcctggtgttgatcagtttcagaattcaaaggcttctttttctaatgaccaggtggatttggttgagcagcttgcgaggcatttctctaggcctttgaccaaggaacaaatggaggcaattatggagctggcaactcaggggaaggaaaaggaagggatcaagaagaagggcagcaaggtgacgcccctcaaggctcctatcatcgaggcttctgagatgctctaa

SEQ ID NO: 8380 - DNA, 666 bp, Zea mays
  Peptide Sequence Number=SeqID_51755
atgagcggacgagtggagaacccagggggcgggtgtccggaaagacgtatcggcgagagtagaccgtcgaggccggcggcggtgcgcggtggccgcggtgagggccacgcgggactgctgggcagcggcagtcgtggcagcagccgcagtggcatcagcggtgcccgcggtgagggccacgcgggactgttgggcggcggcagccgcagcggcagccagggtgtagtggggaggaggcggtgtcgacattacggctcactgcttggggagaaaatccatgagggagccgccgagccgggggagggcggtgcctggaggtcgccgccgcacagcttcagctttagggtggcgcagacagagagtggacaggggcgggcggacgctggtcgcggccacgcgggtggcgggctgccggctccgcgacaggggcgagcggtcgccggtagcggccacacgtggagatggacggcgagcaccacgtcggtgagcgcgccggcagatccgcgtcgggttaacgagggccaccgccgtatgcttcgtgcggggctactgcagacggaggaggcgctggacgtcgtgccgagaagagggctggggtggcgactggctcatgggggtgacggccggcggcggctggaggtgacggccggcggcggctggaggtga

SEQ ID NO: 8381 - DNA, 1803 bp, Zea mays
  Peptide Sequence Number=SeqID_51756
atgcatgaggagagtgcgaagacatggttgccatccaagggggtcaccctccttttaaaggcgactctccccacttgcgtcctcagctatcgcggactgagtcatcaccaacacgctccaaggtcttccccctacgacacgggggctgggtcctacgcgtcatgcaagctggcccaggacaaaaggagccaaaccgctgcgcgcggagcgcacaactgcccagcagttacaagcactcctccacttttgcccataccagcgggtgaaagggcggaccgccatgcatgcggcatgcaaccgcaccaaggggcgcaccctttcgacttcgacgtgcccagcatggaggcccaggcccacacgtcatgtaaccggcgcgccagttactacgtgcgagaaactgcaccgccacatgcgccagtaacgcgccttctcgactgcggaaccggtgccgcgactcgaggcaaccctgcgcatggcccaacagtgccaaccgagcacatcggtcgcgggtcagtcagccgcgggagaaagcgcgacagtcgatatggccaaaagtgggctggcagtaatcgcggcggcaggcgggcggaagcagcagtcaagtcgacaagcgacacctttggcaggcgaagcgggcgacgcttcacctccgccataatgactgcgtcaaaaaagccgcctcagagcactcgggccccgcgcctactactgatcagaggttcgaaggctgacccctcagaaggtttcgacagccgcctcagagcactcggggtccgtgcccactactggtcagaggttcgaaggctggcccctcagaagggttcgacagccacctcagaccactcgggctccgcgcccactactgatcaggggttcgtaggctggcccctaaagggttcgacagacgccttagagcacgcagagcgagggatgactctaggtacgtctgatacatggccaaggctcgggctacgctctcgaggtaccctaggacatttccgagaccagcaggagcgattctgtaacgaaatcccatcagagggaggcatcgagccctcggaccctatcaaacgggatcgagtccgtcaaatcacctgcaggtcaaggctccgtccactcaagggacacgatctcgcctcgcccgagcccagcctcgggcaaaggcagccgacccaggaggattcacgtctcgcccgaggcctcgacctcggaagacggactccgcctcgcccgacaccagggctcaggctcaacctcgacgccggacgatggactccgcctcgcccgaccctagggctcggactcagcctcgacctcggacgacggactccgcctcgcccgaccccagggctcggacttgaaagtcgcctagagggggggcgcgcattaaatgcattgcagtcgaccgttgcacgcgaagtagtcgttgctccgctggctcaccggacagtcctgtgtgcaccggacatgtccggactcaacctcgacctcggaagacggactccgcctcgcccgaccccagggctcggactcagcctcgacctcggaagacggactccgcctcacccgaccccagggctcggactcagcctcgacctcggacaacggactcctcctcgcccgacccctgggctcggactcagcctcgacctcggaagacggactccgcctcgcccgaccctagggctcgaactcagcctcgacctcggacgacggtctccgcctcgcccgacccccgggctcggactcagcctcgacctcggaggagcctccgcctcgcccgacctcgaggtaaatgaataa

SEQ ID NO: 8382 - DNA, 973 bp, Zea mays
  Peptide Sequence Number=SeqID_51757
gggctgttccggcgcgccatggggaaccgcgccgccgggagaggccgcgcccgctggggaggggctgcgcagggggcgcggacgccggagaggggggaagagggctggccgcaagggagccaggcgggtggaggagagcgtggcagtggtgaaggagtcgacggacccgctgggcgacttccgccggtccatgctgcagatgatcgtggagaaggagatcgtgggcggcgcggagctccagcagctcctgcaccggttcctgtccctcaactcgccgcaccgccaccacctcatccttcgcgccttcgccgagatctgggaggaggtcttcgccggactcgaccgcgcgccggacttcctcgcctcctctcgccgcaggaagaagccgcagcacctgggcaacgcgcgccacgccagcgccgagctgcaaggggccgcgtccgtgcacagtcgcgccagtggaaggggctgccccgggagggaggaggagcctcccgggggcggcggcggcggctcagaggctcaggcttcgagctggtgccggtgcgaggggggcgcaagtgcggccgtctaccggggagagaggggcggacgccgccggtgtggaggcgcgggcgtcgccgggggagggcggggctggtgttggtgcgcgggggcgcaggtgcggcagcagcaccaccactcgccggcccaggtgctcaagaacttcagcagcatccacaacctccgcatggagctccccgtgtgcgacgtcggcaccaacgacgacgacgtcctcaggtggaaggttgtgttcggcagcacgctacagagctgcgtcatcctcggcggcgcaaaggtggaccaggccaccgcagggccccgtgcccccaccggcaccgacgccgatgccgaggacacgagtgacggcggcggtggtggtagcatcctggagtcctacaccaacggcgggctaaagctgcgcgtggtctag

SEQ ID NO: 8383 - DNA, 279 bp, Zea mays
  Peptide Sequence Number=SeqID_51758
atgtcggatccgaccgagaaggccacggcagcgacggatccggacaggaagacgcgatccagccaaagggacggcggatcgagccggaaaggtcgcagcaacgtggatccggccgggaaggccgtgacagcggcggatccaacgaaggcgatgaaggggtgggcgacggggcgggtccagccgggcagggccctgcgccggacctggcaaggggtgttggcagcaccggcgacgggagaagttcgaagagtggcgctactcggtgacggcgctggctag

SEQ ID NO: 8384 - DNA, 639 bp, Zea mays
  Peptide Sequence Number=SeqID_51759
atggcgacctccggcttgatggtgggggaaagcgagccgggctgcggcctctgcccctccctcagcctcaaggattttcatcaccaaggctggggaggggagagtgccgagttgggggtcggcccctgcgtgggcgggccgctcgcggcgccggcgtccgccacggcagctggaagaggttcttccgccggcgcggcgaccgggaccggccacgggctgacctccaacttctcggccttctgcccgtccttgcctcaaaatttttggcatgggcggggaacaaaaatcagcggcatcgaccctgaggtcagtgctgccgctgttcggccccccggagcagaagtcgtcgttgtcgccgctgccggagcaggtgacggcgcgccgttcgtcggccttccgttgctccgcaggccttccccctcggagtggggtcgttcgtgcctgcggagggggaaccggagttccgttcgtaatggcacttcgaatgccagtgttttttgttcattgcggctgtcggggcctgaacatgaatccctcggcccgttcggccttgttgtctggggctcctctagcttagttaaagagacccctcggctgcccttcggtggaccgaggccaggggtagcgatatcagtatga

SEQ ID NO: 8385 - DNA, 564 bp, Zea mays
  Peptide Sequence Number=SeqID_51760
atggagttctacaactcctcccataaagcgcctaaaatggtgacatcttcaagctggcccggggccaccgtggggcgaggccatcggggcctggggcgagtcgccgccgaggcgtggaggcacaggggcgcgggggcaagccactgggaggcgcgggcgcgcaaggccaccagggacgccggggcgtgggcgcggggccaccaggccaccggggcgagggcgcgcaggggcgtgggcgcgcaggggcgagggcgcgggggccgccggggtaggggcgtcgacggggagcagggggcacgcgacggggagaaggaaggggaggtgaaggggaagagagagagggagagggagagaggagggcgttacaaacctatctcccttaaaagaatctcgccctcgagattcaagtctcaagaatctgcattggcttctctatataggtcaagtcctcctggacctccaggccttccactgacaactgctcttctagcacacgcagacacttcttcaactgagacacgtggaagacatcatgcaccgctgacaatccctctggcagactga

SEQ ID NO: 8386 - DNA, 216 bp, Zea mays
  Peptide Sequence Number=SeqID_51761
atgagggtggaatgggacgcccttagcttaataattaaaggaaccggggaagtagttcgcttcgccgtcgtgctgttaatggggctcggtgtatgcggctcactctgccaaggtggtgacgaggatgatgtttatgactatggtaatggttgtccacgttgcaaccactacttaggagaagatgaagcagtggaggaagacttccaagagttctag

SEQ ID NO: 8387 - DNA, 279 bp, Zea mays
  Peptide Sequence Number=SeqID_51762
atgggcatggacatggatataaatttctacccgcgggataactcacgagctcgacgccgagcgggcctccgcggagacagtagccagatctggccattgagtgccccgacgctgagcgggcctctgcagagacagtatccctccctcctagctgatatgcagaggaagattgctgacgagttggatagaactccgatgcctgtagcactgtttggtgaggattgccaaggaggaagactagaacaggcaagagcagcgctaatcagtgacagagcatga

SEQ ID NO: 8388 - DNA, 345 bp, Zea mays
  Peptide Sequence Number=SeqID_51763
atgactgcattctccactaacttctggaattaccatattcctactggtctcatgaagatcaagaaaaagaagttcctatccctcaaacagggaggcacgtcagccggtcattttgccaactactgtcccaacagggctgcttataccactccagctccgatgaagcagggtcaggcctcaggaggtaagagtcaggccttatccgtcaatcatggtcaggtcaaccatgtggaagcagaagctgaatctagtgaacctgaaaacccggaagaggtgcaagttgaaggtgaagaagccagtgaagaagcaatgagcaacaagattagagtatatatattggagtag

SEQ ID NO: 8389 - DNA, 276 bp, Zea mays
  Peptide Sequence Number=SeqID_51764
atggccacggtggaagaaaggggcggaggggcttaccggcggcgagactgctctagtgaggtggtcgagggtgtacgggaggtcttgagagtcacgacgatgtgcgagcttggaaagctccacgggccactggcaaagctaaccgaggggcaggcgcaacttgggcgcggctggagcgagctggccgcggtggccgaggcttgggcagtggtggcgggcggtggcgcggcgtgctcgaggcaaaatccggtgaacttcgtcttaggcaagacctga

SEQ ID NO: 8390 - DNA, 533 bp, Zea mays
  Peptide Sequence Number=SeqID_51765
atgagagtacacgtaagcggcaaggccgaccgagccaagggactcctacccctccgggatacggatacctcactcatcaccttccgcgaaaacggggtcctaaaaacgacgagagtacacgtaagcggcaaggccgaccgagccgagggactcctacgcctctgggatacggatacctcactcatcaccttccgtgaaaaccagggtctccgcaaaagttccggcccgagcagacgcctcggctggccactccgtagcctcagccagatgtcccccgaggacctcagctcggctcacggcctcggcagcgtgactccggggttggtcccgctagtggacaacctggccaagctccagccaccgctgctgcacctcctcggccagggaagccacgtgctcccgggccgacgaagcctcttttcgagccaactccgcctttgtccacgccgacaccgctacctctgggtctccttcttcttttccttgtcgttgatcacgatccccctttcccttaggatccttctcttcgggcg

SEQ ID NO: 8391 - DNA, 801 bp, Zea mays
  Peptide Sequence Number=SeqID_51766
atgctggacgcctcggtccacctcaccggtgctcgtcgatccgctgtcgatgtggctagtgaggctctaggtggtttgagagcaattaacttaggggaaatagtagagcacctagaagaagaatttgaagtggaagtggaagaggatcccgttactacatctgaagcttctccaactgaagttgttgctgaaggtcctctcgaaggtcaaggcttcgtctacccaagggacgcgatctcgcctcgcccgagcccagccttgggcgggaactgtagtcccggacgaagttacatctcgcccgagggcctcctcaggcggtgggcgcaccctcggcacgcccgaggcccaactcggacaggcttcctcgagaagcaaccttggccaaatcacctcaccaaccgaccgtatcgcagacgcattcaatgcgggaatcgcctgacagctaatcctgacaccgtcgctcaccccactccgactatagtgtcagccacccgggcaaggttgacaacagcaagttcagcctcaggcgcaacaggaagctccgcctcgctcgaccttaggcctcgacctcggaaggaggtctccgcctcgcccgaccccagggctcagcctcaacctcggccttggaaggtggtctccgcctcgcccgaccccaaggctcagcctcaacctcggcctcgggaggaatcgcgtcctcacccgaccccggcctcggcctcaggagaagtcttcgcctcgcccgaccttgggctcggaccgaccgcgccacgggggatacatcattaccctacccctagctag

SEQ ID NO: 8392 - DNA, 73 bp, Zea mays
  Peptide Sequence Number=SeqID_51767
acgagcaagctatagaggatccagggcctcagctggtagagtctgctgagcaggagctcgttgaaggcaagtt

SEQ ID NO: 8393 - DNA, 2481 bp, Zea mays
  Peptide Sequence Number=SeqID_51768
atgaacaagacaccggcactcaaggtgccattacaaacggaactccggttctatctccgcgagtatgaacaacctccacaccggggagcctgcggggcgacaagctccgggcgactcgccaacgacctctgcagcagcagctatggcggcgctgacggcctcgacggtggggaagcttcctccagctgccaccacgtcagcaccgacggcggcgtccgcctctccaccaacgccgcaccggcgaacgcgggccgctccaaagcgcactggcaggacgcctcctccgcagagctggaggatggtttccaccaccagaagctggaagaggaggtggccaggcgacccgtgcgggaggtagagccccggctcacctcgctctccgccccggcaaggatgatgaacatccttgaagctgagggcgggaccaagatcgcagcccggcttgcttctccccacccaggagctggtggtcaccgtcttggggcagaagaagccaaaccgccgcgcgcggtgcatgcaactgcccagcggttacaagcattcctccactttcgcccataccagtgggtgaaagggcggacaaccatgcattcggcatgcaaccgagccaagtgggcgcaccccttcgactccaacgcgcccagcatggaggcccaggcccacacgtcatgcaaccggcgcgccggttgctacgtgcgagcaactgcaccgcccctcgcgccactaccgcgcctcctcgactgcggaaccagtaccgcgactcgaggcaaccctgcgtatgacccaacagtgccagccaggcgcatcggtcacgggccagcgggcggaagcagcggtcacatcgtcggccaagctcacgtcccctcatgggacagcgagagaaccctctcccacggcgtgaagacggcgcgcccgtattccgttcctcgaacggctcgcgcacgcgcaacggctgccccgcgaaccactcgccccgtcgcattaactccgcggcgggacaggcggcacctttggcaggagaagcgggcgacgcttcgccttcgccataacgaccgcgtcaaaaaagggaccgggaaaggggataccccgaaagggatccttctccgcgaaggaaacgggccccgagcccccctactgattagaggttcgaaggctggcccctcggaggggttcaacagccgcctcagagcgctcgggctccgcgcccactactggtcagaggttcgaaggccggcccctcggaagggttcaacgaccgcctcaggccactcgggctccacgcccactactgatcagggaatcccatcagagggaggcatcgagccctcggaccccgtcaaaaggggaccgggtccggcagatcacccgcagctggtaacccccatcagcacaaagctgcaaaggcctgatgggtgcgatcaagtcaaggatcggtccactcaagggacacgatctcgccttgcccgagcccagcctcgggcaagggcagccgaccccggaggatttacgtcttgcccgaggaccccctccagcaacggacacaccttcggctcgcccgaggcccagtcttcaccaagaagcaaccttggccaagtcgccacgccgacggaccgtatcgcaggagcatttaatgcaaagggcttggactcgggctcagccccggaagacgacgaactccgctttgcccgaccccagggctcggactcgggctcagccccggaagacgacgaactccgcttcgcccgaccccagggctcggactcgggatcaggcccggaagacgacgaactctgcttcgcccgaccccagggctcggactcgggctcagcctcgaaagacgacaaactccgcttcacccgaccccagggctcggactcgggctcaaccccggaagacgacgaactccgcttcgcccgaccccagggctcggactcgggctcagccccggaagacgacgaactccgcttcgcccgaccccagggctcggactcgggctcagccccagaagacgacaaactccgcttcgcccgaccccagggctcgaactcagccctggcctcagccgacattctccgcctcgcccgacccaggggcttggactcgacctcggccttggaagaccgactcgacctcgacctcggaggagcctccacctcgcccaacccagggctcggaccaaccacgtcacatgaggcgccatcattaccctaccccaagctaactcaggctacggggaacaagaccgacgtcccatctggctcgtcccggctccagcgctcctccgacggccacgacaccacacgaaccgggtgccaaaacctctccggctgccacgatggcatggccctcttacagagggttggccgcgcggggaaggacgggacggcgcccgcggacccccccgggttcgaaacgccgacaccgggggaggcggatggagaggcacgtcaggtgagcgaggggcaaagggcatacccatag

SEQ ID NO: 8394 - DNA, 789 bp, Zea mays
  Peptide Sequence Number=SeqID_51769
gggaagctcgatcccgcggtggcgctccgtcttttgtttggcgacaagccttgctcgtccctggcggcacaatcgaaggtgtgggtgcccaaggagcgcgcgtggtggggtgttgggcagtggggcattgttgccagcgtcagggagaatggtgggctggcgagggctgaggacactatggaagccatggctcttcacggactgaccaccttctgcggattccaccccttggagctgtccactcaccccattggcttgttccccgcggagaaggaggacgacccaatgtggaaggaccgagtggagcatgctaatgatatctgggctatctacccaggtcagactgctcacttgacggtgcggtgcacgaatgccctgtatcgtttgcaagtgatgcgtggagaggcaatgtcccatctaatggcattgttggaggcaaccaagatcactttggataacagagaggaacttgtggttgacttgtccactgagatggtggaaaaatacctacaggtggaacaattgtcaaatgagatccaagagcttgaggagctagtgggaacgagggagaacaccatcaaggttctcgaggatcagcttatcaacactcagcagcaacttgcggaggctaaccagcatctggatatgcatcaccaggagatccaggacatggaggccaacgaggatgccaatatcgagggaggagaggagcctgcctccagcttggacactgctggctcagggagaccaccttcccctgagtcgagcgttgcctcgtttgctcactag

SEQ ID NO: 8395 - DNA, 447 bp, Zea mays
  Peptide Sequence Number=SeqID_51770
atgaggtggaatggagagagttcaaggcagcttttagggggcaccatataccagcaggcattatggaccgcaagctcaatgagtttctggcactcactcagggaaaccggacaatgttacaacactgacgagaagaagagagacaggttcaggagggggctcaacactaagctccgtgaccgtctcaacatagtcagggccaacagctataatgagttagtcaacatggccatttctcaggaggactgtatcagagctcgtcaggcagagaagaagaggaagacccctgtggcaggaccttcagctcagccacagcgcttcaggatcgtgtctgacactcagaacagaggacctcagcagcagcaaggacgttgggtgatccgaccacagcagcagcagcaggcacccaaccgcacccagtttccagtgcagaggaacaatcaatag

SEQ ID NO: 8396 - DNA, 459 bp, Zea mays
  Peptide Sequence Number=SeqID_51771
atggggaagcctgtcccatcactcatcatgctcctactcagccgaggcaggatcccactcgactgtccaacccggtggcaagatggacggccaagtcactccagcaaccatgtcctccagagaacctgtaaacgttatgccacaagcaaggctgagtatactaatactcagctagacttacccggttacaatggatcaagcagtctcattagctgcgagaagcagacgattcgaatcgagtttttatccttgcaagtgaccgcacttgtacccaccataaccggaatgggagaccacgtctcaggtcgcgtgaggggcaaagtctactgccaggttcaatcaggtatccgcacattaatccttattccaatttcatctcgtagaccacgcatccccatggatctatgtccacagaccaagcatcaatatgatatgaaagtgcgtacaaccaattcctga

SEQ ID NO: 8397 - DNA, 882 bp, Zea mays
  Peptide Sequence Number=SeqID_51772
atgaagcatttgagagcaagtccccaacacaccttaagccagttctgcatacgtgagcaaattggtcgcatctctgaagccaggctcccgccgacctggctcatgcagccgggctactgggagaagccaaccaaacagacgtttacatgggtatgtgtcggtaccctgaaagaggggtaccccttactacagtgtgaaggcacggtgccccacgcggctatctctagtcacctggacctccatgggcgtaagccggacccctgggacgggtcccggacccctctttgtggggttcgggtcactcacagcaaggtcccgggattctgggacaaagaatatcgaggccttaatcaaggccaggcgggggtttggagccgacacgtgtccggaccataccgtgtacgcatctgctccccgcttaggcggagacccgatgctgtcacgtggcccattgcccgtgacgtaagccagcggacggagcctgacataaggtctctgggccgcgcggtcgctgcatttattgcggataaggcgcgccgcctgtctattccactggcaggtgatgtgtcgcctcggcatttaatgagccctatccattccactggcaggcgatgtgtcgcctcggcatttaatgtgccatgtccactccgctggcaggcggcgactaggccatcccgcagcggcgtgcctgtccattccattggcagacagtacgcccgtgctgcggcatacactgtgcccatcgtgactcgcgcgttaccgaggaagcagctgcgagatattaatactatatgcactacatacattatggcgctcggagatcttctgggcgatactggcattggatacttctataatgtattccctccgttttgcccctag

SEQ ID NO: 8398 - DNA, 1089 bp, Zea mays
  Peptide Sequence Number=SeqID_51773
atggcaatcgaaggattaaacgagtgcgagtacagcgaatatggtgatggtatatgtaccggatgcaatggacgaatcaacgccttccccagcgagaagcggctccgcacacgcggcagatatgttaaggaatgggtccgagttttctacgctactgtatggatcgaccctgatcaccagtggatgagattccgttttgagcgagaggatgtcactattcatgccagccagattcgccagctatttggatttcacgagtcatcgactcgtcttcacagcttatgctatggcacctctgaccctcctcgtcgccctcacggcggtgttgctcctggtacagctcacgtcgcggctctgttccgaccgcccttcttagatgggtcgcgacgctctccggcagacttcaccacagcagcaaagtttttatatcagcttatgggacggacacttctgccgcggatggggtacaaggaggctgccactcatatccagctttggctccttagtgccctggtctctcactcagagtttgatgttgtggatttccttatttgtgagatcgaggacatcgtactggatggtctgcgtgctcgtcgacagctgccttatgctcactacctgtgtcacatttttgctcagctgattcggcctccacagttccagggcacacttgaggcctcacgcctcctctttgggtcctaccgtccagcaactgaggatcctgtgccagcacctgctccagtatttgacactcaggccgaggatactgctcttcatcagttcaaagctcaagacgcagcagttgatgatgatgatgatgattttgggattccacctccgcctccgcctcctatgcctccacgcttacatgatcatgaggctgggagttctagtgctacccctgctgcccctcctgccattgaccctgctcttgcttcgatccttcagactcttactcagcagcaggctcacttggcagccgagcaggcccttcaggcaacggcccaccagcagttgtccgagagaatgctctcaatgtttcagacgattcaggacaggcaggattctcttcagcaacaacttctttag

SEQ ID NO: 8399 - DNA, 621 bp, Zea mays
  Peptide Sequence Number=SeqID_51774
atggctccagctcgagccgagccagagactctctgtttcctcccactctctggctctctgccctcctctggcgatcaagctctcctctccggcgaccacctcctcgccggcggccgtgctccagtggaagtgctcctgctcggcctcccttcccctctggtcaggatgccgcgcacgaagaatgtgtccgcgccagggggaggcgatgatgaggatcctcgtcgccccttcaggcaggccgagctaggagatcagccacagactccttctgatcagattgtgtaccgagttcgtcgcctcgcctcccggcctcgctcctccactcccaccactgcttccactccaccacccagtttgcctgctcccgtcacccctgatgcgccatccaccacctccactacaccagcttccactgctcctcctcccgctcccgtttccgctcctcctatcccatctgctcgcttccgggagcgtgatgagactgaggtgcgacctctggctgcagatcccaggttgtttgaccttcagcgtgctacaacggcacagagggaccctgctgcagttgacctcttcagcacccgtattcaggagtcctttttcagagctcagatgtctgcatag

SEQ ID NO: 8400 - DNA, 186 bp, Zea mays
  Peptide Sequence Number=SeqID_51775
atgctctcggtcaccgtggccagagctccttatttggtcttagatgcaattaggttgggggaaatgatcaagaacacgaggaagaagtggaagccactgaagagcaagtaccaccatccttggaaactcaggctgagagttgtttctacttcgatatttgtggatctgagcctgactcacccataa

SEQ ID NO: 8401 - DNA, 96 bp, Zea mays
  Peptide Sequence Number=SeqID_51776
atgctgcagtctttaacacaattgcttctcgacgcaatgacctgtagtgccaagacgtataaccttagaatcaatggtcacagcatcaatctgtga

SEQ ID NO: 8402 - DNA, 115 bp, Zea mays
  Peptide Sequence Number=SeqID_51777
acattgtggtacagatggcaatgagattgatggttttggttatgactatggtgctggcgaagatgaagctgtggaaggagacttccaggagttccaagactacgacgagttctag

SEQ ID NO: 8403 - DNA, 687 bp, Zea mays
  Peptide Sequence Number=SeqID_51778
atgaccgctgcgccatggaaggagatcgagaatcccctccgcgaccgccgcctctcttgggcctgcccgcccgtgagacagactctatcgccccctgccccacgccgctcgcgatgccccccctgcgattcccgggtcttcacgacccatggcgtgacgctctacgccgacggtggaggggagctacacgaccacctcctccgtccagtaagcttcaaagatccctgtgtgctcgatccagatcgtgttgttgagttgtgttggcccatgcgaatcgatgttgatgtgcttcgttttgccagagatccagacagtgctcgtgttcaccgctgccttcgtcgtctcctcaccggcggccttcgcggctccgatccgacctccctggatccacatgatgaggatttgagtgagaagataataaaattgtattggttatctgtggtttatgcagaccatgtattgggaaatgcacttgatgacaacccaattaaaggactaacaagtgtgctaagtgttgaacaggtgctcaatgcaaagctaacagggttcaacacaaagacaaccgatccaaccaaggatggaggcaagaagagcttcgaggtaccgagtgcatgggagaaggtcaaggagaccaggaacccaaagccaggggtgaagaagaagacttgcaaagtcaaggttgattga

SEQ ID NO: 8404 - DNA, 474 bp, Zea mays
  Peptide Sequence Number=SeqID_51779
atgggcaagagtaagaaaggtggtagttcttcgcatcgctctggtgacaaacgcaagtgtgagccgactcctctctcggaggacttcgacgactcggagtactcggaggaagagttctcctccgagtccgagggctctccggctcctgcctctcccccgacgtcgtctgatgattcagacgactcccaggggattgccgcggaggtctggacctacatccggtccgtcgagcgtgcctggctcacgggctcggatgagtcggagtactcctcagacgaggagaactcctcggactcgtccgaggagggcggtggtgacggcgatggtggtgacggcgacggaggcgacggcagcggtgacggcggcgaaggcgatggcgacggcggcggcaagggtggcagcggcgacggtggtgacagcagcaagggcggcagcaggggcagcagcaagggcagcaacaaggccagtggctag

SEQ ID NO: 8405 - DNA, 363 bp, Zea mays
  Peptide Sequence Number=SeqID_51780
atgaacaaagatagaaacttgcagaacggaattgggattcagatgggtcagattcaagcgatagaaatcaaggagaccgcggaaaaaaggagaaatgggaagagcaaggccgcggaggagaaaaggaacgtagatgacggattcgtgagtgtcctctattggaatagtgaccccacggcagatccgccaggaacagagctccttcggaggaagaaccccgatagatacaagatggagaaggtcggattcagagacaacagacatatggttacctgccaaaggcaactgactgttgggtcgatggggaggatgactgcgacggacgaactcgaagctttccgcttgggtgccatttcaacctag

SEQ ID NO: 8406 - DNA, 468 bp, Zea mays
  Peptide Sequence Number=SeqID_51781
atggatatatatatacccgcgggtacccgatacccgacgggtatgggcatgggtacaattttttgcccgcagctgccttccaggaagattctggaactggtcgacagccggccggtccaaggtgctgggttcgcgatatgtcagaacaggctcggcaactcgttcgcagttaaaggttcagtgggctggtctacctattttcctgttccacatcttacttatggtggtcttcgtgggcattttttcgtcggctcatcaagaggtgggcaaaatgtcacgagtacaaggcggggaaagaagactgctcaagaggaagcgcagcgagctgaagagagcgagtgcgtgggtgacgcaggctcttcaaatgaaggtccagtgattggcgtgataggctggctgcacgagatggcctatattatcttggcccagtttgcgtcgcctcatggtgtggtgtatgggtgtaattag

SEQ ID NO: 8407 - DNA, 1839 bp, Zea mays
  Peptide Sequence Number=SeqID_51782
atgccaagggcaacgaatgaccttaggccacatgttggtgatgttgatgttgctgcagtgccatgtggcttggggcgcgctattggcaacaaggtaccagcattacatgaacttgatccggtgttcaaaaagttttctttctcagagagtgttgcaagcttgttctcttctttaggctacaagaggcctgcagtcattcaatctatgtacatatttaagcaaccaggtattggtggtgaggtcgtgccgcaccaggataatacattcctttatacggaacctcgtacatgcacagggttgtggcttgcacttgaagatgcaacaatcaacaatggttgcctgtgggcaattccaggatcacataaaaagggtttggtgagacgtatggtcagagatgaaaatggtacacattttgatcggccctccccagtctatgatcagaaagaatttgtaccgctggaagtaaaatctggtgctttggtggttatacatggagatcttatacatcagagttttgagaacctttctccagcgtcaagacatgcattcagcttacatgtagtggatactgaaggatgtaaatggtccgaagacaactggcgcaagcaagctacgcctacaaaagaagcatctgctctttacgctgctcagtctcatctcgtgcaaggcgaaagttcgttcaatgctcatacctcactactggcaagggataagctttatgatggtgaacaacctctgagtgcagagttgggtgaagagcttggaaagactcagccactcagtgggtactattcctcactgcttacagatggcaaagacagaatagaagatgggaacaggtcgatggatagaagtaccagttacaaaagatccaatagaaattccctcaataaagatttgtctggttgctgtctcattgtaatgtatatccgttgtttttacatgtttcttgggcagcaaacggagaggaatttcgaattgtggcaggtgctgcctccacctgtaaattcgaccaaatcatctgctccacagaagccatcagcgcctcgaccggacagtgacataggtgatccacatatttttttatccttcaagtaccttagaaggctgcaattattttgtagatacttcatgtacacaacaaaagatttggaagagtggtcagaaaatcatgattcctttcgccacgagcagaatttggttcagtggactgagaaaaaacggccatatgttgaagcccttttcatcgtggtttatattcagtatgtgcactctcatttttgctcatatggccctgcagatttggttgtcctcaaatggtttcacctaatacgtttagtgtcgaaccaaatatttgccagagtcgtactggaagacgggatctcgctgacggaggtaggagggctgctgcaggagtgggatggcagggaagagccagcaggacagcatgccctggaggacagcctcgcatccgaggatctggggagcatgctggagtccatcaaagtggagagggccaaatattcactgatgtgctttcagttccctattggacgtatccaccgtcagctgaagcaaaggactcaggcaaatggtcgtgttggtgccaccacagccgtctactcagctgccatcctggagtacttgactgccgaggttctggagctggctgggaatgctagcaaggatctgaaggtgaagcgtatcacccctcgccatttgcagctagctattcatggagacgaggagctggacactctcaccaagggcaccatcgcaggcggaggtatcataccgcacattcacaagtccctggtcaacaagtcatccaaggagtga

SEQ ID NO: 8408 - DNA, 174 bp, Zea mays
  Peptide Sequence Number=SeqID_51783
atggagagtcatgatctccgggcagaaagggaatcacggcttgtgggtggcaatgagactgatggttttggttatgtctatggtgctggttgtcagcattgcaaccactgctcaggcgaagatgaagttgtggaaggagacttccaggagttccaagactacgacgagttctag

SEQ ID NO: 8409 - DNA, 276 bp, Zea mays
  Peptide Sequence Number=SeqID_51784
atggggctcggtgtatgcggctcgctctgccaaggtggcaatgagactgatggttttggttatgtctatggtgctggtaagtggtattctttccgtttggaaagggttgtcagcattgcaaccactgctcaggagaagatgaagctgtggaaggagacttccaggagttccaagactacgacgagttctaggtgtgggttagcggcaacccctagtcggctgcctgtgaaggccgcgtttatctacgtttcttttccgcactttgatttattgtaa

SEQ ID NO: 8410 - DNA, 799 bp, Zea mays
  Peptide Sequence Number=SeqID_51785
tgatctcgcctgcccgcgtgctcgtctcctgtcctacctggatcttttctctctcaagagcactaaggtcaagatggtgcagatgaagaatgtctcatcgttagggggaggaaacgacgaggaccctcctcgccccttccggcaggtcaaagggaagacagtttaccttgagcagcaggagggcagaaagaagagacatatggacaagccgctcgtgcagcacttgcaacgggagcatgacgagactgaggtgagactactggctgctaatccatgtctgctcgaccttcagcgtgccactgctgctcgggcacgtcggttcagacacattgctttgagagcgcaccgagttttggatctccctacgttcctgttagccatcggtgccgagtcagatgagtcgacgaccaggctccacagcttgtgctacgacacttcggatcctccccatcgccctcacggtggagttgcacccgctacagctcacgtcgctgccctgttcagacctccattcacagatgggtcacgacgctctcctgccgacttcactcctgcagcgaagtttctatatgagctgatgagacgtaccttgctacctaggatgggatacagggaggccaccactcacattcagttatggctacttggtgccttgatctcgcattcagagttcgacgtggttgatttccttatttatgagatcgaggacactgtgttgtatggtctctatgctcgccgtcagctgccatatgcccattacctctaccacatctttgcgcagctgatcaggcctccttag

SEQ ID NO: 8411 - DNA, 465 bp, Zea mays
  Peptide Sequence Number=SeqID_51786
atgtgcacgctcctctcccatggccgccgtggagcttccctgcgcgcgcccagcccccagcacgctggccccagctcggctctgccctctgctcggtcttctgctgcccctgttcatcagcgcgcgctacctcgtgctactggatcgtcagccagcaccttgccggcgtcctcccaacgctcctgcaccagacatcgaatcccggcgcgtcttcaacaccggtatgcgtcgctgtccgtcctcagctcctactctattgccggtggcagcagccatcgtagtgtctggtcgctgtcgaggctccccggccgatctttggtgctcagcctcgccgtgctgctagatcatagtgccatcagctccctatccggcttcaacctccggaactccgcgtcgtgctcgactctgcaagtcttcaactcggcatcattccgtacgttatcaagaaatctcgagagtgggtaa

SEQ ID NO: 8412 - DNA, 412 bp, Zea mays
  Peptide Sequence Number=SeqID_51787
gcgcactgaaccggacttcgccatggtacagtgctatggatcagaccgccagcgcggcaacctcaccgtcgacgaccgatcctccgccgcgattcatgtcaccggcgtctggattcgtgctcgtggcagatggataacatcgcgaggtaggaaaatcttcgccgccggtgagctggacgccagtcctgctagccgcggggcacctacagggttgtctgaggtccgttggacaaggacaactataggtgggcctaattacttgggagggtttcgtcacacgattcctcccgaggccgaggttgaggccaagccctggggtcgggcgaggcggagaccaccttccaaggccgaggttgaggccgagccctggggtcgggcgaggcggagacctcctcccgaggccgaggcctaa

SEQ ID NO: 8413 - DNA, 516 bp, Zea mays
  Peptide Sequence Number=SeqID_51788
atggtccaaatcataccaaactctgatgatgaacggatggctaatgcgagtcacggcgatgcggtggatgtgccaaggcacatggcgcaaggccgtgaagcggttgtctctggcgaactcatccgaatccgatgtggtctgctggaggattgcgaagcacggggaagcattcatacagtggttttgggtgtcagggatacactccgcaacgagcagcggatcgacggcatcgtccgaccatcggtgagaaattgtcgataccgtggttgcagtcttcaccctgctatgcgcctcctacgtgcgacacgatcatccgaatgcccaggaccatgcatagaggacataggggcagcgagcgcttggatagatctctgtgggatttctcagcgagcaggaccggccgcaccggcgcctaggttcgcaaggatggtcccagcttttatacacacaggcggatcaggactgcggacaatccctcctgcatgggcccaccaaatcacaactgacgcccactaa

SEQ ID NO: 8414 - DNA, 315 bp, Zea mays
  Peptide Sequence Number=SeqID_51789
atgaagtataggcatctttctctacgtcttcgtggagaaagccagaccagcattgttctaggtgaggttggagaagatcgcctcaacacccttattggtgtggtggcaggtcttaacaccgacctggacagtgctaccctagacctctctagggtacatttggagctagaggatgcacacgcaaggattgcagccctggaagctcaactggaaggaagggatccccttgaagcccaagtccctgccatggctttgtcccctccccgcaagaggatcagctatggagaaccaggatccatcaccatgctactataa

SEQ ID NO: 8415 - DNA, 417 bp, Zea mays
  Peptide Sequence Number=SeqID_51790
atgacaaaggaggccagtttcagaggccacaacacggctcacaatcttcaggacagcagcaaagctccttcaggacaccagctccaaggggctgaggcggttggggcttcagaggaagatatggggatcagcctaggaaaatctattgcttattctgtggtgaagacaagggccacacgacaagaatgtgtcagattaccattcaaaagcaaaaacagatcgccgaagcagaagcccggcagaatcagccgaagcatgtcttacatactgcttcgtgccactctccctacataccagagtatgtgggcaatcaacctgcagcttctgttgcttcggcaagccattcacaagcttcctggcctcagcttccaccgccaccaccattgcaacctgcttatacccgaagccagcagctag

SEQ ID NO: 8416 - DNA, 198 bp, Zea mays
  Peptide Sequence Number=SeqID_51791
atggagcacttccctaacctgctgcagaatgttctacatgcgttggaaacctacgtccgacccatgtatgagacaaggactctatcagctcatgagtctctaacaccgctatccacctacactgctttggtcaatgttggggcgaaggcaaagacgccacccttcgctcgtcgtctctcgctgcagtcgctggtttga

SEQ ID NO: 8417 - DNA, 1305 bp, Zea mays
  Peptide Sequence Number=SeqID_51792
atggcggcggcatgggcggggctggctgtgttgctcgtcgcggcgcagttggcatcagcggcgcaggtcacggcgccagcgttcctgtgggcgcccaaaaactacggagtgacatacctgaaaatgggtcgagcaattagtctgtggaaacacatgcaaacaatggtaaaggagaaagccccggtgatggtgccgctagaatcactgagtttcttgagcatatgcgcacaccctgacgacatccaaaggaggcagctgaatgagtcgacgggtctttcggtacatcaagtgaagttttggttcgagaataaaaggacccatgtaaagcatctgagtggaagagaagagaactacaggttgaaagcggagaatgaaatgctgaaggaggaaaacaataggcttattaggcaggaacagagcaatgctcctgcccctgctccctgtcccagatgcattaatgatgcggggcacctcctgctcgagaaagaagttgaacggctgaaggcgcttaaccagatgctgcagcaagagttgcagctacaaggcacggatggtgaaacacataggcactcatctctctcagatctcgtttactggagcatcaaagtgtcaactgcttataacccgctttgcttctaccagctctccttcacacgctcagagttttccatggcattcccctacgtttccacatcagtcaacgagaaactagaggactcgttgctatccagctttgccgagaactacaacaatggtttcggaagaaaccgcatcacctacacagacacgtgtaccggtcaagatctgaagaaataccacaacatggatgccatcaatgacctggtagtgtcaggggtagcgtcaaggagagtcaaccacccaagtggacaaaccgatataatcgtcttctgtagcggcgggttcgagaatccaggcactgcgaaatcaaaagggttaagaacgtgggtacctcgaacttattgtgcagtcctcgcagactcacgcaggacacataagttcgatgaccacgtggccccgtcgaacttaaccgtaagaacgtgggtgccgtcgaacttatgggaaaaaattcgacggcccccgtcgaacttaaaaacgcacgttcttaatgttaagttcgacggtacccacattcttaatgttaagttcgacggtacccactttcttaatgttaagttcgacggggccgtcgaacttacttctctaagttcgtccaaaaatcgtcgtcggctatattcgtcggtaaacccacgttcttatggtaagttcgacggcttattacattaa

SEQ ID NO: 8418 - DNA, 129 bp, Zea mays
  Peptide Sequence Number=SeqID_51793
atgcatatccttgagagtcttttactttgtcgggtgaagaagcaacaaacttttgttgcttctgttccaaggtggtaccgaaagaagagaatcaagactaaagctgcgggaggaagggccctccgttaa

SEQ ID NO: 8419 - DNA, 954 bp, Zea mays
  Peptide Sequence Number=SeqID_51794
atgtcgactgggaaacgccacctagatcagatcgaactcctcagtgttaggcggctcctcctgaaccacctgatcatctcctgtgggggggggggtgtgagacagcaaggtacagggttcctggctgaccgccatcgcagcaaaatcaaccagggacctccccgcactgacctctcccctactgcccttgcccctttcggggtctctttagcaaaagtctcgggcgaaggggtattgtgctatctgggccgttggatcaactctggacggcccggattagatctgacgacccctgaaccccgcaatcaattctggccatccgatccacccaacggccacgatttaatgcagcaggacgcgatcagagccgacggatcaaagatctacggtgtcggtttgatcgcgcgaacggaagggaaaggtgctatacgtcggtgggggcaaagcgaacgagatgagggttatctcaccagcgattccggtgcagaggcccctggagacgatatggtgcggctccgcggcggaatagcgacgccggcgagcaattcacgtcgtgcgggcgcccgtctccatggtccgagcgcgcgtatgggttccccggacacaggcgcgcgcgttgaccacacgccgaggccgagctttagcgcaaacaagcgcacaccggcggcggcactcccttcttctctggttggcgaggtaagcctggatttgggttatggcggcaggaagggtcaacgaggcaagggttacgaggtggagtcggtccgcctttgtagcctccgtgggacggagtcgtgccgcgatccagctgatgccgtggccatcaatctcgcgtgcaccgttcggcgaagccgtttgcgagaagataaacaggacttcgtcaatggtcactggcgcgaggaccccatctggcagcgagccagtgcgagcagaggcaatgcgcatacacgatag

SEQ ID NO: 8420 - DNA, 867 bp, Zea mays
  Peptide Sequence Number=SeqID_51795
atggcggtggcgcggctgtgcgcggcggccgccgccgcccggctgcagccggcgctcgccgcgggcgcccgcggcctcgggacggcggcggaggtggccgcgggcgccaggtgggagcccatgggggcgcgggagtactacgactaccgccgggccatgtacggcgacatcacgcacaaggccatcctcgtcgacgccgccggcacgctgctcgccccaaccgagcccatggcgcaggtgtacagaacgataggccagaagtatggggttgattactccgaggatgagattctgatgcggtatcgctgggcgtatgcgcagccttggggtagatcacgtctgaggtatgtcaatgatggaaggcccttctggcaatacatagtgagttcatctactggctgctcaaatctagagtactttgaggagctgtatcaatattacacaactgaaaaggcttggcatctctgcgatccagatgctggacgtgtttttgaggcattgaggaaggctggtgtcaaaacagctgtcgtgtccaattttgacactcgtcttcggccacttttacaggcactgaaatgtgaccgctggtttgatgcagttgctgtatctgctgaggtcgcagcagaaaagccaaaccctacaatattcttgaaggcctgcgagctgttaggagtgaaaccagaagaagtcgtgcatattggtgacgaccgtaggaatgatctatggggagctagggatgcaggctgtgatgcctggctttggggcagtgatgtttactccttcaaggaggttgcggagaggatcggggttgagcatatcaagttcatggatctaatgatacaatatgccaagtttaacgaccgatga

SEQ ID NO: 8421 - DNA, 516 bp, Zea mays
  Peptide Sequence Number=SeqID_51796
atgcttgccttttgcgtccgttttctggcgtcacaactgacagccgaggagtggctacagtgttcccctatctcccgcagcggcgagcgccaccctctcccctccctcgccgcactcttctctctcacgccagatgcaggggacgactgtagccgccccctcgcctccttcgcgcggacggtgccggccgcgccagactacggaaacttcgcgttccacctcgcttcgcctcgacccctccgcggacgggcgattttgcgcggcgacgcggcgacggatctcccgtcggccggtggagtcggccccggcccccctcggttgcgcagaagaggacgtcgagttcgtcaccacgcagagccgttcgcgaccgaagacgaagaggagtccaatccgcttccggcgacgaacgtcgcgaccgattggttgggttccatctccgacaatcgacggcgccatcagatccacaccgagacgcttcgattcggcgtgttggggcctagatctccccttcttaag

SEQ ID NO: 8422 - DNA, 723 bp, Zea mays
  Peptide Sequence Number=SeqID_51797
atgccgggcaacggcctgccgctgcggcggtggctggttgcctgcgtgcgcccggcgcggcgcgaggcgcggctggcggtgtggggcggcgggggcacgcggggagcggagcccgggcaggcggcgggggaggtgatggtggagcacctgggccacgtggtgtgccgcgccgacgggttccgcgtcggccgccccgcgccggtgctgggcatcggggaccggctcgaggccgggcgcacgtacctcgtcgtccctgccgaccgcctcccttgcgccgctggcgggacgggcggggtcgtcaccgcggcgtcgctcgcaacgctctcgcgcggcaagcggcaggcgccggctggaccacggaactgcccgttcgagtacgccaaggacggcgacgggcgcacggtgatcagggtcgcggaggagttcctcgtcagggccgtcgcgggtggcgccaacgccggcaggaatggaaagccgcgcggtggggacggcgacggcgacggcgacggctgcgggtcggccgcgctttgcagcacgcctgagctgaggaaacactatgagcagctggtgggcgccgtgaggggccgcccgtggtcgccgcggctggacaccatcgcggagcgcaaagggcggcggaggctcgccgacgtcgtaagccccgggaggctgtcgccggcacgattgctggggatgggcaaggacaaagggctcagcttcagctag

SEQ ID NO: 8423 - DNA, 231 bp, Zea mays
  Peptide Sequence Number=SeqID_51798
atgggcgcaccggacagtccggtgcacaccggacatgtccggtgtgccagccacgtcatcctatccgttgagattggagctggtcgaccgttggaggctttgtcctcatgtggcaccggacagtccggtgcagcaccggacagtccgagtcgaccgttgcgcgcagatgaccgttgctccgctggcacaccggacagtccggtgtacaccggacagtccggtgaattttag

SEQ ID NO: 8424 - DNA, 4639 bp, Zea mays
  Peptide Sequence Number=SeqID_51799
gtttttgcttgattatctaacctctggaacactcaactcacaggataagtttatggatagtgagaattctgacggcgacgacgatgatgaccttgaactctcagatgatgaagatgattttgttgagaatcggaggcaacctaaacgacttaagattgtagcaactaaaacttccaagggaggacagttgcccatgccagttcaaccaaaacgaggggtgtctcacagtgatgaagaatatttttcaggaaaagactcagatgttcccagcgattcggatttcaaacacataccgaaaaaacctgacaggttgcatcagaaacctgtgggccgcagtgatgttgccccaatcagttctcataatgagcttagaacttctggaaggaggaggacggtgaaaaagatctcatatgctgaaagcgaagaaagtgatgatagtgaggagaagtcaaataagcgacaaaagctcatcaaggaggaaccggaagaggaggatggagaaacaattgaaaaagttctgtggcatcaacccaagggtgtagcagaagaggcaataaggaatcaccggtcagctcaacctactgttgccagcctaacatcggactttgaccaacaatgggatgaattagagttctatataaaatggaaaggccagtcttacctgcattgtcaatggaagatactatcagagctccaaagtgttagtggattcaagaaggtaataaactacacgaaaagagtttctgaggaacagaggtacaagagggcactatcacgtgaagaggttgaggttgaacggatatttgctgatagggtcagcaaagctgatggagatgatctggttcccgaatatttagtaaaatggcaaggacttccttatgcagaatctacctgggaaaaagatacagatattgattttgctcaagatgcgattgatgaatataaggctcgtgaagctgcctcagctatacttgggaaaacagtagatttccaacgaaagaaaagcaaagctagtttgaggaggcttgatggtcagccagaatggctaaaagctggcaagcttcgtgattatcagctggaaggactaaactttctcgtcaatgggtggagaaacgatactaatgttatacttgctgatgaaatgggtctgggaaaaactatccaatctgtatccatgcttggcttccttcataatgctcaagaaatcaatggcccatttcttgtagtcgtgccactgtcaacattgtcgaactgggcaaaggaatttcggaagtggctgcccaacatgaatgttgttgtttatgttggcaaccgtgccagcagagagatgtgccagcagcatgaatttttttcagacaaaaaaggtgggcgtcatgtaaaattccacacgttgataactacgtacgaggtgattctcaaagacaaagcggttctttccaagataaaatggaactatcttatggttgatgaagcccaccggttgaaaaattgtgaagcgtcactgtatacaacccttttggaattcagcactaagaacaagctgcttatcacgggaacacctttgcagaacagtgtggaagagctttgggcattacttcatttccttgatccagtcaaattcaacagcaaggatagttttgttgagagatacaaaaatttgagttccttcaacgaaactgagctcgcgaatctgcataaggaattgaggcctcatattctacggcgggttataaaagatgttgagaagtctttacctcctaaaatcgagaggattctacgtgttgagatgtcacccctccagaaacagtactacaagtggattttagagcggaattttcagaatctgaataaaggtgttcgtgggaatcagttatttcagttggcacatcttggaattgaatgcaatttggctgtctcagatcttgattggaacaatgttactattctttctcacctactattgctaggtcaagcagttcctcacctgctattgctagctcaagaagtttctcacctggccgtgcattacctatcaaactggagcatgggcaaggccacaaggcaagacttggctgttgtatcacttcttaacattgttgttgaattgaagaaatgctgcaaccatccattcttgtttgaaagtgccgatcatggttatggtggagatagcatcggtgatcggaataaagttgaacgtattgttatgagtagtgggaaacttgtcttgttggacaaactattggtgagactgcgggagactaaccatcgtgtgcttatattctcacagggcctcttcagtgtggtttggtttggttcaaacccgcactacgggtgccctaagagagaaagcaaaaaaatggttaagatgttggacatccttgcagaatacctctctcttcggggatttcagtttcagaggcttgatggtagtacaagagcagatcttcgtcatcaagccatggaacactttaatgctcctggaagtgatgatttctgttttcttttatccacacgtgccggaggacttggtattaatctagcaactgcagatacagtgataatttttgattcagattggaatccacaaaatgatttgcaggttcttgatcacttggtcattcagaagctaaacgctgagggcaggcttgagaagaaagaatccaaaaaaggtggccccatatttgacaagaacgaactttcagctatcttgaggttcggtgcagaggaattgttcaaggaagacaagactgatgaagagaccaagaggaaccttgaaagtttggacattgatgaaattcttgagagagctgagaaagtcgagacaaagggtggtgaaggggaggaaggaaatgagcttcttagcgctttcaaggcatgtgatgtcgcaaacttttccagtgtcgaagatgatgcaacgttctggagtaggttaatacagccagatcctgcagatatagttcaggaaactttggcacctcgtgctgcacgaaataaaaagagctatattgaagatcctcagcttgacaaaaataataacaggaaaagacgggcagttgaaacacaagaaaagccaaggaggctttctggcagaactgtggaaacagttaattcattaccattggttgatggagcagtagctcaagtacgagagtggtcttttggtaatgttccaaagaaggacgcttctcgttttgtacgagcggtcaaaaaatttgggaatgcaacccagattggattaattgtggatgatgttggtggtgtacttgcgaaggtaccgcatgaagcgcagatagaactatttgatttgctggttgatggttgtcaggaagcagttaaggagaatacagacattaagggcacagttttggattttttcggtgtagctgtaaaggcctatgaattgctagctcgtgttgaagagcttcagttcttggcaaagcgaattgcacgttacaaagatccaatcaagcagtaccgcatccagctaccttataaaaagcctcagtggtcagcaagctgtggatggactgaaactgatgacgctagattgatggttggaattcattggtatggctacgggaattgggagaaaataaggttggatccaaagcttggcctgacaacaaaaattgcgccagcaacacttggagaaagggagacatttttaccacgtgctcccaacttggataaccgcgctagtgctctcctgcaaaaggagtatgctaagtttagcggtaagagcttaaaagtcaaaggaaacacccgccagacagtcaataacgacagtaatagtggagttcgatcaatgaggggccggcaaaaggatgtaccagaaaaagatgataataagccgaacaaagatgacattcagaagcgtagggtaatagtggaagctgaagcaagagaagaaggtgaaatttctgaatcggaggcagagaccaggtatcgtcaggacaaagaggagaagtggcttgaatggtgctctgaagttttagatgaggagcaggaaactttgaagcgcctggataggctgcagaatacaagtgtaaacctcccaaaggaaaaggttctttcaaggattcgcaagtatctcctgataattggggacaaaattggagaagttgtccggcaacacagtgaatcttataggcaatcccgcatggtcatgaggttatggaattatgttgccaccttttcaaacatgtctggggagcaactgcatgatctctatatgaaacttagtcaagaccaactggaaggtggagttggcccatctcatggtggcaatttcacatccattcctcccaataagggaggtaactcaaatcaacttcatccttcgagaaaccaaaggccaactaggtctctccagtacaattctgagtctttccataatgagagctctggaagttctgaagcctggaagcgtcgacggagagctgacacagataatcaatttgacacccagcctttgtgtcaacctccaattatgacaaatggaaataggttgcaggaatctagtagttctgcaggtattcttggttggggtccagttgaaattagacggtatggtaatgagaggccaaaacgtgctgttcatcctagtcatttccctactgggcatggacctttgctgtag

SEQ ID NO: 8425 - DNA, 432 bp, Zea mays
  Peptide Sequence Number=SeqID_51800
atgaacaagacaccggcattcaaggtgccatcacaaacggaactccggttccacctccgcaggtacgaacaaccccacacgattggggggcatgcggagcaacagaaggccgacagatggctcaccgtcgcccgctccagcagcagcgacgacgacgacttctgctccggggggtcgaacagcagcagcaatgacctcagggcggatgctgctgccataaggccctcgcccatgccctcactcgagaggcaaggacgagcagaaggccgtagagttggagggaccgggaaagggggataccccgaaagggatccttctctgcgaaggaaacgggcccgagcccccctactgatcagaggttcgaaggctggcccctcggaggggttcaacagccgcctcagagtgctcgggctccgcgcccactactggtga

SEQ ID NO: 8426 - DNA, 882 bp, Zea mays
  Peptide Sequence Number=SeqID_51801
atgcaacgatggggccgagggagacgaacaaaggcagcgccaccacctaacgtcgtcactgtattagccaacgtcgccggcctcaacattggaccaaaaggtcggggtaatgatggcgcctcctttgacgtggtcggtccgagccctgggttgggcgaggtggaggctcctccgaggtcgaggtcgagtctgtcttccaaggccgaggtcgagtccgagcccctgggtcgggcgaggcggagactgtcggctgaggccagggctgagtccgagccctggggttggcgaagcggaggtcgtcatcttcccggggctgagccccgagttccgaagccctggggtcggggcgaagcggagttcgtcgtcttcccggggctgagcccgagtccgagccctggggtcgggcgaagcggagttcgtcgtcttccggggctgagcccgtgtccgagccctggggtcgggcgaagcggagttcgtcgtctttccggggttgagcccgtgtccgagccctggggtcgggcgaagcggagttcgtcgtcttccggggctgagcccgtgtccgagccctggggtcgggcggagtggagtttcctatggcgcctgaggctggacttggctgctgtcagcctcactctgtcgagtggcacagcagtcagagcggcgcaggcggcgctgtcctcttgtcaggccagtcagtggagcggcgaagccacctttgcattaaatgcccctgcgattcggtcggttggcgtggtgatttggccaaggttgcttcttggtgaagactgggcctcgggcgagccgaagctttgtgctgatgggggttaccagctgagatttaggagtcttgagggtaccgctaattatggtccccgacagtag

SEQ ID NO: 8427 - DNA, 597 bp, Zea mays
  Peptide Sequence Number=SeqID_51802
atggaaggagggggtagcaacacgcccttctaccgcggcaacagcaccgcactcgccaccaacccttctgctgctgctgctgctgctgctgcggtattcctcttccttgctttctctagccccaatctccacgccggtaatctctgctatgctgtatggctctgcgccattgcttattccacccctctagctctaggggattcaagaaacagtggatcaagacatgagccgtttatgttaataataactgcaaaaggggtcactacggtttatctaagtgaaatctcgattctggtttcttttgtaaacttatgtgaaagagactctagaggcgagcagaatggggcacagaaaggggacagggaggctgccatcgatgccgagatagtgagggttaacgacctaccagctcatagttcctacgccatacaccgcatgaaggtgctaaacaaacttcgtcatctgctgtccatcaaggcaaggaaagagccagaggggagcaggattggaaggggcagcgcagggaaggaaagaggcagaaaaggcacaccaaaatctcaggcgggtacaggagctgggtacattgaagttgggtga

SEQ ID NO: 8428 - DNA, 1566 bp, Zea mays
  Peptide Sequence Number=SeqID_51803
atggccacctcccctgccgcctcgtcctcctccgctccgaccgcctccgcggtggctgcggctacgatggctgttgaggccaccgacgggccggtgctcagcgtagtatcgaagcgtctccgcgcactgcggaagaagtacaaccgaatcacgcagatggaggagtcgctcgccgccggcaagacgctcaaccgagagcaggaggaggttctccgctccaagcccgtcgtcgccgctctgatcgacgagctcgagcgcctccgccctccgctcgcctccgccctcgcggaggagctctcctcccgccccgcccccgccccctccgccgcttcctcctccgactcagattcgtcagtccaggacttgcttgcgctcgtctacttcggctccctctttgacgtcaagcagcaaagcgacttcgtctctttggtttacacgcgcgaactcgagcggagcagctgcctcacttatgactacgtcggggatgatccggaggacagtctcgcggagaccgatctgaacgcggtttctgcccttgcctccctcgccgcgttgcgccctcctgctgcagccggagtctcgcaccgtgacgcccttcaggcttgtgctcatcacgcccgcctctggctctgccgtgcggatgaacccatccatcctgactccaccatcacatatgctggggtgagggcaaagctggataggatcatggcatcgggctacttcacagcgcagctagaaatgaggacaccattggatctggctgctgcagtggcaagttttggagctggaggtgtgcaggtgcaagagagcatggttgtgtcacctcaggcaccggaagcagtggaggagagccaggctgttgaaggacacaaggagctggcgggcagtgtgctggcgttagaggcggccggcgctggaggagggagaggggagggggcgctcgggcgctggaggaggtggtctgcggttggcgctattggggagtgtcgtggaggtggcggacctggcagtgctggaggatggagggtgcagaggagaagagggaggcacgaggcggtggacgggcagagctggcggcgctggaggagggaggcgagcgacggcgtagcaggagctggacgagaggaggaggcgggctacgctgcacaggaggatgaagtcctggtgcatccaactgatgaagttcctccagctgagacagagcaggagcaggagacatttgatgctgatgtgaaggatcaggagcaaaaggaccaacaattcatccagcggcggtcttaccagaaccagcgtggtggtggtcgtggtggcagcaggagaggctatcctaatggtcgtggaggacgtggtggccgaggtggcgggtaccagaatggccgtggtggataccagaatggtcgtggcggtgctggcgggtactactacgaatctggatactaccagccgaggaactacaacagaggccggggtggtcgctccggcggtggcaactcttactacaacagccatggtggaggtgcacaggggcatcatcctgggagtgttgagctgggcgcaaacgcctag

SEQ ID NO: 8429 - DNA, 648 bp, Zea mays
  Peptide Sequence Number=SeqID_51804
atggctgaaaggtaccaactcccacggagttgcgttcctccaacgacaaggcggaaagacggcggatatcccccatccggaggcttggaaggtggaaagacacgatgcataagggagcgcgaagacaggtcgccttccaaagggggtcaccctccttttaaaggcgactctccctacttgcgcccccaaccgtcgcgggctgagccttctccaacacactccaaggtcctcccctgcggcgcgggggctaggtcccgcacgtcatgcaagccggctcagagcagaagaagccaaaccgccgtgcgcggtgcgtacaaccgcccggcggagaagcgggcgacgcttcgccttcgccataatgaccgcgtcaaaaagggaccgggaaagggggataccccgaaaaggatccttccccgtggaggaaccaggctccgagcctccctactgattagaggttcgaaggctggccccccggaagggttcgacagccgcctcagatcgcgtgggccctacacccactactggtcagaggttcgaaggccggcccctcggaagggttcaacggccgcctcaggctactcgggctccgcgcccattactgatcaggggttcgaaggctggcccccgaagggttcacagccgccttag

SEQ ID NO: 8430 - DNA, 1290 bp, Zea mays
  Peptide Sequence Number=SeqID_51805
atggcgcctcctgttgacgtggctggtctgcgccctaggttgggcgatgtggaagctcctccgaagccgaggtcgagtctgtcttccgtggtcgaagtcgggtccgagccccaggttcgggcgaggcggagatcgccggctgatgccgaggcggagtccgagccctggggtcgggcgaagcggagttcgtcatcttctggggccgagcccaagtctgagccctgggtcgggcgaggcggagatcgtcgtcttctgggacttagcccgagtccgagccctgggtcgggcggagttcgccgtcttccgggacttagcccgagtccgagccctgggtcgggcggagttcaccgtcttccgagacttagcccgagtccgagccctgggtcgggcggagttcgccgtcttccgggacttagcccgagtccgagccctgggtcgggcggagttcgccgtcttccgggacttagcccgagtccgagccctgggtcgggcggagtttgccgtcttccgggacttagcccgagtccgagccctgggtcgggcggagcggagcttcctatggtgccttcggcagggcctgactgcctgtcagtctcactctgtcaagtggcaccgcactcggagtggcgcaggcggcgctgtccttctgtcaggccgctttatgctgatgggggttaccagctgagaattaggagccttgaaggggaccagcctttatcggttgcgttttgttccggtgggtgcgcgcgagcgcacccgccgggtgtagcccccgaggcctcggaggagtggtttcactcctccgaggtcttaatgcctcgcgtaatgcttcggctggtctggtcgtccctcatgcgagctggccgtagcccgggtgtacggtcgggtcccaagttctcgggctggtatgttgacgctgtcaacggttcggccgggtttgcgagagcagcccccgagcctctgcacagggcgagaggacgatcagggacagactcgacttttttatatacgcccctgcgtcgcctttccgcaaggaggagggggaaagcgccatgttgccctcgatgggcgccgaacatggtgtctccggtgagctgcaagcgggtaatccgagtggacgtccgtgccccgttcgttgggggtcggctaggggcccaggggcacgcccaaaagtacatgcgggtgatctgccggacccggtcccctggcgacggggtccgagggctcgatgcctccctccgatgggattccgttacaagatcattcccgctggtctcggaaatgtcctag

SEQ ID NO: 8431 - DNA, 342 bp, Zea mays
  Peptide Sequence Number=SeqID_51806
atggaattaccactagacgcgcagagcagcggaagacgtctcgatgtagacgaacgcgtcgagcagtgtcgtgcagtcgtcggcgtccttcacgtcctcgcacggttcgtccaagtgctccagatgcagcacctccgaggaaaagaaaaggattggaaaagagttggctatgtacagccaactgctgctcagtctgggtgcaccggactatccggtggtgcaccggacagtgtctggtgcgccaggctggactctggtgaactggccactctcgggaattcgtcggcggcgtacgactataattcaccggactatccggtggtgcaccgggctgtccggtga

SEQ ID NO: 8432 - DNA, 129 bp, Zea mays
  Peptide Sequence Number=SeqID_51807
atgggtgaatctagggggtttattgggtcagtgtcggggaccataattaggggtaccctcaaggctcctaaatctcagctggtaacccccatcagcacaaagctgcaaaggcctgatgggtgcgattaa

SEQ ID NO: 8433 - DNA, 408 bp, Zea mays
  Peptide Sequence Number=SeqID_51808
atggacgaggaaacaatatgcaaaaatcaggtggaacaatcacttctcatcacaggttttggatatgaacatgatgatgcctggatgaccaatataaatttgtttaaggaatttactgtcctaagcagggcagacaaccttctctttaactttgaagaacccttgaaagattatgtgcgtgctgtacaatctataaaattgaaaggagacagtgaggatgctactaagaagtttgaacacatagttagactaatgaatgaagagctcgctcattttcaggagcaaaagacagctgatactggactcgcattccatgaatttgccaagggtcaggctaagctagctaaagacattgcggatgcatggcgcaacgtcctcccaaagctcgaagcttgttccacatcataa

SEQ ID NO: 8434 - DNA, 408 bp, Zea mays
  Peptide Sequence Number=SeqID_51809
atgatgatcgtgtcaaaaaaggaaaacagcgccgctcgcccctctctgtctgctgtgccacccgccagggtgaggctgacaacagctgagtccagcctcaggcgcaacaggaagctccgcctcacccgaccctgggcctcggccgcctcgctcgaccctagggctcggcctcaacctcgacctcggaagggggtctccgcctcgcccgaccccaggggtcggcccccgcctcagcctcggaaggtggtctccgcctcacccgaccctagggctcggcctcgacctcgacctcgggaggaatcacgtcctcgcctgacctcggcctcaggaggcgtctccgcctcgcccgaccttgggctcggaccgatcgcgccacagaggatacatcattaccctacccctagctag

SEQ ID NO: 8435 - DNA, 132 bp, Zea mays
  Peptide Sequence Number=SeqID_51810
atgtcggtccttctgctcctgttgctgaggaagtgccagtgcctgaatttactgaagctgatcccaatgggtgtgacccatctgacgctgatcccaatgggaagaaaaacgtgcccttgttacttctcgtga

SEQ ID NO: 8436 - DNA, 273 bp, Zea mays
  Peptide Sequence Number=SeqID_51811
atgtcggaggagcgacctgtggaagaagtggtcatagcaggttttgctgcaacacccgaaggcaccaaggacttgatgttgtcatgtccctgtgatgccgaaggtgcggtgctgcgtgtgccgctggtggaggaaggcccacgaaagaacgaccttgcgatttattgggcccttgggcctttcgtgaggtctttcatctctttagtggacccgggggatatctatcccccacaagcccccgatctttgggttgatttagagagattggcatga

SEQ ID NO: 8437 - DNA, 258 bp, Zea mays
  Peptide Sequence Number=SeqID_51812
atggatgagcttttcaccaagctcaagtccatagagattgaccaccagactcgagccaagattgagaaccctgtgcacccaccatggtcctggagtaggtggagagcctcagggatgaggagcggcacttctggccagtcggttcacaagattctacaacaaccaccagaactggcggcatggcagatcgaaggatggaagcttcaactgcagcaaactgttgtacctaaggatggcaccgtcgctcctgcttcctaa

SEQ ID NO: 8438 - DNA, 573 bp, Zea mays
  Peptide Sequence Number=SeqID_51813
atgccgtggagacggcgcaaggacgacgccgtggagcgggcccccatgccagaggaaggggggctgacggcgtggcacggtgacgggggggagagggagccggccggggttcgactgccggtggaatcccgcggcggttctctgccgggagtccagttttgcgacggggaagtggtggcgaggcacgggcggggagatgggaggacggagctcaccggagcgaaaggagggcgcggcggcgctggctcaattgagctcggggaaggggagggcgaggtagccgaggctggtgtggggaaggcggagctcgggcggtcctttttatacgcgcccggggaggggaaagggatgagggacgacaagcgccgacgagctcgccatgatggtggtgatggcgcaaacggcgacgggacggctcgggcaggcggggaggtgaagggacggctcgggcacagtgagcgggggcgcatggcgccaatcgggctggtgagcgcgttaatggcgaggagacggggcgggtggtggttagcggcgaacgcgccggtgaagacatgggcgggacgaggggtctga

SEQ ID NO: 8439 - DNA, 1254 bp, Zea mays
  Peptide Sequence Number=SeqID_51814
cccgggcccgctcgtcagtcccctcgtctcgcccatgtcttcaccggcgtgttcgccaccgaccacagcccgccccgtctgctcgccattaacgcgctcaccagcccgcgcttgttgtccctcctccctttcccctccccgggcgcctataaaaaggaccgcccgagctccgccttccccacaccagcctcggctacctccccttccccgagctcaattgagccagcgccgtcgcgccctcccttcgctcttgtgagctccgtcctcccctctctagtagcgtttggtcaaattgctctagctcttaaggtccgccactctgtcacaagcctagcgcacacctgctcgtcactgattgcgcccggtggcctcgccggcgacttcaccaccgcgagcgcccgccacccgccgtggaccggccaccccaggcctccaccggtcaaattgaccccacctctgtggccccctacccccgcccgtgcctcgccaccacttccccgtcgcaaaaccggactcccggcagagaaccgccgcgggattccaccggcggtcgaacctcggccggctccctcccccccatcactgtgccacgcagtcaccccccttcctctagcatgtgggcccatgccactgcgccatccctgcgtcgtccccacgccgtctccccgctggtgggccgcctgcccacgcggccgcgcgcacgcccgcgcccgaccaggccgaaatctccaccatatgaagcatatggaaggctcttgggtcattagaacatcctactgctcagaggaggaaggattccctcacctcttacggagttgcacgctacacatggggattcgcaagaagccgaaatatgtctggaaggaataccgcgaaaacggagttgagaacaacaaaaatacccccacctggaggaaaagacttcaggccctgtcagggagagatcctattgaggatgaccccaccatcgtctacatggccgggtacctccacactcttgataaccactacgatgaccttttctcccactgcacccacctaaactcccgggtggaaagcttagagcagcaggtcaaggaacttaagaaggagaaggcatccctccaagagtgtctcgatatagtggaaggcgaggaggccaacactcgtgaagcctaccgaaccctgaagatggattatgataagaagctaaagaagctcgccccccacgaagaaaatccaaaagaaaaccaagagccaaggatgccaggctga

SEQ ID NO: 8440 - DNA, 1461 bp, Zea mays
  Peptide Sequence Number=SeqID_51815
atggctgccccgcgaaccactcgccccatcgcattaactccgcggcgggacaggcggcacctttggcaggagaggcgagcgacgcttcaccttcgccataatgaccgcgtcaaaaaagcagggaccgggaaaggggataccccgaaagggatccttctccgcgaaggaaacgggccccgagccccccaactgatcagagattcgaaggctggcccctcggaggggttcaacagccgcctcagagcgctcgggctccgcgcccactactggtcagaggttcgagggccggcccttcggaagggttcaacggccgcctcaggccactcgggctccgcgcccactactgatcagggcgggaacgatcttgtaacggaatcccatcagagggaggcatcgagccctcggaccccgtcgaaaggggaccgggtctggcagatcacccgcagctcattggagacaccatgttcggcgccctccaagggcaacatggcgcttcccccccctcctccttgcggaaaggcgacgcaggggcccgaccccggagggtttacgtctcgcccgaggaccccctacggcaacgaacgcgccttcggctcgcccgaggcccagtcttcaccaagaagcaaccttggccaaatcgccacgccaaccgaccaaatcgcaggggcatttaatgcaaagggctcggactcgggctcagccccggaagacgacgaactccgcttcgcccgaccccagggctcggacttgggctcatccccggaagacgacgaactccgcttcgcccgaccccagggctcggactcgggctcagccccggaagacgacgaactccgcttcgcccgaccccagggctcggactcgggctcagccccggaagacgacgaacttcgcttcgcccgaccccaaggctcggacttgggctcagccccggaagacgaagaactccgcttcgcccgaccccagggctcggactcgggcttagccctggaagacgacgaactccgcttcgcccgaccccagggctcggacttgggctcagccccggaagacgacgaactccgcttcgcccgaccccagggctcggactcgggctcagccccggaagacgacgaactccgcttcgcccgaccccagggctcggactcgggctcagctccggaagacaacgaactccgcttcgcccgaccccagggctcggactcagccctggcctcagccgacggtctccgcctcgcccgacccaggggctcggacttgacctcggcctcgaaagacagactcgacctcgacctcggaggagccaccacctcgcccaacctagggctcggaccgaccacatcacaggaggcgccatcattaccctaccccaagctgactcaggctacggggaacaagactggcgtcccatctggctcgccccgccaaacaagtaatgatggcgccccgcacgctaaatga

SEQ ID NO: 8441 - DNA, 984 bp, Zea mays
  Peptide Sequence Number=SeqID_51816
atggcggctggtcggcgcaggcaccttctgcccatggcgctcggcacccatctggcaggaacaacgccctccctcctctctgttttccttgagctcaagcgcaggaagccgtgccctccttctccacaacactcggcgccttcctccctagcctccctagcgcatggggcagaagcctccatggccgggctcctctggtgcaggcgcccaagcagtgcccttctctgctctgaggacgaagcccgatgctccagcgcccccctgctcctctctaccgagccccctttctccacggcgtccagcagcagggagcagtcgcttccattttcccagcatcagaagctcccactcccatggcgcgcgcccctgctcatgccttcatggtcatcaacaccgtcgacctcgcgcagcagccgcgaagccacatgggttccctctgcgtcgcgccctcggcgtgctcgtcgaaatgacgcagcaagcagcagccatgagatcccgtccgtgtcgccagcgtcgacccgatctgcgcagcggtgccggtccaccgcagcagccccatgctgcgccgttgatctgcgcggttcgactgtcttcgcgtctcgcttcgccgaatctgcgcagcgccgacgtgccatcgtgggaacccgtgcccttgttgtcgtcacgcctcgcgcgttgctcatcggcaaagagcccagtccgatggcacgcatgtgcaactccaatcggaacaacccgagagtcgtcaatgttggcgacaaccatgaggcccccctgcttaacgatggacagcgcgatgcagttgctctggaccgcgtccaagtggtggcttcgcgggagcttgtcgtacacagcggtgcatgcgaccacgtaggactgcttctagaggtcgaactgacagtcgccaagcttcttctcgtcatcgataagcgacaccaacgtgagtgtctcctgctcatggtgtttgtttggggtttcaagtaa

SEQ ID NO: 8442 - DNA, 393 bp, Zea mays
  Peptide Sequence Number=SeqID_51817
atgtcggatgaagatagagatagagaaagagatagagatagagtctggtttgcacggagagaaaggttggcgcaggtttcaaatgcaagtattgtagagaaacaaagagcggagggggtgataagacaaaggaaaaaaaagagttctaggttcaggcagcagttgagggtagatgaggcagcacgaacccattttggggacgatgagtatgaggatgaacttaaagcgactctgtatcagtcacgtgtggagcacgaatttagtcagagggctggtgcaaggtatgataggggtggtggatcctccagccagagggtacctgaacgtgttagagactacaatcttgctcaagcctctggactaaggcaacagaggatagatattggtccctag

SEQ ID NO: 8443 - DNA, 636 bp, Zea mays
  Peptide Sequence Number=SeqID_51818
atgaagctgtggaaggagacttccaggagttccaagattacgacgagttctaggtgtggggtcttcgagttgaattctttgccgtatggcggttaccctggggaggacgtcatcgatcgccgcgggaaaaaaccagcggctgtgactgaggatgaccccgcgctggaggccgccccagccactaaaaagaggaagctaggtactacggtgggagaactgggggtctccgatagctttgctatggagttgatgggaacatgcgcggccctagggggaaggatgtctttgcccgagctccgggagtcttcggcgcggatgctggaggttaccgggggtcgatggcccaaggacgttcctatcccccgcgcggccgccgaagacttttttacgtctcgcatggctcgtgacttgagagtgtttccttacggacgaaatattgctgctgttgtgtcggcggtgatgaacaaggatcgccaggaagctgcgcagaagcgccgggcggtcatcaggctccccgaagctaggccgaagagggcgtgggggactgcgaaggctaccgcccccggcggtagccagccgacccctggcggcgaagcccggccgcccctgggtccagcagggtggccgagatcttga

SEQ ID NO: 8444 - DNA, 2223 bp, Zea mays
  Peptide Sequence Number=SeqID_51819
atggcgcggtgctctacgtgcgatcgtttctcgaggttcatggagacgacggacgagttcgcggtgccgccacgtcccgcgctcgtgcacccggacgccgacggcgttcgaaccccgtcggccctcggcccgctctcccccgaggacccgccacccgcgttcatggagcgagattggcgacacggcggcgataacacggccgcgtatccagggtgctcgccgttccagccgtccgcggccgggcgcccggtctcgatcagcctgccggcgtcgccgacaggcgggttcgacatctccagcaggacggaggcggagctgcagcgggatgccgccgccgtcacggacgcgccgccgccgaggatgatgatgctgccgccgttcgccccggcgccggccatggctctcgagcagcctggcaaggtggtgttccggtcccagccgatccccgctgcgccgccggtaggtgacgggggccacgacgacgagttcggccgcagcgcgccggcggccatggccctcgagcagcctggcaaggtggtgttccggtcccagccgatcatccccggtgcgcctccggagggcgacggcgccgcccggggccacgacgacttcggccggagcgcgccggcggccaagacgcgcagggacagccgggacaccagctacgactcgttcaagacgtggtcgggcaagctggagaagcagatcgccacgcacctgctcggcagcagcctgcagcagcaaccggagcacggggaggagccggaggaagacgacgcggcgagcgaccgccgcaactcctccatgcccaaagtgcagcgcttcttcgccgcgctggaaggccccgagctcgacaagctgagggtactgacgccgatgacaccatccatacgttatactagtactactagtgctgttgacgcgaacgccaggtggcgtgcgtttgttagcttcgtcgccgccgtgctgctgtggccggcgcacgtgcctttagctgtcgctgatgccgatgaagaagctgacgtcgttttgtcgtactggtggcagtcctcggaggagctgatcctgccgtccgacaagacgtggccgttcctgctccgtttcccggtgtcggcgttcggcatgtgcctgggcatgagcagccaggcgatcctgtggaagcggatcgccatctcggcgtcgacgcggttcctgcacatcacggtgaagatcaacctggtgctgtggtgcgcctcggtggcgctgatggcggccgtgtcggcgctgtacggctgcaagctggtgttgtacttcgaggcggtgcggcgggagtactaccacccgatccgcgtgaacttcttcttcgcgccgtggatcgcgtgcctgttcctggcgatcggcgtgccggacgtggtggcggccacgctcccgcactggctgtggtacgtgctgatggcgccgatcgtgtgcctggagctgaagatctacgggcagtggatctcgggcgggcagcggcggctgtcccgcgtggcgaacccgtcgaaccacctgtccatcgtgggcaacttcgtgggcgcgctgctgggcggcatcatggggctgaaggagggtcccatgttcttcttctccgtggggctggcgcactacatggtgctgttcgtgacgctgtaccagcggctgccgacgagcgagacgctgccccgcgacctgcacccggtgttcttcctgttcgtggcggcgcccagcgtggcgtgcctggcgtgggcgcgcatcaccggcgagttcggctacggctcccgcgtcgcctacttcatcgccatgttcctgtacgcgtcgctggccgtgcgcatcaacctgttcagagggttcagcttctcgctggcgtggtgggcctacacgttccccatgaccagcgcggcgatcgcctccatccgctactcgtccgaggtgaagaacgccttcacgcagtgcatgtgcatcgggctggccgcggcggccacgctggccgtggcggcgctcttcctcgccacgctgctgcacgcggtggtgtaccgggacctcttccccaacgacatctccatcgccatcacggagcgccggcgcagcaagcccctcgtcggggaaaagatgctgctccgcctgcgcagcggcaagaaggtgcagcaggcgctctccaccgcccccgccgacgccgccgcggacctggaggccgcgcgcgccgccacgacgacgtcgtacacgtag

SEQ ID NO: 8445 - DNA, 264 bp, Zea mays
  Peptide Sequence Number=SeqID_51820
atgtcgataggggggcaactgggcaatgggcgggcggcggattcgtacctgctgaggcacgcgggcatcggtgcgtccagaaaatggcgatcggtggcgcatggctccgtccagtcgctctctgaccggcaaccggagccatcttgtgtcagggaagagctccgtcgttttcaaatgaattcccttggagctgtgccactccagaaattagtctcagaggtcccgtttatttcctttcgttttgaggaattagaattttactag

SEQ ID NO: 8446 - DNA, 390 bp, Zea mays
  Peptide Sequence Number=SeqID_51821
atgatggaaaatttcggcagcaaaacagtgcaaatagcaatgaatgctgtggtaacttcacaactacttgtcagtttatatagtgctgcagtggaccgcaaggatcaaacagtaactctgcaaggtgggaccgacacgcgctcggaagtcggatcgtttctccgcaacgagctcagggaaggtgttttttggaccttcggcttcccgaagctgaagaggcttttttcacgggtcaagctcgttacgaagaacgatctagcaccgcgaaaggggctactgttggggtcgtgcttcggtgcgccgaaggtctcacacgaagaagcagcttcggctgaagtcgtctccaagaaatggccgaaggtcccttttcatggagcttcggcgttttaa

SEQ ID NO: 8447 - DNA, 480 bp, Zea mays
  Peptide Sequence Number=SeqID_51822
atgggcaagaacaacaagcgcaagcgtgagccgactcctccatcggaggagtttggtgactcggaatactcggaggaggagttctcctccgagtccgaggggtctccggctcccgtctctcccccggcgtcgtccgatgactcggacgactcccaggggatagccgcggaggtctggacgtacatccgggccgtcgagcgcgccgggctcgaaggctcggatgagtcggagtactcctcggatgaggaggactcggacggcggcgacgagggtgaagacgacgacgacgacgacgacgacgacggcgacgacggtgacggcagcggcagtggcaggggcggcggcgacggcagcagggacagcaccaagggcgacagcagcaggagcagcaccaagggcagcagcaggggcagcaccaagggcagcagcaggggcagcaccaagggcgacggcggcggcaggggcagggccagtggctag

SEQ ID NO: 8448 - DNA, 737 bp, Zea mays
  Peptide Sequence Number=SeqID_51823
ggcgacgattccgcttcggaactattggaagccaaaacgttgtcatggtcatgaccgggctcagcatgctgaacgccgggctcacgacccagctgctgctgagcctgttcagagtgaaaggcatcgtgcactggggcatcgctggcaacgccaacgaggacctccagatcggcgacgtgaccatccctgagtcctgggcccacctgtccctgtggaactggcagaggcacggcgacgggcctgagaacgagctgccgctagagaacgccggcgactacacgagggagtacggcttcctcaacttctccgactacacggtggggcaggacgccggcaacccggagctggcggcgaacacgctcaacagcgtgtggtaccagccggaggagatcttccccatctccggcacgccggaggagcggcagcacgcgttctggggctgcagcgccaacatctacaccgacaacgccagctaccgccagttcatccgctcccacttcgggtgcacccccgtggagatggagagcgccgccgtggccctcgtcgcgcaccagcacggcgtccccttcatcaccatccgctccctctccgacctcgccggcggcggctcctccatcagcaacgaggcagccacgttcctcgacatcgcggcgcagaacgccgtggacgtcatgctcaagttcgtgcccctcatcgcgcgccgcggtggcgaacaggagcacgccgccgacatgtaa

SEQ ID NO: 8449 - DNA, 1290 bp, Zea mays
  Peptide Sequence Number=SeqID_51824
atggccgccacctccacagcgtacgacgtcttgtacgaccccctggacagtgtcggaacagtgcggccgacgacgcgggggacgtcatggatgtggcggacctgcgcacggcgcgaccgtcgcccgtgcggtggacggacagccatgccccgatcagcggcgggagacagcgtcggaggcgacaccaaagccatcaaatccaaagagatggagacgcaacacggctcgcttcccaccccaagatactggggggcgcgtgggatggagccgtggctcagcccgctgcccacctccacgaggctggaagaagcaggaaagaacgtcgcctccacggacatccccgcggaagtaggcgacgatggccgcctgaaggatgaaaacagggcaccatgggtagagctcgggggccaggcccctccaacagctgcacgaagaaagatgggatcgacgggaccgacccgctgggagtttggaaacaaagaacacaaactcttcggcggaaaggtcgccgaaaggagaggccccagcacaagtcctcccggcaaataccggcgcattccatccaagcaggcggtataccatttcgagcactcactcagtctgggcacgctcgggatgaagtcacaaggccatggtaaactatggtggcacaaagcagaaaccttgaaggcaaaggggcgcagagagctcgaaggcggaaggatttccccgctcgcgccccgaagcgtcacgggcaaggtctcccccgatgcgcaccagggttcccatcctatgacatggggccagacctcacatgtcatacaagctggcccgaagcgcgaagaaggcgaatcgtcgcacaaggagcgtgcaaccgccgtgcgattatacgcccctccatcttcgccacaaccagcggttaaggaggcgaaccgccgcacaaggaacgtgcaaccgccccacgattgtgcgccccctcggtttctctgcaaccggtggtccaacctatggcatgggggcccaggcccacatgtcatgcacccgacgcgccggtttctgggtgcagaaaagtcgcaccgctgctcgcgacaataccgcgcctcctcgagcccgtcgcagaagactgagaagataaatcttcaaaaccaatgcagcgactcgaggcaccctgcgcatggcccatcaaagacattaagtgcggaggtcacgggccagtcagccgcggggacatgcgtgacagtcgacgtgaccatgggcgggccggcagtaattgcatcaaccggcgccgaggagcagcgatccaatcgctaa

SEQ ID NO: 8450 - DNA, 1740 bp, Zea mays
  Peptide Sequence Number=SeqID_51825
atgtccggtgcaactccggagcaacggctagtcggcgccaacggctacctgcagcgcattagatgcgcgcgcagcgcgcgcagaagtcaggcgcgcccatactggcacaccggacaaggaacagtgcatgtccggtgtgcaccggacacccaggcgggcccacaagtcaggagctccaacggatcgggcgaggggcaacttgttgttgttccgcctgcggtggcgaccacggtgtctgccgcggtgcctagggtgaagggtagcgctctcagcactagcggcgagatttcggcggtcactgccgtcaaggacgaagcgggcactgtgtcccaccggctgagggaggcgtcgcagcagctaagtcaagcggccgacttcgccgaccgcgtggcgtcgggggcccttactgcagatgtgtctgccgaagtcgagagacttcgggcgcagcatgctgacgccgtccgggaaaagtcagctgcggatagcaagtgccgcaagctggcggagaaggtggccgccctggagggcgagaggacggacctacggcgccagctggtggaggagaggagggaggccaaccaggccatcgccaaggcgcaggcggcgcaggcggaggccaaattagcgcgggtggaggggagtctcgccagccagcgtgccgaggaatggaggtgcggttcaacactttgcaggcccgcatggagagggtcgaggcctctacacgctcagaagttgagcggacacgcaaacagctcgtggactcataccacgagctgggcgcgcggactgctgacttcgaagtgcccgaccgagaggcgggctcttcgctttcctcgagtggctgcaagaggaattgttggcgctcccgaccatcgtggagggattcatgtccttttcctccctcgtcacctgcgaagggacgttgaacgcgctgtcccgcgagggatggcgcgtgccgaggacgtggaggacttaggacccctgaacagcgcgcagcccgaagcggaggccaacccggtggtggccgaggctgaggccgacccggcaccgcccccgaaaaccggtgaaggctcccttgctgcccctgcggctgctgtgtccggtggaggctcgtcgccagccactgcgccgatggtggagaatcccccgaaggcggcgacggagccggcagcggaggatcccatgtcggcggctgggtcttcgcaggttcaggattttgggcctgcgcacgcaaccgctaattttgtggcggcttcgaccgtggtcgctggaaatgaatcagatgagtctacgtctaagttttctgattttggtgactctgggagttcggttgagtggacgaaagagtcttcggatgaggacttggattactttgcggccttggatgtggctgcggcgaaggcttctccgcgtgttacggatactgaagttttgcctgggtaccctagtatttggagctataagtcttgtgggtccggcaacctggggtctggaactagagaatgggcacttgtctcctggggtggcctggtccctagtcgaggttacctcctggggcccatcgccaactctttcttaggcagcctcaccagcggtggcgaccacctctactccgagcggccgcctctgcaccaacggctcgccagcgatggcggccaccttcgccctggtggcttgccggcaacggcggccatcacagtgcgcacgaagaggtcctcgctcccgtcctgtggaggatag

SEQ ID NO: 8451 - DNA, 81 bp, Zea mays
  Peptide Sequence Number=SeqID_51826
atggctgatattcacagggccgtcatatccgatcaacagttcatattccctacaccaaaccgttttccaagtttcgagtga

SEQ ID NO: 8452 - DNA, 138 bp, Zea mays
  Peptide Sequence Number=SeqID_51827
atggaggcagcaccagcgaaggagcggtcaccaaatatggagcaacgtccggttggaggtggaggagacgacggagatcgacgaagaggcctagtggcagtggggacagtggaggtgatgatggagatgacatcctga

SEQ ID NO: 8453 - DNA, 354 bp, Zea mays
  Peptide Sequence Number=SeqID_51828
atggccgccgcctctccaccccaccagaacaaccagcttctccctgctcagggactgaagatgatcgtgtacgagcgcaacgtcgtacgtgaaattagggttctagacgcgaagatcggtaaactcgagctgcagctcaacgacgagatggagaagatctcctcctgctcgggcttgctgaaggagatcatagccaagccacaaggctcgacttgttcttggctgcgggcagagctggacagggcccgcgccaaacgggagagggcataccacaagttccagcgccaggagatgcagatccaggggggcgacgaggatggcggcgcccctaattctcgtgacgccagcaactag

SEQ ID NO: 8454 - DNA, 775 bp, Zea mays
  Peptide Sequence Number=SeqID_51829
atggggctcggtgtatgcggctcgctctaccaagggtggtttgccccttgggcaggagtggtgacgaggatgatggttatgataatgcttatggtaatgatggctcgtcttagacacaccgcatggaagtcagtcattcctttcttgccttctcgtctcacgaagcgttcgcttcgccgtctggaggtagagtctgtgaggggctgctctcctgtgcccccgctggaggcgccccctgcaccaccaataggtgtcccgaccactggagtagctgctggaggagaccccgacgatggagaggactccaactcaaactcgtcgcctttgggaaaatccagaggcaactccactataattcaccggactgtccggtgctccaaggaagagcggcctcaggaactcgccagcttcgggaaactgcaacggctgctccgctataattcaccggacatgtccggtacgtcaggcacgcccatactggcgcaccggacactctacagtatatgtccggtgcgccaccggacatccaggcgggcccagaagacagagctccaacggtcgaatcccaacggctttggtgatatggctggcgcaccggacatgtccggtgaccgttggccgcgaagtaagtcgtttgccccgcagttacaccggaacagtccggtgtacaccaggaacatgttcggtgaaattatagccggagcagccgtcgcagtttcaccgaagcttgcgaggttcctggagggccgttccttccttgggagcaccgcaacag

SEQ ID NO: 8455 - DNA, 354 bp, Zea mays
  Peptide Sequence Number=SeqID_51830
atggccgccgcctctccaccccaccagaacaaccagcttctccctgctcagggactgaagatgatcgtgtacgagcgcaacgtcgtacgtgaaattagggttctagacgcgaagatcggtaaactcgagctgcagctcaacgacgagatggagaagatctcctcctgctcgggcttgctgaaggagatcatagccaagccacaaggctcgacttgttcttggctgcgggcagagctggacagggcccgcgccaaacgggagagggcataccacaagttccagcgccaggagatgcagatccaggggggcgacgaggatggcggcgcccctaatcctcgtgacgccagcaactag

SEQ ID NO: 8456 - DNA, 118 bp, Zea mays
  Peptide Sequence Number=SeqID_51831
atggaagcgaggatgatggcggagcaggaggcacgcctgcactcagcaaagaaactgacaaaggacccctctagtggaccctttgccaagtgcaggctgatgaacactcaacaaagag

SEQ ID NO: 8457 - DNA, 231 bp, Zea mays
  Peptide Sequence Number=SeqID_51832
atggtgggcggttggctgaggaggaggagggggaggaggagcaggacgacggaggaggcactacaggacgacaacgtccagcagcaggcggcgtcgcaggacgacgatgaccagcagcaggcgacacagcaagacgacgacgacactcagcaggacgcctcaggttcgaggaacgtctgcctgcgaggtcccgcgagtctccctcagcgtcccatactgcggagcgggtga

SEQ ID NO: 8458 - DNA, 1023 bp, Zea mays
  Peptide Sequence Number=SeqID_51833
atggccgcctgtgccggcgtaggacctgttgtggggatggtggtgttccagattatctttgcatttgtcaatatcttctataagctagctgtgtcggacggcatggatctgagggtactcatcgcctaccgctaccttttcggatcagccttcctcggcccgctcgcctacttcgtcgagaggggcacgatggcgcagaacctgtacatcgccggcatgaagttcacctcggccactttcgcctccgcgacaaccaacctcctcccggcgtgtaccttcgtcatcgccctcgtcttccgctacgagaagttcgccatccgcagcctggccagccaggccaaggtcgccgggaccctgctgggcgtcggcggggccatgctgctcaccttctacaagggcgtcgacatcacgccctggcacagcaacctgaacctcgtcgccacgctcacccagcaccaccaccatcacaccaccaccaccaccaccaactacgccatggggtcgctgctctgcgtctgcagctgcttcttctacgcgctttggatcgtcgtgcaggccaagctgagcaacgagtacccgttccactactccagcaccgccctcatgtgcatcatgaccacgctgcagtcctccatcttcgcgctctgcttcgacagggacgcctcgcaatggcgactcaagttcgacatcaggctgctctcctgcgcctactcgggcatctttgcgtcgggcgtcgcgctggtgataatggcgtggtgcgtgcagcagcgcgggccactgttcgtctccgtgtttagcccgctgatgctgctcattgtggccgtgctgagctcgctgctgctgggtgagaagctgcacctcggcacggcaatgggcgcggtgctcatcgtcatgggactctacgccgtgctctggagcaagggacgcgaagcagcggctgaggcggccagggtcagcgtcaacgaccaccccaccaccagcaacagcaacagcagcgaggaggacgacgacaagaagcggcac

SEQ ID NO: 8459 - DNA, 339 bp, Zea mays
  Peptide Sequence Number=SeqID_51834
atgaagaacaagctggatctgaaaatgatgatgaaggaaacagcataccttccttttttgtccgtggaaaagggtgctggttccttggacaaggaactagctgccagtggatttaccaggaaagagcaagtggatatggagaagtacaccgaggaagttgttgaagggcatgattccagttcagatgatgagaatgatgaggttggtgatgttgtgcctttggtttccttgaagatagaccaagacagttccgatgagcctgattgtgatcttacccaagtgattcagaggcgcctggaactttttctgaagaggttagttgtcttcccatcagaatga

SEQ ID NO: 8460 - DNA, 318 bp, Zea mays
  Peptide Sequence Number=SeqID_51835
atggcggtaacgtacacctgcaagaacttcgatgggttcgatgttccgtcgtatttctccggcagccgtgtgctgccgtgcggcgtgcacatcagcagtgcctggcactgggcgattgggaactgcggtgtggaggaagtagcttcttcttccactaggaaatccgtggaagtctcggtgtggtgttcaacgatttgcaccatcatccttgggcaaggaaataagcaaaaacctaatgcctaccccctacctggcgcgccaaatgttagagagcaaatctccggccgggtggtggagtgcacctgccctaaatcctaa

SEQ ID NO: 8461 - DNA, 147 bp, Zea mays
  Peptide Sequence Number=SeqID_51836
atggcgtctggcggctgggcgcgacgcgtctggtcgtctggcggctgggcgcgatgtcctctggcggctgggcgcagggacttgttgcaagctgaggacaccaggaaacccttgtttgctactgctcaaggttatgtggtcatttaa

SEQ ID NO: 8462 - DNA, 201 bp, Zea mays
  Peptide Sequence Number=SeqID_51837
atggagcctggcggagggacagctgtcggagcggttgagtccttgctgacgtcctcttgcttccgtaagggggctgagagccgccgccgtcacagggttgggcgatgtggaagctcctccgaggccgaggtcgagtctgtcttccgtggtcgaggtcgagtccgagcccctggttcaggcgaggcggagaccgtcggctga

SEQ ID NO: 8463 - DNA, 201 bp, Zea mays
  Peptide Sequence Number=SeqID_51838
atggagcctggcagagggacagctgtcggagcggttgagtccttgctgatgtcctcttgcttccgtaagggggctgagagccgccaccgtcacagggttgggcgatgtggaagctcctccgaggccaaggtcgagtctgtcttccgtggtcgaggtcgagtccgagcccctggttctggcgaggcggagaccgtcggctga

SEQ ID NO: 8464 - DNA, 489 bp, Zea mays
  Peptide Sequence Number=SeqID_51839
atggacgaagatggtggtggtggactcatcgaaggtggtggtgaactaggtgctagggtaggtgagctcggtgaagaagagttgctagatcccctcgctccctcaaagtggacgaagttgatgacggagtcactgatcgttgaagtcaagtcgttgtccaccatattgccccatgtccaagctcaccctttgttgaacacgacatcgttcgagggtgcggtaggccttggtgccatccacgcaatcgatgaagacccttggtatgctctaggcgtcgagcttgtcgatgtggttgaactccttgacgaacgtctgacagccaaagatgtgatggtggctgatcaccggtttgtaccgatgacaagcctcatatggtgtcttgctagggatgtaatatggttcggaaaatatccgtccgaatccggattcgaagatggtgaacactggttcggatggaattttcggatattcggactttttttcggataa

SEQ ID NO: 8465 - DNA, 882 bp, Zea mays
  Peptide Sequence Number=SeqID_51840
atgcaggtggcatgcaactacaccacggagacgcaccctttcgactttgacgcatccagcatggaggcccaggcccacacggcatgtaaccggtgcgccggttactacgtgcgaaaaactgcaccgccacttacgccaatgccgcgccttctcgactgcggaaccggtgccgcgactcgaggcaaccctgcgcatggcccaacagtgccaaccaagcgcatcggtcacgggtcagccagccgcgggagaaggcgcgacggtcgatatgtccaaaagtgggccggcagtaatggcggcagcaggcgggcggaagcagcagtcaaatcatctgtaggctcacgtcccctcctggagcagcaggggagccctctcccacgacgtgaacacgacgcgcccatgttccatccctcgaacggctcgcacaacggctgccccgcgaaccacccgtcccgtcgcattaacttcgcggcagggcaggcgacacctttggcagggaccaggaaaggggatacttcgaaagggatccttccccgtgaaggaagcgggccccgagccctcctactgatcagggccgcctcagagcactcgggctccgcgcccactactgatcaggggttcgaaggctggccccccgaagggttcgacagccgccccagaacacgcagagcgagggatgactctgggtacgtccgatacatggccgaggctcaggctacgctctcgagaggctcaggggctgctctcgcaaactcggctctggccaaaccattgacagcgtcaacataccagcccgagaactcggaacctgaccatgcacccgggctacgatcagatcgcatgagggaacaaccagaccggccgaggcgtcacaaaaggcattaa

SEQ ID NO: 8466 - DNA, 1170 bp, Zea mays
  Peptide Sequence Number=SeqID_51841
atgcattgcgcccttccaccttccgagcccccggatggggagcgcccgcgttgctttcgtcttgctgctgttggaggagcgcaacttcgcggaggttggcacctttcagccattgctcggcttcaaggattttcatcaggcagcccggctgcattccctcaccaatggtcacccaggacggtgaccaccagttcgatggtggggagaagcaagccgggctgcggcctctgccccgccctcagcttcaaggatcttcatcatccttgctggggcggggggcgagctgagccggagctctacctcccgtacgggccggcgggccacctcttccttcagcattcaggggagagggcgctcaccggcctagcggagggggcgaacttcgacaacgcggggccgatcggtcgcaagcgttgtcagctccagcatgcttggttcgctggctcagctagctctggcgcagcttccggtgccacctcccaccgctgggcggagtgtggctatctgcccgccgtacgggcggctgttgcgccgcacgcaccgggggaccgcccaagacgtcgcacgccgctagggcggcgttcgtgttcttgggttgtcctgccctcgctccggcacgacgcctccgcgcggaggtcagtgctcgcccgttcgggaggacttgagtggggatctgccggtgggcaggtggctgccgtcgtcggtgctaaggtggtggcagccggagaaggcttctccgccgacgagaccgagtacctcggcttggtcggccttgccacccaaggcttctcttgctcagttaaagaaaccctcggccgctctgcaatgagccggagccggaggcagcggtgtcagcgtggacagaggcggagtcggcttgagaagaagcttcgtcggcccaggagcaggcttggtgctgacatcttccttcgaggtggagatcctccgcccgtgtcaccgtccgaggccgggccagattccgctgaaggtggagacgatgccaagggtgctgctgctccctctgttgatgacttgtttgtcgatagcagaatcgcttatccaagcgagagttacttatcgcggaaggtgatgagtgaggagtccctcagctcggtcagccttgccgcttacgtgtactccgtcgttttcaggatcccgctatcgaagtag

SEQ ID NO: 8467 - DNA, 585 bp, Zea mays
  Peptide Sequence Number=SeqID_51842
atggtaccgatccggggagggagaaccgcgccgcctgtagaggccgcgatctccgtcgactcggtcgccgccgccgggagcaccgccggcgcgtctacgcccgtctgggctgccgccgcgtgcgcccccgcctggagcgccgtcagcgtgtcggcgcctatccgggctgccgccacgcgcgcccccatggggatgcgcggctgcccactgtgccgcctgctctcgcgctgcttccctcgccagcctgagctcgtcgtcggtgttgtcgtcgacagaagcagagctgccagctctactgccgccgcagaacttcgagctctgttgccgccgcacgtgcagcatccgccgcctccgctgcttctacttccgctctcgccgctgccagttccgccgccgccaaccgtgctgccctcgccgctgtcgctgcagccgctgctgctgctcgctcgcgttcttgtgccgcggcgacctcggcctcctgctggcgccgcgcactcgaagtggccgagcgtagggacatggtgggctagtgaggggttgctgcgtgtggaagaggctgtctcagacgaaaggctgctcgtttga

SEQ ID NO: 8468 - DNA, 648 bp, Zea mays
  Peptide Sequence Number=SeqID_51843
atgggtcgacgcgagacggaacacaaagaggggaaaactgcagcttcgtgttgtcctgcgcccagggtggatgcgcttgcagtagggggttacaagcgttcgcaagggagagagagcctgttcgtcagcccgtcctcccgcgcggccacctcctcgtacgagggccctggaccttccttttatagatgtaaggagagggtccagcccaaggtcgggcgaggtggtgactcctccgaggtcgaggttgaggccgagccctggggtcgggcgaggcggagaccgtcttccgaggtcgaggttgaggccgagccctgtagtcgggcgaggcggagaccgtcttccgaggtcgaggttgaggccgagccctggggtcgggcgaggcggagaccgtcttccgaggtcgaggttgagcccgagccctggggtcgggcgaggcggagaccgtcttccgaggtcgaggttgaggccgagccctggggtcgggcgaggcgaagaccgtcttccgaggttgaggttgaggccaagccttggggtcgggcgaggcggagcttcctatggcgcctgaggctggactcggctgctgtcagcctcaccctggcgggtggcatagcagtcggagcagggcaggcgacgctgttttcctgttag

SEQ ID NO: 8469 - DNA, 525 bp, Zea mays
  Peptide Sequence Number=SeqID_51844
atggaggcggagatgggcggctggggaccggggcagagatgtggaggggccggacgcggcgggatcccggcgaggagaggccgggcgcagagggatccggcacagggcggccgctgcggcagggcgtcgcgacgcgacggggcagagggcacgcacggcgcgggtctgggcgccggtcgcggcgcgctggcgtgcctggggtcgagcgcgacggggtcacggcggcaagcggctgggcgcgcagggagcggcccggtcgggccgcggcaggggcgtcggccgccggtgatgggcacagggcgcgggggcgctgctcgcgccgccaccagggccgccggcggcttggggaaggggaggagccgcgcgccgccggtggaagggccgggcggaggcggccggcagcagggaggccgacggccagagagggacgcccggcgggggagcagcccggcggctgagggtgggaggaaaaaaaaatttggctttggtaccaagttgaaatggaaacccctaaccctagagtag

SEQ ID NO: 8470 - DNA, 2451 bp, Zea mays
  Peptide Sequence Number=SeqID_51845
atgcaagtagtggagttggttccatgcgcccgcaacaagtggggcaactggaatgaattttggttttacgttgctgagggtaccgtcgaaggccatgagggactccccgtgtccgagatgtgctctcattattactcagcgtatccgccctttgaggtggcagaggaggatgcggacgaaggggcccttcgctgcgccgccggtcagagcagtgggcgtgatttagttgaagagttcgtggcgtacggggtgtggcccttggcgcatggctgggcgttgggcgaagtgtgccctcgccagatgccttttcacggaggaagggtggtgcgaagtccggccttcgcactgaatctgcggaaccgcgacccggccgcctttgtgcgtgatgcggaggatggggcggtgcggctcgtgggacgttacgtgccgaggacggaaggccagcgcagctttgatattcgtgggtcaaatgaccgtttgaacagggttttcgaattaaatcaattgccgtacgacggctatcctggtcaagacgaagcggaccgtcgtggaaagaagccgacggtggagactggagacgaccctgcgccggcggccgccccttcctcaaaaaagagaaaattaggtactgcgatgggaggacttggggtgtctgatagttttgctagagagttgatgaggacgtgcgcggccccgggggaaaggatgtcttcgcccgagctccgggagtcttcggctcggatgctgagggttaccgggggttgctggcctaggaatgttcctatcccctgcgcggctgacgaggactgttttacatctcgcatggttcgtcaatggagagtttttccttacgggcggaatatcgctgctgttgtgtcggcagtgatggacaaggatcgccaaggggcggcgcaaaaacgccaggcggctgtcaggctgcatgaagctaggccgaagaggcagcggggggctgcgaaggctgcggcctccggcggaggcaagccgccgctggcggcgaagtcgggcgcctctgcacctagcaaggcgccggaggcgacggcgggcgccggaggctccaaatcgacgagggtggtgccgccggccagcggagtggcggaggcttcgaaggcggcccgagcgctgccgttgtcgggcaaacgtgttgccgacttcggcaccgatattactgtggacgactatcttggtgggtcggacgagggccagcttgctatagttgcgcctgccgcggcgatcgcgacggctgccatagtgccgaaggcgaggggtgaggctcttggcgccggaggcgaggtgtcggccctcgcggttgtcatggacgaggcgggcgtagcgacccgccggctgaaggaggtgacgaaggcgctgagtcaggtggctgacttcgccagccgtactgcgtcgggggccctcacggcagctgtgtctgccgaagtcgagagacttcggacgcaacatgctgacgctgtccgtgagaaatcagccttcgacagcaagtgccgtaaactgacggacaaggtggccgcactggagagggagaaggctgacctccggcgccaactggcggcgaagaggagggaggccaacgaggccatcgccaaggagcaagctgcgcaggcggaggccaaactggcgcgggcggagggcaatcttgccaaggagctcgccgaacatctgcaggagcggctcaccgccctggagagccgcgcgaagggggccgaggccgcgatgcgtgcggaggccgaacggacgcgcacgcagcttatggatacatatcgtgagctgggtgcgcggaccggtgacttcgaggtgccggaccgagagcccgggcttcgttgtctgcaatgggtgcaggaggagctgcaggaactccccactgtcgtgggggggtttatgtcgtacgcctccctgatcacctgcgagggggcgatgaacgcactctcccgcgaagggtgccggcacttcgaggtcttcgaccaggcagatgaagattttgagcgagatgtctataaggtcgaagaccccgtcgtgaaggaatccgccggggccctctatgaccggatgtggggtccgcacggtcgtgaggtggtcagggagcgggccgagactgcgagggctcaggcggcgcgtggcgagcgggtggacgacttcggggcgttgaacagtgcgctgcctgacccggagccgacccctgcggaggccgagtctggggtcgccctggagccaaccccggagaccgcggcgatcgcgacggctgcccccacatctgctgcggccggcgaagacctgcccccaaaggtggccgaaggcgcccctgatgcccccgcagctgctgtgccgagtgctgaagatcccgcggcggtggcggcggagacaacggcggagccaacggcggaggctcccgcagcgtcagggccttcgcaggtggcgtag

SEQ ID NO: 8471 - DNA, 1113 bp, Zea mays
  Peptide Sequence Number=SeqID_51846
atggccccctatgacgtggtcggcccgagccctgggtcgggcgaggcggaggctcctccgaggtcgaggtcgagtttgtcttccgaggttgaggtcgagtccgagcctcgggtcgggcgaggcagagaccatcgtctgaggccgaggcggagttcgtcgtcttccggagccgaggccgagtctgagccctggggtcgggcgaggcggagttcgtcgtcttccggagccgaggctgagtccgagccctggggtcgggcgaagcggagttcgtcgtcttccggagccgaggctgagtccgagccctggggtcgggcgaagcggagttcgtcgcccgaggccgagacgggggccgagccctggggtcgggcgaggcggagcttcctatggcgcccaaggccggacttggctgccgtcagcctcactctatcgagtggcacagcagtcggagcgacgcaggcgacgctgtcttcttgtcaggccgggttcttgtctgaccgccatcgcagcaaaatcaaccaaggacctccctacactgaccactcccctactgcccttgcccctttcgggtaccaacttgcttttcagatgacacgtgtcctcacgctagtcgtagcaatacaaacaaacatgggtctctttagcataaatgtcgaggcgaaggggtatggaccaaagactgggcacgacggcgcccgcacggttccgcggtggaggttcgccggcgcgcgatctatgtgtcaccccggtgctcccaccccaaatcaacgagttcacaaagtgccggagtggtcaccgaggcaaatccgttgggctattacccactggtttaggcaacaggggccggaccgcggcacgagtgtatccgcggcggcgaaaattcctccgatgagaaattgcgtctaccggtcagattccaatacctccctggacggtcctacgcgaatatgggaaggttttgaagagaataaacatgcttaccactggtttggagcaacgacccaagctagccgcggcactaggaatcccgcggtggtcatccccgcccgaatggcgccagagtcgcgttaccagcggctatctatggtggcggcgatggtgggcgattctaggtga

SEQ ID NO: 8472 - DNA, 165 bp, Zea mays
  Peptide Sequence Number=SeqID_51847
atggatagtgtggtcctctcgtggctcaacggcatcatcaccattgagctacaaaacatcatccgtgaccaggcggacatcgcgcgccaggtgtggctcactctcgagggccagttcctcgggaacctggaggctcgggcactccacttgggggaaagtgcataa

SEQ ID NO: 8473 - DNA, 99 bp, Zea mays
  Peptide Sequence Number=SeqID_51848
atggtcgtaagagggggttgtgtcggacagggcgaagtggggtggctcaccaccttcgagggaaggcagatgaggaggtcgttctggggagaggtgtag

SEQ ID NO: 8474 - DNA, 890 bp, Zea mays
  Peptide Sequence Number=SeqID_51849
atggccgccggctctggccccgccccgcccgcggaagcgcagctccgtcgccgatccaccactgccgccggacgcgctccacaacgtgctgctccgcctgcaactgcgcgacgccgtcgtgtgccgccccgtctcgcgcctcttccacgagaccctctcgccgcagctcctcgcgctgctccccaccctgcgcctcctcctcctccgccactcgcgccccgacggcggcggctgcaggcggaggagacaagggagctacggacgataaacaagtggggcgagatgatgtacgagaagatcaagaagctggataaggagctggccaggtatgttcacaacaatattttctttagttttgctgtcgactctaactttgaagacatttcaaaggaccacaagctagattgccaaaatggctctagcagaagcaccaaggtttcctccccagatgtgatcactaagccagatgcaaaccatggcaaatctgctgaggtagttgattcaaaatctgaagaggcacaactcgcagatagagagcaggcgacatatgcttctgcaaacaatgacttaaaaggaactaaggcttatcaagaagctgatgtttctggccttcacaatcttgcgatggcaatagttgattacagaggtcacagggttgtagctcagagtataatacctggtattcttcaaggagacaagtctgattcccttctgtatggttctgttgataatggcaagaagatatcttggaacgaaacgttccattctaaggttgttgaggctacaaagcagctccatttgaaggaacatgtggtattggatggttctggcaatcctgtaaaattagctgctacagtcgaatgcaagggtattgttgggagtgatgacag

SEQ ID NO: 8475 - DNA, 144 bp, Zea mays
  Peptide Sequence Number=SeqID_51850
atggccatgatggattcaacatcagaaaagatgtacctctgccaggtgaggaaacatcagacttttgctattttagttctaaggtggtgcccaaagaagaacctcaatagtgaagccgcgggaggatgttggcctcccacttga

SEQ ID NO: 8476 - DNA, 489 bp, Zea mays
  Peptide Sequence Number=SeqID_51851
atgttggtagactacacaacggtactcaatggaccaagtgtgtcggtcgaaggcctaacgcagccaggtgttgagagcatcgtggaagtgacacccacgagcggtgtcatgagtgatgggtcttgtgatccatccctccggctccttcgagagctctatgtcgtggctcgaactgccaccagtgtcgtcgtccagccgggatgccctgtggtggcgcaggcggcatgtctggctgaggtgcaggggaaggcatcctcccagaccccaccacctactgaggcgagggggaagagtcctactgctcctggtctcgctcctgatcctgctcctggcgttggcgctcctgctcctcgtgcaggcgatgatgtagtctctccatgtgactggactaacctggcagcgtgcgacgcagtggacactccgctaggcgagaaggcaaaaaggggatcactgactctcgtaagcacaagagtgagagtagaactataa

SEQ ID NO: 8477 - DNA, 705 bp, Zea mays
  Peptide Sequence Number=SeqID_51852
atggacggcttgggcatacaagcctcgaatgatctcgcttttgctgacgggaacatgccttttaatatgcacatgaattttatgtttgataagtattgtttcatgttcttatcagttgggcaagtggtgctctcgatccagaaaggagctcatctgctgatcgtgtttggtcagtcaagaggcaccttcaacgtgagttacagaactcttttcctgactctgattattgttttatatcaccacaatcaaaagctggctgtgctgctgcctgtgtccatctgttctagcggattgcaacaacaggctgttacaaaagccaagctaggttacgatcctctggaggttaatccagaagatatggttcgctttgcaatggagcagccacatacaatggctttgtattctgtatcagacgctgttgcaacatactatctatacatgacttatgtccatcctttcatcttttctcttgcaaccataatacctatgtcacctgatgaggtactgcggaaaggaagtgggacactttgtgaaatgctgctaatggttcaggaaaaagtcatgtggtttgtcaagggcgtattgatcaagggtaggcggccctcgactacggagttcgtagtctcctgccgtgtcttccaagaccgaaggttatgccccttacggcggctgggcttgagagtagatagagagagagatgggtaa

SEQ ID NO: 8478 - DNA, 351 bp, Zea mays
  Peptide Sequence Number=SeqID_51853
atggctgcctgcgcggtggatctggtacccgagagtggaggtgtagaggttgaaggcggcgcggttggatcgacggacgtggagggagacgtactcggcgccaaagacctggtccatggctgcctgcgcggcggacatgagcttggtggcgagcccgagcttgcggtgggagcggagcactgcgagggaggtgatgtggcggtggcggcgcggcccggtcgcggtcgcggtggtggcgcagcccggtcgcggtggcgtggcggcggcgcggccgctcgaggtggcgcggcggcggcgcgggctgccgctgctctagtggaagatataccacacaacaactatggtgactaa

SEQ ID NO: 8479 - DNA, 762 bp, Zea mays
  Peptide Sequence Number=SeqID_51854
atgacttctcacggatcctcggaaggagggaacacacagtcccacatggacggacttgcacgagagggttttccccgtatcttgtgggaggtgcttcacagagctggttacacgacgcctccccagtacgcggtgcagctgtttgagaagcaccgagtgccccgctgtagggataccatcaaggcgattgctctccacgggctgaccaccttctgtggttttcaccccttggagctatctactcatcccattggcttattccctgctgaaaaggaggatgacccaatgtggaaggaccgagtggagcatgccaaggatatatgggctctttacccagggcagactgcgcacttaacggtgaagcgaggagaggcaatgtctcacatgatggcattgttaaaggctaccaagattaccttggataacagagaggaacttgtggtagacctgtccactgagatggtggaaaaggacctacaagtggaacggatgtccaatgagatccaggagcttgaggaattagtgggaaccagggagaacaccattgaggttctcgaggatcagctcatcaactctcagcagcaactcacgaaagctaaccaacatttggatatgcaccaccaggagatccaggacatggaggccaacgaggatgtcgacatcgagggaggagaggagccggagcctgcctccagcttggacactgctggctcagggagactaccttcccccgagtcgagcgttgcctcgtttgctcactag

SEQ ID NO: 8480 - DNA, 348 bp, Zea mays
  Peptide Sequence Number=SeqID_51855
atgcaagatgcagcacgacgggcactttctcaatattgctcgttgttcaacggggtagcggatggccttgacctgaagtattacgctcgctattcgaccggcaatgctggaggtgtgattgtatcgctagttggtgaaggcaatccctggctgaacagcatggtcaacgtggccgccgtgctcaacacagagctagaccacgcccttgacgagttgggcaaagttcgggcggaggttgcgaaattgcgtgctgattgcgcagcacgccactatctggatgttggttctcccgcccctgtcgggattcagcacccttaccgctcaccgccccgtggtcactttgactaa

SEQ ID NO: 8481 - DNA, 402 bp, Zea mays
  Peptide Sequence Number=SeqID_51856
atgcagcaaggtgtcgagagcgtcgtggaagtgacacccgcgagaggcgtcgcgagtgatgggtctagcgatccatcccttcggctccggctactccgagagctccgtgacgtggctcgaactgccaccggcgtcattgccgtctccgtctccatcagggtctcctccagcagccgggatgccatgtggtggtgcagggggcatctctggctaaggtgcattggaagcttgcctcccagtcctgcagctcctgctcctggcgacgacgctcctgctcctcgtgcaggcgacgatgcagtctctccatgtgactggactgacttagcactgtgtgacgcagtggacgctccaccaggcgagaaggcaaaaaggggatcactgacttatgtgcagtgcacctaa

SEQ ID NO: 8482 - DNA, 489 bp, Zea mays
  Peptide Sequence Number=SeqID_51857
atgactcttccccctcgcctcagcaggaggtggagtctaggaggcagccttcccctgcacctcagccagagatgcccccctgcaccaccacagggcatcccggctgctggaggagaccctgacggagacgacgatgacgacggtggcagttcaagccacgacacggagctctcggaggagcaggagccgaagggatggaacactagacccatcactcgtgacactgctcgcgagtgtcacttccacgactctctcgacaccttgctgcgttgggccttcgaccgacacacttggtctattgagtatcgttgtgtagtgtaccagtattgtcgcgggttatacctggaccagtgggaggctacttgcttggtgcaccgttcggacgatgatctccggggtgcagaggccttctcaaagcattacactatcactgagagggatactgccgaggcagccatgcaagatgttgcacaacgtgtgctttcgtag

SEQ ID NO: 8483 - DNA, 567 bp, Zea mays
  Peptide Sequence Number=SeqID_51858
atggaaggctcttggatcattagaacatcctactgctcagaggaggaagggtttcctcatctcttgcggagttgcgcgcttcgcatggggatccacaagaagccagaatatgtctggaaggaataccgagaaaacgaagttgagaagtgctctatggcagtctacctgggagaaagccgaagttatccaaaccaccctcctttccaagtcaccttcaaggggcaccacttcccagacacttgccaaaatgttgcccgaaaagccctccgacaacaaagagagggcgaagaggccaacacttgtgaagcctaccaaaccctgaagttggattacgataagaagctaaagaagctcgcccccacgaagaaaatccaaaagaagaccaagagccaaggatgtcagactgagcggaagaagaaagcccctccagcaccacctccctccaggatagagaatttgtctgacgtcgaggatatgtccctagctagcattgatgaccttctcaaggaatttggggacactttagaaaaggagttcggaagtacctcagaaagcgctcgcgtgtag

SEQ ID NO: 8484 - DNA, 705 bp, Zea mays
  Peptide Sequence Number=SeqID_51859
atgtccaaaccggacaaaactttccccctccttatcctcccggtgctccccagccttcttaaccctggggttggaccgcacgagttcggattgagtgactgcccacacagtcttgagtggttgtacgataaaggagtacagcacgggcggaggctggcgatcctaagggtaggctcaattcggccggagagggttgggagggggctgcccacggggagggggcggagtttcgcggcggggatcgccgccggtgggctctgggtggggaacagggactgggaagtggtgcttcgggttcgtggcctcgtgagggagctgctcggctcacttaatttcttgctggaccaacggagagggagagggaggaggaggaaaggactcaccggagaggaggaggacgacggcgcttcgcgaattgtgctcgggggaggggaggagagggatggccgaggctggtgcgaggaagaaggggctcggggcgagccttttataggcgcgcgagggaagtgggggcggtggagcttcttggctccggcgagctacacagtgccgcccataaatgccgcacagcgccgccgaggggacaccatggcggggcggtaccggcgaggacgctggtcaaggggaggggaggacggagcggtgccaaacttccctgtgcggcgagaaggcggaggggaggacggaggcgatggccggaggtga

SEQ ID NO: 8485 - DNA, 942 bp, Zea mays
  Peptide Sequence Number=SeqID_51860
atgagtagtgatagtgatttatttgttgatgctcatgatctatggactagaattaaaataaaatattctgagtccaaatgtactacttctactccatatgttgcttgtggtactaatctttcgaagggagaagaaaaacgatggcaaccaaacgatgaatccacctcaccgacaggtttgtcttccactagttataaatgtcttattgataacaatgatagtggagacgaaagcgatgatgaggaggaatatgaggatgatagcgaggatgggtcttcatcaccacaaggtacattttcctgtattgcttccactaataataatgacaatgagaccgacgatgtgaaagaagaggagattcgtcggttctacacccatctcaacaaagaagacaaagtgctcttggttaagctattgaggaggaacaaggaacaaggcgagatgcttctcaggctggaggagactctcatcaaaaccaacgacagcctagagaagatgaccaaagaacatgaggagctcttactgaaaaatgctttatcttgtgttctcatgatgatttggtccaacggatcaaaagaaaagttgctcatcaataaagaaaggaacaagaaagcaaagcaactaaggagaagacacattgctcaacctcctcaagatatccacggacgcgtggtgaagaagcttgagatgggagaaaccgcagcaagtgttaaactccataagaaggatgttcctaaagcaataaatgaagcaatcaacatgagcaaggaaaaagagacaaccgatcaagccaaggatggaggcaagaagagcttcgaggtaccgagtgcacgggagaaggtcaaggagaccaggaacccaaagccaggggtgaagaagaagacttgcaaagtcaaggttgatcgagttaagagtcatggtgcatcaaggatcactacataa

SEQ ID NO: 8486 - DNA, 657 bp, Zea mays
  Peptide Sequence Number=SeqID_51861
atggtgaaccaacagttattgtttcgacgggaccatctcggtcactcggtgatttatttgaacaagtacctgaaagcctctgtcaccttgtcgaaaaagttctctttagtatatgtcggtaccctaaatcaggggtaccctctcatggagcatgaaggcatcgcacccatgcgacgtcccctagccgcgcggaggaccgcgcctgaccccaccggatgggcaggccaaaggaagccacgtggcagggaaagacaccacaccccagacatgggtgttggcaaaattgtacgcatcactggatttgactctctttttgcaattgaggctggccaggtcaagataaagggaaaacttgaagatcttggatcttttatcaacaatttacttggaaagatggggcttggaacacattcttatattatgctgataaaatccattgaagtgcaagaggccgataaacttaggcgcatagtgctggatgctccatccactggacatacacttaagcttctatcagcttctgattggattgaaatgttccttactttgagcattaagggcataaatgtggcttcgtccatgtcgtcgtttaatatgtatcttgcggacgtgcaagtcatcggaagtgtgcaacagtttccagttgactttttttaa

SEQ ID NO: 8487 - DNA, 360 bp, Zea mays
  Peptide Sequence Number=SeqID_51862
atggagcttcttggctccggcgagctacacagtgccgcccataaatgccgcacagcgccgccgaggggacaccatggcggggcggtaccgacgaggaacgctggtcaaggggaggggaggacggagcggtgcccaaaattccctgtgcggcgagaaggcggaggggaggacggaggcgatggccggagtgctgccaagaagattgtaagcagccacaacatcgttgtaactgatatcaacatagtggaaggctctatctgtcgcactgacagatctaagcaaacagaggaaggagttgaaatagactccaagccaaggccatataaagatttcaataatctacgcaccatgccttcttga

SEQ ID NO: 8488 - DNA, 654 bp, Zea mays
  Peptide Sequence Number=SeqID_51863
atgaccgtaggcctcgtggtggggagaagcaagccgggctgcggcctctgccccaccctcagcttcaaggatgtttatcatcctcgctatggcggagggcgagctgagccggggttctacctcccgcatgggccgacaagccgcctcttccttcagcattcaggggagagggcgctcaccggccttgcggtgggggcgaacttcgacaacgcgggaccggtcggccgcaagcgttgtcagctgcagcgtgcctggctcgctggctcagctggctctggcgcggcctccggcgctgcctcctgccgcttggttcgggcgtggccgtccgtccaccgcgcaggcgactgttgcgccatgcgcaccgggggatcgtccaagatgtcgtacgtcgcgcgggtggcgttcgtgtccttggattgtcttgtcctcactccggcacgacgcctccgcgcggaggctggcgccggtgtttcctgtagtggcaccggaaagatctacactcaagtcctcacagacagaccggcgccagcctccgcgcggaggcgtcgtgccgaagtgaggacaagacaatccaaggacacgaacgccacccgcgcgacgtacgacatcttggaacgatcccccggtagcgcatggacgcaacaagtcgcctga

SEQ ID NO: 8489 - DNA, 162 bp, Zea mays
  Peptide Sequence Number=SeqID_51864
atggccacctcgcgaaccactcgccccgttgcattaactccgtggcgggacaggcggcgcctctggcaggagaagcgagcgacgcttcgtcttcgccataatgaccgcgtcaaaaaagggaccgggaaagggggataccccgaaaaggatccttctccgtga

SEQ ID NO: 8490 - DNA, 687 bp, Zea mays
  Peptide Sequence Number=SeqID_51865
atgggggcccgggcccacgagtcatactccttgggtgtcggttcccgggtgcagaaaagcggtatcaaggcgcctcgcgcgtggcccgacgaaaccatcaggcgtgggggccacgggctcgtatcctcccctgaggtgggcccgggggccactgtaggtaccctgaaactagggtaccccttactacagtatgaagacgtggccactcatagcagggtcccgggattctgggacaaagaatacccaggccataatcaaggccaggcgggggaccatagccgacacgtgtccggaccataccgtgtacacttctgctccccgctcaggcggagccctgatgctgccacgtggcacggtgcacgtgacgtaagccaacgggcggagcctgacgtaaggcctctgggctatgcgggctctgcatttattgcggacaaggcgcgccgcctgcccattccactagcaggcgatgtgccacctcagcatttattgagccctgtccattccactggcaagcgatgtgtcgcctccgcatttaatgagacttgtccattccacgggcaggcggcgaccagtccattccacaggcggcgtgcctgtccattcccctggaaggcagtacgcccatgctgccgcgtgcactacgcccatcattactcgcgcgttaccaaggaagcagccacagcataa

SEQ ID NO: 8491 - DNA, 639 bp, Zea mays
  Peptide Sequence Number=SeqID_51866
atgggtcctatggctgtgctattaacactttcttgccaaagctatgtacagatccaggtcccagtcgagactacctcctgggggccgggtcaccatctctctcttaagtatgctggaatcctcccacggcaacagcagccagcgcaggagctccaagggtcgccagcaggggctccatggccgccgtgctcccttccatggccgggcgtcccttcctccggcgcaccgaagcacctccctgcgctcagcctctctgactcggcgtccttgcagcaggcgagctcagcccctccccttcctcccctcggccagccatggcgggacgccctgcttcccatggcgctcatgccccctgtcctaggcgctcgcctcctccatgttggatggccggtctgggtggtcgctgctgccatgagagccatgtcggctccctgttctccatgccgctgggctgcaggaagccgcgtccttcttctctacgcagggcgcccgacctccctgcgtctccctcctcgctcccctccccatggccacctccctctgctcctcccattttccataggagccgagctccttctacctgcagcaggcgccccctgctcttccctgtccgcgaccagggagtttcagctggcgtga

SEQ ID NO: 8492 - DNA, 1026 bp, Zea mays
  Peptide Sequence Number=SeqID_51867
atggcgtctgtcgcgccgtcaccgctcctcgtggaccgtctgggcccaatcggccgtgacgccgcgcgcccaaccgggccaaaattccccctggcccaggttatgaaggctggggagcaccaggaggataaggagggggaatgttttgtccggtttggacatggcagtggcctgactccttctggtataaccgttaaggttaggacatggaaggctcttgggtcattaggacatcctagtactcagaggaggaaggattccctcatctcttacggagttgtgcgctacgcatggggatccgcaagaagccggaatatgtctggaaagaataccgcgaaaacgaaattgagaagtgctctatggcagtctacctgggagaaagccaaagttacccaaaccaccctcccttccaagtcaccttcatcgggcaccgcttcccagacacttgccaaaatgttgcctgagaagtccttcgatagctatgccaaaactacaacagatagcaacaaaaatacccccacctggaggaaaagacttcaggccctgtcaggaagagatcctaccgaagatgaccccaccatcgtctacatggccggatatctccacactctcgataaccactacgatgacctttcctcccactgcacccacctaaactcctgggtggaaagcttagagcaacaggtcaaggaacttaaaaaggagaaggcgtccctccaagagtgtctcgacatagcagaaggcgaggaggccaacactcgtgaagcctaccgaaccctgaagatggattacgataagaagctaaagaagctcacccccacgaagaaaatccaaaagaagaccaagagccaaggatgccagactgagcgaaagaagaaagcccctcaagcaccacctccccccaggatagagaatttggccgacgtcaaggatatgtccctagctagccttgatgaccttctcaaggaatttggggacactttagaaaaggagttcggaagtacctcagaaagcgctcgcgtgtag

SEQ ID NO: 8493 - DNA, 318 bp, Zea mays
  Peptide Sequence Number=SeqID_51868
atgggcgacgcaactagaagaagagaggagggaacgtcacgagatggaggcgaggattatggcagagcgggaggcggagcgggaggctcgcctggcagatcatcagaggatgacagagatgttccagtacatgcagagccttggcgccgcacagggcatcgctccgccacctccatgttccctccaagtgaccctgctctcttccatactcctgggcaaatctggggcggcatccaacaaccctccggaagggttcagcccaatgcagcaccaatcgaaccacccacctccatgagtgttatgtttttcagtgtttag

SEQ ID NO: 8494 - DNA, 273 bp, Zea mays
  Peptide Sequence Number=SeqID_51869
atgggcctgcaatgcattacggaggcatttggaggtagcatttatctttataccaggaaagatgtcatgaggtactacaagcagaacgccgatgaaacatgggtcgacatctcgctgaacagcctgcttcccggctcagtcctcaattgccagcgtcagctgtcaggatgtctcatccaggaaaagcctaatggctactcaaacgtctgttgtctgtccatgattgagatcttcagttttcacacgttctcagtacagtacctgatggtttag

SEQ ID NO: 8495 - DNA, 396 bp, Zea mays
  Peptide Sequence Number=SeqID_51870
atggcgagcgggggaggaggattcagcgacgactttggggaggatgaagccgcgggggtgggggattcaagcgacgactttgggacaacggctattgcgctgaggcatggaggcgatgggggctttggatggtctgtcgacggaaaagcaatcccaagatctttcctctctgacagggtccctcctaggaggagagatcttggttcactcgaagttctttgtgccatcacaaacggatcgttgcctacgtgtggacggtccacgcgcctgcagaggagaagtggagctctctgtgtagtcatggacgatctagctatctattgtggacggtctgtgctcccgcaaagagaacccaaaggtcctgcacgccgcacgcaggccgtatggttcatttag

SEQ ID NO: 8496 - DNA, 1314 bp, Zea mays
  Peptide Sequence Number=SeqID_51871
atggatttatgcaaccgcgagcgcgaagattcttacacccggttccatttcggtttcagagactaccatgcctccgtttcccgacccttcgctccgacccacacaggcgtatgcgtacgaggttttgcaagcttgacgtacaatgccagcagcatgattggccacaatctcgaggggccgttgccagtccacattgtgaaggttctggatctcgtagtacatatgaatcatgctagaccgatgtcaacagcagcagcatcaaaggtgcctgttggagcccggaaggttggtctgaaggttgccatgatgagtcctggtttcgtatatgagccgtacagcccacgggaacgcattcccttctggaaaagatggtttacactaagtggctggagaaggacaaaggaggacatcattttggagatgaagaacgcatatgctgtttcaaggctgaggaagaaaactgggtataccaaaaatcaattctacgatcaagcattaaaaatatacaaggaggttaacactttgatggcacatggagacacatcatcgcttcggaaaattctgacagagaggatgcattctactataaaaaatgaactaaagagaagacagtccatgtggaattctgtacactgggaactggtggagcctgctgttagtatcagaactttgagggctcgcatgattggcctcgataagaatgacctggataaagcttttatacagcttacacttgagtttgttaccaaacaggtttcgttctctcagacttcttccctttccccaacgctagcaactacaaccggggcaaaatccttgacacaagccactgcagatgttgagactggaccgaaactccgtaaacaccatcgtcgggagccccttggtgaagacgtcggcgaattgggaggtggtcgggacgtgaaggacgcgaacagctccacaggcgacccgttcgcggacgaagtgaagatcgatctcgacatgtttcgtgcactggtgctagacggggttggtggagaggtagacggcgctgacgttgtcgcagaagaccagggtgctcgtggccagtggactgtggagctcttggagcagctgacggagccaggacgccttagccacgccgttggccacggctcgataatcggcctcggcgctggagcgggagacgatcgactggcgcttcgacgaccaggagacgaggctatccccgaggaacacgacataccccgaggtggatcggcgtgtgtcgggacagcctgcccactcggcattggtgtagacgcgaagctatgtggtcgaggaccggcgtag

SEQ ID NO: 8497 - DNA, 311 bp, Zea mays
  Peptide Sequence Number=SeqID_51872
atggttgggcagttcgacccgcggctccagcgcacgccgctgcaccacggcacgttcccagctgtggaggccagcactcaacggcctggtggatgccatccagagcctgctggtggacgagctcctggcacgccgctggcctacgacgtctctggcagtgcagtgcttgagatgatgcggaagctgcctcgcatggcatgccacagtgcagaggaggaagacgctggggagacgagaagctatgttttcgcaaatgagtgtctggaccggctgtcaattgctgttggtggtaatatgattgtctatgccag

SEQ ID NO: 8498 - DNA, 312 bp, Zea mays
  Peptide Sequence Number=SeqID_51873
atggggagaaagaaggaggaagttcacatacgttattcgctcaaccagtttggggggaataaggtgcatgaattccgccaaaggtgggaggtccccgtgaagggtaaaggcttaccaaagaggatgggaccgccatcacagcaaaatcctcccgagggcctccccaggaatcccttgcaggaccgccatcacagcaaaatcctcccgagggccttcccaggaatcccttgcaggaccgccatcacagcaaaatcctcccgagggcctccctacactgaccactcccctactgcccttgcccctttcgggtaa

SEQ ID NO: 8499 - DNA, 591 bp, Zea mays
  Peptide Sequence Number=SeqID_51874
atggcggaggtgaaacgtcgcccgcttcgcctgccaaaggtgacgagtgaggtatccgtatcccggaggcgtaggagtccctcggctcggtcggccttgccacccaaggcttctcttgctcagctaaagaaccctcaactgctttgcaatgagccagagctggaggcagcggtgtcagcgtggacaggggcggagtcggctcgagaagaagcttcgttggcccaggagcacgtggcctccctggtcgaggaggtgcagcagcggcggctggagcctggccaggtcgtccgctggcgggaccgaccctggagtcaggctgccgaggccatgagccgggctgatgtcctcgggggacagctggctgaggctacagagcggccggtcgaggtgtttgcccgggtcgggacccttacggagatctcgactatgatggcacgagcttggtgctggcctcctccttcgaggtggagatccttccgcccgcgtcaccgtccgaggccgggccagatcccggcgaaggtggagacaacgcttagggtgctgctgctccctctgttgatgtctgaacctgcagggagagtttgtctgtag

SEQ ID NO: 8500 - DNA, 309 bp, Zea mays
  Peptide Sequence Number=SeqID_51875
atggaggcagatccgcgagtcagggtcgcgacgccggagcagagacgggcgacgctgcagacggagcaaaggagcgcaggggcgggcgaacggtgcggtggccgcgacggcggctggcgcgcgcaaaggagcgcaggggcgggcggacagtgcgcggtggtcgcgacagcggctggccgcgcgcacagaagagcgcaggagatggccgcgacgacggctgggggagggagggccgcgacggcggctggggatgcaagggccgcgacgatggctagaaaactaggaaaccctaatcgtaacctcctctga

SEQ ID NO: 8501 - DNA, 537 bp, Zea mays
  Peptide Sequence Number=SeqID_51876
atggttgggcagttcgacccgcggctccagcgcacgccgctgcaccacggcacgttcccagctgtggaggccagcactcaacggcctggtggatgccatccagagcctgctggtggacgagctcctggcacgccgctggcctacgacgtctctggcagtgcagtgcttgagatgatgcggaagctgcctcggctcctcgtgccgctgctcctgtctgaggactcagctctccagctcaacgtcgtcactacgctgctcaacctctccatcctggaggccaacaagaagcgcatcatgcacacggagagcgccgcagacgcgctctgccatgtcatgggctcgagcgccacgtggcacgccaaggagaacgccgtggccaccgccctcagcttggcagccgtccacgcgtaccgccaccggctcggccgcaacccatgtgttgtgcagctcgcgcgcacggcccctccaaaactgaggatgcgctcatgcgcccctgtgcctgtcagccgagcgagagaacgccacaaggatcgttga

SEQ ID NO: 8502 - DNA, 240 bp, Zea mays
  Peptide Sequence Number=SeqID_51877
atgaagaagagcgaaaaagatatccacgactctcgagaagcagcaaagaaagctaagaaagctccagaacttgagagacatatagctgaactacctcctccaccagagccattcgacccactagctaacccagagacgaagaaagctatagaaattattaacatggccaaagctattatcgacgaagttgttaccaatctgcttaatgaagttgcagaaaaagttatgaaggaggaatag

SEQ ID NO: 8503 - DNA, 147 bp, Zea mays
  Peptide Sequence Number=SeqID_51878
atggctgatgagctgagccttggtgaagctgagcctagtaggccaacacagtggaccgtgcagctgttggtcgacggtggcctcctcgaacgccagtgtgggcagctggaggccgacggtggcaacctcaagcgtagtggagcctag

SEQ ID NO: 8504 - DNA, 318 bp, Zea mays
  Peptide Sequence Number=SeqID_51879
atggagcaggcggccatgggaagggcagaggaagcgccgacagaggagggagatgaagacgccagcagcaaaaaatcagaggagggagaggatagggatggcacgccgtcaggaacaaaaatcaggaagcagatgatttgctgctgcgcggggaagagccatttggctgggaagaagaaggagctggacgacttcagcagattttcctctgcagcggctggagataaccacggctggaatttatccattgctagaaagcggcgcagggatttgttcacgagcttgagcggcatcaaaaaaaatcccacccgaggataa

SEQ ID NO: 8505 - DNA, 318 bp, Zea mays
  Peptide Sequence Number=SeqID_51880
atggggaagaacctcggcgcgcagagctccacggcgagccaggcgagcagaaggaaccagcagcgggcgagacctgggacagggaggaggaagcggctgggatgggcgcgtagagcagcagggcaaggccgcggtcaggcgagatccgaacagagaagctccggccaggggcgagcgatcggccggcgatggagcaggcggccatgggaagggcagaggaagcgccgacagaggagggggacgctagcagcaaaaaatcagaggagggagaggatagggatggcacgccgtcatgaacaaaaatcaggaagcagatga

SEQ ID NO: 8506 - DNA, 339 bp, Zea mays
  Peptide Sequence Number=SeqID_51881
atgtgtacagatccaggggaaggcctggggccggttctaaagaatggatgcccgttccatagggtggtccggatgtgtgaccggtcctcgccccgtcttcctatagggggcaacaacgaggccattaaagccaaagagccggaggtccggcggcaggtggcactgacggtctcgccagcggaggcaaccacctctgtagtggggagcctcaccagcggcggcgaccacctcagcaccgacgacaacgaccacctgcgcaccagtgctgtaccggcgaacggcggccactccaacgcgcgcgcaaagaggtcctcgctcccgtcctcactacgggagtga

SEQ ID NO: 8507 - DNA, 207 bp, Zea mays
  Peptide Sequence Number=SeqID_51882
atgtcgaaaacccccgcggaaccacttcgagcgagggcagcgtctccgccatctagcgacgtcttcggcaccaggatcaatatgggcaggcgacggtgtgatgccacggtgaagatgttgattggtggcatggaccgattgatcctatggaagcacatgctagtggtgatggaaagtcgcatggatgacgagttcataatttcttag

SEQ ID NO: 8508 - DNA, 354 bp, Zea mays
  Peptide Sequence Number=SeqID_51883
atggctgaagggagcagcagcaccctcggcatcgacgacaccttcggcgagggtcttctccgggaatccggcccgagcaggcggctcggctggtcaactccggcgtcggtcccgctaacggacgacccggctaggctccggccaactaggtttccttttcgagccaaccccgcctctgttcatgctgacaccgctacccctggcctcggctcatcgaagagcggccgaggggttcctttaattaagctagagaagcctcggacaacaaggccgaccgagccgagggactcctacgcctccgggatacggatacctcactcgtcacctttacacggggcgactcacgcttggtga

SEQ ID NO: 8509 - DNA, 681 bp, Zea mays
  Peptide Sequence Number=SeqID_51884
atgggacgccggtcttgttccctgcggcccgagtcagctcgaggtagggtgatgatggtgcctcctgttgacgtggctggtctgcgccctaggttgggcgatgtggaagctcctccgaagccgaggtcgagtctgtcttccgtggccgaggtcgggtccgagccccaggttcgggcgaggcggagatcgttggttgatgtcggggcggagtccgagccctggggtcgggcgaagcggagttcgtcgtcttctggggccgagcccaagtccgagccctgggtcgggcgaggcggagatcgtcgtcttctgggacttagcccgagtccgagccctgggtcgggcggagttcgccgtcttccgggacttagcccgagtccgagccctgggtcgggcggagttcgccgtcttttgggacttagcccgagtccgagccctaggtcaggtggagttcgtcgtcttccgggaattagcccgagtccgagccctgggtcgggcggagttcgccgtcttccgggacttagcccgagtccgagccctgggtcgggcggagcggagcttcctatggtgcctttggcagggcctgactgcctgtcagtctcactctgtcaagtggcaccgcagtcggagtggcgcaggcggcgctgtccttctgtcaggccgatcagtggagcggcgaagtga

SEQ ID NO: 8510 - DNA, 93 bp, Zea mays
  Peptide Sequence Number=SeqID_51885
atggctcaaagaagatcccaaaagaacaagaacacaactcggaaggaggcgcagctccgctataattcaccggactgtccggtgcgccactag

SEQ ID NO: 8511 - DNA, 561 bp, Zea mays
  Peptide Sequence Number=SeqID_51886
atgggcaggactacgattggaggagccagccaatcgaccctcaggcagcatatgctagagcaggaggacaagcccatggacggttgggtatttttgattctacgattgattctagggagacgtcgtggacgacagtccacatcctcgtcttcacagtcgttccattctcgatcatccgcccaagagatagagattgcagtgttgcatcaacagatagagtgtcatcaatcagttttgaggcaacaaatggagtaccagaggcagcaagctgagtaccagaagaagaaggacaagtattattcaatcctccaggcccataatcaagctctactctcgcaactagcacaacaagcgggcgtcccaatgccgacatatgggatgccgcctctggactttgcactgccaccgccaatgctgtcgcctccacctccgccacaatttcctgtgctgctgaaattcattatgtctgacggcttaacacaggccatcggacataagacttccgtatgttcgacggcttaccatatgccgtcggacataatactcccttatgtccaatag

SEQ ID NO: 8512 - DNA, 1089 bp, Zea mays
  Peptide Sequence Number=SeqID_51887
atggtgggtacaagtgctatgactgcacggttgggtccgcgagagtggaaccttgtatccaagggaagtgggcctgatccattgctagaggatcgatggggacgattgacgtgtgtggggacggagtgtccctacatgtcgtgttgtttaggtttacctcgcaaggctaaaaactcgattcaaatcgtctgcttctctcagctaatgagactacttgaccgctatgctgcatcgaataacagtcagttggtggagcccgaaggagttgcaggtgaagaccctgagcagcagttggtggtgacgaggatgatggttatgattatgcttatggtaatgcaggaggtagagtctgtgaggagctgctctcctgtgcccccgctggaggcgccccctgcaccaccactgggcgtaccggccactggagtagctgctggaggagacccggatgacggagatgacaacagcagctcgagccacaacaccgacctctcagaggagcaggagccggagggatgggttgctcgacccatcactcgtgacgctgctcgcgggtgtcactttcacgatgcgctcgacatcttgctacgccagacacttgactggcgtacctggtctatcgagtattgctgtgttgtcttccagcacagtcgcggggtttacccggaccgctggaaggcgacttgcttggtgcgccgtccggagaacagtctccggggtgcggaggtctgctcagaacattactctatttctgagcaggactcagctgaggcggccaggcaagatgccgcacggcgtgtgctttcacactactgctcagtgctcggtggggtggctgacggtcttaacctgaggtattacccccgccgcccatctagcagcacaggaggcgtggttgtctcacctgtcaatgaggacaatcctaggttgagcagcacagtcaacctagtcgccgtgctaaacacggagctggaccatgctttagatgagatgtcagacaacaggcgcagaggaggaaggcgtgctcagcagaagcaagcagcaccacaagatgaggcaccccagcagcagctgccaccaccgccccaatga

SEQ ID NO: 8513 - DNA, 99 bp, Zea mays
  Peptide Sequence Number=SeqID_51888
atggggaagcctgtcccatcactcctcatgctcctcctcaaccgagcacaattccacttattactcaatgtagcagcatggatcaagcagtctcattag

SEQ ID NO: 8514 - DNA, 924 bp, Zea mays
  Peptide Sequence Number=SeqID_51889
atgtcttcgcgcttccttatgcatcgtgtctttctaccttccaagcccccggatgggggatacccgccgtctttccgccttgttgttgggggaacgcaactccacgggagttggtacctttcagccatcgttcggcttcaaggattttcatcagccagcccggctgtacccctacgccggtggtcacccgagatggtgaccaccagcccctgggtgtggagaagcaagctgggctgcgatcttggtcccaccctcagcttcaaggatgttcatcatcctcgctggggtggaggccgggctgagccggagctctacctcccgcgcgggttcgtgggtcgtcctctccttcggcgttcgagggagagggcgctcactggccctgcgggcgggccggacttcgacaacgcggggccggtcgatggcgggcgtcgtcagcctcagcgcgtcgggctcttcggcttggctcccggtgccccctcctgccggaaggcggctgccgcgccgtgtgcacgggaggaccgcccaagatgtcgcgcgctgccagggcggcgttcgtgttctggggcggtcctgcctttgcaccggtacggcgcctccgtgcggagagacccttggaccacgtcgccgtccaaggctaggtcgggcctcgctgaaggtgttgtcgacgccgaggtcgagaaggctcgaagaatcgctttggcagaagagcttccgaacgtgaagacttgctcggtccgcggaatcacttatccgaacgtgagttacttatcgcagaaggtgatgagtgagccgaagcaccaggtcacccacctggaggtctcgggaccggacccctcgggcgtggtagcgtcgcagggactgctggccctcgtcctcggggaaccgtattctaagtccgtgggcaagatggcctcggccccatag

SEQ ID NO: 8515 - DNA, 225 bp, Zea mays
  Peptide Sequence Number=SeqID_51890
atgtccctcaccaccattggatctcaaccaatgccggtcaacgacgaggacgagtggtcgttcgggttctgtgaaatcggcagccgcgtgtttagttgccccgcgaggaagaaccccatgtacacctattgggaacgcatcgtcctcagggagaccgagcgtggtatactggatcctacagggctcagtcgcgagtggtcggaccactcgtacaatcacctctaa

SEQ ID NO: 8516 - DNA, 576 bp, Zea mays
  Peptide Sequence Number=SeqID_51891
atggtgcccgccatgtttccgagagtacagcaccccaccttccagtctcttgccacggagggtacaagctactctcgccatctctccactcccagtgcgtgcgagctgttctgcaaggaggtgggcaaatgcaccggggcttgccttggtgaggaggagagtcgggctcttctaccaggatatttgcagttagcagcaaatccaaatgggacaccctctggaggaccttcagcgacaacctcagttggagaagtttcagatggaggaacagactccccttctacttcaacttcaaattcttcttcaagttgtcaactaaaagaaaaaggaaaaactgcaatagtgtctaggccgaaaccaactgcttggcccacgaacgcagagaaatctgccctgcgctggtattattgcgcaaaggcgcctgtcgattcagttaacttgttaataggtcaagcattatttccccttctcactgacaatcgcattgagaaccctaggtttctctgctttcacaaagtatcgtccctggccgtgaccctagcggtcccaggtcgaacacctgggtgcagccgctaa

SEQ ID NO: 8517 - DNA, 204 bp, Zea mays
  Peptide Sequence Number=SeqID_51892
atgccacgccaggcctccacgccgagcctccgcgcgaggcgcgaccgcgcctccgagctctgtcgccccggaccaccggcgcagggtagccgggtattcaaccaggacacctcagattgggactgggaggaggacgaggagacgatttggtgctaccagggtcaggccccatctcctagaaatggaccttcctcctttgcctag

SEQ ID NO: 8518 - DNA, 276 bp, Zea mays
  Peptide Sequence Number=SeqID_51893
atggaaattaaggaaaggaaaacgaataatggaaatttatgtcatcctaagaccttggtaaattgtccactaaaatctatagaggcaataccaatccactgtaataatctaaaagaaaacctaatcttaaaagactgtaatcttgctgacggagagtacatcctcgtgccggagcaaggagctgctcaggaggtagccccagatccagcacccgagcctgcaccagaggacctgcctaccactgctttggaaggcaagccccggttttatgcataa

SEQ ID NO: 8519 - DNA, 627 bp, Zea mays
  Peptide Sequence Number=SeqID_51894
atgaaccattatgcgccctccatcatcaatcctaaggtccagatcaattccgaacggcttagagacgccagccgctgtctccgagtgaccgagtggagcagccgaccagggacagaggcagtcggcaacgacggcgagcagcccgacgaggcgacgagcaacggccgacgaggcgtcaagcagtggcgcggcgggctggcggctgcctgcgtccctccgcggaccgcagtttcgcctggccgcacggtgcccgactgcctggccgcagtgccgcacggcgcctggacgacatggttcaactgcgtcctcccccactggcagagactcaagctgggacacaactacgtacggggcagaccagggcaaataacagaaagggattttcaccgtggttcaagacagcgcgatgccgatgatgtctccgcggcgcccatactggagattcgatcccccgagagttcagccgattgtgctttgcggagcaccaagcggcataaagggaggttcctcaccgtgactgcgacgggaatggagttggatgatgacgacgcgcaagttgtcccgaggcgtgaggccccggcgcttgacaagcagccatcggaggcaaccaagctgcagcagcgatga

SEQ ID NO: 8520 - DNA, 375 bp, Zea mays
  Peptide Sequence Number=SeqID_51895
atgaccaagaccaaaggccccaacatagggatcttcgtcaagaaagcccaatcaatgaagatgaatggtacggcgattttcatcatggatcggatggtgggaatcagaccggggaaggatgaacggctgcgggcgacgctgctcctctccacggtggtgaagtcgccggagttgaggcaggcacgtgctagggtggctccagggtcgccgagattgggcagagagggagagaatgctacgacgaactcagtggcggggaaaaaggccacgaatccgaggacagagaggggagaacggcggggagaaggccacgggtggaccggaggaactccgacgagggattccagccacggggaggggcttgaggcgcgctaa

SEQ ID NO: 8521 - DNA, 735 bp, Zea mays
  Peptide Sequence Number=SeqID_51896
atgtccttcacaggcacgctgtccttcctggggttccggccccgggacgtcgagacaagagagacggcaatcgcaggcagccgtgtcgacttccccggcaagcactgcggctcctgcgcgggcctcgggcaccaggagtctagcctccgctgcgccctcgaggaggcgatcttcctcgacagacctcatatcaagaaatatgtacctgttattttggataatccacgatcttggtaccagataatatcaagaagtacaaaactcggtgaggatggcttggtggtgcatgtgcaaggggttagcagagctgaactcaaacaaaatgcaaattaccctggtgctttcctcataaaccgcacagcaagtcctcttgcttgcctgccattctctgcttctaaatttgtgtgccctcctcagatgaaagagataattggtgactatgatgctattcatgtcagaagagagatactcaccgtgagttcatcgagaaaagaattgcaaagtggattcgacgaggtcgcactcttttcattgcctcaaatgaaaggaccccatgcttcttttcatctctgtcagacaagattaccacaacgcacctactctcttgcacctgtatctcatacatatctgtctgtggcggaactgcccgaattattccaacttaagtgcctaagccccgccttagaggctggaccacacttaaatgggaataacccgtcaatccctcggatctag

SEQ ID NO: 8522 - DNA, 216 bp, Zea mays
  Peptide Sequence Number=SeqID_51897
atgacgagggcaatcttcactggccaccacccgcagtgccatgaatttctcaactcattcaccttgccgagctcggcgccaagatctatggcgccgagctcggtaccacgtcggcgccacgacgtccgtttgtgccaacgcaacacgtacctcggcgccatagcctatggcgccgagctgtgttacctcggcgccataggctacggcgccgagtaa

SEQ ID NO: 8523 - DNA, 573 bp, Zea mays
  Peptide Sequence Number=SeqID_51898
atgaacaaactcactggcattcgaagtgccattgcaaacggaaccccggttccccctccgcaggtacgaacaaccccactccgagggggaaggcctgcggagcaatggaaggccgacgaattgtgcgccgtcacccgctccagcagcggcgacgacgacgccttctgctccgagggaccaagcagcggcaacgccgacctcaggctcgatgccgctgccaggaggcccccgcccgtgccaaaacttgtgaggcaaggacgggcagaaggccatagagttggagggaccgagaaagggggacaccccgaaagggatccttctccgcgaaggaactgggctccgagccccccattactgatcaggggttcgaaggctgcccccccgagggttcaacagtcgcctcagatcgcgtgggcccgacacccactactggtcaggggttcgaaggccagccccccgaagggctccatggccgcctcaggctactcgggctccgcgcccattactgatcaggggttcgaaggctggcccccgaagggttcacagtcgcctcagacactgagcgagggatga

SEQ ID NO: 8524 - DNA, 1848 bp, Zea mays
  Peptide Sequence Number=SeqID_51899
atgaaaccggccgcccccttgcccagcaaggcttcggccagtgcgaaggctgccgccactggcgggagcaagccacccctaggtgggctcgtgaaaggacgaaggtcgccttcaccggcacgacgtattgccgacttcggcactgacattagtgtcaaggattatcttgttggttcgggtgaggggcaactggccgttgtcccgcctccggtgacgaccacttcgccaacgacagtggcgggggcgaagggagccgcacgggacccgtgggccactttctgcgtgagcggcaagattctgtcggccgctaccgctaaggacgtggtgggctccatgtctctgcgactgagggaagcgtcgcagcagctgtcacagcagctgaagcaggcggccgacttcgccgacctcgtcgcgtcgggtgccttgactgcggatgttgccgccgaggtcgagcgtctccgggcacagcatgcggatgctatgcgggagaagtcggctgcggaaagcaaaaatcgcaggctgtcggagaaggtggccgctatggaggccgagaagatggatctccggcgccagctggcgggggagaggagggaagcgaacaaggccatcgctgatgcgcaggctgcgcaggccgaagccaaagcggcgcgggcggagggtagtctcgcctgccaacgcgccgaggagctggaggcgaggttcaacgccctgtgcagccgcgtggacaaggccaagacctcgacgcgcgtggaggtcgagcggacgcacgcgcagttcgtggacacgtaccgcgagctgggtgcgcgaactgctgacttcgaagtgcccggccaagaagcgggcctcgaatggttgcaggaggagctgctggtgctcccgaccattgtgacaggtttcatgtccttcgcctccctcgtcacctgtgagggggccatgaatgctttgtcccgtgaagggtgcaggcattacgaagtcttcgaccaagcggacgaaaactttgaatgtgaaatcttcaaggtcgaagaccccatggtgaagcagtcggcgggggcactctttgataggatgtggagtccgcacggccgagaggcggtcagggagcggtccgaacgggcaatagagcagatggctcgtgacgaagacgtcgaggaccttgttggtctggacggcgcgctgctcgaggccgcggaggtcgatccgttgccgccctccgctgcggccggcgaagaccccgcaccagcccctgcgtcgactggcgaagacgccctaaaggtggtggccgagccggctgccgagccggcagccgaggaccccacagccgcaaccgggccttcgcaggttctggggtttgggcctgcgcacgcaaccgctactgacaatgctatttttgtggtggcttcgaccgtggcagctgatgacgattcgtttgactctgtgtctaagtgttttgagtctgatgattctgggagttcgattgcatggtcggaggagtcttcggatgaggacatggattatttcgcggcattggatgtggctgcagcggagccctcgccgcgagtggagggttccgaggagcccccgggcgcgagtactgggtataggcggcgaagggcggtggcaaaacggagggtgagtggattgtcgcgaagtggtgggcaccaacgtggtgagatggagagtgggcgtcttcgtgtggacgggactggtaagcgagaattgttgtcctcgccgattggggtgagtgtgggtgagggagagctgcgaaatctttttgagggtgaggaactgaggataatgttgttcaactacagggagatgggtatcatcccgaaggttgagccaatgtaa

SEQ ID NO: 8525 - DNA, 798 bp, Zea mays
  Peptide Sequence Number=SeqID_51900
atggaggtcgtgttcgggcgacggctccggtcaggtgccgaggaagaagctgcgccaatccccctcccccacatgctgtcccacgcccaccagttcatctccgagcggtcccaactcgagcgggaccgtaaggagtacaagaaggacctccagaaggtgtatgccagggtgctggaggtgcactatagggagaagaaggttgccaagagggaggaggccttgacccagagggaggccctcacaacagagctctgggccaagctgaatgccctggaccagaccctggaagcgcagtgggtccagcagcatgagcttgaggcggagaagaaagaaaaggagctagaggagcaaatctgccagttcaacgcggcacaggcggtgcagggttcccaggcggtggaggccaccaggaaggcccttgaagatctccaggcggtgcaccgcaccggggtgcagcacattgtcgcgtgggccggcgaggcaagcacgacactggtgccgctagggatgagccccatcctagtgtcggagcagccggtgtcgatctccaatgcactcccggtgctggactccaccgctgatcgcctccgatgcctggaccagatccttggtgcccgcttggaggcagagggcagcaagctctaccggacggtgattgagtatgtcttgacatgcttctggaggcacgaccccgccatatccttggctgccatagaagacgccgcccgagagagaatacaagacgccgtggagctggtggccgagtgcttccagcgcgatcctgctgacgacgagtag

SEQ ID NO: 8526 - DNA, 336 bp, Zea mays
  Peptide Sequence Number=SeqID_51901
atggtcggcttcaccagaaaaggaggaaatcgggcaccggacaagctactgttcatgtccgatggtgcactggactgtccggtgcaccaccctacagatggcaaggatagctttccaaatggaattccaacggctcctagtgctgtcaagaaggttgtaagcagccacgacggtgttgtaaccaatatcaacatagtggaaggctctatttgtcgtactgatagatctgagcaaatggaggaaggagttgaaatagactccaagcccaggaacttcaatccagctgcaacctactcgaagggtcctccattctactgcgatccagccttcgagtag

SEQ ID NO: 8527 - DNA, 1020 bp, Zea mays
  Peptide Sequence Number=SeqID_51902
atgcaggcggcatgcaaccgcgccaggtggacgcgcttctccgactcccaacgcgccagcatggaggcccaggcccacgcgtcacgcaaccggcgcgccagatgctgcatgcaggcaactgcaccgccacttgcgccaccatcgcgcctcttcggttgtggaaccaatgccgcgactcgaggcgacccagcgcacgacccagcggcgccagcctggcgcgacgcgaccgccctgccaaccactcaccccgtcgcattaactacgcggcgcgacaggcgacgcttctggcaggagaagcgggcgacgcttcgccttcgccgcaataaccgcgccaaaaaagaggttcgaaggctggccccccgaggggttcaacagccgcctcagatcgtgtgggccctacacccactactggtcagaggttcgaaggctggccccccgaagggcttcacggccgcctcaggctactcgggctccgcgcacattactgatcagggcgggagcgatcctgtaacggaatcccatcggagggaggcatcgagccctcggaccccgtcgtcaggggaccgggtccggcagatcacccgcagctcaccggagacaccttgttcggtgcccatcgagggtaacatggcgctctcccccctcctccttgcggaaaggcgacgtaggggcagccgaagtgactgcagtcacttcgccgcttcactgaccggcctgacagaaggacagcgccgcctgcgccgctccgactgctgtgccactcaacagagtgaggctgacacacagtcaggcccggcctcaggcaccataggaaactctgctctgcccgacctagggctcggactcgggctcagccccggaagacggcgaattccgctccacccgacccagggctcggactcgggctcagccccggaagacggcgaactccgctccgcccgacctagggctcggactcgggctcagccccggaagacgacgaactcgtgtggcggaactgcccgaattattccaacttaa

SEQ ID NO: 8528 - DNA, 174 bp, Zea mays
  Peptide Sequence Number=SeqID_51903
atggggctggggaaagctagactggccggtctacggctgcagtggctcgggtggccgcggacacgccgcgcacgggcaaacggcggtgaactgagctccggtgaggttatgaagcatactacaacttttatatttggcccaagccatgatcataaggtttacatgaccttttga

SEQ ID NO: 8529 - DNA, 243 bp, Zea mays
  Peptide Sequence Number=SeqID_51904
atggatcagagcttcatactcggctgcattgttggaggctggaaacagcaactggagggcatatttgaggtgctcgcctccagcttcagcgagccatcaaaatatattcgccatacttctgcagtctctgggttatctggcccacttggctattcggccaatggcttccttgttgtgaagaatatcccctattggaaaaccagtgactactatgactttgtggtcgtcaaagtagtgacgtag

SEQ ID NO: 8530 - DNA, 234 bp, Zea mays
  Peptide Sequence Number=SeqID_51905
atgcagccaagtcggcgccgccgccaccgtagccgtctcgtcgccgtgactccgccgccgccgccgcaaggttgctccaccaccgcccaagcacagcccgtgcccgacgacctcccctcccgccccgacgcgcagcccgagcacgacgccaccgacgccaccggagccgccccgacgcagcccgcggccgccggagcctctgcccctgtccccgacgcctcctaccagacatag

SEQ ID NO: 8531 - DNA, 336 bp, Zea mays
  Peptide Sequence Number=SeqID_51906
atgacgagatgcggcattacggtggctcgacgattccgacgagtaatttcacgcggccccaccaccaaatcccccccggtgagggcatattcatcgccggtgtgccacggcttctcgcccagaccgaggtcgcagacgtggttcattgtcgatgcctaccttcgacctcaccatggttccctggtccgtggtggcacccgtgattccagcgagctcatggaagaaatgcccagatttcaaatatccaattcaaatttaaatccctatttgaattttctgatttcaactctcaaagataattctaatgtaaaggtcttacaaatcctacccccttaa

SEQ ID NO: 8532 - DNA, 234 bp, Zea mays
  Peptide Sequence Number=SeqID_51907
atgccgccgtggataggccggagcacacgccgccgacgagctcgcccgcctgctcacgtggaccgggcgattccggccatccccgacgacgagtcgtacctcgacgtgatcgccagaccctccccgagccaaccctacccttcgccggacctccctcgccgccgcacaaaaacctattatcaccagaggatgccaacaaaaataacctttaggacagaacctacccctaactag

SEQ ID NO: 8533 - DNA, 1401 bp, Zea mays
  Peptide Sequence Number=SeqID_51908
atggacgcggccactggaaggctctcgttcgcattcccgctcaagggacgcgaaccagccatcaaagccaaagagcgggccgctccaaagcgcaccggcagcaacagttcgccttccccggcatggctggaggacgcctcctccacagagctggaggatggtttccaccaccagaagctggaagaggaggtggccagccggcccgcgcgggaggtagagccccggctcgcctcgctatccgccccagcaaggatgatgaacatccttgaagctgagggcgggaccaagatcacagcccggcttgcttctccccatctaggggctggtggtcaccgtcttggccgtcgtgggctgagtcttctccaacacgctccaaggtcctccccctatggcgcgggggctgggtcccgcgcgtcatgcaagctggcccagggtagaagaagccaaaccgccgcgcgcggtgcatgcaaccgtccaacggttacaagcgtccctccactttcgcccagactagcgggtgaaagggcgggcagccatgtaggcggcatgcaaccgcgccaagtgggcacacttctccgacttccaacacgcccagcatggaggcccaggcccacgcgtcatgcaaccggcgcgccggatgctacgtgcgagcaactgcaccgccactcacgccactgccacgcctcctcgactgcggaaccagtaccgcgactcgaggcaaccctacgcatgacccagcagcgccagcctggcgcgacggtcaatacggccaaaaatgggcctgcagtaatggtggtggcaggcgggcaggagcagcggtcacgtcgtcagccaagcttacatcccatccgggggcagcgagagaaccctctctcacggcgtgaagacgacgcgcccgtgttccgttcctcgaactgctcgcgcacgcgcaacggctaccccgcgaaccactcgccccgtcgcattaactccgcggtgggacaggcggcgcctctggcaggagaaggaccgggaaagggggataccccgaaaaggatccttctccgtgaaggaaacaggctccgagcctccctactgatcagaggttcgaaggctggcccctcggaagggtttaacagccgcctcagagcgcgtgggctccacacccactactggtcagaggttcgaaggccggcccctcggaagggttcaacgaccgcctcaggctactcgggctccgcgcccactactgatcagggcgggaacgatcttgtaacggaatcccatcagagggaggcatcgagccctcggaccccgtcgacaggggaccagctcaccggagacaccatgttcggcgccctccgagggcaacatggcactttccccccctcatccttgcggaaaggcgacgtaggggcgtaa

SEQ ID NO: 8534 - DNA, 891 bp, Zea mays
  Peptide Sequence Number=SeqID_51909
atgtgtccagagaaagtgatataccccaaggcctcaacagtgagtccggacccccatggtagagtgccggacccctggatatacagtccggacctccaaggttggtccaggacctccacatgtgcaagccggacccctggaatgggatctggaccccgccatatggggtctgggccacccacaatggggtcccaaggtggcgtgcacagtccacgatacgcgggccgtgctgttatttaccattactcgtatgtttcggctatcaattactcacataatgtattccttatgttatgctcctgggcccgcatgtcggggctcagcattcttgaccaccagctcgtcctaggacaggttggtgcccggcccacgctagatcctaccgatgtcgttcacgccggtgaaccagcaacacaggcacgccctcctctgcagcggcgcgatccgacgcttcaggaagtcaccgaccacatgcatcaacgtcaggccgcccgtagccaagcccttgatcctgtccagtatgggcaggaactccggcgccagggacggcttggtcctccactacttgcgattgagagccggcccatcggacggcaggacgaggcggtcgttggcctcggcgctggcgatcacccagtcgcttcgccagttctcccacctcactccaccaagggtggggatgtagacgacggtcggatctggcctcgtctggaagtagtaggccccgatgtggtccctagtcttcccagacttgaccaacacgaagaagtggcgaaagagagaagtgtagggagccacccctacgaacatctcacagaggtggacgaagatggccgcctggaggacggagtggggcatgaggtgctgaagctgaagcccgaactcctctag

SEQ ID NO: 8535 - DNA, 1232 bp, Zea mays
  Peptide Sequence Number=SeqID_51910
atggcgcctcctgttgacgtggtcggtccgtgccctaggttgggcgatgtggaagctcctctgaggtcgaggtcgagtctgtcttccgaggccgaggtcgagtctgagcccctgggtcaggcgaggccgagaccgtcggtggaggccagggctgagtccgagccctggggtcgggcggagcggagttcgttgtcttccggggctgagcctgagtccgagccctgggtcgggcagagcggagaggtacttcagggggctggatacacgacaccccctcagtacgcggtgcagcagttcgagaagcaccgagtaccccgctgtagggtgaggatgaccttggagcctcatcccctgcagccaggctggcgctctttggactccgagtcttttggataccgagctgaggacacgatcgaggcgatcgctctacacgggttgaccactttctgcggattccatcctttggagctggctacccaccccattggcttgttccccaccgaaagggaggacgacccaatgtggaaggatcgggtggagcatgccaaggatatctgggccatctacccaggacagactgcacacttgaccgtacggtgcatgaatgctctgtaccgtctgcaagtgatgcgcggtgaggcgatgtcccatctgatggcactattggaggcaacaaagattactttggacaacagggaggagcttgtggttgatttgtccactgaaatggtggagaaggacttgcaggtggagcagctatccactgatatccaagagttggaggaactagtgggcaccagggagaacaccatcgaggttctcgaggatcggctcattaacacccagcagcagcttgccgaggctaatgagcacctggatatgcatcatcaggagatccagaacatggaggccaacgaggacgtcgacatcgagggaggagaggagcctgcctctaatatggtgttaagtatgtatgtggtttttcagatggccgggaggcagcgtcgtggccagaatgagcgcgttcctccaccgccgccaccgcctcccactttgcaggagctgatggctcagcagaatgagatcttgaggcagctagctcagcgtcagccaccacctcagcactatggtggcagagaccatcagcgtccccccgcggcgctacctaccaggagttcctcagtactcaacgtgatcctcaaggcagaagacccactggatgcagatgtatg

SEQ ID NO: 8536 - DNA, 765 bp, Zea mays
  Peptide Sequence Number=SeqID_51911
atggcgcctcccgttgacgtggtcggtccgcgccctaggttgggcgatgtggaggctcctccgaggtcgaggtcgagtctgtcttccgtggccgaggttgagtccgagcccctgggtcgggcgaggcggagaccgtcggctgaggtcagggctgagtccgagccctggggtcaggcgaagcggagttcgtcgtcttccggggctgagcccgagtccgagccctggggtcgggcgaagcggagttcgtcgtcttctggggctgagcccgagtccgagccctggggtcaggcggagcggagttcgtcgtcttcaggggctgagcccgagtccgagccctgggtcgggcggagcggagttcgtcgtcttccggggctgagcccgagtccgagccctgggtcgggcggagcggacagtcggagcgacgcaggcggcactgtccttctgtcaggccgggcagtggagcggcgaagtgtctgcggtcacttcggctctgtcgactggaggacgtgcgtcaggataaagctttgtgctgatgggggttaccagctgagaattaggagccttgagggtacccctaattatggtccccgacagaacttgaggatactttttcttcgagggacccagaacttcactgatgaaataaacaggatgttgcactgggtaggcatgtccttcttctgctcgctcgactaccaacgcggtgcttaccatgtgagtcatgcaagagatatacagcagcagatcttcagctggctgagttga

SEQ ID NO: 8537 - DNA, 228 bp, Zea mays
  Peptide Sequence Number=SeqID_51912
atggtgggtacaagtgcggccactgcacgacggccagtcggggtcagtggggcattgtacgccaaggcgctagtgcttttggcaaccaaacccccacagccaaacagctgcatgtctagaggttctctggaggagatggttgctgggataacttggccgaccaccctgccaccgggttggactgtcgagtgggaccctgcctcggctgaggaggagcatgaggagtga

SEQ ID NO: 8538 - DNA, 174 bp, Zea mays
  Peptide Sequence Number=SeqID_51913
atggcgggcggaaaggagctcgccggagctaaggaggggcgtcaggccggcgatgattcgaagggcaggaggaggggttggtgtgattacgtaccagtttccttaggtaggcaatcggggaagttggatctcaagaattcctcggtctcccaagtagcttcttcctctgagtga

SEQ ID NO: 8539 - DNA, 342 bp, Zea mays
  Peptide Sequence Number=SeqID_51914
atggcgctaaggtcaaattcgaacaagtcggtcgtctaccggtgcagcatggaaggtcatgaggacaccttgtacgaggagaacgggatccagttctacatgcagaccttaatctggggcaccgtggacttaatttgtgtttggcaatgcccaggccatgttccagagctgcccgctgctgcggcgccgggcatggacctcgatggcgtggagacctacctcagcctcccctacaggaacatctcccacatcaccttcatcaagtcgtatctcagtcgcgtggtcagcaccaactgttgggtcacgtggaacaagaccaaggtcgtcgaggataccacctag

SEQ ID NO: 8540 - DNA, 948 bp, Zea mays
  Peptide Sequence Number=SeqID_51915
atgcggcttcatatccttagaggtatgaaggcagaagtcatccttgcatttgcagacatttgcactcatgagatgacttctcacagatcctcggacgaagggaacgcacattcccagacggacagacttgcacgagaaggctttcctcgcatcttgtgggaggtacttcagggagccggatatacgacacctccccagtacgcggtgcagctgttcgagaagcatcgggtaccccgctgtagggtgaggatgaccctggagcctcatcccttgcagccaggctggtgttcattggactccgagtctttcggatatcgggctgaagacactatcgaggccattgctctccacgggctgacgaccttctgtggctttcaccccttggagctgtcgactcaccccattggcttgttccccgctgataatgaggacgacccaatgtggaaagatcgagtggagcatgccaaggacatatgggctctttacccagggcagactgctcacctcacggtacgatgcatgaatgccctatatcgtctgcaagtgatgcgaggagaggcgatgtctcatttaatggtgttgttggaggctaccaagattaccttggataagagagaggaacttgtggtagacctgtccacagagttggtggaaaaggacctgcaggtggaacaaatgtccaacgagatccaagagcttgaggagctagtgggaaccagggagaacaccattgaggttctcgaggatcaacttgtcaacactcagcagcaacttgcggaggctaaccaacatttggatatgcaccaccaggagatccagggcatggaggccaacgaggatgtcgacatcgagggaggagaggagccgaagcctgcctccagcttggacactgctggctcaggcagaccaccttccctcgagtcgagcattgccttgtttgctcactag

SEQ ID NO: 8541 - DNA, 414 bp, Zea mays
  Peptide Sequence Number=SeqID_51916
atgtctgcactacttcaagacatgtgccatcaagggaaccatagacttcatcttggatctgccaagtcattttatgaggaatgcaaaatcgtttcggtgttgaaggaggtggtggcattgccaatggcgccaccagagcaggaacgatctagaaatcccatcaaaatcgccccaggcaagagcgggttggcatacaagacttgcacaatcgagggggaaggagaaaaaatttacttgggtagggtgggcacgattgtgatctactcctacaccgatataggtaaggagattgtaggcataatatctgatcgtcaggacgtccagactgtcgagagggggtactattgcgccactttcaagtgttacgggcctgggatgtctccaatggtaacctcaactctgacctatgtatag

SEQ ID NO: 8542 - DNA, 588 bp, Zea mays
  Peptide Sequence Number=SeqID_51917
atgcggcttcatatccttagaggtatgaaggcagaagtcatccttgcatttgcagacatttgcactcatgaggggccatctgattctgttggagtttatgttgattatggttctgagcagattttaaggctaaaggcagagcttgcgaaatcatcaagtgaccttgaaactttccttttaaaggctcttcgttctactgcctattctggtgctttagcaaacccactaatcacaatagaatgtttagctagcagattaaatgcagatgtcatggagaaatttattcttgtgatttatttattttattaccagaccggaagttcaaaggacaaatcaattaacttagataggtggaccattggtgtatctattgagaagttgagaaaaggatggaggactgcccaatcgtgcgcaggcgccgccggccgagccaggccgtggctcatggtaccttcggattcgaatcagaaccacagtgggggaagcacgaacaatacgaagattgacgaagtaccgaagctacgcgcaagggagcttcggcatgacagcaggaaggggaaccgacttaaaggggagaagactatttag

SEQ ID NO: 8543 - DNA, 1035 bp, Zea mays
  Peptide Sequence Number=SeqID_51918
atgcctccaacaaatgatccagtatccacaccaactgttccaacacctgataaacagcaacatgatcaggaaagccatgttccttctgatcatatcaaagtatcagatgatgctcccacaacagacaagcctgctgctcctaagttaacaccagatataaatagtgaaggacaaaaatctgttacacatgacactcctgtatctggtgcacctctattcgataaaaccccactgacagatgcaactactgacctggttgcaaaggatagttcctataaagctgcagttgctgaacatccccacgtgtcacgtgaggactgtgctcgcaacctgcttaagttcattttgtcaggaaaactagacccgagcatgtctatcattaattttggaggatttggagggtctgtccttgatgttatccagtcttttggtcccaacaaatgtcttgagaatactttcatgcagggatttatcgactgtattcgtcaggatgatgtattatacaatccagattctgtaatcaacactctaatactgaatgtcaacgttgggaccgttttgaatatcgaggagtttgaacaacacagttcaaatccacagcccttcacaacatcacttcttaaagaacatcttgaactgacccttccttcagatgatgttctgaaccagattaaattgataccttggtccagattaataatgagaagacttagcattgccttacatgaagctcgacctgagtcaactgtaccaaagtttggcaactacaagattgggctccttcccaattgtccaaccatgacaccagggtcaaatgattgtggtttttttgtcgcaaactttctccgctactacgattttgatgatggcgacttatcagaattttatactccggatgaaccattggaccaacgtgcctttgttctgcattaccttacctttcatcgcaacaacatggttgccccccttcctgcagaactgctgcctttcaagtattctccaaggagacgccgctgtttggaagccaagacttag

SEQ ID NO: 8544 - DNA, 507 bp, Zea mays
  Peptide Sequence Number=SeqID_51919
atgggtgagccacggaccgcgctggtcgtgctggccgccatgggcgagccgcggaccgcgctggtcgcgctggccaccatgggcgagccgcgggccacgacggatgcccagacgcgcatcgcaacgaagaagaagggagggtggggaggggaaggagaaggagggtccacctcggcgggcgccgcaagaagtgcaaatcatgtagcaagaaacagagaaaagaagagaagaaaagaaatgcaaaagacttggcttggtacaaccgaagtccagctcggtctggcacaccgaactgtccgtggtgcaccggacagtgtccagtgcgctaggctgaactccggtgaacaggccgctcttgggaaatgtttggcggcgtacgactataattcaccggactgtccagacgagaggctccaagttgtggagattcctcgcaaacaggagaaaagacgaaggaaaaaagtcgtggtattcaagttgatcattggatcacttgaaaggggttga

SEQ ID NO: 8545 - DNA, 189 bp, Zea mays
  Peptide Sequence Number=SeqID_51920
atggggtccaggcacagtgcttgctctgccgaggctgggtgccgaggttctttcgatttgcttttgttagtcaccctcctgcggggagaggttgcctttggtgcaatctatgctcaggtaaagaagaaggagaacggtgttgaggcggttctccaggagttccaggactttgacgagttcaatgattag

SEQ ID NO: 8546 - DNA, 306 bp, Zea mays
  Peptide Sequence Number=SeqID_51921
atgggtgagccacggaccgcgctggtcgtgctggccgccatgggcgagccgcggaccgcgctggtcacgctggccaccatgggcgagccgcgggccacgacggatgcccagacgcgcatcgcaacgaagaagaagggagggtggggaggggaaggagaaggagggtccacctcggcgggcgccgagaagttagaggttgcccactggacaagtgcaagagggaagggtatagatagaaaaggggaaattattctaaggccatcgaaaggcaaggggaataataagacatacagaataggggcatga

SEQ ID NO: 8547 - DNA, 804 bp, Zea mays
  Peptide Sequence Number=SeqID_51922
atggagcttggcggagggacagctgtcggagcggttgagtccttgctgacgtcctcttgcttccgtaagggggctgagagccgccgtcgtcacagagcatgcggggcgccatcattgcctatctggcggagcgagccagatgggacgccggtcttgttccctgcggcccgagtcagctcgggtagggtgatgatggcgcctcctgttgacgtggctggtcgagtccgagcccccaggtcgggcgaggcggagattgccggctggtgccggggcggagtccgagccctggggtcggtcgaagcggagttcgtcgtcttctggggccgagcccaagtccgagccctgggtcgggcgagacggagatcgttgtcttctggggccgagcccaagtccgagccctgggtcgggcgaggcagagatcgtcgtcttctagggccgagcccaagtccgagccctgggtcgggcggagttcgccgtcttccgggacttagcccgagtccgagccctgggtcgggcggagtttgccgtcttccgggacttagcccgagtccgagccctgggtcgggcggagcggagttcgccgtcttccgggacttagcccgagtccgagccctgggtcgggcgaagcggagcttcctatggtgcctccggcagggcctgactgcctgtcagtcttactctgtccagtggcactgcagtcggagtggcgcaggcagcgctgtccttctgtcaggccggtcagtggagcggcgaagtgagggcggtcactttggctctgccggctgggggcgcgcgttaggataa

SEQ ID NO: 8548 - DNA, 216 bp, Zea mays
  Peptide Sequence Number=SeqID_51923
atgaccatcaaaaaggatgaaagcaaaaggagacccaaatttgactcttgtgctagaaaggtgatgagttcaccacattctaggaccaaggctatttgggtgcctaagtccttattggctaaccttgatggacctatcatgagatggccacataggaaaaatgaagcacttgagaatgaacttaaaagactttaccttgctttggaaaggatctaa

SEQ ID NO: 8549 - DNA, 426 bp, Zea mays
  Peptide Sequence Number=SeqID_51924
atgaccggggataaacaaaggcaaaagctcaagcaaaagccatcaagcaaaatcaccaacacctacatcaaaaaggtgaacaaaaaggatgctacaccatatttgatcaagaagaaaaagaacggaaaggtgatagcaatcaaggcaaacaagcaagccaacaaaggaaagggggccaaacgcatctgggtgccaaaggagataatttcaaccatgaaaagcaccaagaaggtttggatcccgaaagggaatttattgccaagtgggttagtgaaaactttggacccaaatttcccacccatgactaagatctacaaatggcctttcaagtggttttggttatttggtcccaaaataggaattcacaggttgcgaagagaattggaccaaggcaatgaggatgcaacacctcaaaagaagacataa

SEQ ID NO: 8550 - DNA, 2532 bp, Zea mays
  Peptide Sequence Number=SeqID_51925
atggcgggcaagattgcagttgcaacagctacatctggggttgcggcttccataatgtctggtgggagaactgcccattcacgcttcaagataccacttactattgatgatggtgctatatgtaccttcacgaaacaaagtgggacatcaaagttgctacagaaagcgtcgctcattatttgggacgaggcatcaatggctaagcgacaatcaattgaagcgttggacaacagcatgcgtgatatcatgggacgccctggtctgccctttggtgggaagactattgtgtttgggggagatttcagacaagtactccctgttgtacgtaaggggtcaagggctcagatagttgctgcctctctacggagttcttacctatgggaatcaatgtgccacctaaagcttgttcgcaacatgagagcaaagagcgacccatggtttgcagaatatttgttgcgtgtcggtggtggaactgaggaagtgaacaacgatggtgatgttcgtcttccagatgagcatgctggaatgcgggttttcttgcctcgtatacccctgtgcccttctgatgacgagatgttccctttccattttaaaaggaagcagtttccagtaagactaagttttgccatgactgttaacaagtctcagggacagacgattcctaatgttgctgtgtacttgcccgaaccagtgttctctcatggccagctatatgttgctctctcaagggccacaactcgattgaatgtgaagggtgatcttgcactcatcgattggattaaagaaatcccttgtgaaccaagggtagaagtcgtgcttattgatgatgcttttgtggaaaggaagtggatggaatgcctatttcaaccggacgcatatctaggtgatgaggtgatagactgttacataaatttaataaaagctcaagagcatctaaaatgccgatctggaggtcgtgtacacatagaaaatgcttttcagttcaactttctaaagcgagatggtgatgttgaaactaaaacagatgagttatatccaagtaaagacatggcacaaatatctagcgctgaaagaagagttttactttatctagaccatgacatggtgtttattccaataaatattcgagaaatgcactggtatcttgctgtgatcaatgcaagaaatatggagatacaagtgctcgactcacttggtacatcatccggtcgcaatgacctcattgccactataaaaggactccaaagacaaattgatatggtatctcagcctcctcgtgtggcctcttttctactaaactatatcgagtactggacaggggatgaactatctgataattttacccaggacgacatgtcacactttaggaaaaaattggctgctatattactatcctcagatataaacaagagaaaggggtgtccgttatacaagtatgacaaagaagtcgatgctggatgctcctctgatgttcagatattagatagtcccacaaatcctaagaagaggaaactaccttgtgtatctgaagaaaacaaagtattgatggaagatggtgatggccccatcactcaagcagacttagaaaggtggtttgttcatgattgggataaaagaactcctataaaaatcccgaccgatgagtgcactaatgagtttttactgagtggcctttccacaaaggacatgccagtgaccaaagccgatttaatagatgttctatgtgattacatcatgacaatccaagatgatacgacattagagatgacatgggtgcgaagtttcaacccttttaagatagaaatatctgtcaaagacctgcaaaacgtattaagggtaaatctagatatgactctaaaatgctttgacatggctgttcgattgttggccattaaagagtcacatatgtcgaaagatgaaatgataaaggataaaaaacattatatggacatgcgcttctggagaatggttggttttggtaaacttgcaaagtaccatcaggatcctacaacagaagagttagccaaaacactcgactgttggccttcattgaactattatatcactggttgtaaatatgttcttatgccatggaaattcaacggatgctacgcacttttcataatcgatcatggtaaaaagcacgtaacttttatggactttacacccactgaagattggtgtaaacacatgccatacaagaggtttgcagaagcaattatcatggcctctaagaaatataagattgcctacaataagaaacgttctggatgggcacatgatatttttaagtgggaacatacaattcggtctggtcttccattggacttaaaaggggttaatacaagctacttcgttctacaagctatggtcatgtgggggagtggtagacgaatggaatttaatagggatacaaagattcttcgaaggaactttgtaattgatctattaagttacgaggagaattcatgccgctatgctatccctccaaacatacaacaacgacttattagtatcgctaaaaaagattag

SEQ ID NO: 8551 - DNA, 2008 bp, Zea mays
  Peptide Sequence Number=SeqID_51926
gaaggccgcaagaagcggcgttcggacagagaggctcgtgcagcagcagcagctgcagcagccgctgcgcaggcagcacttggagatcagcccagatgttccatccgatcagattgcattccgtgctcgtcgtctcgcctcccggtctcgctcctccactcacacctccgcttccactccgccacccaccctgcctgctcccgtcactcctattgctccatccacctccacagccatacccactaccagcactacgccagcttccactgctacccctgctcccgcccccgcttcagctcctcctgttcctccacctcgattccgggagcgtgatgagactgaggttcgtcctctggtttcggatcctcgtctgtttgatcttcagcgtgctactgcagcacgggtacgtcggttcaggtacgtacccgtggagtcttggctaccagctcagagagacccagcagcaggagttctattcagcacacggattcaggagtcattcttccgggctcagatgtctgctcagattgcgctgcgagtgcaccgcctattggatcttccagcttttttgctagcagccggtgctgagtctgaggcgcatctcacctatctgcctggcctcctgacccttctgactatcagcggcagatatgttgaggagtgggtccgcgtcttctacgcctctgtttggattgacccggatcatcattggatgaggttccgctttgagcgcgaggatgtcacgatcactgccagtcagatccgacagctatttggattccctgagtcgacgactcgccttcacagcctctgctacggcacttctgatcctcctcgtcgccctcacggcggtgtggctccagggacagctcacgtcgcggctctgttccgcccgcctttcacagatgggtcgcgacgttctccagcagacttcactacagcagcgaagtacctgtatgagctcatcagacggacactcctgccgaggatgggatacagggaggctaccactcatattcagctttggctccttggtgccctggtatcccactcacagtttgatgttgtggacttcctgatctgtgagatcgaggacactgttctggatgggattcgtgctcgtcggcagctaccttatgctcactacttatgccacatctttgcgcagctgattcagccacctcgatttcagagcacccttgaggcctcacgccttgtgtttggatcttaccgccctgctcctgagattcctgtgccagcttctgcttctgtgtttgacactccggccgaggatgcagcacttcgacagtttgacacccagggtacaacagatgatgatgatgatgattttggggttcctcctccgcctccgcctcctatgcctccacgctcacatgatcatgaggctgggagttctcgtgctgcccctgctcctcctccagctttggaccctgctcttgcggcgattctggccaacctggcagccgagcaggcccggttatccgagacgatgctctcgatgtttcagagcatgcaggacaggcaggatgcacttcagcagcagcttcttcaggatagggcagagaatagggcattcatggccctcatgcttcagcattctggtatctcagctcctccggttcagtctgctccgcctcctccgcttcacgctccagtggtgccttcgatcttgtctggaccccctgctggtacctctccgctccggccggtcactttggcgttcacctctccggctctcagctctatctgtccgcagccgccagtgccaccagcatctgctgttaccactaccgctgtggcagtatctgtgaccgcttctgttccggtagctcctgcagcgcggcctccgtccgagtcagtaccagctccagcttctaccgcagatcctggatccgagactgactctgaccctccgtcggcgttcgctctgctacctcgacctcgaccggatgcgcccccgccgcctcctcctgcttcagatgtttag

SEQ ID NO: 8552 - DNA, 396 bp, Zea mays
  Peptide Sequence Number=SeqID_51927
atggccgaaaacggagaagagagtgaagtgattgaagagaagacaccaccacctttggaatctcaggcagggacttggctctacttcgacaactgcgagtccaagcctgactcacctactaacaaaggcaagccccgatctggtcttaagaaccccggtggcgggttgacatatgcaagggttaagtgctacatatgtcgtgtgattggagatcctcagctgagtataatcgattcggatcgccgtaccttcgcgcatacccttgagagtcttttccttagtcgggtgaggaagcgacaaatttttgttgcttttgctccaaggtggtaccaaatgaggaaaaacaagactgaagtgcgggaggacttggtcctccacataggatcttttgcttag

SEQ ID NO: 8553 - DNA, 153 bp, Zea mays
  Peptide Sequence Number=SeqID_51928
atggtgactttagctcccatattatgttgtgccctctggggaaagctggcagcagaaatcctagagtgtgagcagggtgttctggacaaagaaagcttgtaccttaaaacaggaggatacaagaagctggagtggttgtttgaaggcttttga

SEQ ID NO: 8554 - DNA, 270 bp, Zea mays
  Peptide Sequence Number=SeqID_51929
atgcatgataggggcatgagcataataaaggatgaagctaaagcaaggattataaccggcaagggagagaatgaaaccaaggtcaggataggtaaaacaccattctcaaatcgagatgggaaagatgatgattcaaaaggtaggcataagataacatcatggaaagatctagagattacaaaggtacatgataagcatcaaggtaaagatcgagggatgacagaggttaaagtgataatggacaaacacacaacaaaggatgtattttag

SEQ ID NO: 8555 - DNA, 315 bp, Zea mays
  Peptide Sequence Number=SeqID_51930
atgcggaagcgaattacatacactttacattttatttcaaaaaagcagcaaaagtctgctacttcctcacctaaaaacaacgaagggataaaccctgagtatggaatactcagcaagtcttacccgactaaagaaaagactctcaagggtatgctggttatatgggagtcaaggatttcaagggggggtaatcaagatcaaggaaggctcggatccacaaatgtcgaagtagaaactattcctggcctgagtgtccaaaggtggttgcacttgctcttcggggacttctacctcttcttcacgttctactcataa

SEQ ID NO: 8556 - DNA, 333 bp, Zea mays
  Peptide Sequence Number=SeqID_51931
atgaagagtttaattcagaatcctatcgagatcaccttcagggtcaagaggccagtttgttacatggactttgaagctcaagttattcagaggtgtgacaatttggccttcaatacctggcacctagagattgagtggtctatgctggagctaaaggacaacattgcttcagtggatgagcacgaacttattaggtggagatatacatataagtttgagtccatcttcggagacccctgcgacgaatggctcgaagctattgaggagagccacatatctgaggaggtcatcgagatacccatactcgaccagacccctctagcaaaaatgtaa

SEQ ID NO: 8557 - DNA, 939 bp, Zea mays
  Peptide Sequence Number=SeqID_51932
atggcagcaggcttgcaggtgtttggccagccggcgtctactgatgtctccagggttctgacatgcctgtttgagaagaaactggagttcgatcttgtccgcatcgatacattcaagacgcatcacaagcttcccgagttcatcaggcttcgggatcctaatgggcaagtgaccttgaagcacggcgacaaaactctcgttgattcgagggacatctgccggtacgtctgcacccagtttccaaacgatggaaacaagagcctttacggatccggcgctctagaacgggcgtcgatagaacagtggcttcaggcggaggctcagaacttcgggccccccagctccgcgctcgtcttccagctggcgttcgtccctcacctcactcacctgggcgttcgtcaggaccctgccgtgatcgccgagaacgaggataagctgaagcaggtccttgatgtctacgacgagatactctcgaggaacgagtacctggctggcgacgagttcaccctggccgacctctcccacctcccgaactcgcactacatcgtgaacaccgagagaggaaggaagctcttcactaacaagaagaacgtggccaagtggtacgagaagctctcgaagcgcgagacgtggaagcaggtcgctaagatgcagaaggaacatcctggagagctgcgcatcattatattaagagaagaaaaaggtccaaaatggaccaaaacaccaagcccccaagatgatgacgctgttaatgcctcttcttttggatttgtgcacttgcttacacaccttcctccaccactcagcaaaagatatctcaatagaaacaggagaaagatcagcaagccccaacggtgcaagaatgcaatgccaaaattgtctagcaaagatgcaactgcaaaggagatgttggatattctccggctcctgatcacatag

SEQ ID NO: 8558 - DNA, 2502 bp, Zea mays
  Peptide Sequence Number=SeqID_51933
atggctgggcgttgggcgaagtgtgcccttgccagatgccctcccatggggggaagctgccgcgatccggccgcctttgtgcgtgaggcggaggatggggcggtgcggatcgttggtcgatacgtggcgaggatagagggccagcgtagctgggatatccgcgggtccaatgaccgtttgaacagggtttttgaattgaatcgactgccgtataacggctatcctggccaagacgatgtggacctccgcgggaagaaaccggtggtagagtctggagacgaccctgcgccggtggccgccccatcctcgaagaagaggaaactaggtactgctgtgggaggacttggggtttccaatggttttgccagagaattgatgaggacatgcgcggtcccggggggaaggatgtcttcgcccgagctccgggagtcttcggcgcggatggtcagggttaccgggcgttggtggcctaggaatgttcctatcccccgcgcggccggcgaagacctttttacatctcgcatggttcgtgagtggaaagtgtttccttacgggcgaaatattgctgctgttgtgtcggtagtgatggacaaggatcgccaaggagctgcgcagaagcgccaggcggtcgtcaggcttcatgaagccaggccaaagaggcagcggggggctgcgaaggctacggcccccggcggaggccatctgccgaaggcggccgtcactgcatccagcagggcgccggagcttgcggctgccgccggtggttccaaggctgcgaaggcagcaccagcgtccggcagagtgacggaggctgtgaagtcggcccgagggttgccgccgccgggcaagcgcgtcgccgacttcgccaccgacattagtgtggaggactatcttgttgggtcggacgaggggcaacttgtcgttgttccgtctgccgcggcgaccacggcggctgccgtaatgccaaaggcaaagggtggtgctcctagtgctggcggcgagatgccggcacttgctgctgtgagggacgaggcgggcgctgtgtcccgccggctggaggagatgaaggaggcgctaagtcagcaagtgccgcaagctggcggacaaggtggccgtgctggagggggaaaatccggcctccggcgccaattggtggaggagaggagggaggccaatgaggccctcgccaaggcgcaggctgcgctggcggaggccaatttggcgcgggcggagggtaatcttgccagggagcgtgccgcgcagttggaggagcagctcaacgccctgcagagccgcgtggagaggaccgagaccgcgacgcgcgcggaggctgagcggacgcgcaaacagcttgtggattcataccatgagctgggcgcgcggaccggtgacttcgaagtgccggaccgagagcccggacttcgctgcctggagtgggtacaggaggagttgcaggcactccccactatcgtggaggggtttatgtcgtatgcctccctggtcacctgcgagggggcgatgaacgcactctctcacgaagggtgccggcacttcgaggtcatcgaccaagccgatgaggattttgaacgagatatctacaaggttgaggaccctatagtgaaggagtccaccggagccatctacgaccggatgtggggcccgcacggtcgagaggtggtcagggagcgggccgagacggcgagggctcaggcggcgcgcgacgagagggtggatgatttcggggcgttgaacagcgcgctgcttgacccggagtcgaacccggcggaggccgtgcccgaggctgccctggagccgcccccggagactgccgaaggcgctcctgatgcccccgcagccgctgcggccggcggaggcccacccctggagaccgccgaaagcgttcctgatgcccccgcagctgctgcagccggcgaaggcccgccgccaactgctgtgccgagggttgaagatcctgcgacggtggcgttggaggcgacggcggaggctcccgcaacggctgggtcctcacaggttcaagattttgggcctgcgcacgcaaccgccactactagttttttggcggcttcgaccgtcgatggtgttaataaatcggatgggtctacatctaagttttctaattttggtgactccgggagctcggttgagtggactgaggagtcgtcagatgaggacttggactattttgcggccttggatgtggcagcggcggaggcttcaccgcacgctgcggacacagaagatgtgcctggtccgagtaccggacgcaggcggcgaagggctgttgcgaagcgtagagtgagcggggcggagggcggtcggcttcgtgtgagtagggctagtcggcaggaactgttgtccttgccggctgccgcgagtacaggtgaaggggaattgcgaagtctttttgcgggtgaggagcttaggattatgttatttaactatagggagatgggaattattccgaaggttgagccgatgtag

SEQ ID NO: 8559 - DNA, 414 bp, Zea mays
  Peptide Sequence Number=SeqID_51934
atgggtaagaacaacaagagcaagcgtgagccaactcctccatcagaggattttggtgactcggagtactcagaggaggagttctcctctgagtctgaggggtctccgactcccatcctcctgcgtgagtcgtctgacgactcagacgactcccaggggctcgcggcggaggtctggatgtacatccgggccgtcgagcgctccgggctcgagggctcggatgagtcggagtactcctcggatgaggaggactcgtccgaggaggacggtggcggcgacggcgaggacgacgacgacaacgacgacgacgacgaaggcggtggcggcggtgacggtgacggcagcggcgggggcagcaacaggggcggcggcggcggcggcagcagcaggggcagcaacagggctagtggctag

SEQ ID NO: 8560 - DNA, 564 bp, Zea mays
  Peptide Sequence Number=SeqID_51935
atgtccgtagaccatggttcacctgtgaacctttccccagcctcaattcggtcgtcctcgccgtcggttggtcggaacacgctcatcctcctgcccatccgcccggtcaccgtaaaccgatcgattcaacgtcccctaggtgaaattgatagaggggaaacggtcggggtagctccaaggttgtgtccgctgctcgggagcgccggtcttggccccctccggccggtcttgctcgtcggagttgagctctccgtgctgagcaccgtcgagggccagtcggtgaagagaaatagaaatccagggactatactgcaaactgtcagcgactgtgttaaacagttaatgaacctacttcggtttagccagcttgatagagcaaggactatcttagctagccgcataccctggaaatgggacaggcatacccttgagagtcttttccttagtcgggtgaggaagcgacaaatttttgttgcttttgctccaaggtggtatcaaatgaagaaaaacaagagtgaagatgcgggaggacgtggtcctccacttaggatcttttgcttatag

SEQ ID NO: 8561 - DNA, 882 bp, Zea mays
  Peptide Sequence Number=SeqID_51936
atgtatgcggcttgctctgtcgagggtggattgccccttggagaggagtgcggtgataatgaggatgatggttttgattatgattatggttatggtttctgcgtcccgcttcgccattcggtgactggtcagtctagccatttggagaggctgcaccaccgcctgcacgaggagcaggagtgttggcgacaggagttggagcagcagggctcttcttcttcgccccagcaggaggtggagtctatgaggtgctgctctcctgtgcccccgctggaggcgccccctgcaccaccactgggcgtcccggccgctggagtagctattggaggagaccccaacgacggaggtgatgacagcagctcgagctacaacaccgacctttcagaggagcaagagccagagggatgggttgctcaacccatcactcgtgacgccgctcgcgggtgtcacttccatgatgcgctcgacaccttgctgcgccaggcactcgaccggtgcacctggtccatcgagtatcgatgtgttgtcttccagcacagtcgcggggcttacccggaccgctggaaggcgacttgtttggttcgtcgtccggaggatagtctccgggtgttcggtggggtggccgatggtcttgacctgaggtattacccccaccgtccacctggcagcacaggaggcgtgattgtctcacctgttggtgaggacaatcctaggttgagcagcacagtcaacctagtcctcgtgctaaacacggagctggaccatgttttagatgagctgagtagggctcgtgctgagatcgcccagttgcgggctgagcgtcacctggaggatggctcccccacccccgtcgagactcagcacccgtatcgctcaccttag

SEQ ID NO: 8562 - DNA, 270 bp, Zea mays
  Peptide Sequence Number=SeqID_51937
atgaacgacgatgaacctacaggagggcttaattacgccgagaaggatgggcacggcagcagccacgttgaggcgggtgcccctatccacgagctgcacgcgcacgcggtctccgccgcgatcccgccaggcgcggtgttcgttggaggggagatagttgcgaacccgggtgataatgaggatgatggttttaattatgattatggttatgaagaagatgaagtcgtggaggaggacttccaggagttccaagcgtacgatgagttctag

SEQ ID NO: 8563 - DNA, 327 bp, Zea mays
  Peptide Sequence Number=SeqID_51938
atgtccggtggtgcaccggactgtccggtgcgccaggcgacaaaaggcaagaattgccttcttgaaatgctctcaacggctcctagctaccttggggctataaaagggacccctaggcgcatggaggagaacaccaagcaacctttgagcattgttgatcactcacacttcattcttgcgcacttgttcgacattcttagtgatttgagctccattctaggcgagagactccaagttgtggagattccttgcaaatgggaaaagagcaaagtaaagaagaacaccgtggtattcaagttgatctttggatcacttgagaggagttga

SEQ ID NO: 8564 - DNA, 222 bp, Zea mays
  Peptide Sequence Number=SeqID_51939
atggcgcgacggtggcccggggcgacggtggcggacctccgcggctgcacgggggaacggcggtgtccaacacaagtgcctaagtgtaaaaaggtggacaaagtacaaatcaaggataaagtgctggaaacaggaaaaatccaattggaaatgtcttggctcgagcagccaagactctgctcagtctgggaacaccggactgtccggtggtgcactggatag

SEQ ID NO: 8565 - DNA, 309 bp, Zea mays
  Peptide Sequence Number=SeqID_51940
atgaaggatgccaagcccatcaagacacccatgggaaccaatgggcatctcgacctcgacacgggagcaccagacaatgtccggtggcgcacaggactgtccggtgtgccagcggagcaacgactacttcgcgccaacggtcgtctgcagaaggcattaaatgcgctacagtgcacgccagagtcagagcagagccagatggcgcaccggacactgaacagtgcatgtccggtgcaccaccagactgtccggtggcccagaagacagaagctccaacagtcggaatccaacggcgaggtgacgtggtag

SEQ ID NO: 8566 - DNA, 1227 bp, Zea mays
  Peptide Sequence Number=SeqID_51941
atggagttgatggggacgtgcgcaaccctcaggggaaggatgtcttcgcccgagtttcgggagtctttggtgcggatgctgaaggttaccgggggtcgatggcccaagaatgttccgatcccccgcgcggctggcgaagacttctttacgtctcgcatggctcgtgacttaaaggtgtttccttacggacgaaatattgctgttgttgtgtcggcagtgatgaacaaggaccgtcaagacactgcgcagaagcgccgggcggtcgtcaggatcacagatcctatgcgcgagacgaagagggcgcgggggagcgcgaagactgctgctgcctccggcagtagcaagcctgtgttggctgcgaaaccggttgtccccgggcccagcaaggtgtcggcgagagcgaagactgccgcctctagcggaactaagcctcccctgggcggacccgcgaaaggacgggagctgccctcgccggggagacgtgttgccgacttcggcgcgaacatcagtgtcgaggattattttgttggttcgggtgaggggcaattggttgttgtcccgccttcggcggcaaccacgccgccaacagcggtggttggggcgaagggtgccgcgcaagacccgtgggccgctttctgcgcgagcggcgagattctgtcagccgctgccgccaaggacgtggcaggctccatgtcccagcagctgatgcagcagctaaagcaatcgagtcttcgggcgaagcatgcggatgctgtctgggagaagtcggctgcggaaagcaagaaccgcaggctggcggagaaagtggctgccatggaggccgagaagacagacctctggcgccagctggtggaggagaggagggaggcaaatcaggccatcgctgaagcgcaggctgcgcgagcggaggccaaagtggcgcgggcggagggcagtctcgccagccaacgcgccgaggagctggaggcaaggttcaacgccctgcgcagtcgcgtggacaaggccgaggcctcgacgtgctcggatgtcgagcggatgcacgcacagttcgtggacgcgtaccgcgagctgggtgcgcggactgctgacttcgaagtacccgaccgagaattaggccttcgcttcctcgaatggttgcaggaggagctgctggtgctcccgaccattgtggagggtttcatgtccttcgcctctgttggggacttgctctcaaattctatgaattaa

SEQ ID NO: 8567 - DNA, 1062 bp, Zea mays
  Peptide Sequence Number=SeqID_51942
atggaccagtgcgtcgtactttgcggcgttattggatgctggaaacaggagctggagtgcgtacttgagttgctcacctccaagagcgataaagggaatccctgcccctgctctttgcagtctcagcgagccatcgaagtacattctccatatttcagcaacttctcggctttccaggacctgcgcggcccactccccttaggctgtctccagcaagagcctgatgtggcagacactctaaatgtggagggctccggcagtgcgctatccgcgctcttcgtccaccagccgccgctaggaaacttccgcgcattcgtaccccacgctggcgactgcgtcttccggggccgagccctcgatccggcgcgcttcgccgccggcatcgaggcaggagggcgagaagcggccgtgcggagggggatctgtcggcgtagagctcgcaacccttggaaccgaggcggcgcgacccaccacaaccgaagatccaagccagcttccccctgttcgtcgccggagagtcgccatcggcaaaaggcttcgtcgtccgccgacttcgtcgaaggcagccgccaaaaggaagagaagctcctcgtcgccgtcgtcttcgtcttcgattcggtccaccgagccagatccgcgaagagcgagatgcaatatataacagccatggattcggagaacgaaaagctccgtaaagcactggctactctgctcagagttgttcaaaagcgtagttgtgacatcgttgatgtcgtcacatcagccttccagcctttcaactcacctttggtcgacgaattgaaccgagcactagttgagattgacgacctcgtcaaggatcttgaagacgtagcagtgcaaactcagtgggaggtagaaaatatggctaagagtgaagtgaaagaacatccacaacaagaggaagcagtagaggaccttctcatacatgatggttcagaagacgagctactgatagacgaagagtcaccaattaactatgaagaccttgtgggctacgacgatggtcgtgactactcaaccgacgacacatatccgtactag

SEQ ID NO: 8568 - DNA, 1116 bp, Zea mays
  Peptide Sequence Number=SeqID_51943
atgccgtcctcttcctcttctgttgccgatacaccaccggtcggcgcatcgtccgagggcacgctgagcaacgtggcggcggaggagttgcatcctggtgacacagtggaattcggcgtgtcgcggatgtcctcgatccgcgtgcacgacatgcaacagcttgaatattttggcggcggagtggcgcgtgtcccgggggtagaggaggtccctgagccagaagtgatgaacaaggatcgccaggatgctgcgcagaagcgccgggcggtcatcaagctccccgatcctaggcgtgaagcgaagagagcgcgggggagtgcgaaggatgccgccctcggcggtagccagccgacgctggctgcgaaagcggccgcgcccggatccagcaaggtgtcggagagcacgaaggcagtcgtcgccggcggaaccaagtctaccccgggcggagctgcaaaggtccgggggctgccttcgccggggagacgcgttgccgacttcggcacgaatattagcgtggacgactatttcgttgggtcgggtgaggggcaaatggttgttgtcccgcctgcggtggcaaccacggcgtcaaccgtggtggttggggtgaagggtgatgctttctgcgcgagcggcgagatttcgtcgtccgctgccgtcaaggacgaggcgggcaccatgtcccgccggctgagggaggcgtcgcagcagctgtcgcagcagctgagtcaagcggccgacttcgccgaccgcgtggcatcgggtgcccttactgcagatgtgtctgccgaagtcgagagacttcgggcacagcacgtgaacgccgtccgggagaagtcggctgcggagagcaaaaaccacaggctggcggagaaggtggccgccctggaggccgagaagacggacctccagcgccagctggtggaggaaaggagggaggccaaccaggccatcgccgaggcgcaggctgcgcaggcgaaggccaaattggcgcgggcggagggaagtctcgccagccaacgcgccgaggaatgggaggtgaggttcaacgctctgcgcggccgcgtggacaaggccgatgcctctacgcgctcggaggttgagcggacgcgcgcatag

SEQ ID NO: 8569 - DNA, 483 bp, Zea mays
  Peptide Sequence Number=SeqID_51944
atggatgccgaggattggctacacacagtagagcgggagttgcacactgctcagtgcaaagatcgagagaaggttctagggcttgatgatagtgaagaaagggagttcctggcactgaagcagggatccatgtccgtcagcgagtaccgagaccgattcctgcagttgtcttgctacgcttcagaagatgcaatccaccccagcagttcaagcaaagtcacccccagggataccagcatcaaagttaacatcaacagcagtatcagaggcagtttcctcagcagcagcagcaacagcagtagtgccgccagaacaatcaaccaagagggaaccaataccagaggcagaacaactaggcacctcgccttcctgccccagcagctaatcagaatggtcagacaaccccagtgcaaggaggaggtcgaggatgttttcactatggagaacaaggccactgggcgtcgcattgcccaaagaaagtag

SEQ ID NO: 8570 - DNA, 270 bp, Zea mays
  Peptide Sequence Number=SeqID_51945
atgatgaagcatttgagaacaagtccccaacagacgatgaacctaccatgcaaggggaggaacctccccagcgtgatgcccgacgatgaagaaacaaacgccgaaacgtgtgacgacatcatgaagccagggaatgggatccagcatagcccgtgtcctggtacgaagcctcggaagtgggagaaactcccgacgaacgagtacaccgagaaagacgtaactcccgccgtcgtgatcgccgataggctcaggattgggagcgagagctag

SEQ ID NO: 8571 - DNA, 1143 bp, Zea mays
  Peptide Sequence Number=SeqID_51946
atgcgagtgaatacaagtcagcgtgaacagtacagggatactgttcatctatttataggcacaggacgcagcctgtgtggatttacattcatgtcctttataactgattacaattatgacacaggaccttcggcgacgaagcagacccccaacataatcgagattacatttgctggaaataagcctttagtgctagttttctttgagtgtaaatggatgctgctaaagtcgaagaagtcagtgaaggggttgttcaagggcctgggcctatttcagggcagtttgagcagcagcagacgtcgagagctattgagcgctgcacatggagatgaggaattgggaggatctgcctttgatggtgaaggacaccacactcaggtgaaccttacgttgggttctctttgccgccttcactaccctggtatagtgaaggtgtcagatggagatagcgtggatgaggtgctcgtcaatacctgggacgagtacaagttaaaaaagaacgagaccacaccgacagacagggacttgtgcgtcatgacttttggagaggattacatggggcacgctgaacgtgtgttccaaaacaatgcaaagaagctggtgaaagataccatatattatgtgagaattcaagctacaaatctgcattttcaaaatcatcctgaagaagcaggccccttgaacaaaaacgaagggtcctcaaagaaatatttgactgaggatcaatatcgtgaggtgatggtttcatggatggcacccgtgcctgatgcgtactatgcttggaagctacgtgtggccaaaagcctagtgacattgaggtctaccaggagggccacaaaggaccagaccctaacaaccctgactagctctgcagccagacgaccacggatcggctggcggtatatgaggagaagatggttcggtgctatggccctgacttcgactgatgacatgaaccggtggatccctcggtggtgtactcaagtggtgggggaaagcgcatggacgatacacactctttcaacgggattcattgactcgtcgtcagtgagatctcagaggacgggtttgtcttcccgtagctcgtgctctcatcgatcgaacgagcaggagttggagattatgaggatccgtgaggaatga

SEQ ID NO: 8572 - DNA, 294 bp, Zea mays
  Peptide Sequence Number=SeqID_51947
atgcccgcgccggcgtgctcgcctcgggacctgcgcgggagctcgtgccgctgggtagcagaggtatccgaccaccgccatgggcgattcgtgcccaagatgccggtccggcctcaagatgagaacaggggggtcgctagagcatgttatgtcgatctaggtcctggtggggcgaaaatcgtaactggtggagcatggatttctcgccgcgacatcaccacctccttcgatttactttgcgccttgggcggaaccatccttgccccaaccagagttgcattgaattcattttaa

SEQ ID NO: 8573 - DNA, 1257 bp, Zea mays
  Peptide Sequence Number=SeqID_51948
atggacaaggatcgccaaggagctgcacagaagcgccaggtggtcgtcaggcttcatgaagccaggccgaagaggcagcggggggctgcgaaggctactgcccccggcggaggcctgccgccgctagcggcgaagtcggctgtccctgcatccagcagggcgtcggaagctgcggctgccgccggtggttcgaagtctgcgaaggctgcatcagcgtctggcagggtgccggaggccgtgaaggcggcccgagggttgccgccgccgggcaagcgcgtcgccgacttcgccaccgacattagcgtggacgactatcttgttgtaagtgccgcaagctggcggacaaggtggcccgcgctggagggggagaagactgacctccggcgccaactggcggagaagaggagggaggccaatgaggccctcgccaaggcgcaggctgcgcaggcggaggccaatttggcgcgggtggagggcggtcttgccagggagcgcgccgagcagttggaggatcggctccgcgccctgcagagccgtgtggagagggccgaagccgcgacgcgcacggaggctgagcggactcgcaaacagcttatggattcataccatgagctgggcgcgcggaccgctgagttcgaagtgccggaccgagagcccggacttcgctgcctggagtgggtgcaggaggagttgcaggcgctccccaccatcgtggaggggtttatgtcttacgcttccctggtcacctgcgagggggcgatgaacgcgctctctcgcgaggggtgccggcactacgaagtcttcgaccaagctgatgaagatttcgagcgcgatatctacaaggtcgaggactctgtagtgaaggaatccgccggagccctctacgaccggatgtggggtccccacggtcgagagatggtcagggaatgggccgagacggcgaggggtcaggcggcgcgtggtgagagggtggatgactttggggctttgaacagcacgctgcctgacccggagtcgaacccggcggaggccaccctggagccgctcccggagaccgacgaaggcgcccctgaagcccccgcagccgcagcggccggcgaaggcccacccccggaggccgccgaaggcgttcctgatgcccccgcggccgctgcagccggcaaaggcccactgccaactgctgcgccgagggttgatcctgcgacggtggcggcggaggcgacggcggaggctcccgcgacggctgggtcttcgtag

SEQ ID NO: 8574 - DNA, 633 bp, Zea mays
  Peptide Sequence Number=SeqID_51949
atgaagtcgtggaaggagacttccaggagttccaagactacgacgagttttagatggctcgtcttatacacactgcaccgtcctctgcaccgcaccgtgtccggtcagtcgagtcacctggagaggctgcaccaccgcctgcgtgaggagcaggaacgccggcgccagcacggagagcagcagggctcttcctcctcaccccagcaggaggtggggaccgtgaggccccgttcctctgtggcccaactggaggcaccccctgcaccaccgcgggacgtcccggctgttggaggagctactggaggagaccccgacgatgactcagaccacagcacggagtcttctgagccgcaggaggcggaaggatgggtcgcccgacccatcacccgtgacgccgctcgcggttgtcacttccacgacgcactcgacaccttgctgcgccaggctttcgaccggcacacctggtcgatcgagtatcgttgtgtagtctaccagcacagtcgcgggaggtacccggaccgctgggaggctacctgcctagttcgccgtccggaggatgacctccggggtgcggaggccgtttcggagcactattccatctccgagagggacactgcagaggcggctatgtag

SEQ ID NO: 8575 - DNA, 783 bp, Zea mays
  Peptide Sequence Number=SeqID_51950
atgcagagcgccgagaaatcgtttgcgcgcgtgctgccggtgtgtgcggatggattgcgacagatggatcagctcattcttagcgcaacacatattattctactactagttattgctgaggacgacaccgcggatgtgaggcggcggtgggtaggagcagccgagcaggcggcgggcagaccgtggatgcgagccaccgatgcgtctggggcttgggggcacgagataggagcaggcggcaagctgtggcggcgacggcggctgcgagcaggatcaaatgaggaagcagcggggaatgacgaaaaagatgagaaaaaagaaaaaggctctttcccgcgccgctgcccacgccgccccgggcagccacgccccaccggctccgtccggtcgtccaccgccgccctcggctcccgtcgaccggccacgaccgagctctcctcctgccactactccgccgtcgtcgccgagctcttccccatccaaagggcccgttacaatgggccggatcgcacgtgggcctctgagctggacgaggccgcactgtgggatgccttcgtcgccggtcttcgtctggtgccgatcaagcgaagggtgtccctgcctgctttgtctgtcagagcagcggctaagcagcggagacttcgagcgaagggtggcgtttctgccttcgctccaacatctgccctccgagggaccagttcgacaaagtcacctggtgccgaagacgtcgctagatggcggagacgttgccctcgctcgaagtggttccgcgggggtttttga

SEQ ID NO: 8576 - DNA, 1650 bp, Zea mays
  Peptide Sequence Number=SeqID_51951
atgactgcaagggccgcttatctagcttcatttctcatcgtcaccagcttcctccccaccagcagcagccattcccatgtgcctgctgtaactgatgccttagacattgtgtcaaagatcagcacggagcacgacgcaaccatcaaggcatccatggactttggccacattgtgagagctatcccaagcggggtattccatccgacctcacccagcgacattgccgccctaatccggctctcactctcccagccaaagcccttcgcagtggcgccacgcggccgaggccactccgctcgagggcaggccctcgccgtcggcggggtcgtcgtcgacatgcgctcgctccacgaccacgaccacgaccaccgtgctggtcatggtcgctaccgcatgaataatgcagtcccaggagcatgggtggacgtcggcggcgagcagctgtggatcgacgtcctccacgctacgctggagcacgacctcgcgccccgcgtctggacagactacctccacatcaccgtcggcggcacgctctccaatggcggcatcggcgggcaggcgttccggcacgggccgcagatctccaacgtgcacgagcttgacgtggtaacaggcacgggtgaaatggtcagctgttctccgggcaagaactcggacctgttctacgcagcattgggtgggctgggtcagtttggggtcataacccgggctcggatcgcgcttgaacccgctcccagacgggtcctttgggtccgactcgcctactcagacgtacgatcctttaccagtgaccaggagctgctcatatccaaacggcctgcaggcggatgcggatccggtttcgactacgttgagggccaagtccagctgaaccggaccctgaccgagggccgaagatcgtcttccttcttctcagccccagaactcgaccagcttgccaggctcgccgttgcgaccgggtctgcggcaatctactacatcgagggtgcaatgtactacgatgacgatactactactgcctcctctgtgaatcagaaactcgagacgctactggaagagctgagcttcgtcccggggcttgcattcgtcagagacgtttcctacgtggatttccttgaccgggtcggccgcgacgagcagaagctgcggtcggccggcgtctgggacgtgccgcatccatggctcaacatcttcgtcccgcggtcgcgcatcctggacttcgacgccggcgtgttcaagggcatcctcaagggcaccaggcccgtggggctcatcctcatgtaccccatgaacaaggatcggtgggacgacaggatgacgacggccacgccggacgaggacgtgttctacgccgtcgggctgctgcggtccgcggtggccgccgccgacctggagcagctcgagagggagaacgcggccgttctcgagttctgccaccgggagggcataggctacaggcagtacctgccgagccacgcgtcgctggacggctggaggcggcatttcggcgagaaatggagcaggttcgccgcgctgaagcgcaagtacgacccgagggcgattctgacgcctggccaggggatcttcttctccgccggccacgacttgaccgaccagcaaacgggctctgattctcgaaatgttctttaa

SEQ ID NO: 8577 - DNA, 714 bp, Zea mays
  Peptide Sequence Number=SeqID_51952
atgcgatacaatgtcgatgaggaacctcctgtcagtgatctcaaaattttacaatggagaggcacaagtactagtaagggcacgttctaccaccttagcatggatgaaagaatgtccgcattgctatacatgtactcgaatatggaagagatggagccatatttcataacctttagtcgatacgatgtgaatggctttcttttcgttcagaccaatttgaaaagtctcatcctcgtgcagccagacgaagaggaggacaaggaggaggaggtgcagcaccatgaggaggaggaggtgcagggccatgaggaggaggaggtcgtgggcatagatgctgaggcagataacgataccatcgaggctcctatcgttcgacagaggggcactcggaagggccactttgtcctacctccatcagcgcctgcacaatccgaagctcgggtactgatcatcctggttggtgatagacgctattgtgtggaacctgatgctcaagagcatgcagacggagtattagagaaaaatgcaaagaaggtgcgcaaggatgcattttccaatgctcgtctacaagttgtgaatgagtacatgaagcgcagagggcattctatcaacaactttcgacaatattcggatgtctacttgactgtagaccagtacatggagatgcaggagacttacgggcagaagatggttaggaagtacggagatgactaa

SEQ ID NO: 8578 - DNA, 351 bp, Zea mays
  Peptide Sequence Number=SeqID_51953
atggaggacgctatgagggagcagcaagaaaggttttgtgaagagctgcggcaacaacaaatgatattcctcaaacaacaatcagagtacatggttgcttacaacgcacaggcgcaacaagcaatgaacatgagtgtcttatttattctcaacatggcttggtttccagagcaggcacagcagcaaccattcgttttccctcaatttcagccgccgatgcctcagtcgagattacatgctttgccacctccacctcagggatccagggttatgggccacgacacgccaccaccggtgataccaacaccaggaggagctgaaagggaaatgagcataaaacatttcctataa

SEQ ID NO: 8579 - DNA, 273 bp, Zea mays
  Peptide Sequence Number=SeqID_51954
atgtccggtggggatggacctcctcccgtttttgatggtgacgattttccatattggaaaattcgtatggaagcatacttagaggctatagacattggtgtctataaagccgccacacaaggattccccgaacctagagatcgcacaaatcttgtagttaccacacctacacagatgttgggaaagatcaattctcatgaaatgtacatgcacatcaatgacaaagatgagtcatcttccaagagaaaggatttggctctcaaagcaaattaa

SEQ ID NO: 8580 - DNA, 1359 bp, Zea mays
  Peptide Sequence Number=SeqID_51955
atggacaaggatcgccagggggctgcacaaaagcggcaggcggctatcaggcttgttgaagccaggccaaagaggcaaaggcgtgggtcggcgaaggatgcggcccccagcggaggcaagccgccgctggcggcgaagtcaggcgtccttgcatctagcaaggcgccagaggcagcggcgggcgccggaggctccaaaccgtcgagggttgtgccgccgctcagcagggtggcggaggccgcgaaggcggcccgagcgttgccgtcggcaggcaagcgtgtcgccgacttcgccaccgacatttgtgtggaggactatcttggagggtcggacgagggccagcttgctatggttgcgcctgccgcggcgatcgcgatggctggcatagtgccgaaggcgaggggcgaggctcttggctccggaggcgaggtgtcggccctcgcggttgtcagggacgaggcgggcacagcgacccgccggctgaagggggtgacggaggcgctgagtcaggtgactgacttcgccagccgtactgcgtcgggggctctcacggcagctgtgtctgccgaagtcgaaagacttcggacgcaacatgctgacgctgtccgtgagaaatcagcctccgacagcaagtgccgaaaactgacggacaaggtggccgtgctggagaaggagaaggctgaccttcggcgccaactggcggctgagaggagggaggccaacgaggccatcgccaaggagcaggctgctcaggcggaggccaaactggcgcgggcgaagggcaatcttgccaaggagctcgccgaacatctgcaggagcggctcaccgccctggagagccgcgcgaagggggccgaggccgcggggtgccgacacttcgaggtcttcgaccaggcggatgaagattttgatcgagatgtctataaggttgaagacctcgtggtgaaggattctgccggggccctctacgaccggatgtggggtccgcacggtcgcgaggtggtcagggagcgggcggagacggcgatggctcaggcgttgcgtggcgagcgggtggacgacctcggggcgctaaacagcgcgctgcctgacccggagccgacccctgcggaggccgtgtccggggtcgccctggagccaaccccggagaccgcggcgatcgcgacggctgcccccacatctgctgcggccggcgaagacctgcccccaaaggtggtcgaaggcgcccctgatgccctcgcagctgctgtgccgagtgctgaagatcccgcggcggaggcggcggaaacaacagcagaagcggcggcggagccagcggcggaggctcccgcagcgtcagggccttcgcaggtggcatag

SEQ ID NO: 8581 - DNA, 519 bp, Zea mays
  Peptide Sequence Number=SeqID_51956
atgaacgcgctctcccgcgaaggggtgccgacacttcgaggtcttcgaccaggcgggatgaaagattttgatcgagatgtctataaggttgaagacctcgtggtgaaggattctgccggggccctctacgaccggatgtggggtccgcacggtcgcgaggtggtcagggagcgggcggagacggcgatggctcaggcgttgcgtggcgagcgggtggacgacctcggggcgctaaacagcgcgctgcctgacccggagccgacccctgcggaggccgtgtccggggtcgccctggagccaaccccggagaccgcggcgatcgcgacggctgcccccacatctgctgcggccggcgaagacctgcccccaaaggtggtcgaaggcgcccctgatgccctcgcagctgctgtgccgagtgctgaagatcccgcggcggaggcggcggaaacaacagcagaagcggcggcggagccagcggcggaggctcccgcagcgtcagggccttcgcaggtggcatag

SEQ ID NO: 8582 - DNA, 558 bp, Zea mays
  Peptide Sequence Number=SeqID_51957
atggacgtggactcgcgcatgacgacggagtccgactccgactccgacgcggcggccgccgcggccgctcacgggggcagcgccggaggctcggggtccgggagcgagacctcctcgtcgtccgcgccatcgacgcccgggacacctgggacgcccggcgctgcgggaccgaggccagcgcccgggtacacggtggtgaacgcggtgatcgataagaaggaggacggaccagggtgccgatgcgggcacacgctgacggcggtgccggctgtcggggaggacggcacgcccggatacatcggaccgcggttgatcctgtttggtggggccaccgcgctcgaagggaactctgccaccccaccctcttcggccgggagcgcggggatccgtcttgctggtgccacagcagatgtccattgttatgacgtgtcatcgaacaagtggagcaggcttaccccacttggcgagcctccttcaccaagagctgcacatgtagcaactgcggttggaaccatggtggtcattcaggaggactgcacccctaagcttatccactaa

SEQ ID NO: 8583 - DNA, 324 bp, Zea mays
  Peptide Sequence Number=SeqID_51958
atggacgctgcgggctatcttcgtcactggacccaggagcagacgtcactagggcccagatcggaagctgtcgccggctacgatgacgacaacgtgaggtgcaagatcgacaatgtctacttgaccaaactgcaggggggcttccagctgctccattacccgctggtaactgaattgagttacgcagaagacagctggatgaccatcacccagatagcgcaccacagaatgcttttcatcccgattggctacacatttggttccgacatgttcgacatggatgatatcagagaaggcaacccctatggtgttggcgtcaaataa

SEQ ID NO: 8584 - DNA, 1173 bp, Zea mays
  Peptide Sequence Number=SeqID_51959
gttgtggtggctgctgaaactggaggtgccctaggtggcatggtcaggcagctatcaattgaccaatttgaaaatgaagggagaagagtcagctatggaaccccagagaacgcaactgcagcaagaaagctactagatagacaaatgtctattaatagtattcctaaaaaggtaattgcatctctgttgaaacctcgtggctggaaaccccctgtccggaggcagttcttcttggattgcaatgaaattgcagacctatgtgacagtgctgagcgaatattttcaagtgaaccaagtgttttgcagcttaaagctcctgttaagatatttggagatttacacggacaatttggagatctgatgaggttatttgatgaatatggtgctccttcgactgcaggtgacattgcttacattgattatctattcttgggggattatgtagatcgcggccagcatagtttagaaactatcactcttcttcttgcattgaaggttgaatatcctcaaaatgtacatttgattcgaggaaatcacgaagctgcagatatcaatgctttgtttggtttccgaatagagtgtatagaacgaatgggcgaaagagatggtatctggacatggcatcgaatgaataggctatttaattggcttcctttggctgcgcttatagaaaagaaaatcatctgtatgcatggtggcatcggtcggtcaatcaaccatgtcgagcaaattgagaatcttcaaaggccaattacaatggaagctggctcggttgttctcatggatcttctatggtctgatccaacagagaatgacagtgttgaaggactgaggcccaatgcccggggtcctggtcttgttacatttgggcctgatcgggttatggagttctgcaacaacaatgatcttcagttaattgtacgagcacatgagtgtgtgatggatggctttgaacgctttgcccaaggtgcgatcttggttttgggtagagatcttgtggttgtgccaaaactaatccatcctttgccccctgcaattacatcacctgaagcgtcgccggatcatattgaggacacatggatgcaggagctaaatgctaacagaccaccaactccgaccagggggcgtccccaagcagtagctaatgaacggggctctctcgcctggatatag

SEQ ID NO: 8585 - DNA, 2760 bp, Zea mays
  Peptide Sequence Number=SeqID_51960
atggcgtggaaactgtccccatgctcttcgctttggccgacaagtgcgccagagccgccgaggggtcgtgcatggcactcggccccacaaactagagctgcccaatcgggtggatcaggggctgtcctccgggacggaaagaagaaaaagaaggaccgcgactaccagaagtcgcggtccaccgctctggtggtcgcagcagcgaccggaggccagggcgaccgcaacaaacacccgcggtcgcagagaggtggcagcggttcatgccctgtgcacccgaacggtcgccaaagcgccgcggagtgtcccgagatcattgacctcgcaaaacgcgtcagcgagcggcgcgagcagtcttccaaagatggctccccgcctcgccgccggcccggcaaagagaaggtggacgacggcgaggtggccgcggccgagcgggacctcgggtaccagtcgcccgagggggacctaaaggatatcctcgccggaggctcctactccgacaggtacatgcaaaagtggccacagccagagacgagggctcctgtgtcaaatgcaggtgggaaccctgggtcgggacctagccccacggcaagtaccataccaaggagggctccacaactctcccccagctgggaaggacccctcgaagtaacggcagtgcaccgacccagggataacgcatacgtgtacgacaacccggtggggtctgcccccataaacccgagttataagtcctgcgggtccgacaacctcgggaccggagctagagaacggacattagtctcctggggtggtctagagcccgtgcagccgctcagcctggtccgtaccatgggcctgcacgctccaccgccctgcgacaaatccagatcccggcgagtttgcctcccgaggattgttgacaaccttttcagaaacgctggtatccaacctcaatacatcaagcctgcatcccaggcgggggggcaggggaaggcctgggggccagttctaaagaacggatgcccgttccataaggtggtccggagcctgtgtggccgcgacaacgacctcttctccgagcggctcgccagcagcagctatcacctcagggtgagcgctactgcgaataggtcctcgcccccgtcctcctacgggggtgacggtgaggccattaaagccaaagggccaaaggtccggcggcaggtggcactgacgatctcgccaacggaggcaaccacctctacagtgggcagcctcaccagcggaggcgaccacatcagccccatcagtggcagcgaccacctctgcaccaatgggcagtggctgcaccagcacgcacgaagaggtcttcgctcccatcctcactgtgggagtgaggacaagaccatccaagaacgccgccgccacccccgtggcatacgacgtcttccacgctccgccccagcggcaggaggcagcgtcggaggcgacaccagagccacccaggccggggagccagacacgcggcagctgacggcgccacagacgaccggccccgcgtacccagagttcgcgtcctccgcaaggccggcgaacgtccttctcccccgaatgctggaggaagaagcggaccgccagcccacgtggaaggcgaagctcccactcggctcgccctcctccccagcacggatgatgaacatccttgaagctgagggcaggggggaggccgtagcctggctcacttctctccaccacaaggctgcggtcaaagaggcggaccgccgcgcaagaagcgtacaaccatcccatggctgtgcgccccctcagctccgctgcaactggcggtccaactcgggggcccaggcccacatgtcatacaaccggcgccccgcgactcgaggcagctccgcgcatggtccaacagtgccattaagaacgatggtcacgggccagtcagccgtgggaataggcgcagcagttggcatggccataggcgggccgacagtaattgcagcaacaggcgcgcagaagcagcgatccaaccgccaatcagactctggtcccacctgcaggctcgcatcctcccctaaggcgggcccgggggccactgtcggtaccctaaatcaggggtaccctcttctacagcatgaagacgccgcacccatgcgatgtctcctagccacgcacgtgacgacgcctgaccccatcgcatgggtaggccaaagggcgccacgtggcaagaaaagacaacacatcccagtaactccggaccccctcagaaggacactggacccctatacatataagtctggagcctccgggtatgtccgaacctcagcagggtcccggaacgaggaggaccctggtatgagcaggggtccggtgctgacatgtgtccgggccttgccctccacttcctgctcaggcggagacctgttgcttgtggcccatgacataagctatcgggtcgagcctgacgtgaagtcgtgcagcccctgcatttattggggagaggacgcgccgcctgcaactgcacagacgggcgacgtgccctctcagtatttaatgcgtcctgtcccatccgctggcaggcggtgtcaaggtcatccagcaggcggtgcgcctgctgggtctgctggcaaacagtgcgcccgtgccaagcggcgcgctatactcatcctcccttctacaagaagcttcccctacactccaaggatacgcagatctcaagtgtcagggcacaagaaggttagctatatcattgctgaagaaaatggtatagtttcacttgccaaatag

SEQ ID NO: 8586 - DNA, 159 bp, Zea mays
  Peptide Sequence Number=SeqID_51961
atggttaaaaattttggcagcaaaacagtgcaaatagcagtaaatgctgtgctcatagcatttgagaacaagtccccaacaattacgaagctatgcgcagaagagcttcggcataacggcggaaagggaaaccgacttaaagatgaaaagccagattag

SEQ ID NO: 8587 - DNA, 450 bp, Zea mays
  Peptide Sequence Number=SeqID_51962
atgccgccacgcacaaggctaacggcgcgcaagtcaactggaccaatcgacggagatagaataaatgaactaagaagggatatccgtcacctgcaggatcagcttgctgatcgggacttagcacttgactgggcagtacagtcccgtttgctggcatgtgctaaggaagcaagggctcaggcccgaattaaggaacttagctcaactgtcgacgacctgcaggtctattgcaatacgttgcatgaggaagtccatgtactatactcgcaactataccctagtgcacctgcacaccctgctgaggcggaagccggaccctctcacattgcgggacgcgcgctgggtggggagttagacctttttgagccccctccttccatgaggttggttgacgtctggactcccacacctgacgatgaggccgccaagagtaatgggaagcaggactaa

SEQ ID NO: 8588 - DNA, 117 bp, Zea mays
  Peptide Sequence Number=SeqID_51963
atgaagccgtggaaggagactttcaggagttccaagactacgacgagttctaggcgtgggttcaagaaaggaagcttacatatccaaagcaatgatgacgatgtccaggagaactaa

SEQ ID NO: 8589 - DNA, 780 bp, Zea mays
  Peptide Sequence Number=SeqID_51964
atgaacgtatgtgagctcactcttgctgtctcacacccccccacaggtcaagagcaggtaccacaggatgaggcgcttggaggatgctgcgatgtgttcgtgagaggtcaaggcttcgtctactcaagtgacgcgatcttgcctcgcccgagcccagcctcaggcgggaactgtagtcccaggcgaattcacgcctcgcccgagggcctcctcaagcaacgggcgcaccctcgactcgcccgaagcccagctcgggcaggcttcgttgtgaagcaaccttggccaaatcacctcaccaaccgaccgtatcgcaggcacattcaatgcaaggatcgcctggcgccttatcctgacacgcgtgcctcagtcggcaaggtcgaacctcaggcgcaacatgaagctcagcctcaggaggaagtctccgcctcgcccgaccccagggctcggcccccgcctcggcctcggaaggtggtctccgcctcgcccgaccccagggctcggcctcaacctcgacctcggaaggtggtctccgcctcgcccgaccccagggcccaacctcaacctcgacctcgggaggaatcgcgtcctcgcccgaccccgacctcggcctcaggagaagtcttcgcctcgcccgaccttgggctcggaccgtccacgccgcaggggccccctacggaagcaaggagacgtcagcaaggtcccagcagccccgacagctgtgcttctacatggctcaaacgctccttcgacggccacgacaccgcgtacacaggactctag

SEQ ID NO: 8590 - DNA, 336 bp, Zea mays
  Peptide Sequence Number=SeqID_51965
atggctgagagggactcgagcgcgctggctgcgcaggagctcgggatgagagaggagcgcagcgctgggagccggacgccgtgggaaccgctcgacaaactccatgtcggggccagggaagaagagggggcggcggggaagaggagggagagagagaaaagaaattttatacccccaaattcagggtgttacaaatctaacccccttaacagaatctcacccccgagattcaagaagaagctagcaaggaagcaagggttagcggctaacccccttaacaggagcgttgatacacacttggtgaagatgtcgtcaactctaatcttgactgattaa

SEQ ID NO: 8591 - DNA, 966 bp, Zea mays
  Peptide Sequence Number=SeqID_51966
atgaacgcgctctctcgcgaagggtgccggcactttgaggtcttcgaccaagctgatgaggattttgagcgagatatctacaaggttgaagaccctatagtgaaggagtccgccggagccatctacgaccggatgtggggcccgcacggtcgagaggtggtcagggagcgggccgagacggcgagggctcaggcggcgcgcggcgagagggtggatgatttcggggcgttgaacagcgtgctgcctgacccggagtcaaacccggcggaggccgtgtccgaggccgccctggagccgcccccggagactgccgaaggcactcctgatgcccccgcagccactgaggccggcggaggcccgcccccagagaccgccggaggcactcctgatgcccccgcagccgctgcgccgagggctgaagatcctgcgacggtggcagcggaggtgacagcggaggcaacagcggaggctcccgcgacggctgggtcttcgcaggttcaagattttgggcctgcgcacacaaccgccactactaattttttggcggcttcgaccgtggatgatggtaatgaatcggatgggtctatatctaagttttctgatttcggtggctctgggagttcgatcgagtggactgaggagtcgtcggatgaggacttggactactttgcggccttggatgtggctgcggcagaggcttcaccgtgcgctgcggatgcagaaggtgtgtctggtccgagtactgggcgtaggcggcgaagggcggttgcgaagcgtagagtgagtggggcggacggcggtcaacttcgcgtgagtagggccggccagcaggaactgttgtccttgccggcctctgtgagtacaggtgagggggaattgcgaagtctttttgcgggtgaggagcttaggataatgttattcaactatagagagatgggaattattccgaaggctgagccgatgtag

SEQ ID NO: 8592 - DNA, 1035 bp, Zea mays
  Peptide Sequence Number=SeqID_51967
atggcttctctcaaatcgatggactacacacttctaccagatttaacagcgtataaaaaacatgcgataatccaggtccatgtctcgagaaaatggtctttccatggcgccactgaaaatggtcccttgcagcacatcgacatggtcctttcagattgcaagggtaatagcatttatgctgaaataccagcaaatcttgccgaagaaaagggagtactcatcgaaacaaatcagatctacgacatcagtcgttttagagttactgcagcaaaaacagcctacaaacccattgatggtgacaagatgatacaatttacgacttacacaattatcaagcctgcaagtaacccaccacctacatttcctttatatatctatcgattaactccatttgatgagattgaatctcagattcagcacaagaccaaattcctagatgttcttggaactataaccgaggtaactgctttgaagacagtacacatacaaggtcagctcagccccactattattagagacgtaatgatagaagatctaagccgcaaaactctcaagatcactctttgggcaaaacgagcaacatcatttacaatacaagatgtgtatgacccagttagcaaaaagccaattcttgctctttttgttggttgcctacctaaattctacaaaggtgtttacttaagtggtggtgcggcttgccattggtatttcaatcccacaatacctgaagctgaagcgtaccaaaatagacgtggtggtgaaacaattcagctgcaccttcctacacaaccgaaacatgcactacaaaccttccaacctccaacaatagaacataaaactctggagcaactcctgacaatgaacccatatgattacccagacacgggatatgaatgcacagtgacaatcaccaaaatagatacatcaaacacatggtggtatccatcatgcacaaaatgcggccgaaaaacaactccacataatacaacatattattgtgattggtgtaaatgggatggctacaaattcaagtaa

SEQ ID NO: 8593 - DNA, 405 bp, Zea mays
  Peptide Sequence Number=SeqID_51968
atggcccaagggcacatttccctttcagggctgacggctgtcgttgtcgttgccgcgctgtgggggaaggagtaccttgtcatagctatcgtcgagggacatgaactcgagactcccgaaacggagcagtgtccctggctgaagaggttgctggagactacccatctggaactcaacgggaagttgttcgtcaacacgcagcaggcccctacctggcgcgccaactgtcggcgtttcgaccccggggggtccctggaccgacgagtaaaatgctgcgtgccccagcccagatgggttggcgcgagatggaacacaaagggtgggggaaaccgcggctcgtgttatcctgcgctagaggaggatgcgcttgcagtaggggttacaagcgttcgcgaaagagtgtga

SEQ ID NO: 8594 - DNA, 2589 bp, Zea mays
  Peptide Sequence Number=SeqID_51969
atggccactaggagaggagggggacaacgagggctcaatcgccagggaggcgatcatagctctggggaagacaagcggtccaggaacgtggcggcccgcatgtgggtgaagctcgacgcagtcacgaaggacaaggctcatggcacgattgaaggccacgaagttgccccgaacaagctggccgttgtggaggagggcatgcatagcaagcctgatggagatgggcgaagccaggagcagtgggcgaggcaaagctcatgtgtgacgggggtgaagccatggaaccggcgaggagaatttagtgtttcggagttggacaaactatacaatatatttttctcttctactgcgtgcatcatgattatcctgcaacgtatagcattaaatggttcagaagaagaaaaaacagctgctgcaaagattctttgtggtgcatcacttgttcgtggctggaacattcaggaacatgtggtcggtatggtggtcaagctattatcagcttctttaccctcagattctgcaacttcaactcctgggagcatgagcaactaccttgctcatatgtctacattaaacgaaatcttactcggtgtgtcttatggtgatgccatccacattctttcattgtatggaatggttccagatgttgctgtggcgttaatgccaatatgtgaggcttttgggtcaataccaccgccacctaatcacaagtctaccattcttggtgaaatatctgtttatacagtcttctcttgtgcattcctttgtcttcttcgtttgtggaagttttatagacctcctcaagagtattgtcttgctggtcgtggaggctcagtaaagctggaactgactctggactatctgttgttgatgcacaataatcacattgagttctcaaattcatctgcctctaatagggattcttgcaatgatatgggctcagtaaatgaggttcctgctcagctgatttatattgattcttttcccaagctaagggcttggtatttccagaatcaagcttgcattgcttctccactttctggtctttgcaacaaaaaccctgttcatcaagttgcgaacaaaattttgaatatgatttgccgaaaaatgaataaaggtgtggtatcgtcaagtactctttcatccacttctagtagtagtgtcagtggttcctctgtaagtgcatcagatgatccttgccaaaggcctgctgtttctggttgggaatttttagaagctgttccttttgttcttgaagctgttctgacagcatgtgctcatgggcagctttccagccgagacttgactacaagcttaagggatcttgtggactttttgcctgcttctcttgctgcaattgtgagctacttctcagcagaaattacacgaggaatctggaaacctgtcccaatgaatggaattgaatggcctagtcccggtgcttctcttcattccattgaagctgaagtaaaggaaattcttgcctctgctggtgttcagattaacagctgctatccacgcttcgtcatcaatgtgccaaatacctttattccacttatattgccatataggagtttggagtacattcaaggggtcattggacaggcgctagagaactgtgcaggggggagttcctggccaagcatgcccattattggggcattgtggacacagaaagtgcgaagatggcatgacttcatcgtcctctcttgtatgcgttctccattcggcagagacaaagatgcagttgcgcagctcatccaaagttgcttctcgtcctttctgcagtcttcatccagtggttctgatataattgcaaaccgtggagttggggctttactaggggactcaatcacgaatcaaggtcttaggctcccaatggcacctggtttcatctacttgagaacatgtcgaactttccatgacacttactttgttagtgaagtgatccttaagcaagtgattgagtgggctcacaaacttgcaaacggatggtgtttcaatggtcctccgcagttgaaatcagggcggacaccactatcttgtgcagcatccatggtgcagcaggtcgcgttgcttggtggaggtctcctatgcatagcaggtggaccacttgtggtccaggtgttgtatgaggaaacactgccaacactgctgctatcagccagagatcagagtttgaaaggccctgggccagtttctagcacactccaaggttacgccatggccaacatgctcttctactgtggtagcctgctttggggagcggataggacttctcctgtcatgaaattgtccttcctctcgaggcggccacgggtggtgagaacccacatggatttcatagctggtgtgttggacggacacattcttctgggctgtgacccgggtacgtggaaagcgtatgtgtcgcaatttatgttcctggtggtgaaatttgttccgtcatggttgcgggacataaagctggacacgctaaagaagatagcagctggacttcggagctggcacgaacacgaccttgctctgtctcttcttgaacgaggaggaccacaagcaatctctgttgtagtcgagacctttctgtaa

SEQ ID NO: 8595 - DNA, 321 bp, Zea mays
  Peptide Sequence Number=SeqID_51970
atgtccggggcggccgccgaggcgttcccgtgcgtggacctgggggcctccgcctgggcgtccttgctacggctcgagccgggccgagcgcgtctgtggcggccggcgcgtcgctgcttgtccgatctgccgcattggatacctggcgaacaaccaccggtcacgaaatcgtccagtcgtcccttcttcagcgatttgagtacaccttgctttgttatttccagtcttcccttcttcagcgattctgacttcgagggtttagtgtaccttgctttgttatttccagtatctcatcagcctcctggtagtcaaattagatag

SEQ ID NO: 8596 - DNA, 2001 bp, Zea mays
  Peptide Sequence Number=SeqID_51971
atggacgcctacgaagccaccaaggtggtgttctcgcggatccaggcgctggacccggaccacgccgccaagatcatgggcttcctgctcatccaggaccacggcgagaaggagatgatacgcctcgccttcggccccgaggcgctgctgcacaccgtcatggccaaggcgcgcaaggacctgggcctgctcccgtcgccaggcccggggacgcccacatccgtcaccgccgccgcaacgcactcgccgttcctcctctcgcgccagaactccgggcgctgcggcgccggcaccgcgccgtcgccgctctcggtgtcgtcgccctcgtcgtgggcgccgccgccccacttctccaggaccaacagcgtcgtcagcaatggcgcgccggcggaggccttggccgccgacctcatgagcccggccgccgccgggaacgcgccgccgtcgcccttctttgccgccggggaaccgctcctcgacgagctccagctgcaggagcagctcgcgttcctcagcgacgccgccgccggcggccaccagctgcccctgttcgacgccagcgagtgccggagccccggctcaggagacgccgccgggttcttcccgtacggcgccctcgggtgggccaacggcggcccggggcaccgccggagctcgtcggtcagcgagctctgcctcggcggggccgacgggctcggctggaagccctgcctgtactacgcccgcgggtactgcaagaacggcagcgcttgccggttcgtgcacggcggcctcaccgacgacgccaccgctaagatggacaccgccaccttggagcagcagtgccaggacatcctgctccgctccaagtcccagcgccttgccgccttcccctactccccgaccggctcggtcccgggctccccgtccgcggccaccaagtgcctgagcttgctcttgcaccagcagcagcagcagaacgagaaccagagggtggcagctgcagcggccgccgcggcgctgatgctgggcggcgacgacgcgcacaagttcattgggcggccgcggctggaccgcgccgacttggcgagcttggtgaacccgggctcgcgccagatttacctcaccttcccggcagacagcaccttccgcgaggaggacgtgtccaactacttcagcatctacggccccgtccacgacgtgcgcatcccgtaccagcagaagcgcatgttcgggttcgtcaccttcgtgtacccggagacggtgaagctgatcctggccaagggcaacccgcacttcatctgcgacgcgcgcgtgctcgtgaagccctacaaggagaagggcaaggtccccgacaagaagcagcagctgcaaggcgagagggcggtggatttcttctccaacgggttagacggcagagaaaaccacttggatctgcaccagctgggtgcgaggatgctccagcactcgcacagcgcgaacgagatgctgctgaggaggaagctggaggagcagcagcaggccgctgctgccgagctgcagcaggccatggagctccagagccgccgcctgatgaggctgcagctgctggacctgaagccgcgcgcgtcgccgagccccatcggcagcatgcccctgggccccacccaaagggccgtcgactcgccgcccgattccggcagggaggagtcgtccgccggcgacgcgagcccgaacgcggacagcgaccaaagcgccgagcacaacctgccggacagcccgttcgcgtcgccgacgaggtccgcggccttggctcgcgaccctttcgcggccatcgaccgggagatggctgcctcgcccggtcgtcgaaacggcgccggttccttcgctggcatcagcagcagcagcggcgtcctcgccggccatctgaggccgtcggctctggacatcccttcgccgttcttccccatgtcgatgaccagaggctgtcaatccggtggcaggctgtcctccgatcacggcgccggcgcgatcgggatgtaa

SEQ ID NO: 8597 - DNA, 543 bp, Zea mays
  Peptide Sequence Number=SeqID_51972
atgtctttcgtgctttctgactacttcgaaaagtggatcctgaaaacgacggagtacacggcctcatggacgggtgaaagtacgcgtaagcggcaaggccgaccgagccgagggactcctacgcctccgggatacggatacctcactcatcaccttccgcgagaagcaactctcgctcgcacaaacatccctgttaccgacaaaaaagtccagatactcgaaacaagaggaaaagagacgcagcttgacaacgcagtgaaggctcgggtcttgacgctggaagggggcagcagcaccctcggcatcgacgacaacttcggcgaggttcgacctagcctcggacggcgacgcggtccgaagacctccactccgaaggacgacgtcatcaccacgcccgggccatcgccgccaggatcttctccgggaatccagcccgggcaggtggctcggccggtcacctctggggcctcggccgaccatcttccaagggcgccagcccgacccgaggcctcggctggtcaactccggtgtcggtcccgctaa

SEQ ID NO: 8598 - DNA, 219 bp, Zea mays
  Peptide Sequence Number=SeqID_51973
atgggctccacaagcccaacggccgacacgagcacctttgtccttatgcctagtaagcgttctaggaggagaggtccgacctccaagaaggacagcgtcgcctgcgccactccgactgcagtgccccttgacagagtgagactgacaggcagtcaggccctgccaaaggcaccacaggaaactccgctccgcccgacccagggctcggactcgggctaa

SEQ ID NO: 8599 - DNA, 747 bp, Zea mays
  Peptide Sequence Number=SeqID_51974
atgtggggactcagcatccaaggtgagctcctcgtgaagaagcttgttgcaaacatcgtggaaggagggaaacaacacaaagcgtttaatgaaagccttcacgtggtcatagcgccagctgagaccacacagaaggttgaggacgagcgtgcggtcagagacaggctcgcgaggtcacgcaaggagtctgtcatgcccttcattcgacgacagtactcagtgatggagaggtcccttgggagaacagtaaaaaaggcatcgaggtggagggagggagagtggcctagtcgtgggccacaggcgtgggaatggcgccgatcctggtgggcgcatggggaggaaggagctccttgtggtggggtagagagccatgcagttggtgaaggaagccagtgcagtggtgctcaagctaccgcgtatggtggcactatgagcagaggggagaggcatcggcttggggaggagttggctggagcgaatggggaagaaggtcagtatggacgtcgacggcagacacatcctcgagtgctggaggggagggcgcgggtggcacggttgggcgccaaacgagcatgcatggaaggggcgacatcagcacacctgggagcggcgaggcacgggcacaccgatgccaggaaggggcgacacgggcacgggcgtgccgagggtgggaagcggcggtgcgaactcaccgaggacgagcacgaaggcgccagcagcagatgcgcctggagaggccacccatga

SEQ ID NO: 8600 - DNA, 1287 bp, Zea mays
  Peptide Sequence Number=SeqID_51975
atgcgccgctactccgcgctgcccaacggcggccgccaggagacgctggccgaccgcgcgcaccgctaccggggcgtcgtgctcgtcatcctcgccccgctcgcgctcgtctctctcgtcctcctcctcatgccacgctcacccgctggcaccatgggcggcgcccggaggtccgggccggccggggcagacaggtacgccgtcatcttcgacgccggtagctccggcagccgcgtccacgtcttccgcttcgacgccaacctggatctcgtccgcattggcagcgagatcgagctcttcgtccagataaaaccggggcttagccactatgccaacgacccccgggaggctgccgagtcgctcgtctctctccttgacgatgccaagcgagtggtgcccgccgaattgcgcgaccaaacgcctgtcagggtcggggccaccgcagggctgagaaatttgggtgcacaaaaatccgaggcaatactgcaagcggttagggaccttcttcgcgaaaagagttcctttaaaaaccaaccggattgggttacagttcttgatggaacacaggaaggtgcatacgagtgggttactatcaattatctgttggggaacttgggaaagacttatgcagacacagttggagtagtcgatcttggtggtggatctgtccaaatggcatatgctattgcggagaaggatgcagaaaaggctcctaagccatccgatggggaagatgcatatgtgaagaaactgtttctcaaaggaaccacatattatctttatgttcatagttatttgcattatgggttgctggcagctagagcagaggtcttaaaagctggcaatggcaatggttacagcaactgtatgttagagggatttcaagggcaatacaaatatggcgacaattcatttgaagcatctgcttcaccttctggtgctagttattcaaaatgcaaggatgatgcagtgaaagctcttaaggctggatttgtgaacgccaatgcacctgttgctaaggttaaaccctcagacttcagacaagctgctgagcgcgcttgctctttgagtgtgaagaacgccgaggctacctttcctggtgtccaaaaggataacattccatatatctgcatggaccttgtttatcagtacacattacttgtgcacggattcggcgttgatccagaccatgagatgaccttggtaaagaaggtcccctacagtggtgcatatgtcgaagccgcatggcctcttggcagtgccatcgaggtggcatcttcatcatag

SEQ ID NO: 8601 - DNA, 660 bp, Zea mays
  Peptide Sequence Number=SeqID_51976
atggagaaagtggttatagaagttgacaattgtgtcttagtggctctgatccgttcagatgaaggaagaaggagacttacgagtaggagatggttaggaagcatgccattctatgtttaccattgtgatcgattcaacgaagttgcggtctcattgggggctcttcgtcatagatgggttgtgtcctggtttccagataagtcacaacagcaaccattcgtttttcctgaatttcagtcgacgatgcctcggtggggattacaagctccaacacgtccttctcagggattaggggttatgtaccacaacatgccaccatcagtggtaccaacaaggaggaacttctggacgggagggagctactacacagaaggaaagatctccagattacgcggtttagtatctaagtggcaatatataaggaatgaattcggccaggaacgaacaacaggtgaggtagagtctatcctcttttttgtgagttgcagtcagctgcaccaaattttttcggccgtgtcccaggccagactccttccacatggacatggggttggctggccgctagctgttgggcatgtttgtttcggcttcgggcagcttctggccaccaaaagttgctgcggactgccaaacgctcagcttttcagccagcttctataa

SEQ ID NO: 8602 - DNA, 759 bp, Zea mays
  Peptide Sequence Number=SeqID_51977
atgaactacctccacaccagcaagggccgtgggataacaagccccgagcggctcaccagcagaggcaaccgcatcagcaccgacggcgacggccgcctttacaccgacgactcgccagcagcgataatcatcccagcatgtgcgccgctgcgggtaggacctcgcccccgtctccctacggggggcgacatcaggccattaaagccaaagagttggaagcccgacgataggcaacacggggcccaggcccacacgccatgtaatcagcgtgccggttaccgtgtgcaaagaaaccacaccgccgcctacgccaatgccacgtcttctcgggactatcacgagagtctgaaaaggctcgcatcctcccctgaggcgggaccgggggctactgtcggtaccctaaatcaggggtaccctctcctacagcatgaagacaccgtacccatgcgacgtctcctagccacacggaggaccgcgcctgaccccaccagatgggcaggccaaagggcgccacgtggcaaagaaagacgccacacctcagtaagtccggacccccacagaaggacaccggacccctatatacatataagtctggagcctccgggcggcgtcaaggtcatccagcaggcggcgcgcctgctggttctgctggcaaacagtgcgcccgtgcctagcggcgcactatactcatcttctcttccgcaagaagcttcccctgcacgccaaggatacacagacctctgtcacacccggttttag

SEQ ID NO: 8603 - DNA, 1164 bp, Zea mays
  Peptide Sequence Number=SeqID_51978
atggagatgcgggttgttcttctgctttgccaggtgatatgtatgcaggcggcggtcatcggcgccgtcgccgccgccgccggcgctcggccaccggcgatgtacgtgttcgggtcgtcgatactggacgtgggcaacaacaactacctgcgggggccggccgtcggcagggccaacagtccctacaacggcgtcgacttcccgggctccatccccaccggaaggttcagcaacggctacaacatcgccgactacgtcgcaaagagcatgggattcgcgtgcagccctcctccctacctgtcgctagcacaggcaccggcaccggcaccggcacagagctccggccctgacctggcccagacggctctcaccattggcatcaactatgcttctggaggagcaggcatccttgactccactaacgccgggaacacgatcccgttgtcggaggaggtgaagtacttcggcgccaccaaggccaagatggtcgccgcagcgggccccagcgcggtgaacccactgatctccaggtccatcttcctcatcggcatgggcaacaacgacctgtacgtcttcggggcttcggagcgggcgcggaacaggtcagacgcagagcagcggagggacgccgccgccgcgctctacgccagcctcgtctccaactactccgccgccgtgacggagctgtactcgttgtcgttgggcgccaggaagttcgccgtcatcaacgtgtggccgctaggatgcgtgccgggggagcgcgtgctcagcccgacgggcgcgtgctccggcgtcctcaacgacgtcgccggcggcttcaacgacgccctgcgctccctgctcatcggcctcgccgagaggctgccgggcctcgtctacgccctcgccgactccttcggcttcacgctggacgtcctggcggacccgcgcgcgtcagggtacaccgacgtcgcaagcacgtgctgcggcggcgggcggcggctgggcgcggaggcctggtgcacgcgcagctccacgctctgcgtcgaccgtgaccgccatgtcttctgggaccgtgtccatccgtcccagcggactgcgtttctcttggcgcaagcgttctacgacggaccgcccaagtacaccactcctatcaacttcatgcagctcgcccactcaagctag

SEQ ID NO: 8604 - DNA, 444 bp, Zea mays
  Peptide Sequence Number=SeqID_51979
atgaccgagccgagggactcctacgcctccgggatacggatacctcactcatcaccttctgcgataagtaactcgcgttcggataaagcgactccgtggaccgaacaagtcttcacgttcggaagctctcctgccgaagcagtccttcaagctttctcgactaagtcggggacagggcctcatgaacgggcgaaagtacgcgctcgggtcttcacgctgaagggagccgtagcaccctcggcaccgacaacgtcttcagcaaagtccgacccagcctcggacggcgacgcggtccagggactcctccgggaatccggcccgagcaggcggctcggccggttacccctggggcctcggccaaccggcttccaagggcgccagcccgacccgaggcctcggctgatcgactttggcgtcggctccgctgacggacaacacggctag

SEQ ID NO: 8605 - DNA, 171 bp, Zea mays
  Peptide Sequence Number=SeqID_51980
atgggaggcgcgagccgagatccgcatcagactctatttcttcacgcggacacgatgcagctcagcttcaggttcatgccatcgaagtctgctaagccttctgataatgtgaaaagaagttcattaccattttctgatgcagaaagcaccattcccataaaaccagcatga

SEQ ID NO: 8606 - DNA, 202 bp, Zea mays
  Peptide Sequence Number=SeqID_51981
atgggaactaatgagcatctcgacctcgacacgggagaactcctcagcctcgggaaattcctggagccggcgcgctataattcaccggactatccggtgtacaccggacagtgtccggtgctccaagaagacgcggctttggaacttggcagcctcgagaaatcacaacggctgctccgctataattcaccggacatgtccg

SEQ ID NO: 8607 - DNA, 441 bp, Zea mays
  Peptide Sequence Number=SeqID_51982
atgtttctgatttcttggtccaactcgtccccctggggtgttggactagtggccttcctcttctggcttcgggcctctcaaagagaaagggtctcctggtttgggtccagtggctgcagagcggcagcccctggcgctgaaactttcttcggtggcatgacgaaggtcaatgcttgccgaaggtggtcgaaaagattcaccggagaaatgatatcaaattacaaatataccttcgacttgaaagaagaagcattgttaaatcatgtttttgaggaccttcggaagacgaaggcccccaacagtaatctcgctgacggagagtacgtcctcattccggagcaaggagttgctcaggaggtagtccaggagccagcaccagagcctgccatcgaggatctgcgtgccctagcttttgaaggcaagccccggttttatgcataa

SEQ ID NO: 8608 - DNA, 441 bp, Zea mays
  Peptide Sequence Number=SeqID_51983
atgggcaagagcaagaagggcggaagttcgtcgcaccactccggcgacaaacggaagcgcgagccgactcctccctcggaggacttcggcgattctgagtactcggaggaggagttctcctccgagtccgaggggtcgtcggtccacgcctctcccttggcatcgtctgacgactcagatgattcccaggggattgcggcggaggtgtggacatacatccgggccgtcgagcgcgctgggctcgagggctccgatgagtcggaggtctcctcggatgaggggggctcctctaactcgtccgaggaggggagcgacagcgacgacggtggtgagggcgatggcggcgacgggggcgatggcgatggcggtggcgacggcagcaagggcgacggcaagggcgacggtggcggcggcagcagcaacggcaaggccagtggctag

SEQ ID NO: 8609 - DNA, 114 bp, Zea mays
  Peptide Sequence Number=SeqID_51984
atggttttccatggtcaactcaccatcatcgacttgtcccaaccttgcaccaccaccaccatgacatgcttagggaaggagaagatcatcatcgtcaatgatgagcatgtgtag

SEQ ID NO: 8610 - DNA, 549 bp, Zea mays
  Peptide Sequence Number=SeqID_51985
atggggtggttctcaccgaaactgcagtggttacacccggccgcggcggtccgtggtacagcggcgacaacggaagaccgacgagcaatccagagccccgccgatccaatctccacccaccgaggcctcgagcaggtccgtggtgatcccccgaagctccaaggccagccgagcggaccgcgctcgagcgccgggggcactgacggagttcccagggccgagcacgcgcctacggtggcgacattaccttccttccctgcggcgatggtggcctccgtcagggcaacatggcggagacgccgtgattctagcgacccggcgaggcaggctggaagtgcggccgcgcggcgtggtctctcactcgtctaccctcacaccggtcctgaagcacggcggccagggaggtcgacggaaggcgctagcagggacgcgtgcacggtggagtttcaacggctggcgaggggccatggggaagcaggggcgcggcagaggagctcgcaatgggatgaccggaagttctggacgagcagtcctgttagggaatattaa

SEQ ID NO: 8611 - DNA, 861 bp, Zea mays
  Peptide Sequence Number=SeqID_51986
atgtaccgagaggcgttgtggcagaagagaggtcgttctcgggagttatatccggacgtatctagtaaggatgctcctgttcctcctgaactcctcttgcctaactgtgactgtggcagactggcttggtggatcgacggtcctgataaatttgacccccgatatcttcttttcgctaattggttgtgtggaaggactagtcaagaacgttttaagcgttgggtacctcctcccccgaatcctccaccaatgacggatgcggagaaggaggtagcaacagaaagacggattgactcaccgcctcgatgcgattgtggagaccgtgctgtcatcgacgaagaccatgagaagcagtttgtgtgtctgaacattgattatgagacgaggaaatgcagttgggagagttacgacgacaaaggagaggtgatgcgcacaatagagtccaagagactagtgggacagaagatgtgttgtggatctcagctcgtcgattcatacattaacgatcgcatacgcgacatgcgtagggacgcgaaatctgccttttatgatagcccgaagcgtgcagagtataggatgttgaaggtggcagatgagaagagagcacaggatgcaagggaatgggaagcggctcgagccgagaaacagatgttggataatcttgctgatcgcctcaagggaaagattggatgtggcgtaaactatttggccgatgaggcgcatgcaagatatggtcaggataaaatggtgatggttgagctgatggaagaggtggaggacgacacatctagattgagtgagcttatcgctctcgtagaggcaggattacatggagaagagaggacgacacatcaaggttga

SEQ ID NO: 8612 - DNA, 762 bp, Zea mays
  Peptide Sequence Number=SeqID_51987
atgacttctcacctacccacggacggagggaacgcacattcccacacagacagtctggcacgagagggctttccccacattttgtgggaggtactacagggagcaggttacgctatgcctccccagtacgcggtgcagctgttcgaggagcaccgagtacctcgttgtagggtgaggatgaccttggagcctcatcccctacagccaggctggcgttccttggactcagagtcttttggattcagggacgaggatattgttgagtccacggctctgcatgtgctgacaaccttctgcggatttcaccccttggagttgtcaacccaccccattggcttgttccccgctgagaaggaggacgacccaatgtggaaggatcgggttgagcacgccaaggatgtgtgggctctctaccctgggcataccgctcacctgacggtttggtgcatgagtgccttgtatcgtctgcaggccttgcgaggtgaggcgatgtctcagcttatgggcctagtggagtctactaagatcaccctggataaccgggaggaccttgttgttgacttgtccactgagctggtggaaaaggatctccaggtggagcaaatggccaaccacatacaggagcttgaggatcaggtggatgccagggagaacaccattgaggttctggaagatcagctccagaccacccagcaacagcttgaggaagccaaccaacatttggatctgcaccatcaagacattgaggatatggaggcataa

SEQ ID NO: 8613 - DNA, 1149 bp, Zea mays
  Peptide Sequence Number=SeqID_51988
atggctgccatccaagggggtcaccccctttttaagggcgactctccccacttgcgtcctcagccctcatggattgagtctccaccaacactctccaaggtcctccccctacgacacgggggctgggtcccacgcgtcatacaatctggcccaggacagaagaagccaaaccgccgcgcgcggagcgcggaccaggaaaggggatactccgaaagggatccttctccgcgaaggaagcgggccccgagccctcctactgatcagaggttcgaaggctggcccctcggaagggttcgacagccgcctcagagcactcgggctctgagccctcctactgatcagaggctggcccccgaagggttcgacagccgcctcagagcacgcagagcgagggatgactctgggtacgtccgatacatggctgaggctcgggctacgctcccgaggagcattcaatgcaaggatcgcctgacatcttatcctgacgcacgctcttcagttgacaaagccgaagaaaacagtgctgcctgcgctgctttgactgatgtgccacccgtcagggtgaggctgacagccgccaagtccggcctcaggtgccataggaagctccacctcgcccgaccccagggctcggactcaacctcgacaccggaagacggtctccgcctcgcccgaccccagggctcggactccacctcgacttcggaagacggtctccgccttgcccgacaccagggctcggactccgcctcgactttggaagacggtctccgcctcgcccgaccccaaggctcggactcaacctcgacctcggaagacggtctctgcctcgcccgaccccagggctcggactcagcctcgacctcggaggagtcaccgcctcgcccgacctcgggctcggaccgaccacgtcacagggggcccatcattaccctaccccaagctagctcaggctatggggaacaagaccgacatcccatctggctcgccctggtaaaacaggtaatgatggcacaccgcgtgctccatgactacggtggttctcagccccttacggaagcaaggagacgtcagcaaggatccgacagccccgacagctgtacttccacagggctcaagcgctcctccgacggccacgacatcacatga

SEQ ID NO: 8614 - DNA, 1836 bp, Zea mays
  Peptide Sequence Number=SeqID_51989
atgccgtcttcctcctcttccgctgctgctacgccgccggccgccgcctcatcggaggagacgctgagcagtttgatgccggaggagttacgcgccggcgattccgttgatttcggcgtgtcgcgaatttcgtcgtcccgcgtggaggatatgcagcggttgggctatttcggcggcggagttgcccgtgccccggggacggagaaagtccccgagccggagggcgagttggttgttttcgaggcgtttttcgccgccggcctccgcttgcctgcgcatcggatcgcccagggggctgcccaaaaacggcaggcggctatcaggattgttgacgccaggccaaagaggcaaaagcgggggtcggcgacggctgcggcccccggcagagggaaaccgctgctggcggcgaagtcaggcgtccctgcatctagcaaggcgccagaggcagcggcgggcgccggaggctccaagccggcgaaggctgtgccgccgctcagcagggtggcggaggccgcgaaggcggcccgagcgttgccgccagcaggcaagcgtgtcgccgacttcgccaccgacatttgtgtggatgactatcttggtgggtcggacgagggccagcttgttacagttgcgcctgacgcggcggtcacgacggctgccatagtgccgaaggcaaggggcgaggctcttggctccggaggcgaggcggcggccctcgcggttgtcagggacgaggcggacgcagcgttccgccggctgaaggaggtgtcggaggcgttgagtcaggtggctgacttcaccagccgtactgcgtcgggggccctcacggcagctgtgtctgccgaagtcgagaggcttcagacgcaacatgctgacgctgtccgtgagaaatcagcctccgacagcaagtgccgtaaactggcggacaaggtggccgcgttggagagggagaaggctgacctccggcgccaactggcggcggagaggagggaagccaacgaggccgtcgccaaggagcaggctgcgcaggcggaggccaagctggcgcgggcggagggcaatcttaccaaggagctcgccgaacatctgcaagagcggctcaccgccctggagagccgcgcgaagggggccgaggccgcgatgcatgcggaggccgaacggacgcgcacacagcttatggatacatatcgtgagctgggtgcgcggaccggtgacttcgaggtgccggatcgagagcccgggcttcgctgtctgcagtgggtgcaggaggagctgctggaacttccagccgtcgcgggggggttgatgtcgtacgcctccctggtcacctgcgagggggcgatgaacgcgctctcccgcgaagggtgccggcacttcgaggccttcgaccaggcggatgaagattttgagcgagatatctataaggtcgaagaccccgtggtgaaggaatccgccggggccctttatgaccggatgtggggtctgtacggtcgtgaggtggtcagggagcgggcggaggcggcgatggctcaggcgttgcgtggcgagcaggtggacgacctcggggcgctgaacagtgcgctgcctgacccggagccgacccctgcggaggccgcgtctggggtcgccctggagccaaccccgaagaccgcccccacacctgctgcggccgacgaaggcctgcccccaaaggtggacgaaggcgcccctgatgcccccgcagctgctgtgccgagtgctgaagatcccgcggcgggggcagtggaaacaatagcaggaacggcggcggagccagtggcagaggctcccgcagcgtcagggccttcgcaggtggcatag

SEQ ID NO: 8615 - DNA, 2429 bp, Zea mays
  Peptide Sequence Number=SeqID_51990
ccttttctccttcttctaacggaacaggaaggagcgagcaagacgccgttgagaaaacacggggtgctgggcaggtgaaaggaagaggaaagagggcgagtgcgacgggaggcgcaatgcggtggagatctcccgccgtgctgcggctgcagctgtggctgctcgccgtctccgcgtcgttggctgccctcggtgttctcgcggctgatcttagcaaagaaccatttactatccgtataagctgtggaagctttgacgatgtccggacggagcctacgaacacattgtggtacagagactttggttatactggaggcaggttcgctaatgccacccggccaagctttatcgttcctcctcttaaaacgcttcgatatttcccgctatctgatggccctgaaaattgctacaacatcaacaatgttcccaatggccactatcaagttagacttttctttgcgttactggacaaccctaatcttgacagtgagccgattttcgatgtttctgttgagggtactctgttcagctctttgcttctgggctggagcagcgacgatgagaagacatttgcagaagctttggtttttgtccaggactcaagcttatcagtttgcttccatagtacagggcatggtgatccatcgattctttctattgaagttctacaaatagatgacgatgcctataactttggtccaccacgggaaaaggggacagtgcttagagcagtcaaaaggctgaaatgtggctcaggaaagcctgcttttgatgaagatctaaatgggattcactggggtggggacagattctggttaggattgcaaactttatcatccagttctgatgatcaatcaatatcatccgagaatgttatagcagagacattgcttgcaccaaatttttaccctcaaggcatataccaatcagctatcgtgggcactgataggcaaccgagtttgtctttcgaaatggatgttaccccaaacaagaactattcagtatggcttcactttgcagagattgataatggggtaactgcagaagaacaaagagtatttgatgtactcatcaatggagacactgcttttaaagatattgatataattcgcatgacaggagagcgttttactgcacttgtcctgaataaaactgttgctgtcagtggaataacactaaaaatcatcttgcaacctgtgaaaggaacccgtgccattattaatgccattgaggtgtttgagataatcccagctgaaaagaagactttgcctcaggaagtgagtgcattgcgaacgttgaagggttcacttggtcttcctcttcgatttggctggaatggtgacccctgtgttcctcagcagcatccatggagtggagttgattgccagtttgacagcaccaaagggaactggatcattgatggattaggcccccggccggtgttcctgcccatcgatacccctctccaatccctcaccgatctagcgaccattacatctggtatcggctaccttgggtttcgatctgatcccatggcttctgctgccaatttcgcggcgacatcttggcaaccggcgtccccatctccatggacagcgccacatgtcaccttcgtcacgccgtcctggcaaccaacgtccccatctccatgggctgcgccgcatgccaccttcgtcacgccatcctggcaaccagcgtccctatctccatgggcagcatcgcctgccaattttgtcaccacatcctggacgccggcgtgcccatccccagggataacgccaaatttcatcacatcatcttcgttgacggcgtctccgtccccatgggcgacgccactaggggcagccacggctcagcaatcatcagctccatcgatgggagacttgtggaccaacataagggctgatctcgcaaagatgcaagccacgctccagaaggttgagcaagggctactgcaaatcaaggtagcagtgcaacatgagcagcaccagctggcgttgtctacacggctccagacgttggcggctgtgggcatacaagctgctgctcgtggcttccttgcacgacagagagtgcgggagatgcgccgacagatgctcgaggcagccttggtgacggtagacctcggcacacgggggcgcgacctcgccttgtcggacggccatcagcagcggctccgggccgctatttccaagtgcgggcatggtacgtttcctgcgggcgacgaacttcaattctacggcagcagcggtaaggaaggcactcccctcgtcatcggcaagggcgcactatttagcgccaccacattccgctaccggccgccacgagggcgcctccgctggttattgttgcgacctattccagcatccgtcatgctgcagctcgaggacgagctgcttgtccaggaggggtgtagtgccagggcctaa

SEQ ID NO: 8616 - DNA, 204 bp, Zea mays
  Peptide Sequence Number=SeqID_51991
atgcggccagaagagacgacatactccaaggtggcgacagtgggtctggacccccacgggaagtgccggacccctggatgcacagcccggacctccgggcgaggttcaagacatccacagccagtgaagcttccactgcacgccgatactacgcaggttgcggatatcagggcgcaaggagatggccctggcaaccagcgttaa

SEQ ID NO: 8617 - DNA, 81 bp, Zea mays
  Peptide Sequence Number=SeqID_51992
atgcggcttcatacccttagagatgatgtggttttatactctcagaggtgcttgttgctcatcaagggaagtgggaagtag

SEQ ID NO: 8618 - DNA, 2016 bp, Zea mays
  Peptide Sequence Number=SeqID_51993
gatatcatatgtcccaactgcagtgatggttttatccaagaaatcagtgagatgggtggcgtactgaacacttatgggctaactgaaccggactttgaagagcgccaggccagaagatttggaatgatggatgccatatcttccctcatgcggcaacggctgtcagaaataggaagggatagtttgtttgatattcacggtagacaagggacaggtactgaatatggaaggaggtcaactgctattcctacgctggtatttggtggcatcccttctcctgcagttggtagcagtgatatcaatgttgtcatcagggaaggccgcagagctggcgctgcccgtccgaatttcagtagcttagttgttggtcccagtctggaagctctatttgagcagctactactccagaacaaccgtcaaggcccaccacctgctccacagtcagctattgactccatgcctgtggtaaagataaatcgcaggcatcttgacgaagatccacagtgtgcagtttgcaaagacaaattcgaggttggagcagaggcgcgggagatgccgtgcaagcacttgtaccatactgactgcatcatcccctggctggttcagcacaattcctgccctgtttgccgtcatccgctgccatcacagcgatcaggcagtagtaccagcagcgcccgtgtgccttcagcatactacaacgaaacagcttgccctcctgcggtcgccagggcagatttcgatcctgtgccttcagcatactacaacgaaacagcaactgatcctcctgcggtcaccagagcagatttcgatcctgctccaggaaactacggcagcgaaagccaggaaagtcacgtccccttctcctttctctggccatttggcccgtcgagttcttaccaatatgaagaaaatgttgatgaacctgcagtcgaagggagggccgcgccggtcatcttgcttccattggtgaagcgaggtgacgaagacctggagcgaagggtggcgtcttcgccttcgccccaacatttgccctccgagggaccagttcgactgagtcacctggtgccgaagacgtcgctagatggtggagacgctgccctcgctcgaagtggttccgcgggggtttttgatgtgaccgttgatggacgtggatatgcaatagttggggtccaccagctgacgctgaacgccgtggtggccctggcgaagtatgtctgggcagcgacttcgtacggtggacagccctccgtagaggtcttcgccaagaattattggctcccggcggccgtgatgtgctcccactgttatgtggcgttcccgccatttgaggtggcggaggatgatagggacgaaggggcccttcggtgtgctgcccgcatgagtagcgagcgtgatttggttgaggaattcatcggttatggggtgtggcccttggcgcatggttgggcgctgggcgaagtatgccctcgccagatgccctccctgggtgggcaacaagtgcgaagtccggccttcgcgttggatctgcgtggccgggacccagtcgcgttcgtgcgtgaagtggaggacggagcagtgaggattgtggggcggtatgtgccaaggatggaggctttgcggagttgggatattcgtggggccaatgttcgcctgaatagggtcttcgagttgaatcgtttgccatacggctgctatcccggggatgacgctgctgtggccgtcgatcgccgcgggaagaaaccggtggccgcggctggggagggttcgtcgcgcgaggctgcgccggccatgaagaagagaaaattaggtactatagctgaagggttgagggtctccgatcgttttgctgtggagttaatgggtacttgcatgaccctcagaggaaggatgtcttcgcccgagctccgggagtcttcggcgcgaatgctgagggtgaccgggggtcgatggcctaggaacgttccgatccccccgtgcggccggcgaagacatgtttacgtctcgtatggctcgtga

SEQ ID NO: 8619 - DNA, 886 bp, Zea mays
  Peptide Sequence Number=SeqID_51994
atggaactctagcagcacagttggtgaatttgatgggcactcaaagagggttctaagctgtgacttcaagccaacatgtccatttcgcattgtgatatgtggtgaagatattctagctaacttttatgaaggactgccatttaaattcaagcattccataaggatgccaagtggtagggctattttagcatgtggagggttcaagatttgtcctcttaagtgtcgcaatggaagaccctggactcaggttcagcaccttatgcagattgatctgaagggatggttcttgaactactctacttcccttcagtatcattctttgctgcagatactgaactgtgttgccggcctgatgaccttcatagaccatttggaaaatttggccccgttaaagacatatattgccaaaggattactacactcggttgctttacgcacccctgagattaacagtgaaaggaacctagaggatttgggttcatccaatactttgatcctgaggatgcttctgatgcaaaaggaaaacatgaagaagccttctaacatgagggccagagaaaaaataagtggcagaggtcgttcttatgatgggaggttgcgctcaaggtcacctgggttgaaggattctcctaggggtagatcacggtcccaaagccgaagctacttgccagcacttaagcgaaagcactattcaagcaccctcatgtgtactataggatatctgaacgtgtactatgtattgggtattccaaaatctctgatgagtgaagtgggttgtgaaccaatgaaccttgatgttggacgtgctgaccagtgcgcaggtgcctatgtggattggagggagaatatggagatagaagtctcgcatgcattgttaaccaattga

SEQ ID NO: 8620 - DNA, 900 bp, Zea mays
  Peptide Sequence Number=SeqID_51995
atggcggagaggcggccgatctacagggagcccggcaagccccggcggcggccccgctctcaggattggttgcgccgttcaaaggtttctgattttgcagagtggtgtcctcttttctttgatcctagtgtccctgccgaaatgccaatgctagcgagcagcgacagtccggtgtttcttctgaattctgattggtactcatacagagcaaaccgccggtattgtggtgctatgactatgagtctaggagcaaagagaggcagtgtaaatttgtcagttccgatgtgggaaaagaaattttgcactgatgcttgtgctgtcccctgggctaaactgtgtgaggccaagagattgatgactctgtacaaaagtgtggttgattgggatgactcggctgcattagaagccttcaacgatgcaaaggcgcgcttctgcgctgtatatcatggtcaacattatgatatccctttgcctgacccggacatgtttattgatataatcaacccagatgagtatgttgatcttgaattggtagctgatctggagaagtcacgtcgtcgcgttcccagaaaagatgatggtgttcctgatgtatgggactcttttattttatctgacaagccagttccagttacaggatggggtgacacggataccagcttcactcacggccagcagctctctgtaaattgggactatcagctaaaacactcagttgaagcaaatcataaacatatgtcagcaaattgggattattctatcaagcgacctgctcaaatagtttgtcagcaaaactcagggaaacagcaggatcaaaccagcagccagggggagcagacgaattcttgcattagccactggatcatgaggggtggctccccaggatgcttggaagcatga

SEQ ID NO: 8621 - DNA, 687 bp, Zea mays
  Peptide Sequence Number=SeqID_51996
atgagtagagtctggggaaaggataaactgagccaagctttccctttcaaatatagagaggccgcttcaaacccgggacctggtgactcagcgaggcagctctcaccactgcaccaggcctgccattcccaatgtctcgtcaaaccactgtcgatcaagtatgggcttggtatatcagaccatgatactgaagggagggttgtgactgtagagtttgatgacttctacctgttaactgcttatgtaccaaactctggtgatggtctaaaaagattgacttacagggtcacagagtgggatccatcccttggtaactacatgaaagaattagagaaatcgaagcctgtcatactaactggtgatcttaattgtgcgcatcaggagattgatatacatgaccctgctggaaatcgtagaagtgcaggcttcacaaacgaggaaagagaatcatttgggaccaattttttgtccaaagggtttgttgatacgtttcggaaacagcatcctaatgttgttgcctatagttactgggggtacaggcataatgcccggaagacaaacaaagctcaatatgagcagcgggggaagctcattacctggttatggaattatgatactgaccttaacctattgaggtctttaaactatctgatcatgtgctgtgccgctgatggcgtcagaaaataa

SEQ ID NO: 8622 - DNA, 1476 bp, Zea mays
  Peptide Sequence Number=SeqID_51997
atgcaggcacagtacatgaagcgcgaccctggctacctgggctgcaagaccgcggcatgccagaagcgcgacgcgtcgggcgcctgcagtgtccgcacctgcgccgccaccgtcaccttccacgtcatcaacttccgcaccgatgtcgagttcgtgctcttctccggcggcttccggacgccgtgcgtcctcaagcggtccggcgcgctccggttcgccaaccccgccagcccgctctacggccacctctccagcaccgactccacggccacatcgatgaggcttacctgggtgagcggcgacgggaggccgcagcaggttcagtacggaggaggcaagtccgctacttctcaagtggcaacgttcacgcggaatgatatgtgcagtagccccttgttaccaagccctgccaaggatttcgggtggcatgaccctggctacatccacacggccgtcatgaccgggctccagccttctcaatcctacacctaccgttacggaagtgattccgtgggttggagtgacacaaacacattcagaatgccaccagctgcaggctccgacgagacatcatttgtgatctacggtgatatggggaaggctccgctggacccatcagtggaacactacattcagcctggatcgatttctgtggtcaaggcagtggctaaagaaatccaaacaggaaaggtcaattcagtcttccacataggagacataagctatgccacaggctttctggttgaatgggatttcttcctaaacctcatagcaccactcgcttctcgagttccctacatgaccgctattggtaaccatgaaagggattatgcagagtctggttctgtatatgtgaccccagattcaggtggcgaatgtggagttgcatatgagtcatatttccgcatgccagctgttagtaaggataagccatggtattcaattgagcaagggagcgttcactttgtcgtgatgtcaactgagcataagtggtcagagatgtcggagcagtacaaatggatgaatcaagatttgtcatcagtcaatagatcgaggacaccatgggtaattttcattgggcatagaccgatgtactcatcccatgtcggaataccagttaatgtagatctagcatttgtagcctccgttgagccactcttgctcaagcaccagaatatatgcaaaggcaagccaaagaaggatgaaagtggaattgatacttatgacaacagcaaatatactgcacccgttcatgccactgttggagctggaggatttagcttggacaagttccctaggattgtgttgaacaagtggagcttatcaagagtttcagaattcgggtatgccagggtgcatgccacaagaggtgatatgctggttcagtttgtaagctcaagtacgatggaggttttggaccaatttagatttgtgaagccagatccggcaaggaggctaaggaacaagccagtttaa

SEQ ID NO: 8623 - DNA, 1263 bp, Zea mays
  Peptide Sequence Number=SeqID_51998
atggctttcttcgtcgtccagcgaggctccagccaactcacgccgctcctcgcgctcgcgctcctcggcctgctgcgctgcgccgccgtctcgtgctcggcggcggcggcggcgacgacgctgctgcaccgcgagagctacgcgggcaagtcggagttcaggacggtgaaccgcaagccgctgggctcctgcgtcgacccgagcccctacctggccatcgatgtcggcgccgcaggcccgatccccgacgaggcgttcctccaggtcaccgtctccggcgtgcaaaggcccgacccctccgactgggtcgccatgatcacgccttccaactccagcgttgctgggtgtcctctgagtgaaagtgaactacgtggagaccggcgacctggcgaatctcccgctcctctgccactatcctgtcaagcttcgaatcttcctgacgcgaaagtgcaggcccaatacctgacaagcgaccccggatacctgggctgcaagaacgccgggtgcgggaagcgcgacgcgtccggcgcatgcacggcccggacctgcgccgccacgctcaccttccacgtcgtcaacttccgcaccgatgtcgagttcgtgctcttctccggcggcttcaaggcgccgtgcctcctcaagcggtccggcgcgcgccggttcgccaaccccgccagcccgctctacggccacctctccagcaccgactccaaggccacctcgatgaggctcacctgggtgagtggagacgggaatcctcagcgcgtgcagtatggagacggaaagtcatctacttctgaagtcgcaacgttcacgcaggatgacatgtgcagtatatccgtgctgccgagccctgccaaggattttggctggcatgaccccggctatatccactcggccgtcatgactgggcttcagccatctcagtcctacacttaccgctacggaagtgattctgtgggctggagtgacacagttaaatttagaactgcaccagccgctggttcagatgagctatcctttgtgatctatggtgatatggggaaggctccactggacccgtctgtggaacactacattcagcctggatcggtttctgtggccaaggcagtggctaaagagatccaaacaggaaacgtggactccattttccatataggagacatcagctatgccacaggattcctgggtcgagtgggacttcttccttcacctcatcacgccactggcctctcaagttccctacatgacagctattggtaa

SEQ ID NO: 8624 - DNA, 1146 bp, Zea mays
  Peptide Sequence Number=SeqID_51999
atgcggtggggccgggcgccgtcccccgtgtggctaggagacgtcgcatgggtgcgacatcttcatgttgtagaagaggactcccgtgacagccccgagaagacgtggcattggcgcaagcagcggtgcggtttcttcgcacacgcttcaaggatgttcatcatccgcgctagggaggagggcgagccgagtgggagcttcgccttccacgtgggctggcggtccgcttcttcctccagcattcgggggagaagggcgttcgccggccttgcggaggaggcgaactccgggtacgaggggccggccgtctatggcgctgttagctgccgcgtgtctggctccctagcctgggtggctctagtgccgccttcggcgctgcctcctgtcgctgggacggagcgtggttgcccatccaccgcacgagcaatggtcgcgccgcgtgcgggttggccacatccacgacttctcccgcgccaccgatcacaccggggggtcgtacaagacgtcgtacgccgcgggggtggcggcggcgttcttggatggtcttgtccctactcccgcagtgagacgggagcgaagacctcttcgtgcgtgctggtgcagccgctgcccatcggtgcagaggtggttgctgccaccagcggggctgatgtggttgcctccgctggtgaggctgcccactgcagaggtggttgcctctgctggcgagaccgtcagtgccacctgccgccggaccttcgaccctttggctttaatggcctcgttgtcacccccgtaggaggacatgggcgaggacctattcacagtagcgctcaccctaaggtgatcgccgttactggcgagccgctcggagcagaggtcgttgtccctgctggtgcagaggtggtcgccgtcgctagtggggctgtccggagccagcttccaacgcgactcttactgtattttagcctgggaagccaagttgtgtgtccgaaccccctagatggtggcttcaagtactacgacacctgccgcagggcggtggagtatgcaggttcacggtacgggaccaggctgagcggctacatgggcggtggagcgtgcaggcccacggtacgggaccaggctgagcggctgcacgggctccggaccaccccaggagactaa

SEQ ID NO: 8625 - DNA, 246 bp, Zea mays
  Peptide Sequence Number=SeqID_52000
atgccgtgtcgcgctcatgggagcagcccgcccgctgcagcagtccaaacagctgcaacagtgtcggcttgtagccagccgaacacgccccgtattcgtggtggaggtggcgtcaccgagtcaagctcaggcaggcttgtcgcttgcttgcgccttgtggtaccacgtaccagtaccgcactagcactacgatgcttgggacgtcccattcgtttccgcctccattggcccaacagtagccgctag

SEQ ID NO: 8626 - DNA, 1089 bp, Zea mays
  Peptide Sequence Number=SeqID_52001
atgtgggcccagggtcaaaacgggtatagtacttggagccattcatccggtgcgatctcctcgtgccctgatatctgcgatctccgtagcattggcttgcagcagaagtttccctggcaacgtataagtcatgatgaccacggcgcgtgcgcggtggctccgcccactagcttacgtcacgggcagaaggccatgtggcagcatcgggtctccgcctgggcggggagcagtagcgttatgcggacaggtccgcaccaggctgggcctggacatatgtcggcaccagacccctgcctaagtaaggcctgggtattctttgccccagagtcccgggacccggctgtgggtagtccgaaccccatgaagaggggtccgggacccgtcccgaaggttcgggtcgcactcgcgggggtcttgaaccttgccctggagatccagtctacatgtacaggggtctggcactttcccatgggggcccggacccactgttggcatcctggagtgtatcgtcttctctggccacatggcgaccctggagccatccacgtggtggagtcgggtgctgttcaccacgtggctagagatagtcgcgtgggcaccgcgtcttcatgctatagaaaagggtacccctatttcagggtccggcgggaacttgggtggctaggacgccgcgcggagatgatccgcaagagcggcgcagcccacaccagccaaggggacacccgtttgggactgggtgcccattggtgtctgcggcgcaaccgcagtgaagtcttggtcgaggtcgcgaccatcgatgttttggcggcgctcgatgaccgcgtcttcgacctggttgaggtagaatgcgccataccgagcagtcggtcgacgtcgtcccaccattgcttcatggctcctggtgaagccgtggagcttggagggtgtcgcaacaactccctggctgctaacaacgcccccggagacgcccttgatggagtccgggacacccagcaggcgcgccgcctgctggatgaccttgacgctgcctgccagcggatgggatgggacacattaaatgctgagagggcacgtcacccgtcagcatag

SEQ ID NO: 8627 - DNA, 93 bp, Zea mays
  Peptide Sequence Number=SeqID_52002
atggacacgggccgcaagcggaccgcaccggagggcgccaacggcgcgggcggccccaagcgcgcgagagtgcatcttagctgggctaggtag

SEQ ID NO: 8628 - DNA, 1032 bp, Zea mays
  Peptide Sequence Number=SeqID_52003
atgagactgaggtacgaccacttgctgcggatcccagactttttgaccttcagcgtgctacagcggcacggcactcgtattcaggagtcctttttcagagctcagatgtctgcacagattgctctgcaagtgcaccggcttttggatcttccagcttttctgcttgccgccggtgctgactctgaggtgcacctcacatatctacctggccttctgactcttttgactaccagcgacagcttatgctacgacacctctgaccctcctcatcgccctcacagcggtgtggctccgggtacaactcacgtcgcggctctgttccgcccgcccttctcagatgggtcgcgacgttcaccggcagattttactacaacagccaagtacttatttgagcttatcagacggactcttctgccgaggatgggatacagggaggctaccacacatatccagctttggctccttggtgccctgggtacacttgaggcctcacgccttgtctttgggtcctaccgtcctgcgcctgaggctcctgtgccagcttctgctccagtttttgactctcaggccgaggatgctgctcttcatcagttcgaagctcaggatgcagcagttgatgatgatgatgatgatgatgatgacaattttgggattcctcctccgcctccgcctcatatgcctccacgctcacatgatcatgaggctgggagttctagtgctacccctgctgcccctcctgctattgatcctgcacttgcttcaattcttcagacactcactcagcagcaggctcacttggcagccgagcagacccgccaggcagcagctcatcagcagttatccgagaggatgctctcgaagtttcagaccatacaggacaggcaggattctcttcagcagcagcttctccaggatcgggctgagagcagggcattcatggctcttatgctacaacattctggtgtctcagttcccccggttcagtctgctccacctcctccgcttcaggctcctgttgtgccagcgatttag

SEQ ID NO: 8629 - DNA, 285 bp, Zea mays
  Peptide Sequence Number=SeqID_52004
atgtccggtgcaccggcagccgcgcgctcaaaatctatttttctgtgcgttgtccgtcatcaggtcaggatgccgcacacgaagaatgtgtcggcgccagggggaggcgatgatgaggatcctcgtcgccccttcaggcaggtcaagggcaagacagtacacttggagcagcaggaaggccgcaagaagcggcgtatggacagagcagcccgtgcagcggcagcggcagtagtagtcgctgcgcaggccgagcttggagatcagccacagactccgtcagattag

SEQ ID NO: 8630 - DNA, 528 bp, Zea mays
  Peptide Sequence Number=SeqID_52005
atggcgccccgcacgctctgtgacgacggcggctctcagcccccttacggaagcaagaggacgtcagcaaggactcgacagctccgacagttgtccttccgccaggctccagcgctcctccgacggccacgacaccacacgaaccgggtgtcaaaacctctccggctgccacgatggaaggaccagggccctcttatagagggttggccgcgcggggacgaggacgggacaggcgctcgcgtgaggccgctcgctccctctcccgcgtggacgcttgtaaccccctactgcaagcgcacccgacctgggcgcgggacgaacacgaaggccgcgggatttccacctctctcacgcccgtctccggctgccttttctccccccttcgcgctcggcctcgcgccgacccatctgggctggggcacgcggcgacatttcactcgtcggcccagggaccccctggtcttgaaacgccgacaagaccctaacctctctggaaatcaaccagcagtactacaaatagtgttctga

SEQ ID NO: 8631 - DNA, 324 bp, Zea mays
  Peptide Sequence Number=SeqID_52006
atgcctagagatgatgatgcgcttatggagaagatcgaggcagtggtacctcatgtgatcaaaggagtacccagggaaaaggcagcaggtggatctaggcacgagtttgtggggagctgtggcagatgtgttaggataacagacgcaaccaaagacacaaaagggggagcagtgacgaccgccgggacaaaggtgggacgtctgcggcccaccgacaaggagaagccaaggacgaggcagagatgggcatcagcgttggggatagcggctcacaccgtcgagggagggacagtgtccgctgctaggggtgataatggtctttag

SEQ ID NO: 8632 - DNA, 363 bp, Zea mays
  Peptide Sequence Number=SeqID_52007
atggcgaggtacgaggcgtcggcggccgcgccgggcgtagactttcaccttcccgacgagatcctggccgtgatccccaccgacccgtacgagcaactggacgtggcgcgcaagatcacctccatggccatcacctcccgcgtctcccgcctcgaggccgactctgggcgcctccgccgtgacctagccgaccgcgaccacgccgaggccgagctccgtgcccgcctcgccgactccgacgcgcgcctggccgccgctctcgacgagaacgcgaagctagcgaaggaaagggactcgctcgccgcgacgaccaaaaagctgaccaggaatttggcgaagagatgtgcttttcagtggccatga

SEQ ID NO: 8633 - DNA, 444 bp, Zea mays
  Peptide Sequence Number=SeqID_52008
atggcgcttcttgttgacgtggctggcctgcgccctaggttgggcgacgtggaggctcctccaaagccgaggtcgagtctgtcttccatggccgaggccgagtccgagcccctgggtcgggcgaggcggaggtcgtcggcagaggccagggcgcccgagtccgagccctgggtcgagcggagcggagttcgccgtcttccgggtcttagcccgagtccgagccctgggtcgagcggagcggagttcgccgtcttccggcccgagtccgagccctgggtcgggcggagcggagttcgccgtcttccggggctgagcccgagtccgagccctgggtcgggcggagcttcctatggtgcctttggcagggactggcttcctgtcagcatcactctgtcaagtggcgctgcagtcggagtggcgcaggaggcgctgtccttctgttag

SEQ ID NO: 8634 - DNA, 2073 bp, Zea mays
  Peptide Sequence Number=SeqID_52009
atggacgacggggttgacggagaaagatggggagctcgctcgaccaagcagacgcacatgaacctccatgccagtgtagccgtcctccaagggtgctgcgacaaggcctcgccgaggcagacgcgacaggaatccacacgatccgcgggcggcgctgctcctgaggtttgggcccccggtgaccttgcatgtttgggtggagatgcacacggagatgcgacagccgcaactgggacgacgtcgaggatggtaggggttcgcgtggagatgcacacgcagcagctaggacgacatcgaggatgggggtcgtgcgcccgtgccgacggggatgggacgcgaggaggatgggagcgggggcaccagagacatccgcgggcacgcgtgcatctagacgcggggcgagagcagcggagcagtgattccgcgagtgattccgcgagagcagcggagcgcgagagcaacggcgtggctggaggaggagattacggacgcaacggcgcggggcaggaggagagcgcggacgcaacgacgcggggccaggagacggagattgcggacggttcggtgaggtgggaagcgacgtccgcgattcttggcaccagagaggatgcggcggcgcggatcgtggtgtatccatccatggaagcacggcgcgaggggcagatcggcgtagggaggctgcgatctcgggaaccttccaagctgggatcgagaggtgagatcattggcgatgacactgtgtactactatcatgacatgatagtggaaatgattaaatggggatatcaagaaggaaaaactctctttggatttggttatgatttccgtcaaagcaacaggctctcagagacacttgacagattttccaaaaagctggagtcagtgtacacagcttctggtggaaaaaagatcaatctcattactcattcaatggggggattacttgtgaagtgtttcatctctctgcacagtgatgttagtacttcttgtattttggatctttggttgagatttgccatttttaatgtcctgcgcagccgcgctatcttaaagacatttgaaaaatatgtcaagagttggatcgcaattgctgcaccattccaaggtgcccctgggtacataactactagtctgctcaatggaatgtcttttgtcgaaggatgggaatcaagattctttatttccaaatggtgtatgcagcaattgctacttgagtgcccatcaatctatgagttgctggcaaaccctaacttccagtggaaagacatcccactgctacagatttggagagagaatttggataacagtggcaagaaaagtgccctgttagagtcgtatgagcctgaggaagcaataatgatgattaaagaggctctttccagtaatgagatcattgctgatggcatgcatattccggtgccccttaatttggatatattgaattgggcaaaggaaacttatgatcttttatgcagtacaaagcttccggaatcagtgaaattctacaacatttatgggattgattatgatactccacatactgtctgctatggcagtgaacagcatccggtttcaagtcttagtagcctcttatatgctcagggaaaatacgtctatgttgatggcgacggatctgttcccgcagaatcagcaaaggctgacggatttaatgcagtggcaagggttggggtggctgctgaccaccggggaatcgtgtgcagtcgccgcgtgttccggatcgttcagcactggctgcacgctggagaacctgacccgttctacgacccgctgagcgactatgtcatactcccaacactctacgaaatcgagaagcatcgtgagaaacacggggatgtcacgtccgtagcggaggactgggagatcatctccccgaatgacggcaagaccttgaggccaggcgagcttcctcctatggtcagcacactgaccacgagccgggaaggcaaggagggtgcactggaagaggcgcaggccactgtggtcgttcacccggagaagaaggggcggcagcatgtgcaagttagggctgtgggtgtcagccatggtggctaa

SEQ ID NO: 8635 - DNA, 267 bp, Zea mays
  Peptide Sequence Number=SeqID_52010
atggggagtcacgccttgaacgagcagcagaagcagaagatgctgccaaaatcaaagaagttagtgaaggggctgttcaagggcctgggcctttttcagggcagttcttcgagcagcagcagacgtcgagagctattgagcgtggtacatggagatgaggatgagcagcacactgaggagcagcacaatgaggaggagcaacacaatgaggctgagcagcataatgatgaggtggagcataatgaggaggtggagcacgtgacatag

SEQ ID NO: 8636 - DNA, 444 bp, Zea mays
  Peptide Sequence Number=SeqID_52011
atggcccggggtccattttccttacacacgcgcaacggctaccctgcgaactactcgccccgtcgcatcaactccgcaacgggacacgcggcgcctctggcaggagaagcgagcgacgcttcccttcgccgtaatgaccgcgtcaaaaaaaagggaccgggaaagggggataccccgaaaaggatccttccccgagaaggaaccaggctccgagcccccctactgatcagaggttcgaaggctagccccccggaagggttcgacaaccgcctcagatcgcgtgggccctacacctactactggtcagaggttcgaaggccggcccctcgaaagggttccacggccgcctcaggctactcgggctccgcgcccattactgatcaggggttcgaaggctggcccccgaagggttcacagccgcctcagacgccgagcgagggatga

SEQ ID NO: 8637 - DNA, 621 bp, Zea mays
  Peptide Sequence Number=SeqID_52012
atggcgcctcctgttgacgtggctggtctgcgccctaggttgggcgatgtggaagctcctccgaagccgaggtcgagttcgagcccccgggtcggcccgagtccgagccctgggtcgggcggagcggagttcgccgtcttctgggacttagctcgagtccgagccctgggtcgggcggacccgagttcgagccctgggtcgggcggagcggagttcgccgtcttctgggacttagcccgagttcgagccctgggtcgggcggagttcgccgtcttccgggacttagcccgagtccgagccctgggtcgggcggagttcgtcgtcttccgggacttagcccgagtccgagccctagggtcgggcgaggcggagcttcctatggagccttcggccgggcctgactgcctgtcagtctcactctgtcaagtggcaccgcagtcggggtggcgcaggcggcgctgtccttctgtcaggccgggcctcgggcgagacggaaacatgttcgccgctgaagggggacctcgggcgagacggaaatcctccgggctttgtgctgatgggggttaccagctaagaattaggagccttgagggtacccctaattatggtccccgacagtag

SEQ ID NO: 8638 - DNA, 1038 bp, Zea mays
  Peptide Sequence Number=SeqID_52013
atgggggctgaacctttcggacattgtgaagtggacaagtcatgcgtagccataaaagacagcattgacaaaattattgagaagcaatattacatagcagacaagtttatagaattgatagatgaggtactacgtgccgagtctgaaaatttggaaaacgagactgatgagccacagcaacaggggaattcggctgattcagcaggacacactgttgatgccacccagcccacacccgatatgccatcccaagcttcgcagcttgagacccaactgggtggtactcagttcgaagaaattcacgaaagacaacagcatatccgtagagtgcttgagacgtgtcccgacgaatcggatgtggtttcagatcaacagagaggtgaaatggcaacagaggaaatggaacacaatgacagtgggccagtttttgaccagaccccaactcctcatgatgatacactgaaaggtactacaaactctggatctgatccaccccttacagagcaagagtgtgttcgttctctgtgggacttaatttgttccaaggacattgaccaaagcagggttgttatagattacggtgaatacggtgcaaactgtatggatatttatgaatctttcgcggagggcaaatgtcttgagaatgtcttcatgcagtgtttcattgagtgtgttcgggatgattctaaaaatcatcgtcgaactctgacatctaacagattaatacttgatgctctgttaaattttgaagaacaggaacgtcacagcaagaatcctcagccgtttgatcaaaatgtcttacagaattgcttgcacaacacattgcctgctttggtaaatctggataaatgcaagtcgatattggtacctatgctcaacaaagagacattggtacactgtgtcatatcttctttcaatcaaccaaacaattcccgagacctacgtgctcatgcccttcatcaactcacattccatcgcatcaacaaggcgttgccacttccattagatatccagagatttatgtttgcgcgcaattaa

SEQ ID NO: 8639 - DNA, 66 bp, Zea mays
  Peptide Sequence Number=SeqID_52014
atggctgcgctctgtgtgccgttgggcttgggaccagagaaggagcgctggccaggtactaaataa

SEQ ID NO: 8640 - DNA, 267 bp, Zea mays
  Peptide Sequence Number=SeqID_52015
atggacgagaggaattggagaatagctcaccggatagctcggcctacgcgcggtggcgggcggccgaagtctggcgacggtgctctcactgttccagtgaggcagggcctcgatccttgcttggagaagcttcacggctcctcggggaagctgtccaagggctcgattgaggctcagggtctctggaaatggctggccgcggtggccggcgcttgggtggctcgggcgggtggcgcagagcacgccggagctaagtacgatgtctag

SEQ ID NO: 8641 - DNA, 804 bp, Zea mays
  Peptide Sequence Number=SeqID_52016
atgggggggtttgcttggttgcgggtgttcgcgcgaggtcgaagtggaggggagagtaagggcctgaccacgcccatcttatggccgctcgcgataggtcagcgcgcccacaacggcatccgcaacgccggcatgaccgagcatgcgcgattcgcgcggcgaaggaagaggaaggttgttcttggacatgatgacttcacccaccccgccaatggaggagacactcattttagttctgatttcctttctcacgagggtttcccttccatcttgtgggaggtgctcaactccgccgattaccctacaccccctttgacggatgacaccaccaaggcggcagctttgaagaccctgacgactttctgcggctaccatcccctggagatggtgatgcacccactaggactcttccccgctaagaagagggatgaccccatgtggtgcaaccgtgccctacagactgatgctatggcacatcttgctaaccttgctcagaccactaagctcaccctcgacagtcgagaggactttgtggtggagatccggggcaacaccattgatgtcctggaaaaccagctccacgatgtgcagcaggagcttgaggaagctaactaccacctggacatgcaccacctggagatggaggccaacgaggccggaagcgagggagaggaggctcctgaggagttagaaccagcccctgctagacagcgtcgcgggcagaacgagcaagttccaccgccacctcctctagctcccacggtggaggagctgatggctcaacagaacgaaattctgcgatag

SEQ ID NO: 8642 - DNA, 423 bp, Zea mays
  Peptide Sequence Number=SeqID_52017
atggccaccgccgccgccgctccagcgtctatggcaccatcccctgcgcccaaggccaacgacagcaggaaggcggtggtgcccgtggacgcgtcggagctggagaagcacgtgctggcagtggacgatagctccatggaccgcgccgtgatcgccaggatcctgcgcggctccaggtacacggtgacctctgtggagtcggcgacgcgcgcactggagttgctcgcactaggcctgctccccgacgccagcatgatcatcaccggctactggatgcctgggatgaccgggtacgagctactcaagcgcgtcaaggagtcggcggcgctcaggggcatcgccgtcgtcatcatgtcgtcggagaatgtgcccacccacatcaccctggtttatactattcacaaaaataagtgccttctatga

SEQ ID NO: 8643 - DNA, 189 bp, Zea mays
  Peptide Sequence Number=SeqID_52018
atggggtatttgagattcaatcgtgagcgctcatcactggtcgatggccagggcaacggggttgcggcatcctacccgttgtggctgggaggtgggcggttacatgatagatctaatctggtacttatctggtacaaccatatcctatatattagaaactctaacaaactcgaaccaacgaatctatga

SEQ ID NO: 8644 - DNA, 2137 bp, Zea mays
  Peptide Sequence Number=SeqID_52019
atgggaggacttggggtgtctgatagttttgctagagagttgatgaggacgtgtgaggccccgggggaaaggatgtcttcgcccgagctccgggagtcttcggctcggatgctgagggttaccgggggttgctggcctaggaatgttcctatcccctgcgcggctggcgaggactgttttacatctcgtatggttcgtcagtggagagtttttccttacgggcggaatatcggtgctgttgtgtggacagtgatggacaaggatcgccaaggggcggcgcaaaaacgccaggcggctgtccggctgcatgaagctaggccgaagcggcagcggggggctgcgaaggctgcggcccccggcggaggcaaaccgccgctggcggcgaaggtgggcgcctctacacctagcaaggcgccggaggcaacggcgggcgccggaggctccaagtcaacgaaggtggtgccgccggctagcggagtggcggaggcttcgaaggcggcccgagcgttgccgttgtcgggcaaacgtgttgccgacttcggcaccgatattactgtggacgactatcttggtgggtcggacgagggccagcttgctatagttgcgcctggcgcggcgatcgcgacggccgccatagcgccgaaggcgaggggcgaggtgtcgaagtctcttggcgccggaggcgaggtgtcggccctcgcggtggtcagggacgaggcgggcgcagcgacccaccggctgaagggagtgacggaggcgctgagtcaggcgacggaggcgttgagtcaggtggctgacttcaccagccgtactgcgtcgggggcccttacggcagccttgtctgccgaagtcgagagacttcggtcgcaacatgctgacgctgtccgtgagaaatcggcctccgacagcaagtgccgtaaactggcggacaaggtggccgccctagagaaggagaaggccgacctccggcgccagctggcaggggagaggagggaggccaacgaagccatcgccaaagagcaggctgcgcaggcggaggccaagctggcgcgggcggaaggcaatattgccaaggagctcgccggacatctgcaggagcggctcgccgccctggagagccgcgcgaggggggccgaggccgcgatgcgtgcggaggccgaacggacgcgcacacagcttatggatacgtatcgaggagctgcaagagctccccgctgtcgtggggggttcatgtcgtacgcctccctggtcacctgcgagggggcggtgaacgcactctcccgcgaagggtgccggcacttcgaggtcttcgaccaggcagatgaagattttgagcgggatgtctataaggtcgaagaccccgttgtgaaggaatccgccggggccctctacgaccggatgtggggtccgcacggtcgtgaggtggtcagggagcgggtcgagattgcgagggctcaggcggtgcgtggcgagcgggtggacgacttcggggctctgaacagcgcgctgccagacccggagccgacccttgcggcggccgtgactggggtcgccctggagccaaccccagagaccgcagcgatcgcgacggctgcccccacatccgctgcggccggcgaagacctgcccccaaaggtggccgaaggcgcccctgatgcccccgcagctgctgtgccgagtgttgaagatcccgcggcggtggcggcggaaacaacggcggaagcagcggcggagccaacggcggaggctcccgcagcgtcagggccttcgcaggttcaagattttgggcctgcgcacgcaactgctactactgagtttttggcggcttcgaccgcggaaggtgggaatgaatatggtgggtctgtatctgagttttttgattttactgactctgggagttcggttgagtggactgaggagtcgtcggaggaggacttggattattttgcggccttggacgtggctgcggcggaggcttcgccacacgccgcggacgagccagacgtgccaggtcctagcaccgggcgccgacgacgaagggcggttgcaaagcgtagggttagcgcggaggaaggggctcggcttcgcgtgagtagggctggtcggcaggagctgttgtctttgccggccgccgcgg

SEQ ID NO: 8645 - DNA, 327 bp, Zea mays
  Peptide Sequence Number=SeqID_52020
atggtgattccagccggtgaggaattgaggataatgttgttcaactatagggagatgggtatcatcccgaaggtcatggaattaccactagacgagcagagcagcggaagacgtctcgatgtagacgaacgcgtcgagcagtgccgtgcagacgccggcgtccttcacgtcctcgcacggttcgtccaagtgctccagatgcagcacctccgaggtatccacacgtacagggaggaagcgccgcgtaccgaactgctaggttcgcgacggcagcttggcgagggcgagaggtgggcggcgactgttagttcgctggtggcgaattag

SEQ ID NO: 8646 - DNA, 441 bp, Zea mays
  Peptide Sequence Number=SeqID_52021
atggcacccaagagagctagttcgaaggcagccccatccgtcgacgaagcagcaaaggcagtgttgctagccgagaaaaagggcaaggccctcgcagacaacaccccccaagaagcctgcgaagacgaagctctcagcaagagacagcgcaacaaccaacccactcccgaaggcaccctacgcacctgcagctatggaggacaaccacaagcaccacccccaggctttgctgcaccagagggtgaagacgcaacagaggacgacgaagtcatcggcgtctcagccgaagaacagctacaactaagggccctgcgcatcaagaaccgcaacctccaaaagcagaaagacatcctcgaggccaagcaccaacgtgtcaccgcgcaagccaaggtgcgccagatgatacgagacgaggagcagagagcccgagaactcaagtaa

SEQ ID NO: 8647 - DNA, 465 bp, Zea mays
  Peptide Sequence Number=SeqID_52022
atgcgcaatctcctcggtgtgcccaacacgctcaacgtgctcaccgcctacccgcttctactcgtcggggttccgggcctcgtcctctgcctctacgacagcgggtgcttcggcgtcagcttgaggtgggaggcctcgggatggttcctcttttatgctgggaatgtagcagcagcatttggctcagcttactatcacctcaagccagatgatgaccacttaatatgggacaggtacacaatgtttgctaacgtcatcgactcgagccaggtgagggttcagcgtggaggttcatcgaggtctactgctcgtagctcacgtcgctccactcaagatccagcagaagtggagcaactgcgagaagaacttaggcgacatcaggattacttgaagcaacaagctacgcaacatgaatattatgctacaattcagcaacaacaaacactcatacaagaatccagttaa

SEQ ID NO: 8648 - DNA, 1215 bp, Zea mays
  Peptide Sequence Number=SeqID_52023
atgcagttggcatgcaaccgcgccaagtgggcgcacccctccgactccaacgcgctcagcatggaggcccaggcccacacgtcatgcaatcggcgcgccggttgctacgtgcgagcaactgcaccgccactcgcgccactaccgcgcctccttgactgcggaaccagtaccgcgactcgaggcaaccctgcgtatgacccaacagtgccagccaggcgcatcggtcacgggccagtcagccgcgggagaaggagaagcgagcgacgcttcgccttcgccataatgaccgcgtcaaaaaagggaccaggaaagggggataccccgaaagggatccttctccgcgaaggaagcgggccccgagccccactactgatcagaggttcgaaggctggcccctcagaggggttcaacagccgcctcagagcgctcgggctccgcgcccactactggtcagaggttcgagggctggcccctcggaagggttcaatggccgcctcaggccactcgggctccgcgcccactactgatcaggggttcataggctggcccacgaaggccaagtccggccttaggcgccataggaaactccgcttcgcccgaccccagggctcggactcgggctcagccccggaagacgacgaactccgcatcgcccgaccccagggctcggactcgggctcagccccggaagacgacgaactccatatcgcccgaccccagggctcggactcaggctcagccccagaagacaacgaactctgcatcgcccgaccccagggctcggactcgggctcagccccggaagacgacgaactccgcttcgcccgaccccagggctcggactcgggctcagccccggaagacgacgaactccgctttgcccgaccccagggctcggactcgggctcagccccggaagacgacgaactccgcttcgcccaaccccagggctcggactcagccctggcctcagctgacggtctccgcctcgcccgacctaggggctcggactcgacctcggccttggaagacagactcaacctcgacctcggaggatcctccacctcgcccaacccagggctcggactgaccacgtcacaggaggcgccatcattaccctaccccaagctgactcaggctacggggaacaagaccggcgtcccatctgcctcgctccgccaaacatgtaatgatggcgccccgcatgctctatga

SEQ ID NO: 8649 - DNA, 195 bp, Zea mays
  Peptide Sequence Number=SeqID_52024
atggatactagtatgataggtcgagtagctgcttttgctaattgggatctcggtacaagtcgggtgatttttctagcactcgtgcgaggtacactgcagaacatggttgatggtgtgacttggccctccaccctaccaccgggttggacggtcgagtgggatgctgcctcgtcaggagaggaccaggaggagtag

SEQ ID NO: 8650 - DNA, 645 bp, Zea mays
  Peptide Sequence Number=SeqID_52025
atggaggcctgggcccacgcgtcatgcaaccggcgcgccggttgctacgtgcgagcaactgcaccgccactcgcaccactaccacgcctcctcgactgcggaaccagtaccgcgactcgaggcaaccctgcgtacgacccagcagtgccagccaggcgcgacggtcaatacgaccaaaaatgggtcggcagtaatggcggtggcaggcgggcaggagcagcgcgggacaggcggcgcctgaggcaggagaagcaagcgacgcttcgccttcgccataatgaccgcgtcaaaaaaggaaagggggataccccgaaaaggatccttctccgtgaaggaaacaggccccgagcctccctactgatcagaggttcaaaggctggcccctcggaggggttcaacagccgcctcagagcgcttgggttccacgcccactactggtcagaggttcgaaggccggaccctcggaagggttcaacggccgcctcaggccactcgggctccgcgcccactactgatcagggcgggaacgatcttgtaacggaatcccatcagagggaggcatcgagccctcggaccccgtcgaaaggggaccgggtccggcagatcacccgctggtacttttggagcgcgcctccgggcctctag

SEQ ID NO: 8651 - DNA, 219 bp, Zea mays
  Peptide Sequence Number=SeqID_52026
atggcgttggccggtcggaattggctcgccggggtgcggcgagggctgttcctcgtcgtggaccttgaaaacgaagaagagagtgaagtgactgaagagaagacaccaccacctttggaatctcaggcagggacttggttctacttcgacatctgcgggtccgagcctgactcacctatcaacgaaggcaagccccggtgcatttgccaccttccttga

SEQ ID NO: 8652 - DNA, 1047 bp, Zea mays
  Peptide Sequence Number=SeqID_52027
atgcatgatgaagaaatcctagctagaacattgtttgccatcaaagaaaaactagagttgcttcagcaggatgccttagaggcaaaagtccaagcctttccagaaatagctaagtatgagtgggatgacatcagtgttgatcctccctctccgtcaccccctccaacagttactggtccttctgttgacgaagaggagttctactgccccgacgtcagtgacgaatggaatcctcttgggccacctgaagtaaacccatttcctgattccattccaccatccaataccagtacaccattgcagggttccaatactataccttccttacctatgaatttggactcagatgcagaacacagtgttcatgacatcaatagtcttgaaaagaatgcacctcctatacataaacccaaaaagtcaaaggaacaaaactttactggccctgaagatcttctactttgcacaacctggttgcaaataagcagtgaccctgttgtgaacactggccaacgtagggagggcctttgggctagaattgaaaaaagatacaacgaacagaggggcaactttccttgtagagtgaacagagcgcttagcagcagatgggacaagataagagcagatgtaagtactccgtatgctcccacaactgaaaatgatagtgcatctgcagggttgacaggaaaacggccgcgtggtcgtgatttcagtaaatcagagagaaacaaacctgcatcatcttcatctccagagtaccttagccgtttgcaagaaataactgaaaaacaaattcagaggtccatagaaaagggtgaaaagaaagagaagtgctcagaagaagacagggaaatggagaaaaagaggttagaattggaagcagaaaaggtcatcatacgaaaaagggaattgaaacttcaagaactagattgtgctgaaaaaagattacaaaggctggaggcaacgaatgaagaagatgttgaacccgaagtttggattatgatgcaaaaacaaaaaaaagaagttgcaagaattcatatttggttatga

SEQ ID NO: 8653 - DNA, 1017 bp, Zea mays
  Peptide Sequence Number=SeqID_52028
atgcccagcctggaggcccaggcccacgcgtcaggcaaccggcgcgccgaatgcttcgtgcatgcagctgcaccgccacttgcgccaccaccgcgcctcctcgattgcagaaccaataccgcgactcgaggcgacccagcacacgacccagcggcgccagcctggcgcggcggtcagtgcggccaaaaatgggccggcagtaatgacggtggcaggcgggcgggagcagcggtcacgtcgtcagccaagctcacgtcccatccgggggcagcaagagaaccccctctcacggagaagcgggcgatgcttcgccttcgccataatgaccgcgccaaaaaagggaccgagaaagggggataccccgaaaaggatccttccccaggaaggaaccaagctccgagcctccctactgatcagaggttcgaaggctggccccccggaagggttcgacagccgcctcagatcgcgtgggccctacacccactactggtcagaggttcgaagaggctcgggggctgctctcgcaaacccggctccggccgaaccgttgacagcgtcaacataccagcccgagaacttgggacccgaccgtacacccgggctacggccagctcgcatgagggaacaaccagaccagccgaagcattacgcgaggcattaagacctcgaaggagtgaaaccactcctccgaggcctcgggggctacacccggcgggtgcgctcgcgcgcacccaccggaacaaaatgcaaccgagaaaggctggtccccttgcaaaaaagtgcgacgaaagcctccaagcgagtgctaacactcccttcgaggctcgggggctactgtcggggaccataattaggggtaccctcaagactcctaattctcagctgaaggacagcgccgcctgcgccacaccgactgcggtgccacttgacagagtgaggctgacaggcagtcaggccctgccgaaggcaccacaggaaactccgctccgcccgacccagggctcggactcgggctaa

SEQ ID NO: 8654 - DNA, 216 bp, Zea mays
  Peptide Sequence Number=SeqID_52029
atggacagaccgaatctaataatacataatgatctacctatcggtgattattataatttgatgattgacaatatcgatgaagtgaccgacaagagtttgatggttctaggagaaatcgagaaagacaagatcattgttgctaaaacttactacaagaaggtcaagataaatcatcctaggttggagatatggtgtggaagaccatcttgccactaa

SEQ ID NO: 8655 - DNA, 837 bp, Zea mays
  Peptide Sequence Number=SeqID_52030
atgcaggcggcatgcaaccgcaccaagtgggcgcaccctttcgactccaacgcgtccagcatggaggcccaggcccacacgtcatgcgggcggaagcagcggtcaagtcgtcaaccaagctcacatcccctcctgggacagcgagagaaccctctcccacagcgtgaagacagcgcgcccgtgttccattcctctaacggcgcgcgcacgcgcaacgactgccccgacgagcggcacctttggcgggcgaagcaggcgacgcttcacctccgccataatgaccgcgtcaaaaaagggaccgggaaaggggataccccgaaagggatccttctccgtgaaggaaacgggccccgagcccccctactgatcagaggttcgaaggctggcccctcggaggggttcaacagccacctcagagcgctcgggcttcgcacccactactggctggccctcgaagggttcgacagccgcctcagacgcacagcgagggatgaccctgggttcgttcgatacataaccaaggctcgggctacgctcccgagtcgacagagccgaagtgaccgcagtcacttcgccgctccactgaccggcctgacaagaggacagcgccgcctgcgccgctccgactgctgtgccactcgacagagtgaggctgacagcagccaaggctcagactcggcctcggccccggaagacgacgaactccgcctcgcccgaccccagggctcggactcggcctcggccccggaagacgacgaactccgcctcgcccgaccccagggctcggactcggcctcggccccggaagacgacgaactccgcctcgcccgaccctag

SEQ ID NO: 8656 - DNA, 1059 bp, Zea mays
  Peptide Sequence Number=SeqID_52031
atgtctttgcactcccctcatgcgtcgcgtctttccaccttccgagcccccggatggggaacactcgtagtccttacgccttgtcattggaggaacgcaacttcgcggaagttggtacctttcagccatcgttcggcttcaaggattttcatcaggcagcccggccgcatcccctcgccggtggtcacccaagacggtgaccaccagctcctgggtggggagaagcaagccgggctgcggcctctgcccctccctcaacttcaaggatgttcatcatcagtgctggggaggggagtgcgccgagttggggtcggtctccacacgggcagcggaccgctccttccctcagcgatcggggggaagggcgttcgccgttcgtggcgctggcagctgccgcgtgtccggctctctggtctgagcggcttcggcgctgcttctggtgccaccttccgtcgcggcagccggaagaggtttctccaccgacgagatagtcggtgccgcccgcggactgcggactgtcctccaactctatggccttctgctcgtcctcgtccctcgagcggggacgtgggtgagggccttacaacagcagcatctgccctgaggtcatcgctgctgctgttcggccgctcggagcagaagtcattgtcgctgctgctggagtgggcggtggcgggccatccgtcggccttctgttgctccgtaggccctccaatcgtgggggttgagtccctcggctcggtcggcctcgccgcccgaggcttctcttgcttggttaaaggaaaccctcggccgctcttcgatgagccgaagccggaggcagcggtgccagcatggatagaggcagagttggctcgaaaagaagacttcgtcggccggagcctggccgggccgtccactggcgggaccgacgccgggagtcgagttgctgaggccacgagccgggctgatgtccttgggggacagctggctgaggctttggggtggccggccgagctgtctgctcgggccagattcctggagaagaccctggcggcgatggcccaggcgtggtgctga

SEQ ID NO: 8657 - DNA, 1032 bp, Zea mays
  Peptide Sequence Number=SeqID_52032
atgccttcgcactccctcatgcatcgcatccttccaccttccgagcccccggatggggagcgcccgcgttgccttcgtcttattgttggaggagcgcaaccttacggaggtgggcacccttcagccatcgctcggcttcaaggattttcatcaggcagcccagctgcattacctcaccgatggtcacccaggatggtgaccaccagtttgatggtggggagaagcaagccgggctgcgacctctgccccgccctcagcttcaaggatcttcatcatccttgctggggaggagggcgaggcgagccagggccttccttcgcgtgggctggcgacccacttcttcctccagcatctgggggtggaaaccatcctccagctctgcggaggaggcgtcctccagccatgtgggggaaggcgaactgctgctgcctggctagggtgcaacattccgtcctccgtccgggcgactgcggccggctgcaccggggggtcgcacaacacgtcgtacgccgcgagggcggtactcatgttctgagatggtcccgttctcgttcttgcggcgaggacaagagtgaggacctaccgatgcgctttggggcggccggtgctcgctggtgcggtgttggcgggcaggtggctgccgtcgttggtgctgaggtggtggcagctggagaaggtttctccgctgacgagaccgtcggtgccacccgtggactgacctccggctctttggctttgatagcttgtccttgcccctcgagtggggacgtgggcgaggaccttgccacagcagcatctgccctgaggtcatcgctgctactgtttagccgcccggggcggaggtcattgtcgctgctgctgcaggggtcggcgaaccctcgtctgctctgcgatgagccggaggcagcagtgttagcgtggacagaggcggagtcggctcgagaagaagcttcgttggcccgggagcacgtggcctccctggccgaggaggtacagcagcgatggctggagcttggccaggtcgtccgttag

SEQ ID NO: 8658 - DNA, 369 bp, Zea mays
  Peptide Sequence Number=SeqID_52033
atgaccgactcgccccgtacccgcgtcgacgagtatcggtcggctcgcggctgcgacagtgggcatgggcagcaggttggggaggaagaacagggcgaaggtcgggaagacgaacgggacgtcctacgacggcgaaaacgatggtgcgcgcatgatgtgaaacgttctcatgggcgtgcaatagccactgtgcgagtcggtgtcgggactgatgttggacgaatacggggaggaggtgcatgttcctacgccctctgtcgagaatggggtggcgtggaggtggagcacaatgatattgcgcgcattgctaggaacttcatcattaagatgaacctcttcgtgaggcaaatcatcatcagggtgaattaa

SEQ ID NO: 8659 - DNA, 1587 bp, Zea mays
  Peptide Sequence Number=SeqID_52034
atgagttcactaaataaagttgtttcaaatagtggagatgcatgttcagtcttagctagtaaagtcacatcattaaatcccaatgcagcggagtttgtaccgtcatttgttaaaccatcttttggaaatggtacagttctagataagtcagatttcaggggttcttctggaaaaacaattctagataggcctgagccatcaaagtctaataactcagatgatgaggcacaccagttttggcataagcagcttccggatgacattattccagacttcacttcttttgagaaagttgaacaagggcctgaactgtcccttgctggattatccttgaatgcaccccccttttatgggacaacttccagtcgcttctcaagagaatatcacgaattatcttctccagttaccaagggcctggaactggaactagaacatactaatatgctatatgaagataaaagcaactgggagcaaaattatattggtgatcttcatattgctaatggaaaccaggaccttcattatgattctgaatctggtgtaagcttttctgatagctttgctagtgagtatgttgccccatcagatggcctttttgctcccctggagtacttggcatctcagttccctggattttcagcagagagccttgcagagctttactacgcaaatgggtgtgatttcaaccatactattgaaatcctcacccagctagagatgcaagttgatgctacacccaatcacacactgaatctgccccacagcacaccgaacttcagcactggggatttccctgcacttccaacagctgaggaccaaaatggtttcaatcagggtaatgtggatgtacttggcatgttcaatgggcgcagttcatctgcgatgcctactggagctggtgattttgtttcagccgttcgcaaacttgcatcgcagaactctggccagtggaagtttaaaaaaggtcctgagtatggtaatggcatttcagctctttctgtacccaagcagtacagttctagcactaaacaatcgtctgggaacaagtttcaaagcatcagcagtggaagagttgccccatggcttgagactggtgatgcagtggcaagtatgtactcagaatcaaggggagaggctcgtgattttgctagggtccggaatacctgctttgagcaggctagacaggcttacttggttggcaacaaggctcttgcgaaggagctcagcatgaaggggcaggcctacaatgtgcaaatgaaagcggctcatgagaaagctagagaagctatttaccgacaaaggaatcctgtttcttcccaacgtgggggtggtgaccacctgattgatttacatggcctgcatgtgaacgaagcaatccacatcctgaagggtgagctcaccgccttgaagagcgcggcgagggcagcaggggagaggatgcaagtcatggtttgcgttggaacaggccaccacaccaagggctctcgcactgcgaggttgcccatcgctgtggagcagttcctgctggatgaaggcctccagtacacgcagcctcaggcgggtctgctccgagtgatggtgtactaa

SEQ ID NO: 8660 - DNA, 675 bp, Zea mays
  Peptide Sequence Number=SeqID_52035
atggaggtggtgtttgggcggtggctccggtcgggcgccgagcaagaagcggcgccagtcccactcccccgcatgttgtcccgtgcccaccaggtccttagtgacactagggcagcaatcttgcgggagtgggaagcgcttgaggctgagcaccagcgcctcagtgactggcgcacccaactggaggagcgcaccaagatgacatcccgacagttcgtctccgagcggtcccaactagagcgggaccgcaaggagtacaagagggacctccagagggtgtgcgccagggagctggaggcgtccaggagggagaagaaggtgaccaggagggaggaagccgtgacccagcgggaggccctcacgacagagtaccaggccaagctgagtgccctggaccagactctggaagcccagcgggcccagcagcaagagctcaagggcaaggccagcgacgtcgccctcgccgaggaaaaccttaaggtgaaggagcagtccttggacaggcgggagacggacctcgccaggcgagagacggatctcaccttcagggaagaaatgctcacccggcgaggcgagatgctggccgagcacgagctcgaagctgaggaaagggagaggaagctggaggagcagatccgccagttcaatgcagcgcaggcggcgccgggtccctag

SEQ ID NO: 8661 - DNA, 714 bp, Zea mays
  Peptide Sequence Number=SeqID_52036
atggctaactgggcctacgacatggccgccgctggccagccgcagggcatcctcgacgagccgccacgccgggctgtgtgctcccgcgccgggcgagcaccgcgccgggcgagccgctgccgcgccgggccagcctccgcgccgggcgagccgctgccgcgccgggcgagcgcgctgcagcgccagccgccgcgccgggctggcgagctcccgcgccgggcgagcaccgcgccgggcgagccgctgccgcgccgggccagccgccgcgccgagcgagcgcgtgctgccggggcgcgccagggagccgcccgcgacgcgtgcacccgaggccgggcgagcgtgctgccggggcgcgccagggagcccgttcagagaagacggcgaggcggtgagcgcgagcgctcacggacgtcgtcatcgtcagacggtctcgctgtcgccgaccatgaccccggcgcgagtggccgtggagagaggtggtgcgccagccgacgtaccaccctgttgccgctcgggctcaagagcgtcgacggtgagaccgttccggatgggccgtcgtcgggagtcggggtaggcagtcgctgctgcaccccgtcgccgaggactaaggcgatcctctcatcgtcgtcggaggaagaggtggcgtcgacggcaaccgtcgcagtggacgtggatgcaatctggcccgacggggcgaccgcgagggccggttga

SEQ ID NO: 8662 - DNA, 264 bp, Zea mays
  Peptide Sequence Number=SeqID_52037
atgactcaaccgctgtcattttccaatttaagtcccttggggccgacactgacttggttgatgacaactatgaagggtgctgatgaaggtggtcaaacttcggtatcttcgaagggtaaatatatcttgtccgaagaggtggacagcccgcatattcagaatgttggaggggctaattttggagattcatcatcatcaagagaagaggatgaaaagaaaaccgccgaaggcgagggatctttggggcacaaaaaagcagagtag

SEQ ID NO: 8663 - DNA, 720 bp, Zea mays
  Peptide Sequence Number=SeqID_52038
atgcaggatgtagttgatggtgtgacttggcctaccaccttgccaccagtaatttttggaacactagtcattcactcaaccgtcgccaccgtgttgtatgatcctcgtacaacacattcttttatcagtgcccagtttgcaacaaagtatggtatccttaagtgccccttgagatcaaggaagaccatcagtgcacccgaaggaaaaatgttagtaaactacatatgtccaaatatgatgaaccccaatggaaatgaagtaaatggtgccaatgacaatatccctaccttaacaactatgaatgagaaaaatgagtcaccgagatattcgatgaatggaatgaagaacaacaaaaggaatagaaaaatatttggatacatgattagtccacctcaaccacaagcaaaagtcacgaaacacacggattcccaaacaaaagaatcaagtcaggctcagctatataagatacagacacccaatcaatcctcatcccctgttggtcaagcaaagttgactcgcaaagaactcaaagcaagaggtgcttgctactaccgcaagaacgaaggacaaataatcttccaatgccacaagaagcatctagaccgactagagaagaaaattgtgaagcatgacctaagcaatagttcagaagacccaccattttataagtacgatgatgaaggtcgcctgattagcatacattgcggagcaaagaagtaa

SEQ ID NO: 8664 - DNA, 156 bp, Zea mays
  Peptide Sequence Number=SeqID_52039
atggtgggcaagctttatggagttgtggtggtgctaggtttcaatggaattagactaagggaggctttaggaggctctggggagttactgatgtggctgagtggggtggaacacgattggggtgggttagccgcagtggtcgtgcttgagcgataa

SEQ ID NO: 8665 - DNA, 660 bp, Zea mays
  Peptide Sequence Number=SeqID_52040
atgactttggagcctcatcccctgcagccaggatggcgctccttggactccgagtccttcggataccgagcggaggacacgatcgaggcgatcgcgctgcacggattgactactttctgcggatttcatcccttggagctggctacccaccccattggcttgttccccgctgagaaggaggacgacccaatgtggaaggatcgggtggagcatgctaaggatatctgggccatctacccaggacagactgcgcacttgacagtgatgcgcggtgaggccatgtcccatctgatggcactactggaggccaccaagatcacgttggataaccgagaggagcttgtggtcgacttgtctcaagaaatggtagagaaagatttgcaagtggagcagctgtctggtgagattcatgagttggaggagctagtgggcacccgggagaacaccattgaggtcctagaggatcagctcctcaacactcagcagcagctggcagaagcaaatgagcacctagacatgcatcaccaagagatccatggtggggaggctgacgaggacgttgacgtcgagggaggagacgagtctgcttccagtatagacactgctggctcgggaagaccaccttcccccgagtccagtgttgcttcgttcgctcactag

SEQ ID NO: 8666 - DNA, 210 bp, Zea mays
  Peptide Sequence Number=SeqID_52041
atggcgtgggagagaaggagaaggacctgctgctcacttccgaaggaggctccattgaccacacttgtactcactatagttagcatgggagacccagtcttaggacaagtgaggggaaaagtccgcgcccggcttcactcaggttttggtttcctcttggatccaagtccatggaccatcatagatccaacgaatcaagctgattcttag

SEQ ID NO: 8667 - DNA, 741 bp, Zea mays
  Peptide Sequence Number=SeqID_52042
atggcgcgtggctctgctactcccctcccatctccctgcgtctctctctactcgctgaccgagctccttccctgcagccgagtttcttcttctacagcccgtcgcgactgctccctttgcctggccgaggcttcccctgctcggtcccctgtcggcctgctccctcttcctggcggcgctcagcttcttctccgctcccccagccgcgccctgcgcgctttcctctgccggctgagtctcctcgacatggagcatctccctgcgcgcggcacttcctctgctcgtccgtctccccaaccccggcgaatttttctggggcgcgttgtggttgccgatcccctggccgtgtgccctacgccggtcgagttttccccaaccgcgcctgctgctgcacccggccgagctccctcgccgctgttccaagctccctggctcgactctgcccagttcgcgtcctgctcgcctttgcgtcgcgctcgtagcatttcattgttcctgcacgtgctgccgcgaaactcctggttcagttctcctccgtcgcgttgtcgtgtgcgcgaaactgctcgtagtcgacatcgagtccgtaacacgcgcgctggacatggtgaaacgctgcgtgtgcttgtgtctgagtccgcccgaccgcaacctcgctttgctctccgcgtcgctgtttgccgggtcaagcccgaggttgccgctttcctgtttcagtttgccgtgccgcacgtccgtctctag

SEQ ID NO: 8668 - DNA, 186 bp, Zea mays
  Peptide Sequence Number=SeqID_52043
atggctgccatggagtccaccagcggtcgcgcccagctcatgttctccatgcccgtcgcgactgctccctttgcctggccgaggcttcccctgctcggtcccctgtcggcctgctccctcttcctggcggcgctcagcttctccgctccaccagccgtgccctgcgcgctttcctctgtcggctga

SEQ ID NO: 8669 - DNA, 672 bp, Zea mays
  Peptide Sequence Number=SeqID_52044
atggctgaagataagaagactgtagaccccacacttgttggtttttactgtaacaccccaggtgttgccatggctggagcacaccttggcactcaagactatgatcacatgtggaagaacttaaggagcaaaaattctccctcccctaggcccgtatctgcccccggcgtctcacagttgagtgacagccctagatgccaggaagagccctcggagaagactgtgcacgtctccgtgaagctccccgagcgaggaatcgggctctgcttcaccggagaggccggcccaaggtcaccggacttcaaccgaccaccggcaaccgtggaccgagactgtaatcttgctgacggagagtacatcctcgtgccggagcaaggagctgctcaggaggtagccccagatccagcacccgagcctgcaccagaggacctgcctgccactgctttggaaggcaagccccgcagattgccctcctcacgcgacctgagacgaggtctcccattccggttatggtgggtacaagtgcggtcactgcacgacggccagtcggggtcagtgaggcattgttctctggaggagatggttgctgggattacttggccgaccaccctgccaccgggttggactgtcgagtgggaccctgcctcggctgaggaggagcatgaggagtga

SEQ ID NO: 8670 - DNA, 144 bp, Zea mays
  Peptide Sequence Number=SeqID_52045
atggccgtgatgggttcaacatcggataagatgtacctctgccaggtgagaaaacaacagacttttgctgtttttgttctaaggtggtgcccaaagaagaacctcagcagtgaagccgcgggaggatgttggcctcccacttga

SEQ ID NO: 8671 - DNA, 345 bp, Zea mays
  Peptide Sequence Number=SeqID_52046
atgctggacgaggccgcacggtgggatgacctcgtcacaggtcttcgtccgatgtcatatggggcaaagggtgtccctgcccgttgtcttgtctccgttggaccaacgaccacgacgaaggcctcgagcgaagggtggcgtctttgccttcgccccaacacccggtccactcaagggacacgatctcgcctcgcccgagcccagcctcgggcaagggcggccgaccctggaggattcacgtctcgcccgagggccccctcaagcaatggacacaccttcggctcgcccgaggcccagtcttcgccaaggagcaaccttggtgaaagtcgcctagagggggggtga

SEQ ID NO: 8672 - DNA, 1110 bp, Zea mays
  Peptide Sequence Number=SeqID_52047
atgggcgccgaacatggtgtctccggtgagctgcaagcggggcccacgcgatctgaggcggctgttgaacccttcggggggccagccttcgatcctctgatcagtaggggggctcggagcccggttccttcacggggaaggatccctttcgggcatccggcacgctggtcgcgtgacgcgtgggcctgggtctccaggccgagcgcgttgggagtcggagaagcgcgtccacctggcgcggttgcatgccgcctgcgtggctgcccgcccctctcgcccgttggtctgggcgaaagtggagggtcacttgtaaccgctgagcggttgagtgcaccacgcgcggcggtttggcttcttctgctccgagtcggtttgcatggcatgcgggacccagcccccgcgccgcaggggagggccttggaacgtgttggagaagactcagcccgtgacggttgggggcgcaagcagggagagtcgcctttaaaaggagggcgacccctttcggaaggcgaccatgtcttcttgctcccttatgcattgcgtctctccaccttccaagcccccggatgggggatacccgccgtcttttcgcctcatcgttggaggaacgcaactccgtgggagttggtacctttcagccatcgctcggcttcaaggattttcatcatgcagcccggctgcacccctccaccggcggtcacccaagatggtgacctccatcttgatggtgggggaaagcgagccgggctgcggcctctgcccctccctcagcctcaaggattttcatcaccagggctagggaggagagagtgccgagttggggtcggcccctgcgtgggcggtggcccgctccttcactcagtgatcagagggaagggcggtcgtcgtccgtggcgctggcagctgcagcgtgcctggctttcggacgcgagtggcttcggagccgctcgcggcaccggcgtctgccacggcagctggaagaggttcctccgtcgacgagatagccagggccgcccacggaccgacctccaactctacgaccttctgcccgtccttgcctcacaagtttgggcatgggcgggggcctcctggcagcagcacccgccctga

SEQ ID NO: 8673 - DNA, 159 bp, Zea mays
  Peptide Sequence Number=SeqID_52048
atggcgagagtagcgtgtaccctccatggcaagaggctggacgatggtgtatttgtgctctcggtgaagaagcagcaaacttttgttgcttctgttccaaggtggtaccaaaagaagaaaatcaagactaaagctgcgggaggaaaaatcttccgttaa

SEQ ID NO: 8674 - DNA, 189 bp, Zea mays
  Peptide Sequence Number=SeqID_52049
atggacgagtctggtatgaaaaaggagatcggcctcctggaactagcaattgtatcacatttgagtcccagaggaccaggacacttcatggacgttgactgcaatcgtacctacggagtccgcgtgtggccgtggagagtcgccgtcaatcggggaaggtgcgagcaccgtctgcgggcggagttctaa

SEQ ID NO: 8675 - DNA, 1365 bp, Zea mays
  Peptide Sequence Number=SeqID_52050
atgccccgctgttctgccattccagcctctcctcgcctccattcccatccgcgattcgttctgccattccagcctccgcgatgcccccccgctgttctgccattccagcctctcctcgcctccattcccatccgcgattccagcctccgcgatgccccgctgttccgccattccagcctctccttgacaccgaggctcccattcccatggcaaaaaaatcacaggagtagagactggcaagagaacttgaccacgattggttcttctaaagcagcacagcttataagctggtaccgcgattgttggctggtcgtggagctgaatgagagggcgtcgtccggaagaggaaagtttggggaagcgcgcttggaggtcgacaccatagctccagcttcgtgcgaatgggctccaagttgctccagatctgcgcgtccaggttgtggcggcgatgatcgaggactagatccacgtccaggctgctgcggcgacggcggaggcctcaatccgggtctagaccaaggtcatggtggcgacgaaggtggaggccgaggtggagggcgatgcttccactctcagtcttggggtggggtcttagggatgacagatgagagtggggtgcagtggtggctcatcgacatcagccattggcacccttcccctgcccagttcgacgatgcaccctccgtcctactacttcacgatggcaccaccatctccaggtaccgtgccgatggaggaaaggagaaacaagctttcagattgcatgggattgtggaggcatctatcttactacttacaggtggatctgctgttggtttgcttgtaggtatcgctactaggcatgttgttgatcgaaaggaacaagcaagcaacataagtggactacccttgaaaattgtgacctgggtaggtttgatcctcaatttcactgttgactggttatttgggaagtgctcggagaaggccatttgcataaggctcattttttccagcattttattacgagtttgtgagatcgtaggtctttactttttcttagatgatgtcgactgtgctgtgacgatctactccttatttctgacaccttgtctttttacgtgcatctgttcgatccgtggcttctcggcgctctcccaggcacctaggcaccagcccgaggatgacgagccactcggacgacagcacgatgccacgacgcgtccaacagccggagccgaaggccgagaggatgaagacgttcgacatcaccgtcccttcatcacggggttcgccatcaccggcttcatcatcaccaagatgacgaccaacttcaccgaggagaacttcaagaactccaagttcatccaggagcacaagagacgctga

SEQ ID NO: 8676 - DNA, 1020 bp, Zea mays
  Peptide Sequence Number=SeqID_52051
atggcggcccggccgtggcgcgcccccggctcgccggcgtgcggccgtggcgccccctcccctgacgtccccgcgcagccccctgccgccctcggcgcgcggcttcacgcccgcgcgcccgaccgtggtgcggccccgtcgtcggccatggcggctcggccccgcccgcctggtgcggccttgccccgacgccccgccttgcctcggccatggcgcggccccagcagcctgcccgccttggcgtgccccgcccctgcccggcgcgaccgcgacatgccggcccggcgcgaccttgagctcggcccgacatgcctatggcacgcggccttgagctcggccagcacgcggccccgcgcggtcggcctcggcatggcctcgttgtcgctcgcggcgcgcaacgcagcgcgtgcgcagctcggacctggcaggatccagggtgtagttcgcttagccgtcgtgccgtcaatggggctcggtgtggcaatgagattgagggttcttggttttgactctgggaatggcagcaacaagaagacttcgccaggaactgaaggacaggacgactacctcttcaacatccgcctcctcaagcagagaagcactagcagtcaagctcctctttcgcggttccgccccgacttctacctccacggctccacgccgtcaagcaggttcaacgcgctcaactctggcgaggactcgcccgactggccgcgcaggaagccagccgccagcccaccaggaacaatcatcttgttgttgccttgtgagtgtgggaaccgggaaagtgggaagccgaacgatcggagagaagttggaacagccgtcgggctcgggcgtcacgtcggccgaacgggatggccggatggggtccccggtgggcttggcttagggtgtgatagggcccacccagacccccctatgggtccacccctgtctgtcgggatgcgtgaggacagcgagacaacaagcaactcccacaatgagcattttactagttgtaacttgcaaagtaaatga

SEQ ID NO: 8677 - DNA, 255 bp, Zea mays
  Peptide Sequence Number=SeqID_52052
atgaagtactcacacatcaccgactgcgacacgcttgcggacgaagtggaggtcgagctcgacatgcttcgtgtgctggtgctggttgggttggtggaaaggtaccaacttgctcttcagatgacacgtgtcctcactgctaaacgtatcaatacagacaaacatgactgggcggataaggatttagccggtgatggatctccgatgattaaggacgggttcggtgcgattcggtcggagatcggcttcaggtag

SEQ ID NO: 8678 - DNA, 1483 bp, Zea mays
  Peptide Sequence Number=SeqID_52053
atcagtcggtggtcccaacaaacaaacatggggtcctcgtgccacttcccagcaccgaaagcacagcaccggcaccggcacgccaccagacactcggccccatcagagtctcatccaaatcgtactcgcactcgcagacgcgtcatgcaacatcgcactcgccgtcctcatggccttgtcgcttgcccaacaatacgatccccattggactgagctatatatccatgtcgaagtggtctcggaacaccatcaccaatctcaactcagcgagctctccaccagttttacagccaagaaagaaccaaccatgatcagcaccaagaggatcgctcagctggccaagaagtggcagaggatggaagcgctcgggaggaagcgccgcctcgcctgggggacggcggcggcggcaaagaaagccgacaggtgctgcgcctccgtggcgagcaagggccactgcgcggtgtacacgactgacggggcacggttcgaggtgccattggcgtgcctcgggacggaagtcttcgccgagctcctgcacatgtccagagaggagttcggcttcgcgggcggccacggcaggatcttgctgccctgcgacgccatggtcatggagtacgccctgtgcttgctgcggaggggcgcctctgcggacctggagaaggcgttcctcagcaccatggcgatgtcgtgccactctgcagaccacgcggcggcgccatatgtggcggcttgctctgaaccacagtgtgccatcgtgcctctttcgtttccaattggcaaccaacctgctgcagcattcagagttttactaacagttttgttggctctcggcaacgagcctctttaccgagtgctggacactcggcacaggacctcactcggcaaagacacgtttgccgagtgtcaaacactcggcaaagggggctctcggcaaagggccgtcagcggccgtcccaaagctgacggtcgtcactctttgccgagggttggcattcagcaaagaggcttctttgtcgagtgccgtatactgggcactcggcaaaggactcttcgcccgagtgtcttctctagacactcggcaaagaagtgtgttaaaggttcacacttagccaataaaaagaccaagagttggattcaacaaaagagcaaaggggtcaaccgaaggcacctctggtctggcgcaccggactgtccggtgtgccaccggacagtgtccggtgcaccaccggacatgtccggtgcaccagaggactccaacgcaaactcgccaccttcgggaatttccagaggcgactccgctataattcaccggactgtccggtgtacaccagacagtgtccggtgcgccaaggaagagcggcctcaggaactcgccggcttcgggaatctccaaaggctagtccgctataattcaccggacatgtccggtgcaactccggagcaacggctattcggcgccaacggctacctgcaacgcaattaa

SEQ ID NO: 8679 - DNA, 822 bp, Zea mays
  Peptide Sequence Number=SeqID_52054
atgacttctcacggatccacggacgaagggaatgcacagtcccacactgacgggcttgcacgagagggtatccctcgtattttgtgggagctgttcgagaagcaccgagtgccccgctgtagggtaaggatgaccctggagcctcatcctctgcagccaggctggcattcgctggactctgagtcctttggatacagggctgaggacactacggaagccattgctcttcatggactgaccaccttctgcggattccaccccttggagctgtccactcaccccattggcttgttccccacggagaaggaggacaacccaatgtggaaggaccgagtggagcatgccaaggacatctggggtatctacccaggtcagactgctcacttgacggtgcagtgcatgaatgccctgtatcgtctgcaagtgatgcgtggagaggcaatgtcccatctgatggcattgttggaggctaccaaaattacattggataatagagaggaacttgtggtagacttgtccactgagatggtggaaaaagacctacaagtggaacaattgtcaaatgagatccaagagcttgaagagctagtgggaaccagggagaacaccattgaggttctcgaggatcagttgatcaacacccagcaacagcttgcagaggctaaccagcacctggatatgcaccaccaggagatccaggacatggaggccaacgaggatgtcgacatcgagggaggagaagagtctgcctctagcttggacactgctggctcagggagaccaccttcccccgagtcgagcgttgcctcgtttgcccactag

SEQ ID NO: 8680 - DNA, 165 bp, Zea mays
  Peptide Sequence Number=SeqID_52055
atggtgagtacaagtgcagtcactgcaccgtggcagtcgggatcagtcgagcattgtacttccttggatgaaatggttactggcgtgacttggtcatccaccctgccaccggactggacggtcaagtgggatgctgcctctgtaggagaggaccaggaggagtag

SEQ ID NO: 8681 - DNA, 831 bp, Zea mays
  Peptide Sequence Number=SeqID_52056
atggaaggctcctttgttattaggacatcctactgctcggaggtggaaggattccctcaccttcttcagagctacacgcttcgcatggggatccgcaagaagccaaagtatgtctggaaagaataccgcgagaacgggattgagaaatgctctatggcagtctacctgagagaaagccgaaactacccaaatcaccctccctttcagatcaccgctactggccaccacttcccaaacacctaccagaatgctgcccaaaaatccctccgccagctatgccaaaactacagtagagaagtctctgagacaccccttcactactttccacctagcaacaaaaatactcctgcttggaggaaaagactccaagccttgtcagggagagatcgcaatgaagatgaccctaccatagtctacatggctggatatctccacacccttgacaaccactatgacgaccttttctcccattgcgcccacctaaattcccaggtggaaagcctagagcaacaaatcaaggaattgaaggaagaaaaggcggctcttcaagacagtcttgagatggctgaaggcgaagaagacaacactcgggaggcataccggaccataaagatggactatgctaggaggctgaagaagctcgcccctgcaaagaagatccgaaagcgtttcaagagccagggataccagactgactcaagggaagaagccccgccagcactaccctccttagggatagggaacttttctaacatcgaggaagtgtccttggctagccttgatgatcttatcagggagtttggggacaccttagagaactcttgtgcgtag

SEQ ID NO: 8682 - DNA, 1989 bp, Zea mays
  Peptide Sequence Number=SeqID_52057
atgtcgcagcgccgccgtcctcgtcgtcgttcttgtcatgccgtcgccccggtcgacaaaaccacaaccgaccgcgaccacgcgacgccccttgtcatggacgtggaccgcgtctctcatccggccgagacgacgtccgggcgctccgacgacggggaaggggaactggccgcgaggtggcgggagatccacggcagcgaccactgggaggggcagctggaccccatcgacgcggtgctccgcggggagctcatccgctatggcgagttcgcgcaggcgtgctacgacagcttcgactacgaccgcttctccccttactgcggcagctgcaggttcccggccaagaccttcttccaggacgtcggcctcggaggcgccggctaccaggttagccgctacctctacgccacctgcaacgacctcaagctccccaacttcgggggccggaagcacagctccgccgccaacgacaagctgtggagcgagctgggcacgttcatcggctacgtggccgtgtccacagacgaggagacggcgcgcctcggccgccgtgacatcgccgtgtcgtggcgcggcacgatcacccggctcgagtgggtggccgacctgacggccaaccagaagcggctcagcgagctgggcgtgccgtgcccggaccccgacgtgaaggtggagatggggttcgcggagctgtacacgggcaaggacgcggcctgccgtttctgcaggtactcggcgcgggagcaggcgctcgccgaggtgcggaagcaggtggagctgtaccacggcaggggcgagcaggtgagcgtgacggtcaccggccacagcctgggcagcgcgctggcgatgctcaacgccttcgacgtcgcggagacgggcgcgaacgcgtcgccggacggcaggaaggcgccggtctgcgtgttctccttcgcggggccgcgcgtcgggaacctcaggttccgggagcggttccagcgggagctcggcgtgcgggcgctgcgtgtcttcaacgtgcacgacggcgtgcccaaggtgcctggcgtgttcttcaacgacgcggcgttcccggaggcggtgctgcgggtggtggacgggctgggcgcgggcggcgtgtacacgcacctgggcgtgcctctggcgttggaccacaaggtgtcgccgttcctcaaggagaccatggacatctcgtgctaccacaacctggaggcgcacctgcacctgctggatggctaccgtggctccggcgaggggttccagctccgcgggagagaccccgcgctggtaaacaagtcggccgatttcctccgcgacgagcacatggtgccgcccgtttggtaccaggcggagaacaagggcatggtcaggacggaggacgggcggtgggtgctgccgccgcgccatagggacatcgacgagcacccggatgacactgaccaccacctccagcagctcggtgtcattctcaccgcatcaacctaccagactccggtcgagacggccgcaatcagcagcaagtgcacaacatcggcaaccagcaccccgctgctgacgcccctcgccgccaagaactgcgcccaccaaaccagagactgcccagaaacgaaggccaccaaagataggatggcacgggcgcagccagccgacaaccccagagttgtcgcgcacacttatcagcaaccccctccaccatacatccacgcccccgccccgcatccaccgcaccacgcataccaacaccaccaggaagtacaaatcatacctcccccacccccacctccacaccagcaacatcagaacatcccccacccccacgccccgaaacaagaagacttcgccgatcagccgtatcgcggagtcattcatatgatcactggggggtccggcgccgacttcgacacaaagcgacagaagcgggaccactacagcagcatcaaccacgtcgccatcaccggcccagtcgtgcagacgaagtggtccccgtaccgctaa

SEQ ID NO: 8683 - DNA, 1071 bp, Zea mays
  Peptide Sequence Number=SeqID_52058
atgaccgtgtcaaaaaagggaccgggaaagggggataccccgaaaaggacccttctccgtgaaggaaccaggctccgagcctccctactgatcagaggttcgaaggctggccccttggaggggtacaacagccgcctcagagcacgtgggctccacacccactaccggtcagaggttcgaaggccggcccctcggaagggttcaacggctgcctcaagccactcgggctctgcgcccaatactgatcagggcgggaacgatcttgtaacggaatcccatcagagggaggcatcgagccctcggaccccgtcgacaggggactgggtctggcagatcacccgcagctcaccggagacaccatgttcggcgcccaccgagggcaacatggcgctttcccccctcctccttgcggaaaggcgacacaggggcgtatgtaaaaaagtcgagtctatccctgatcgtcctctcgccctgtgcagaggctcgggggctgctctcgcaaacccggctccggccaaaccgttgacagcgtcaacataccagcccgagaacttggaacccgaccgtgcacccgggctacagccagctcgcatgagggaacgaccagaccagccgaagcattacgcgaggcctcgggggctacacccggtgggtgcgctcgcgcgcacccaccggaacaaaacgcaaccgagaaaggctggtccccttgcaaaaaagtgcgacgaaagcctccaagcgagtgctaacactcccttcgaggctcgggggctactatcggggaccataattaggggtaccctcaagtctcctaattctcagctgacacgggcagccgaccccggaggatctccgtctcgcccgaggcccccctccagcggcgaacatacttccggctcgcccgaggccctgtcttcgccaagaagcaaccctgaccaaatcgtcacgccaaccgaccagatcgcaggagcatttaatgcaaagaaggacagcgccgcctacgccgctccgaatgctgtgccgctcgacagagtgaggctgacaggcagtcaggcccgacctcaggcaccatag

SEQ ID NO: 8684 - DNA, 573 bp, Zea mays
  Peptide Sequence Number=SeqID_52059
atggggaagcctgtcccatcactcctcatgctcctcctcagccgaggcaggattcccagtcgactgtccaacccggtggcaagatgggacggccaagtcactccagcaaccatgtcctccaagagaacctataaaattatgcccacaagcaaggctgagtatactaaatactcagctagacttacccgtacaatggatcaagcagtctcattagctgtgagaagcagacgattcgaatcgagtttttttatccttgcaagaggctatgtgcgcgaggaatcaaaaaatggggcagaggcttacccggtctacgttcaccggcggtcgggtgaagtctggcgaccgtggactggcttctccggtgaggcaaagtctgattccttgctcggggagcttcaccgaggcatgcacggtctcttccgagggtcgggcgtgactgggaagggctctgcaggccggtctacggtggcgggggatcgggtggccgcgggcacgccgtttgcagggcaaacgtcggtggtttctggctccggtgaggtcgagcgtgcgcggaggagtatggtcgacgcctaa

SEQ ID NO: 8685 - DNA, 513 bp, Zea mays
  Peptide Sequence Number=SeqID_52060
atggaggatacactcgtttcagttccgatttcatttcccatgagggtttcccttctatcttgtgggaggtcggacgacaccaccgaggcggcagctctgaagactctgtctactttctgcggctaccatcccttggagatggtaatgcacccactgggactcttccccgctgagaagagggatgaccccatgtggtgcaaccatgtgagccatgtgaaggataccactaagctcacccttgacagccgggaggacttcaaggtggagatctgggacaacaccattgatgtcctggagaaccaactccacaatgtgcaggaggagcttgatgaagctaacgaccacttggacatgcaccacctggatatggaggaaaacaaggccgaaagcaagggagaggaggctctcgaggagttaggaccagcccctgctaggcagcgtcgagggcagaacgagcaagtttccccgccacctcctccagctcccacgatgcaggagctgatggctcagtag

SEQ ID NO: 8686 - DNA, 297 bp, Zea mays
  Peptide Sequence Number=SeqID_52061
atggcccagatgatggttacattgccggtgtcgtgcatgaacctgggcacggatgcctcgtccagcaggacagcgttggcggccctgatgaagcatcctcattaccaagtgagcaaaaagagcccaggctttacaagcaacatgttgatagtctgcaccaattggcatggtggaaagaattatggtggtatccgagacagcatttcgaagcagaccatccgaagtgatcttcatttgaaaaaactgcttaatgttattgccaagcttgttgctgtattgggaatactgggaagttga

SEQ ID NO: 8687 - DNA, 858 bp, Zea mays
  Peptide Sequence Number=SeqID_52062
atggatcaagcagtctcattagctgcgagaagcagacgattcgaatcgagtttttatccttgcaagaaaggggctcaccgccttggcgtacaatgcctcactgaccccgactggccgtcgtgcagtgaccgcacttgtacccaccataaccggaatgggagacctcgtctcaggtcgcgtgaggagggcaatctgcggacaggttcactcaggctcgggtgctggatctggggctacctcctgagcagctccttgctccggcacgaggatgtactctccgtcagcaagattacagtctatcgaaatgcaatgaacattaaccgcgggaaagaaaagggcagcgcggcttaccggcggcgagggaggtccggcgaagggtggggttggctcggggagactctggcggtcacgtcgaggtacggctcgacgtcggagatggccggaatcgcccggtccacgcgtgcaggtgggtgtcctcgtcggcggcgagtataccggccaaaccacggcgaactggttcaatccgagggcacggtgagcttcacggggtcacgcaacgactgtgtgcacaaggaatcgaaggatggtggagtggtttacccggtccacgtactccggcgggggcgagagctccggcgagcgtggactggcttctccggcgaagtactctccgattccttgctcgaggagcctcacggaggtgtgcacaggcttctccgagggctggacggggttgggaatggctcaaatggcggtctatggtggcagaggggttgggcggccgcggactcgctgcgcacgggcaaacggcgacgagctaactccggtgaggtgtggagggtgcgcggaagggtgtag

SEQ ID NO: 8688 - DNA, 435 bp, Zea mays
  Peptide Sequence Number=SeqID_52063
atgggcaagaacaacaaacgcaagcgcgagccgactcctctgtcagaggactttggcgactcggaatactcagaggaggagttatcctctgagtccgaggggtctccggctcccgtcactcccccagcgtcgtccgatgactcggacgactctcaggggattgtcgcggaggtctggacgtacatccgggccgtcgagcgctccgggctcgagggctcggatgagtcggagtactcctcggatgaggaggactcggacggcggcggcgaggacaaggacgacgacgacgacgacgacggaggcgacgacggtgacggtgacggcgacggcagcggcaggggcggcaacggcggtggcaggggcggcaacggcggcagcagcaggggcagcggcggcggcggcagcagcaagggcagcaacaaggccagtggctaa

SEQ ID NO: 8689 - DNA, 558 bp, Zea mays
  Peptide Sequence Number=SeqID_52064
atggatcagctaccacttgagaactttgagaatagtagaatagagcttttggtttgtcaaaaatctcttattgtctcttttgtcaaaagttggcctcttgtggggagaatggttgattatgggaaaaagggggagtttttgaaatcgttgatcaatttctcttggaacaactctctttatgtctcaacaatgctagaaacagaaaacaaccaatttggaaaagacttggctgagcagccaagactctgcgcagtctgggtgcaccggactgtccggtggggcaccagacagtgtccggtgcgccaggctggtggctgtcaactggctgctctcgggacttcaacgacggtgtacaactataaatcaccggactgtccggtggtgcaccggactgtccgggggctcgagcggtttctcgagtgcctctccgtggcaatgagattgatggttcttggttttgactctggtaatgattgtcagctttgcaaccactgctcaggacaagatgaagccgtggaaggagaccatcaggagttccaagattatgatgagttctag

SEQ ID NO: 8690 - DNA, 447 bp, Zea mays
  Peptide Sequence Number=SeqID_52065
atggcagacaacgagcaacctagtatggatgtggtctgcaccggtgcgtctaacaaagttgatgaagacgcgaccaaacttgaatggcagacaacgagcagctccagtgaagggagcggggaggatagttctagtgacgacaatccttgtactcctatacctccaaggaagaaaaaaacatcagatgagcttgatgccgactatattcccaacgatgaagagatttcaaatgaagagaagaaagaggatgcatcttctacacgaaacacggaggatgctccgatgcctgaatcatccatttcacataagcggaaacgagggcgtcgaggtccaaatcagatgaaagaaggtgcagttatgtatgtaacaaaactaaatgcagaggggtttcgtgaagaaccacttgacgtggttacaaagtttccaatttcccctggcttctgttag

SEQ ID NO: 8691 - DNA, 714 bp, Zea mays
  Peptide Sequence Number=SeqID_52066
atgaggccgttgcacggcggcagccgcggacaattggagcattatgacttcacccaccccatcagtggaggagacactcgtttcagttccgactacctttcccacgagggtttcccttccatcttgtgggaggtgctcagctccgccggttaccctacaccccctctgtacatggtgcagttggtggatgacaccaccgaggatgcagctatgaagaccctgatgactttctgcggataccatcccttggaaatggtaatgcacccactgggactcttccccactgagaagatggatgaccccatgtggtgcaaccgaagcgacgccatgacacacctcactaaccttgctcagaccactaacctcaccctcgacagtcaagaggacttcgtggttgacttgtcttcagaattggtggaaaaagacctacaagtggaacagctaagccagcgcatcacgaccttagagcagcaggtagagatccgggataacactatcgatatcctggaaatccagctccatgatgtgcaagaggagcttgaggaagccaatgaccacctagagatgcaccaccaggacatggtggcaaacgaggcaggaagcgaggcagaggaggctctcgaggaattagaatcagcccctggtccgaatgcgactccctccggaatgctcccttcacccacatccagtgttgcgtctaccacccagggttga

SEQ ID NO: 8692 - DNA, 871 bp, Zea mays
  Peptide Sequence Number=SeqID_52067
atgaacgcgctttctcgcgaagggtgctggcactatgaagtcttcgaccaagctgatgaggatttcgagcgtgatatctacaaggtcgaggaccctatagtgaaggaatccgtcggagccctctacgaccggatgtggggcccccacggtcgagaggtggtcagggaacgggccgagacggcatggggtcaggcggcgcgtggtgagagggtggatgactttggggctttgaacagcacgctgcctgacccggagtcgaacccggcggaggccgccctggagccgctcccggagaccgccgaaggcgcccctgatgcccccgcagctgctgcggccggcagaggcccgcccccggagaccgccgaaggcgttcctgatgcccccgtggccgctgcggccagcgaaggcccgccgccaactgctacgccgagggttgaggatcctgtgacggtggcggcggaggcgacagcggaggctcccgcgacggctgggtcttcacaggttcaagattttgggcctgcgcactcaaccgccactactaattttttggtggcttcgaccgtggatgatggtgataaatcggatgggtctgcatctaagttttctgattttggtgactctaggagctcggttgagtggactgatgagtcgtcggatgagaacttggactactttgcggccttggatgtggcagcggcggaggcttcaccgcgcgctacggatgcaaaagatgtgcctggtccgagtactgggcgtaagcggcgaagggcggttgcgaagcgtagagtgagtgggccggacggcggtcgacttcgtgtgagcagggttggtcggcaggaactgttgtcgttgccggccgccgtgagtacag

SEQ ID NO: 8693 - DNA, 348 bp, Zea mays
  Peptide Sequence Number=SeqID_52068
atgctgacgccgtccgggaaaaagttggccgccgacagtaagtgccgcaagctggcggacaaggtggccgcgctggagggggaaaaggctgacctccggcgccaactggcggaggagaggagggaggccaatgaggccctcgccaaggcgcaggctgcgcaggcggaggccaacttggcgcgggtggagggcagtcttgccagggagcgcgccgagcagttggaggggcggctcatcgccctgcagagccgtgtggagagggccgaggccgcgatgcgcgcggaggcagagcggacacgcaaacaacttatggattcgtaccatgagctggggcgcgtggaccgctga

SEQ ID NO: 8694 - DNA, 462 bp, Zea mays
  Peptide Sequence Number=SeqID_52069
atggctcaccggagttgctccggcccgcccaagaccttctcaccgttgttctcccttctctgcctgtggattcatggccccttccccgccattgagttcgtcgtggcgccctcttcctctctgcccaactctggcaaccccggaccaaccctagctcgcgtctgcctcaacttcggcgacctcagtgccgcggagaggagcagcgccgcccgcagccgttcacccctccccggtctgatcccctccgcccgatctagatcgcacggcccgaaccgcgggtaccgtttcgcacccacgcgcctgatgccctggcccgcctgtcagcgcccaagtcccctggcgttgggccagctcgacaatgagcagtccgaggttcctgagtgtgttgttggagacctccctgagcagcaacctggtgaaggcaagtgtcctctgacctattatgtcctacatactttatga

SEQ ID NO: 8695 - DNA, 198 bp, Zea mays
  Peptide Sequence Number=SeqID_52070
atggaatttggtacgtcaaggattttctcgggccgcgtgctggagatgcagtggcttggttattttggtaatggtgtcgggcgggccccgggttctctggaggacatggttgctggagtgacatggccgtccatcttgccaccgggttggacagtcaagtgggaccctacctcggctgaggaggagcatgaggagtga

SEQ ID NO: 8696 - DNA, 188 bp, Zea mays
  Peptide Sequence Number=SeqID_52071
gtgatagcaaggagcacaggatcgagtccaccatacgacctcggcatgacatctcacagcatcgcatacaacaactcgagacccaactagaagaagagaggagggaacgtcaagagatggaggcgaggataatggcggagtgggaggcgactgatcagaggatggcggagatgttccagtacatgtag

SEQ ID NO: 8697 - DNA, 375 bp, Zea mays
  Peptide Sequence Number=SeqID_52072
atgggcaagagcaagaaaggtgggagttcctcacaccattccggcgataagcggaaacgcgagccaactcctccctcggaggacttcggcgactcggagtactcggaggaggagttctcctccgagtcagagggctcaccggtccatacctctcccccggcatcgtctgatgattcagacgactcccaggggatcgccgcagaggtatggacttacatccgggccgtcgagcgtgccgggctcgagggctcggatgagttggaggtctcctcggactcgtccgaggagggcggcggtggcggcgatggcgagggcgacggcggtgaaggtggcggcgacggcggcagcaagggcagcaacaaggccagtgtctag

SEQ ID NO: 8698 - DNA, 420 bp, Zea mays
  Peptide Sequence Number=SeqID_52073
atggcggcacgaagggcaggaagggcggttctctcttctctggctagatctctcgggttgcgaaaacctaaggggcaggcaggaagcggagcaaagaaccgtcaccggaccctctccggggtatataaagaccaaggcgaagacggttccaacgttccgcccggaccggacgcgggattcaaaaacgcgaagcgaaacgaccgctcctcgaacggctcgcgcacgcgcaacggcagccccgccaactactcgccccgtcgcattaactccgcgactggacaggcggcacttctggcaggagcaacgggcgacgcttcgccttcgccgaaacaaccgcaccgaaaaagggaccgggaaagggggataccccgaaagggatccttccccgtgaaggaaccaggctccgagcctccttactga

SEQ ID NO: 8699 - DNA, 747 bp, Zea mays
  Peptide Sequence Number=SeqID_52074
atgagctgggcgtcgtggaggaggacacacacagtcacgagagcggcgggcgaggtaaagctcatgtatggcgggggtgacgccatggaaccggtgtgggaggagataacaatgggagccgcggcggagagcgcacgcggcagggagaagggcggctggggaccagcggccgacagaggagagctggaggaggaggtcgcgaaagtcggcgacagggcagagatgcggaggggccggacgcggcgggatctcgggaggcggagaacgcggcccaagcagctgtggactggggggcgagaccgacagagagggcgcgcgacgccggggttggaggaagaaggcgaggccaactgcagcgcggccaagcagaggaggagcgacgcgcgagccacggggtccggtgcagggcgcttgggcgcggctcaggacacggctggacgcgcggttccgggtgtcctgggcgacacgacaggttggggcagagagggcacggtcgacaggccgcagggcgccggggtcgcggtggggaaggggcgcgctcggcgggcgtggagctcctggcgggcgcagccggggagggtggagtcgcgcgccgccgatgggagagccgggcggaggcggctgctgggaggccgccggctgggagggggagcagcccggcggctgtgggggagcagcccgatggctgtgggtgggagggaaggaagagaaaatggctctggtaccaagttggaatggaagccctaa

SEQ ID NO: 8700 - DNA, 594 bp, Zea mays
  Peptide Sequence Number=SeqID_52075
atggcaaggaactggggtaaagagaagtccatgcgccagggaaacaagggaggagggagcgctcagggaggtcctgagctgctcatgagtgtgagctcgggctcggctagggatggcaacgggtttaaaacctgcgggtatagagattacaaacccgtacccgcgagattaatgttaaacccgtacccgcacccgctacccatgacagccatagcaaactacccaagtgattcaggggtaaacaaggccgaagaggtatgggccgatctcggccattggattagatttgaacggcacagattaaatcgccagagtaacgaaacgggatgcgtcatggccatctatcaacaactcaacggtctagctcgaccaagacgaagcggtagccaaagatctaatccggcccctctattcccagatcaacggctggcgtgtatcttcctccttgggcctcaccatggcaacgcaagctctctggacagcggtgcccgtggaaccttgccaccagctcaccctcaccacgacttgctccagccattgactccaaaccaggacaaggtctgcggtggtgccgtgccccgcactatgctctag

SEQ ID NO: 8701 - DNA, 123 bp, Zea mays
  Peptide Sequence Number=SeqID_52076
atggcgatccgggtccaggtcgtggctcgcgcgtgccccgccctcctcgtgaacgatcgtcgaccaaatatcgtcggccaaatagtagcaaaccgaaagaaaagaaatttgaaaaataattaa

SEQ ID NO: 8702 - DNA, 879 bp, Zea mays
  Peptide Sequence Number=SeqID_52077
atgaaaaaggagatcgggagccagccagagtatgatggtcgtgaattcgtcgagcatggcacagagaagtgtgtcatgactgtatacattggatccagtccgcaccatgcggaatggagtgtcactgctgctgggcacagattcaaagacacctgcgaagtcgtcgctcgcaaggcattgagggccctgtgtcagatctatgaagaagaaagtggccggcacaccgctcagattctttccgccctttcaaagagaccgtcagtttgggatgaagatgcagagaagcgcaaccgtcagctccatgtgaatctcaccacaactcaagcccgtgtagctgccttggaaagtcatgaagtcattgctgttgaagccctgaagcaagccaaggatgagcatgtccagaagctgatggaggcctacttggtaacccataaccaacgtagagccctgcggatccaagagcctgctccatccaacccagttcaacccagaagagctgaagacccccagattcttgaaggtcacccggtctctatcagaggagagaagaaggcttgggaactcccagaaggagccatagtcttggaaggaattccagtctcccctcaggttatggataagcaagagcaccctgaatcctctcaagatccaccaccagagttgtttgagcccctcaccataaagaagattccagcaccgtcccgtgagatcaaagaagaagctgcaagcaccccaccagcaccgccgccctctgaggagctacaagagtcagttccacttgaagaagagttcgaccctatgctgccatctcagtcgctgccagaagaagtcatcaacatcagctccctcttgacccatccaggagatgtctcagattga

SEQ ID NO: 8703 - DNA, 786 bp, Zea mays
  Peptide Sequence Number=SeqID_52078
atgaagtcacgcatggcaccgggatcacggagttcggagaaattccaactgacatcggggtcgtcctcttcctcggaacccgcgggtccggaggttgagacgaccgtcagtcggtcccaagttgaccacatatggtaccccggaaggtcaggatatgccctcacaaaagcgctcactgaagcggggtcgcttagtgggtcgaagctgaatctaaagggaacaggatggaaaactgaaggtacctattggtgcgagactaatgcccgacaagtccctcgcaagggtgccggtgtcatcagtccgcctagggctagcgttttgctgggaagtgacacccgtcgttgtctcaggtgcgaggataacgcccgacatgtcccccgcaggggtgccggcgtcatcgactcgctctggtccgacagccgtcgaggtgctgcctcccgcctggccatgtttgccccatctccgtctcctccagtgaggagggtggcggggttgacccgagtgttcttccaccacagggagatgtcgtcgccgagttcgcctccgctgggcgagctgtcgaccgtcgttgttgtcgtgctgcggagggagcagtaccatgtcgtagctgccgtcgcgggacatgaactcgagactcccgaagcggagcatcgtcccgggctgaagaggctgctgaagattgtccatctggaactcaatgggaaagtattgtcaacacgcagcgttcccctacctggcgcgccaactgtcggtgtttcggacacgggggaccctcaaccggactga

SEQ ID NO: 8704 - DNA, 1005 bp, Zea mays
  Peptide Sequence Number=SeqID_52079
atgacgcacccgtgttccattcctcaaacgactcgcgcacgcgcaacagatgccccgcgtatcgcccgtcccatcgcattaactccctggcagggcaagcgacacctctggcaggcaaagcgggcgccgtttcaccttcgtcatgatgaccgcgtcaaaaaagggatcaggaaaggggatatttcaaaaaaggatccttctcagcgaaggaaatgggccccggccctcctactgatcaggggttcaaaggttgcgccctgcggggttcggcaaccgccccagagcactcaggctccgagccctttactgatcaggggttcgaaggctggcccctcggaagggttcaacagccaccctagagcacgcagagtcagggatgaccctgggtacgtccgttacatggccgaggctcgggctatgctcccgaggtaccctaggacatttctgagaccagcgggaacgatttgtaatggaatcccaccggagggaggcaccgagccctcgaaccctatcaaatgggtccgggtccagcaaatcacctgcagggtaagactaacaacagtaagtcacggcctctcccgagttcagcctcgggcacaacagggagctctgcctcgcccaaccccaggcctcggtctcagcctcggcctcgggggaaattctctgcctcgcccgacctcggcctcgagaagagtcacatccgcgcccgacctcagcctcggcctcgggaggagtcgccgcctcgcccgacctcggcctcgggaccgactacgctacaggggatacatcattaccctacctctagctagccgcctcaggctacgaaggaacaagaccagagtcacatctggattactctggcaacaggggcttgaacaaccaaccgcaatccacgcgagtacaagctctagcgtatctggcgtcaatgtgtgtgtggccatcagggccacgacaacacaacaagcctccgtaacaagcgtgacagacacaattatgtctcggtag

SEQ ID NO: 8705 - DNA, 1707 bp, Zea mays
  Peptide Sequence Number=SeqID_52080
atggtgactacaccaactatcatcttcacgcgagagagcaaacaacaaccacctgcaactcgagtcctggacgcacgccgctcccagccatggtcacggccagtggacattgccatggatcttggttggaagcggttgttcgacgtcgccacctgcttcgggcgcggcatgcttcagtcgaccgcaagctcttggcaagctccgacagttaagttcggcccgagcaccgctgaggttgcaggtgccgtcgaagctgacgaccggtggcgcgtgcacgatgacggagaagccccatgcacgcaaaattggggcaccgtctcaagctacgaagaactcggagcgagcccgagaaaaggagaggacagagacggtttagcacaggaagactctacgcccaaacttgaccaacctcttagaggtgatgacggcacagttattgggaacatgtctttaacactgccttcaggtttttcagatttcccttgttctgccaatcttcctccactggatgctgagaaatcgaaaaacatcaatgtggaagttgatagtaaaactaacaagattagtgattctgaacaagtttccttacttaactgtatagtagaggatagcgatgatctacaaaatgagtctgtccttcccatggccagtcatgatgttttagttggagaaaacaaaaatgaggctgatgaagatcaaaatcttgtttgtaaaaattctttcagtctgattaatcataatacaaaagcagctgatggtatagaagcatttgatatgattctcaaccaagcagatgctctacaataccattgcctaggcgacgggcatcatcagaatgccccaagttgtgttcaagaagaaaatccacttggtgctagtgcatatgcagaagtttgcaaggataagacaacacaaactttgttccagccttctatggacaacaaagctggatctatagcacctcaaatgaacagagatgttcaatctgaaatattaccggaagaaactactaggcaagatggcatgaacatgaacccgaatattgtttctgaaaatagagatatcagatatctaaatcatggaaggcagtccttgaacaaggcggaggtcaatgtatctaagagtgggcgggataaattggctgtgaagcaaaataagtgcaagaaaaatgaacagccgaaagaagataaagaccacacagcaaagactcaaaatgatcatgtagcacctaaaccacttccttccttcaagggttttgtcgtagaagaggaggaagggtctggaggttatgggactgtttatagggctcagaggacaaaagatggaaatacattcgctataaaatgtcctcacccaaatgctcattcacatcatgttaacaatgaactaaagatgttggagcgttttggaggcaaaaagtgtgtggttaaatatgaatgctctttgaaaagtggtggcctagactgttttgttctagagcatgttgagcatgacggaccagagattttgaaaaaggatattaccttgcttgagctgcagtggtatgggcactgtcttttcagagctcttggaagtttacataaacagggggtagtgcatagagatgtcaaacctggaaacttccttttttgccgcaaattgaagaaggggtatcttattgactttaacctggcaaatgttagtgcacgaactgttcttcctacttga

SEQ ID NO: 8706 - DNA, 216 bp, Zea mays
  Peptide Sequence Number=SeqID_52081
atggcaactgagaaatgccacctagatcagatcgaatgcctcagtgttaggcggctcctcttcgaccacctgttcttctcctgtggggggtgtgagacaacaagatttataggaagctccaatgcagggttcttgcctgaccgccatcgcagcaaaatcaaccaaggacctccctacactgaccactcccctactgcccttgcccctttcgggtaa

SEQ ID NO: 8707 - DNA, 384 bp, Zea mays
  Peptide Sequence Number=SeqID_52082
atggtccaaaatgttataagaaagaaacaatccatgcatatcttgtgccaaaggttcatctataactatactaaatcgactgtccggaataccgtaaattattccggacaggagaagctttttggaagaacaggccaagcgcggaccgtccgggcccttgcggcggaccgtccgcgacacaagaataaccctcggacagaaccaatgcaaaaacacaagtatccactacggactgtccggaggaaagtcaaagaccgtccgagccctcgcgcggaccgtccggcctcaggcgcggaccgtccggtcgccgttgatctacaggcgcggaccgtccgcaccaggagggcggaccgtccgcggtcagcagaatggcccaacggctag

SEQ ID NO: 8708 - DNA, 801 bp, Zea mays
  Peptide Sequence Number=SeqID_52083
atgcctccgctcctcacctcacccgcctccctcccctccgcctcccctctcctcgtctcctgtatcggcgctctccaccgccccggccccttcctccaccagcgcgccgccgcctcggtccacttcctcgcgccgcacaggaagacccgaccgccccccgcgatgagctggcttgggaagctgggcctgagcgggcttggaggcagcccgcgcgcgtcggaggcgtcggcagcgctggcgcaggggcccgacgaggaccagcccgcgccggggaacgagttcgcgcaattcggcgccggctgcttctggggcgtggagctcgcgttccagcgcgtgccgggagtcacccgcacggaggtcggctacagccagggcaacatccacgatccgacctacgaggacgtctgcaccggcaccacaaaccacaacgaggtcgtccgcgtgcagtacgacccggccgcctgcaagtacgacgacctcctcgacaccttctgggcgcgccacgaccccactactcccaaccgacagggtattgacggaaaatgccaaggcaatgatgttggaacacagtataggtcagggatatactactataacccagagcaggagaaggcggcaagagagtccctggagaagcagcagaagcttctgaaccggaagatcgtcaccgagatcgttccagcgaagaggttctatagagcagaagagtaccatcagcagtacctggagaagggcggccgcttcggcttcgggcaatctgcagccaagggctgcaatgaccccatccgatgctacggatga

SEQ ID NO: 8709 - DNA, 78 bp, Zea mays
  Peptide Sequence Number=SeqID_52084
atgggaacaaatgggcatctcgacctcgacacgggaggttccaagctgatcctaaggaagttcacattagggccgtga

SEQ ID NO: 8710 - DNA, 294 bp, Zea mays
  Peptide Sequence Number=SeqID_52085
atggatcttgacccagctactaaggaggaggagcgacagcttgaggaccacaatgaggcgatggatgctagacaagccttaatgggtttcggtgtcactcatttagatcctatcgagctcaaggatttcgccggctctagaacaggcactagtacggactccatgagcccaccagcatctaccattgcctctgctggtggcggctcaaggaagagatccaaagtttggaacaatttcgacgagttaaccaatctggtaaatggtaagcgtgtaagcattggtgagagcacctag

SEQ ID NO: 8711 - DNA, 1101 bp, Zea mays
  Peptide Sequence Number=SeqID_52086
atgatgatgatggggacttttagcgtgacagacgcagcgacaaccatagacatcgcagcctttccggttgggcgcgttcgtcgcgttgccgggggggggatggatgactgctatagctccaacgacaagcataggcattcaactcctttttgtcgtcatggtctggggatgacacagtcatctcgctgggtgcccaaggcgaaggtggacagtctggggctaactgatggtggtggaagcaagtcaggttctattggcgttgacaaccaggaaacctcacacaaccctactgcttccaagtgcaaggtaaccaatactgttgatctcactaatgtttttgccacaattcacaacagtttagacagtgtgctggtgctgaacacttctattccagccaaggccctagctgtccaaccgattgagtttttaggctctcaacttttgaatgataatcaagctatagattacaacatgcctgctgctgatcgggtcggcctaatgtgtgcctcaattatccatgacttgcccgacccagtttttcaaccagtcgttagtgataatcaaccagattttcaactagttgatagtgataatcatgaaaccttaagagcttctcctgctctgaggacagggaacagctcgaccgacaatacacagttgctcgacttcatcgcggcaataacaaatccaccagagccaccattgattccatccccactgaaaagtagcacgaccacatcacatccattaaaatttcagaaccaacccaccactagaagatcaagtgttaggctggctgcgaagaaatgcattaagactgggagtaaccgggatgcaatatccaaagcccaggaaatcatactcgccaaacttaacaattctacagtaaaaaaatcagactgctctagttcttcaggctttactgactttgatgattcatttgagcagatcgcaagtctattcacaaggcctctctccaagaagcagatggaggcaatcatggagctaaaaaatcaagacaatgtgaaagcagtgaggactaaaaagaagggtcgaaaggtggtgccggccatcaaagccgttaaggcaaaggggatctga

SEQ ID NO: 8712 - DNA, 198 bp, Zea mays
  Peptide Sequence Number=SeqID_52087
atggccctgagaagacgtggcattggcgtaagctgctggcgagtcgtcggtgtagaggccgccgtcgccgttggtgctgatgtggtcgccgccgctggcgagcccctcggagctagctatctcggggccctactggttttagtccgggtggccaagttgcgtgtctggacccccttgggttgcggttctaggtactag

SEQ ID NO: 8713 - DNA, 477 bp, Zea mays
  Peptide Sequence Number=SeqID_52088
atgacagtggcaggcgggcaggagcagcagtcgcatcgtcagccaagctcacgtcccatccgggggcagcgagagaaccctctctcacggcgtgaagacaacgcgcccgtgttccgttcctcgaacggctcgcgcatgcgcagcggccgcgccgccaaccactcgccccgtcgtattaacttcgcgggaccgggaaagggggataccccgaaaaggatccttccccgggaaggaaccaggctccgagcctccctactgatcagaggttcgaaggctggcccctcggaagggttcgacagccgcctcaaatcccatgggccctacacccactactggtcagaggttcgaaggtcggcccctcggaagggttccacggccacctcaggctactcgggctccgcgcccattactgatcaggggttcgaaggctggcccccgaagggttcacagccgcctcagacgccgagcgagggatga

SEQ ID NO: 8714 - DNA, 705 bp, Zea mays
  Peptide Sequence Number=SeqID_52089
atgcaggcggcatgcaaccgcgccaagtggacgcgcttctccgactcccgacacgcccagcatggaggcccaggcccacgcgtcacgctggcccctgaggggttcaacagccgcctcagatcgcgtgggccctacacccactactggtcagaggagcgatcttgtaacggaatcccatcggagggaggcatcgagccctcggaccccgtcgccaggggaccgggtccggcagatcacccgcagctcaccggagacaccatgttcggcgcccatcgagggctcgggggctgctctcgcaaacccggcctcggccgaaccgttgacagcgtcaacgtaccagcccgagaacttgggccccgaccgtacacccgggctacggccagttcgcatgagggaacaaccagaccggctgaagcattacgcaaggcattaagacctcggaggagtgaaaccactcctccgaggcctcgggggctacacccggcgggtgcgctcgcgcgcacccaccggaacaaaaggcaaccgagaaaggctggtccccttgcaaaaaagtgcgacgaaagcctccaagcgagtgctaacactcccttcgaggctcgggggctactgtcggggaccataattaggggtaccctcaagactcctaattctcagctggtaacccccatcagcataaagctgcaaaggcctgatgggtgcgattaa

SEQ ID NO: 8715 - DNA, 327 bp, Zea mays
  Peptide Sequence Number=SeqID_52090
atgggcaggagcaagaaaggcggaagctcgtcacaccactccggcgacaagcggaagcacgagacgagtcccccctccgaggactttggtgactctgagtactcggaggaggagttctcctccgagtccgaggggtcaccagcctacgcctctcccccggtgtcgtccgatgactcggacgattcccaggggatcgccaccgaggtgtggaccgacaagggtgacggcgacgacaagggcgacggaggcagtggcaagggcgacggcggtagcagcaaggacgacggcagcagcggcagggccagtggcaaagcgccactggcttaa

SEQ ID NO: 8716 - DNA, 1272 bp, Zea mays
  Peptide Sequence Number=SeqID_52091
atgggcgctgctgcggccaatgcaggggcgtcgccggagtcgagcggcagcgggcggcctggagcgggggcgatggggcgctacgagctcgtccgcagcgacgacacgcctgccatcgccgtggatctggaggctggcaccgccgcgccacgcgacgactaccccaaacgccgcgggtccgcgccgtctccggcgccggcgccgactcggcagcgcctcgtctcgctcgacgtgttccgtgggatcaccgtgctgctgatgatcatcgtggatgacgccgggtcattcattccggcgatgaaccactccccctgggatggcgtaacagtggccgacttcgtcatgcctttcttcctcttcatcgtcggagtcgccctggcgctcgcgtacaagagagtcccggacaagttggacgccacgaaaaaggcagtgctccgtgcactgaagctgttttgtcttggtcttgtcctacaaggtggtttttttcatggtgttcgcagtctaacttttggtgtcgaccttcaagaaatacgtctgatgggtatacttcagagaattgcaatagcttatctgttgactgccctatgtgaaatttggctcaagggagatgaagatgtagattatggatacgatttgctcaagcgataccgctaccaactgttcgtaggcgcaatcgtggggatcacatacatgtctctgttgtacggtacatatgtccgtgactgggagtaccagacatcaggccctggctccatagagaagtctttctttcaatgcagcatcgactcgccacaaaatggcccccttcctcctgatgctccctcttggtgccaggcccccttcgaccctgaagggcttcttagttccgtgatggccattgtcacatgcttgattgggctccaatacggacacgtcatcgtacattttcagaaacacagggagaggataatgaactggctaatcccttccttcagcatgctggtcctagccttcgccatggacttccttggactgcgcatgaacaagccattatacaccctaagctacaccttagccaccgctggcgccgcagggctcctcttctgcggaatctacacgctggtcgacatctacgggtatcggcggccgaccgtcgccatggaatggatggggatgcacgcgctgatgatatacgtcctgatcgcttgcaacatcttgcccatattcatccacggcttctattggaaggagccccaaaacaaccttctgaagttcatcggaattggaccatga

SEQ ID NO: 8717 - DNA, 423 bp, Zea mays
  Peptide Sequence Number=SeqID_52092
atggacggcggggatggggcggcttgcttctgcccccttctccagccagctgaggcggcggcggccgcacccgcggcggagaagctcgctggagacgagggcgcgggggggctctgcgggtccttagggcgaccggagtggcctgggaggttggggaaggcgcggggaatcctctggcgggggttaggtcgggacaggggcaccggaggggggcggttcacgacgaagaggctcggcggcggcgttaatcaactccgacgaggaattaagcgcagcagagagcaacagagaggtagggagagggcagagggggttccttacctcaaggcgggctccggggactcctcggtggcggcaatggcgcgacgacggcccgggtcggcggtggcggacctccacggctgctcggaggacggcgtgtga

SEQ ID NO: 8718 - DNA, 267 bp, Zea mays
  Peptide Sequence Number=SeqID_52093
atgtctattgactggagtagctttattattgagaatgctgaaaataaggatattggagagacgggtgatatgtttagaatctgtgatgaggatgagatgtatgcgttcttgggacttggagatgaggatgaggagatgaatcgaacccacccagaaccaagtaactttgcatctcatttttcatcggaaagtaatagttttgatccaagtgatctagatgctgccatgccagttgatgatgaaaatgcagaatggttaccgtcctag

SEQ ID NO: 8719 - DNA, 156 bp, Zea mays
  Peptide Sequence Number=SeqID_52094
atggcgcaccggacagtccggtgcgccaccggtgcgccaacggtgcgccaccgggaagacactgccgtggaccagcctggccccacctggcagagggtgcaccggacagtccggtgcacaccggacagtccggtgcccctaagccagaaacactaa

SEQ ID NO: 8720 - DNA, 1053 bp, Zea mays
  Peptide Sequence Number=SeqID_52095
atggctccgccgcggtggcgcggctccctgaccgcgggctaccagttcttcctcgcgctcggggtgctgatcgccaacctcgtgaactacgcgacggcacacgcctcctgggggtggcgcgtctcgctgggcctggcgggcgcgtcggccgtcgccatcttcgtgggcgcgctcttcctcaccgacacccccagcagcctcgtgatgcgggggcgcgccgacggggcccgggcggcgctgctccgggtgcgcgggcccgacgccgacgtggaggccgagctcagggacatcgccaaggccgtggaggccgcgcgccgcggcgaggacggcgcgttccgccggatggccacgcggcgcgagtaccgcccgcacctggtgctcgccgtggccgtgcccatgttcttccagctcacgggcgtcatcgtgctcgccttcttcgcgccgctcgtgttccggaccgtcggcttcgggagcagagccgccctcatgggcgccgtcgtactcggcgccgtcaacctgggctcgctcgtgctctccaccttcgtcatcgaccggtacggacggaaggtgctcttcatggccggcggcgtacagatggtcgtctgccaggtcgcgattgcttggatcatgggggcgaagatcggcaagggcggcgaggcggcaatggcgcacccgtacgccgtggcggtgctggtgttcacctgcctgcacactgccgggttcgggtggtcgtggggcccgctggggtgggtgatcccgagcgagatattcccggtggacatccggtcggcagggcaggccatgaacgtctccatcggcctctgcctcaccttcgtgcagacgcagtcgttcctcgccatgctctgccgcttcaagtacgccaccttcgcctactacgccgcctgggtcgccgtcatgaccgtcttcatcgccctcttcctgccggagaccaagggcatcccgctcgagtccatgggcaccatctgggtgaaacactggtattggaagaggttcgtccacgacggaaagcagagcaacgtggcactgacctaa

SEQ ID NO: 8721 - DNA, 600 bp, Zea mays
  Peptide Sequence Number=SeqID_52096
atggcgctttcccccctcctccttgcggaaaggcgacgcaggggcgtatgtaaaaaagtcgagtctgtccttgaccgtcctctcgccctgtgtagaggctcgggggctgctctcgcaaacccggctccggccaaaccattgacagcgtcaacataccagcccgagaacttgggacccgaccgtgcacccaggctacgaccagctcgcatgagggaacaaccagaccagccaaagtgttgcgaatgcattaagacctcgaaggagtcaaaccactcctccgaggcctcgggggctacacccggcggagtgaggctgacagcagccaagtccggcctcaggcgccataggaaactccgcttcgcccgaccccagggctcggactcgggctcagccccggaagaggacgaactccgcttcgcccgaccccagggctcggactcgggctcagccccggaagacgacgaactccgcttcgcccgaccccagggctcgaacttgggcccagccccggaagacgacgaactccgcttcacccgaccccagggctcggactcgggcccagccacggaagacgacgaactccgcttcgcccgaccctag

SEQ ID NO: 8722 - DNA, 459 bp, Zea mays
  Peptide Sequence Number=SeqID_52097
atggagagactcaccattggagctgaggggagggggcttcctgctggttttccatggaagaaatggggacatgctggagaggaagggctgggcgccatggctgttgtactcggccatgggagggagatggcagggagaggggtgtcgctggggaagggcgccatggctgtggaggaaatggagctgctgcgcgcagaggaatatcagggggaagaaaaggggcgccggctgctctcctgcagggagcaagcgccatggacagaagctcggctggagcaggcccgcgcgagggagaaggagctccagcgctggcgtgcacgaaggagcctgcggcttcctgtgcgccggccatgtgggggagaagacgccatgggagcaggagctgagctccctgctgcaaccgtgaggaagaaaggggcagggaaaaagaaaatggcggctaggggggtagatgaataa

SEQ ID NO: 8723 - DNA, 117 bp, Zea mays
  Peptide Sequence Number=SeqID_52098
atgggcctacatgatcaggtggcgcgaagaccagtggctggggattctggtgttcagcatgagcaggagctcattgaagaggtgtatgggattcatgaccgcttggcagatgggtaa

SEQ ID NO: 8724 - DNA, 378 bp, Zea mays
  Peptide Sequence Number=SeqID_52099
atggagagtcatgatctccgggcagatgggaatcacggcttgtgggtaaagtgcacaacctctagatactttggtacaggtggttatgagatcgatggttctggttatgactatgatgctgctagtccactacagccaaacaggatacttgctgagtatgttgatgtgtactcacccttgctctacacaccaaccccccccccccaggttgtcagcattgcaaccactgctcaggcgaagatgaagctgtggaaggagacttccaggagttccaagattacgacgagttctaggtgtgggttagcggcaacccccagtcggctgcctgtgaaggccgcggttatctacgtttcttttccgcactttgatttattgtaa

SEQ ID NO: 8725 - DNA, 297 bp, Zea mays
  Peptide Sequence Number=SeqID_52100
atgcaggcggcatgcaaccgcgccaagtgggcgcacctctccgacttccaacgcgcccagcatggaggcctaggcccacgcgtcatgcaaccggcgcaccggatgctgcgtgcgagcaactacaccgccacccacgccactgccacgcctcctcgactgcggaaccagtactgcgactcgaggcaaccctacgcacgacccagcagcgccagcctggcgcgacgggaccgggaaagggggataccccgaaaaggatccttctccgtgaaggaaccaggctccgagcctccctactaa

SEQ ID NO: 8726 - DNA, 78 bp, Zea mays
  Peptide Sequence Number=SeqID_52101
atggagatgatctttccaccagggtttttcacggttatggttcatttagtagtccatctagcaactgaatgtacctag

SEQ ID NO: 8727 - DNA, 414 bp, Zea mays
  Peptide Sequence Number=SeqID_52102
atgacttcccacggatcctccgatgacggaaatgcactgacccacactgacggacttgcacgagagggctttccccgtattctgtgggaggtgtccacccaccccattggcttgttcccctttgaaagggaggacgacccaatgtggaaggatagggtggagcatgccaaggatatctgggccatctacccaggacagaccgcacacttgaccgtacggtgcatgaatgctaagtaccgtctgcaggtgatgcgcggtgaggcgatgtcccacctgatggcactgttggaggcaacaaagattacattggacaacagagaggaacttgtggttgacttgtctcaagaaatggtggagaaggtcttgcaggtggagcagctatccactgacattcaggagtttttttttccctag

SEQ ID NO: 8728 - DNA, 351 bp, Zea mays
  Peptide Sequence Number=SeqID_52103
atgccttcatggttgagagtaagggcccgtttggcacagctccagctcctgattctaagcgaggatctggaggagcctgccaaacgggtattttttaaactgattcttgtgtgtagccgaaagatcgggagtcgttttttgaagaaaggagaatcaggaggatcaactcctcacgaggatcaggatctgaagctaaagaagcaggagctggagctttgccaaacgggccctaagtataacaaaatgatgcagatttttttagataatgggaaaaaagagttccccaccttgagcctcacggtttacagcaaagttgcaacaacaacaacgacacagaaggtggtcgaatga

SEQ ID NO: 8729 - DNA, 132 bp, Zea mays
  Peptide Sequence Number=SeqID_52104
atgacgactgatcgtccacagcagctcctacacattgtcctattcgacccgatagctcatataagcatcggcgggagaaaaatctcatacccaagagaccttaaagggattcttgagatgggctcaaaatga

SEQ ID NO: 8730 - DNA, 378 bp, Zea mays
  Peptide Sequence Number=SeqID_52105
atggttcgtcgccatggccctgacttcgactggcgccatgaaccggtggatccctcggtggtgtacgcaagtggtggtggcaaagcgcatggacgatacgcactcttcgacggatttattgactcgtcgtcgttaatgcagcaacagggcatgacatcaaattttccaccgccaccacaatggagccaatttgcaaacacaccagttccaccaccacagttcaccacccctccgacacatatacctgcacctagagataaggttacgcccgaagcgggtggtagtgggtctgatcccgcaacaggcactggatttgttgactcgctcttcgcgttccctcctcctggtggtggtggcggcagcgaaatagtcacctaa

SEQ ID NO: 8731 - DNA, 435 bp, Zea mays
  Peptide Sequence Number=SeqID_52106
atggcaggaatatactgcgacgcccgcgactgcctcagcaggagggtgcagccgccggcccgcaccgccgcttggaccttcctctcccccgtcggcgaggcaaaaagctccgcgaaaaagagatgggtccacaaatcccaatggggggcgatccccaaatacccctcgcacaccgctacgaagatagcggcctgcgagatggagttggggggaccgggaaagggggataccccgaaaaggatccttccccgtgaaggaaccaggctccgagcctccctactgatcagaggttcgaaggctggccccccgaggggttcaacagccgcctcagatcgcgtgggccctacacccactactggtcagaggttcgaaggccggccccccgaagggttccacggccgcctcaggctactcgggctccgcgcccattactga

SEQ ID NO: 8732 - DNA, 456 bp, Zea mays
  Peptide Sequence Number=SeqID_52107
atgaacgtatgtgagctcactcttgctgtctcacaccccccacaggtcaagaacaggtaccacaggatgaggcgcgtggaggatgctgcgataaccacttacgagtggggcccgcgcgtcgaccctttccgcggcgcactggatgtcttagccgacaggtgggacccacgtctgggcgcttcttccccgcagatctcgccaacggaagcaagtccgtccaaccttggccgccacgatttccgggtctcggggtatataacccaccctagacacgcccagttctccgtcgaatcagggcatcaccgcctcatccaaatcaccattagcgcactggtcgggatgaaggttaccaccgcgggcatattggtaggggcgccatcgttcgagttacgcgtgcggccgggaggctcggtctatcctggcggaagcgtccgtggcttcaccgcgttcgcgggg

SEQ ID NO: 8733 - DNA, 87 bp, Zea mays
  Peptide Sequence Number=SeqID_52108
atggcgcgacggtggcccggggcggcggtggcggacctccgcggctgcacggggaacggcgggtatgaaatgggccacctttgttaa

SEQ ID NO: 8734 - DNA, 1155 bp, Zea mays
  Peptide Sequence Number=SeqID_52109
atggctgaaaggtaccaactcccacggagttgtgttcctccaacgatgaggcgaaaagacggcgggtacccccatccgggggcatggaaggtggaaagacgcgatgcaaaagggagggagaaaacatggtcgccttccgaaaggggtcgccctccttttaaaggcaattctccctacgtgcgcccccaaccgtcacgggctgagtcttctccaacacgctccaaggccctcccctgcggcacgggggctgggtcccgcatgtcatgcaaaccggctcagagcagaagaagccaaaccgccgcgcgtggtgcacacaaccgcccagcggttacaagcgaccccccactttcgcccagaccaacgggcgggagggggcgggcagccatgcaggcggcatgcaaccgcgccaggtggacgcgcttctccgactcccaacacgccggcatgaaggcccaggcccacgcgtcacgcaaccggcgcgccggatgctgcatacaagcaactgcaccgccacttgcgccaccaccgcgcctcttcggttgcggaaccaatgtcgcgactcgaggcgacccagcgtacgacccagcagcgccagcatggcgcgacggtcaatgcagccgaaaggcgcccgtgatccgttcctcgaacggctcgcgcacgcgcaatggccgccccgccaaccactcgccccgtcgcattaactccgcggcgggacaggcggcgtttctggcaggagaagcgggcgacgcttcgccttcgccggaccgggaaagggggataccccgaaaaggatccttccctgtgaaggaaccgggctccgagccccctactgatcagaggttcgaaggctggccccccgaggggttcaacagccgcctcagatcgcgtgggccctacacccactactggtcagaggttcgaaggccggccccccgaagggctccacggccgcctcaggctactcgggctccgcgcccattactgatcaggggttcgaaggctggcccccgaagggttcacagtcgtctcagacgtcgagcgagggatgaccaggggtacgttcgatacataaccaaggctcgggctgcgctcccgaggggaccaggtccggcagatcacccgcaggtacttttgggcgtgcctctgggcccctag

SEQ ID NO: 8735 - DNA, 342 bp, Zea mays
  Peptide Sequence Number=SeqID_52110
atggggcctaatgctggtcgcacaccattcacagacatatcaaacaccagcattaaagttagctttctagataactatagcaccattgatttcacaaattttgcaacacatgtcattacagattcaacacagactgaggatgtcgtttcattcgatatgtctatagaagcactaagatgtaccttcgaacatggatccttcggacttggatcaagtccacggtgtgaagaggtacaaggaatacgaaggatggcgcagagccgaagctatgcgcaggggagcttcggcatgatagcagaaaaggaaaccgacttaaagatgaaaaggctatttagaccttga

SEQ ID NO: 8736 - DNA, 345 bp, Zea mays
  Peptide Sequence Number=SeqID_52111
atggcgggcagaaataagctcgccggagctaagggaaagtggctggccggtgaggccctgtcgcgcgtcggcaacggggtggcctactgctgcgcctggatcgccatgtgcttggatcgacgatggagattgagtaggtgcgaaggcggctgtcgtcgctgcatcaaagattcacgagcatcggagttcaaggttatggatgagaggcagaacacggcggagattgtctggagcgcggggggcgaggggggggacgcgagaaccgcagaggtgggggacgacggtgcaggatgggtgagggggcggttgctacgcacgcgggcgccgtcgaaggtggtaggttga

SEQ ID NO: 8737 - DNA, 399 bp, Zea mays
  Peptide Sequence Number=SeqID_52112
atggccaatgtgcttaaaaaccacactgcattggcacaggtgactattgaagaccatcctcacttattagctgggaagcatgcatcagtgcacccatgcaaacatgcagctgtgatgaaaaagatcatcgacgttccaatgtcggggggagtggaaccagaagttgacaacgatagtcataccgactatcgagtacgattatacaatggacgtcgaccgtggcagtacaagctgattattggttggcttgaaggggttctcgctgatgtggtgctcgaattcgactcgctggatccgtacctggaacttggagctgttaaacaatgtatggagtttgggagccttcaaacaagaggatacaagtggcgacatcacaacccctacaagcttgtgccttaa

SEQ ID NO: 8738 - DNA, 1215 bp, Zea mays
  Peptide Sequence Number=SeqID_52113
atgatgatgaagataatcaaccttcaacatcatcctctgaggacgaagaaaatgtccgacgtgtcggaaaggttgaggatcttctctttaacattgatagaaaaaagcaaagaaagagaggatgcttcgcatgaggggagaagggccacttcagggacagctgtccaactatggtcgaacccacaaaggggaggagcaaaggcaaggcgcttacaagtgtcaaaatttgggatgactcttcaagcgaagataaacctccaaggacgtgaagccaccgatcctcatcacgctcatcatgctcatcacgatgtatgcactaaacaaaaggctcaacttaaaactttgaaaaataagttgattagatctcaaaatgattataaaggtttgctagaaaaatttgaaacatttgcaaatttaaattgtgagctatcaactaagattgaacaattagagtcaagtgctccatccacagctaccgatgatagtcttattaaaaagaatgaaaaacttaaggctatgttagctagctcccaagaagctattgaaaatttgctagggaaaatgaaaattcttagcatacacaatgatgagctaactactaagctagaaaacattggtagcaccccagaagtatttttgattgaaatacctgcaattattaagaaagatgcttctacttcttacttcgatttaattgatgattctaacccctgcagtcaagttcttgttaagaatgttgttatagaaacatgttccgacgagattgcaatggagaatgagcaattaaagcaagatgtggctcgccttgggaaggccttgtatgacaagaaagctaaagccaaacaaattcaacctcctcaggataacacaattgcgggagtgaacaagcctgtggagggtgaaactgtgatttgtaggctatgccacaaggaaggccacatgtctttccaatgcaaggcgaagaccggggacaagcaaaaacaaaagctaaagaaaaagcgaacaagcaaaatctccaacacctacatcaacaaggtggacaaaaagtctgctacaccatatttaatcaagaaaaaaaagaatggaaaggtgatagcaatcaaggccagcaagcaagccaacaaaggaaagggagccaaacgcatctgggtgccaaaggaaattatctcaaccatgaaaagtaccaagaaggtttggatcctaagagggaagtga

SEQ ID NO: 8739 - DNA, 384 bp, Zea mays
  Peptide Sequence Number=SeqID_52114
atgcctcagcaccgccaggtgggccctgctcatcagccagcgggacgcgcgttcgatacggctgggccgctgcggggtgggacccgatacccggaccacctctcccctagcccatcacctcaaggcgagataaagcggggcgagccgctcttccctccgtacgcgtcggcttctgggattgcgctgggtcggttcaaggtagattcggcgctcttggcggccggtgcatcgatcatcggcgggcgccgtagcacagggacaagccacgccgccgcgtcggtgatggtgttggggaagaaagggggtacaacctctgcagagtgtaaaactggtatactagccgtgctcgcggtcatgagcagctcaggactcttgcatgattaa

SEQ ID NO: 8740 - DNA, 279 bp, Zea mays
  Peptide Sequence Number=SeqID_52115
atgaatgcacatggctacagatgcaataatgacttctgcctccatatctctaaggatatgaagctgcatcataccccttctcgggcaacatatgatgctcaatgtaccgagacaaccgatcaagccaaggatggaggcaagaagagcttcgaggtaccgagtgcatgggagaaggtcaaggagaccaggaacccaaagtcaggggtgaagaagaagacttgcaaagtcaaggttgatcgagttaagaagagttatggtgcatcaaggatcactacataa

SEQ ID NO: 8741 - DNA, 501 bp, Zea mays
  Peptide Sequence Number=SeqID_52116
atgacagaaattatcatgggccgatcggtcttttcatctttaagtcggtgcaacccttcgtctcaaggcgtgtcgttatgccgaagctccctgtatggtagcttcggcgttgcttctgtgttgatctttcgaaggtgtttcttcttacaggaccttcggcgacgaagcagacccccaacaatcaccatcccaggggccaggatatcacatgataccaaggcttatataaatacacctatcttagtcgttgttttccaaaaaatattagatgaggagactgacgaggacatcgagatcgatggtatacaagatgaatctagttccactgatgtgcctgacctgtgcgacaaggtgtacaataacctctctaaagaaatacatatgctgaagcttgttcctgactacgattattgcactacaaagaagtttgagtgtgagccacctgggttttgctgtcgtggtgggaaggttgagctagcaccactggagacccctccctag

SEQ ID NO: 8742 - DNA, 267 bp, Zea mays
  Peptide Sequence Number=SeqID_52117
atggagcaatcaggacttgggtacctccacaagtcgagtaattggtatctaaagttatatccatttggttctggtgctttaaattggtatcttaatgagacaaccgatcaagccaaggatggaggcaagaagagcttcgaggtaccgagtgcacgggagaaggtcaaggagaccaggaacccaaagccaggggtgaagaagaagacttgcaaagtcaaggttgatcgagttaagaagagttatggtgcatcaaggatcactacataa

SEQ ID NO: 8743 - DNA, 375 bp, Zea mays
  Peptide Sequence Number=SeqID_52118
atggcacccaagagagctagctcaaaggcagccccatccgttgatgaagcagcgaaggcagcgctgctagccaaaaaaaaggcaaggcccttgcagacaccacccaccaagaagcctgcgaagacgacgccgtcagcaagagacagcacaatgatcaaccaactcccgatggtagcctccgcacctgcagctccggaggacagccacaggaaccacccccaggccaaggtgcgccagatgatacgagacgaggagcagagggctcaggaactcgagcaagagattgcgctcatgcagcgcgaaggccaacaagatctacagcacggcccgcccctccaacaacgcgcgccagtcggagacctattcattccttag

SEQ ID NO: 8744 - DNA, 636 bp, Zea mays
  Peptide Sequence Number=SeqID_52119
atggcgtgcaccccgctcgctagacccgcacccacgtctgcacgtcccgcccacgtcgcccgagcactaagtaaagccccgcacacccccttagctcacccctgccccacttacgcgcttcgcccgccctcgcactcgtccagccgtggagcagttgccccctcgtcatcgcctccccgttccgccgttgtcgctagacttctgccagtgctttggccacggtcgaagttcgccgccgtcgcgatccttcaacgtccggccaactggagcctccccgtgccacgccaagtcaccccgagccccgtcctgagcgacctcgccaccgtggaggaggccccacaggtcaacgcctgcgccccccggcactggccccgactgacgattcccaggggatcaccgctgagatgtggaaaatacatctgggccgtcgagcgctccgggctcgaggactcggatgagtcggaggtctcctcgaacgaggagaactcctctgactcgtctgaggaggggagcggcgatgacgacgacggcgagggcgacggcgacaatgaaggcgacagcgatggtgacggcgactgcaaaggcgacagcagcagcggcagcggcaaggccagtggcaaagcaccgctggcttag

SEQ ID NO: 8745 - DNA, 228 bp, Zea mays
  Peptide Sequence Number=SeqID_52120
atgaggaaaatcctcccaaaagttgaagtcaaacagagagaacggaggaaaaagcacttagtgtgctgttggctggtgcacatgacagtgaatagtagcatgtccggtgcacagagtgctgtcaagaagattgtaagcagccacgacatcgttgtaactgacatcaacatagtggaaggctctatctatcgcactgacagatctgagcaaacggaggaaggagtttaa

SEQ ID NO: 8746 - DNA, 819 bp, Zea mays
  Peptide Sequence Number=SeqID_52121
atgtgcttcccagcccctaccctcccctccctacctggtgcctcaccctcgccaccccacagccccacgttggtgcctagtccaggcccggcggtcactccctcctcccccttggcgctggaaactgcctctgttccgttggccgctggccgttccaaggctattaggtggcgcgacgacggaagcccgacgtcctcacccgtggtttctccaggactccatcaacgtaggccatcatacaaggaggctcttcttcttcccaggcctgctccctttctaggtcgggaggatgacaatggcgcaggctgggtgacagttgaaggaagacaagctcgtcgacgtcgcctacgccctctcaagtcccctcctcttctccccaggaccatgccattcgaccttagggggaagtgttttaattgcttctcctcttcccaccgagttgttgtgtgtcgtcggctggtgaggtgcttctgttgccggctgcctgggcaccgtgcttacatgtgcccgcgccggcgatcaggcgcaccccagccacaacgaggcctagtgtggcggcatgtctcccagtcatctgggatggccggctctgaggatagtttagctgacagagttgaggtcggtggagaagatgacggtggaagattgaagaagcgcacccactgtgtacagaggaggagaagacccggaaaccagagggatagcaatgatcaggaagcagcagttgcggtgccttcccaacgtcgagctgatcagagccatgatcttgcaatgggtaagcccaggaggatcatcaaacacacccggaagattctttag

SEQ ID NO: 8747 - DNA, 1914 bp, Zea mays
  Peptide Sequence Number=SeqID_52122
atggacaaggatcgccaaggggcggcgcgaaaacgccaggcgactgtgagggttcacgaagctcggccgaaaaggcagcggggaacggcgaaggcggaggcctccggcgggaggcaagccgcccgctgccggcgaagggtgggcgcctctacgcctggcaaggcgccggaggtgacggtgggcgccggaggccccaagctgacgaaggtggtgccgtctgtcagcggagtggcggaggctgcgaaggcggcccgaacgttaccgccgcccggcaaacgcgttgccgacttcggcaccgagattaatgtggaggattatcttggggggtcggacgagggcccgcttgctctagttatgcctggcgcggcgatcgcgacggctgcgccagcgccgaaggcggggggagaggcccttggcgccggaggcgaggtgtctgccctcgcactgggtgggctgacttcaccagccgcaccgcgtcggggggcccttacgacagctttgtctgccgaggtcgagagacttcgggcgcaacatgctgacgctgtccgtgagaagtcggcctccgacagcaagtgccgcaaactggcggagaaggtggccgccctggagaaggagaaggctgacttccggcgccagctggcgggggagaggagggaggccaacgaagccatcgccaaagagcaggctgctcaggcggaggccaggctggcgcgggcggaaggcaatatcgccaaggagctcgccggagagctgcagcggcggcttactgccctggagagccgcgcggagggggccgaggccgcgatgcgagcggaggccgaacggacgcgcacgcagctcatgactgcatatcgcgagctgtgtgtgcggacgggtgacttcgaggtgccggagcgagaggccggacttcgctgtctggaatgggtgcaggaggaactgcaggagctccccactgtcttggcggggttgatgtcgttcacctccctggtcacctgcgaggcagcgatgaacgcgctctctcgcgaaggctgccggcactttgaggccctcgaccaggcagatgaggattttgggcgagatatctttgaggtcgaagaccccgtggtgaaggaatccggcggggccctctatgacccggatgcggagcgcggcgagcgggtggacgacttcggggcgctgaacagcgtgctgcctgacccggagacgacccctgcggaggccgcgactggagtcgccccgggaccgaccccggagactgcggaagatgcaccaggcgcccctgcacctgctgcggccggcgaagaccttcccccaaaggtggccgaaggcgcgcccgatgcccccgcagctgctgtgccgagcgctgaagatccagcggaggtgggggcggaggcagcggcggaggcctcggcggaggctcccgcagcggcagggccttcgcaggttcaagattttgggcctgcgcacgcaaccgctactactgagtttttggcggcttcgaccgcggaagatggaaatgaatatggtgggtctgtttctgagttttttgattttactgactctgggagctcggttgagtggactgaggagtcttcggagggggacttggattattttgcggccttggacgtggctgcggcggaggctgcgtcacacgctgtggacgcgccagacgtgcccggtcctagcaccgggcaccgacgacgaagggcggttgcaaaacgtaggattagtgcggaggaaggggcccggcttcgcgttagcagggctggtcggcaggagctgctgtctttgccggccgccgctggtgcaggggaaggggagctgcgaagcctttttgcgggtgaggagcttaggataatgttgtttaattatagagagatggggattattcctaaggttgagccgatgtag

SEQ ID NO: 8748 - DNA, 540 bp, Zea mays
  Peptide Sequence Number=SeqID_52123
atgaagactctgatgactttctgtggctaccatcccctggagatggtgatgcaccccttgggactcttccctgctgagaagaaggatcatcccatgtggtgtaaccgcgtgagccatgtaaaggatgtgtgggtgatgtatcctgacttggttgggagggtcactgttcaagtgcatgaattgccaagctcactcttgacagtcgggaagatttcgtggtcgacctatccacggagttggtgggagaaggatctgcaggtggagaggctgagccagcgcattgccaccttggagcagcaggtggaaatccgagacaacactattgatgtcttggagaatcagcttcacgatgtgcagagggaactcgaagaagcaaatgaccacttggacatgcaccacctggagatggaggccaatgaagcaggaagcgagggagaagaggctcccgaggagctaggaccagcccctggtgccaatgggactacctccgcgaagcctccttcacctgtatccagtgtcgcttccaccgctcagggttaa

SEQ ID NO: 8749 - DNA, 312 bp, Zea mays
  Peptide Sequence Number=SeqID_52124
atggcgcttttgccgcccgttttcccgacatcagattctggcacgcccggtatggctggacgcgttcaagacttcatcacgctccgcattggttcgctttggctggatgtgccactgggacctctccatgctagcgatagtgctggctccctgtgtaccacagctgcatcaccagccatgattgggcttgagcaggaggtcaactccaaacctcatgatggtttcattccagttgtgtctaaagctgcaaagcgaagggcaaggaggatggctgcgaggtcaagagtgtcagtctcccaagaacacccctaa

SEQ ID NO: 8750 - DNA, 129 bp, Zea mays
  Peptide Sequence Number=SeqID_52125
atggagaagtgcaaaccaatcaagacacctatgccaacaaatggacatctcgacctagatgagggaggtatctcaggcacaccccaagcattggtctgtggtatcccaaaggagctacttttgacttaa

SEQ ID NO: 8751 - DNA, 633 bp, Zea mays
  Peptide Sequence Number=SeqID_52126
atggcggcagcaggcgggcggaggcagcagtcaaatcgtctgcaggctcacgtcccctcctggggcagcaagggagccctctcccacggcgtgaagacgacgcgcccgtgttccgtccctcgaacgactcgcacaacggctgccccacgaaccactcgtcccgtcgcattaactccgcggcagggcaggcgacacctttggcaggcgaagcgggcgacgcttcacctccgccatgattaccgcgtcaaaaaagggaccgagaaaggggatactccgaaagggatccttctccgcaaaggaagcgggccccgagccctcctactgatcaggggttcgaaggctggcccctcgaaagggttcgacagccgcctcagagcactcgggctccgcgcccactactggtcagaggttcgaaggctggcccctcggaagggttcgacagccgcctcaggccactcgggctccgcgcccactactgatcaggggttcgaaggctgtcccctcggaagggttcgacagccgcctcagagcactcgggttccgcacccactactggtcagaggttcgaaggctggcccctcggaagggttcgacagccgcctcaggccactcgggctccgcgcccactactga

SEQ ID NO: 8752 - DNA, 1464 bp, Zea mays
  Peptide Sequence Number=SeqID_52127
atgacgatggtgaaaggtgaaaccaacctaaaggagaaaagactgcttagtcctcgacagcttgccttatggtcagcagtaaatgtcagagacatcaatgcgcgccgtctgctgggtgaccctgacgtcgcctgccggtggattggacaggatgcattaaatgccgagagggccacaaggcacgcggccgtggcgggtttctgcctgagcggggagcgtagggcaaggcctggacacgtgtcggcaccggacccttgcttgtgtcggggtcctttctgtcccgggaccctgccaaggctcggacctcactcagggggacctggcatgtctccacgggagctccgggctcgtgcttacaggggtccggtgttcctctgcggaggtccggacccaacggtgcttcttgggacgtatcatccttcctcgccacgtggtgcccttaggcctgcccatgtggcgggggtcgtgtgccactctctgtgtgaccaggaggtgtcgtacaggtggggccagagtccgattggtggttggcttgctgcacctgtgcgcctgttgatcgaagatgaaggggcacttaaccgtggggcagttgcatgcccctttctgtatgacatgtggggcctggcccccgtgtcaaaaggtgggaaccttggtaggagtgctaccccattggagttggcatccttccgccatcgctcagcttcaaggattttcatcacgcagcctggtcgcaacctccggccggtggtcatccacaaggatgactaccagccttatggtggagagaagcgagtcgggctgtggcctcccccctgccctcagcttcaaggatgttcatcatccgcactggggaggagggcgagccgagtcggggctccgcctttcgcgcgggctggcggcccacttcttcctccagcattcgggggagaagggcgttcgccagccttgctaaggaggcgaacttcggctacgcggggtcggcggtctgaggcgccgtcagctgccgtgtgtctggctcctcggcctgggtggctttggtgccgcctccggcgctgcctcctgtcacttggacggggcgtggctgtccgtccaccacacgagcgacggtcgcgccgtgcgcaggtcggccacacccacgacttctcccgcatcgccggccgcaccggggggtcgtacaagacgtctgaggacgggagcgaggacctctttgcgcgtgctggggcggccgccgttcgccgatacggcaatagtgtgcaggtggccgctgtcgtcggtgttgaggtggtcgctgtcgctgaggtggtcgccacagtcggtgctgatgtggtagcctccgctggcgagccgctcggagccagctatcccacggcccttactgatgtggagggcggtggagcgtgcaggcccacggtacgggaccaggctgagcggctgcatgggctccggaccaccctaggagactaa

SEQ ID NO: 8753 - DNA, 1116 bp, Zea mays
  Peptide Sequence Number=SeqID_52128
atggaggcccaggcccacatgtcatgtaaccggcgcaacggttactacatgcaaggaaaccgcaccgccactcacgccaatgccgcgtctactcgactacagaaccaatgccgcgactcgaggcagccctgcgcggaccgggaaaggggatatttcgaaaaaggatccttcccagcgaaggaaacgggcccgagccctcctactgatcaggggttctgtaacacccgggttttaggggtccaaagcccgggcgtaaacataatcaccagcaaggtcctcggtgcaagaatcccgagacccagtgaacagaggactggaccacgggttatttccactgaacccgaggggttcatacgcaacaaggctcgcagcgaaaggatggttctcaccggaaatcttggagtgattcctcctggccacgacactaggcggacagacggcggcgcaagctccacggcgagaaattgcggcgtcgctagcccgcaatcaaccacagaaagagcacgcgcaccacccgtgcgaccacccgaagttcccaggcccaaatacgagaccccgccggtgctggtaacccgggtcgacggcagcggccaagaaattgggtggacaaccgcggcggctgggctaacggcgatagtcgggatcggtcggacttgcaccggtcctaccgggctcgcgaccgtgagctccgccgaggttcacgcggagccgctgagggcggccggcgcgcacaaaacggagagggaggcagagtcggagacggaaatttgttacggcctgctgcggagtggagacgaagctgacagtgggcccgagttcgaaggttgcgccctccggggttcggcaaccgccccagagcactcgggctccgtgccctttactgatcaggggttcgaaggctggcccctcggaaggcctcgggcgcagcagggagctccgcctcgcccgacctcaggcctcagcctcaggctcggcctcgggagaaggcctccacctcgcccgaccccaggcctcggccccagcctcggcctcggcctcgggaggagtctccgcctcgcccgacctaggcctcggaccgactacgctacaggggagacatcattaccctactgctag

SEQ ID NO: 8754 - DNA, 2154 bp, Zea mays
  Peptide Sequence Number=SeqID_52129
atgaccgagccaagggactcctacgcctccgggatacggatacctcactcatcaccttctgcgataagtaactcgcgttcggataaagtgattccgcggaccgaacaagtcttcacgttcggaagctcttctgccaaagcgatccttcgagccttctcgactgagtcggtgacagggcctcacggacgggtgaaagtacgcgtaagcggcaaggccgaccgagccgagggactcccacgcctccgggatacggatacctcactcatcaccttccgcgagaagcaactctcgcccgcacaaacatcccttaggcacgcgctacaagacaatctgatcctgcatgctcgggtcttgacgctggaagggggcggcagcaccctcggtatcgacgacaacttcggcgaggttcgacctagcctcggacggcgacgcggtccgaagacctccgctctgaaggacgacgtcatcaccacgcccgggccatcgccgctagggtcttctccgggaatccggcccgagcaggcggctcggccggtcacctctgaggcctcggccaaccatcttccaagggcgccagcccgacccggggcctcggctgccaaccccgcctctgttcatgctgatatcgctacccctggcctcggctcgtcgaagagcggccaaggggtacgaacaaccccactcgataggggtgggcctgcggagcaacagaagaccgacgaacggcgcgccgtcacctgccccagcagcagcgacgacgacgacttctgctccgaggggccaaacaacggcagcactaacctcagggcggatgctgctgccaggaggcccccgcccatgcccaaactcgtgaggcaaggatgggcagaaggccgtagagttggaggtcggtccgtggccagccttggctatctcgccggcggaagaacctcttcaagctgccgtggcagacgccggcgccgcgagcggctccgaagccactcgcgtctgagagccaggcacggtgcagctgccggcgccacggacgacgaccgcccttccctccgatcactgagtgaaggagcgggccgccgcccacgcaggggccgactccaactcggcacactcccctccccagccctggtgatgaaaatccttgaggctgagggaggggcagaggccgcagcccggctcgctttcccccaccatcaagccggagaccaacgggcgaaagaggcgggcagccatgcaggcggcatgcaaccgcgccaagtggacgcgcttctccgactcccaacgcgcccagcctggaggcccaggcccacgcgtcacgcaaccggcgcgccggatgctgcatgcaagcaactgcaccgccacttgcgccaccaccgcgcctcttcggttgcggaaccaataccgcgactcgaggcgaccaggcacacgacccagcagcgccagcctggcatgacggtcaatgcggccgaaagtgggccggcagtaatgacggcggcaggcggacgggagcagcggtcacgtcgtcagccaagctcacgtcccatccgggggcagcaagagaacctcctctcacggcgtgaagacaacgcgcccgtgatccgttcctcgaacggctcgcgcacgcgcgacgaccgccccgccaaccactcgccccgtcgcattaactccgcggcgggacaggcggcgcttctggcgggagaggcgtgcgacgcttcgccttcgccgctggccccccgaggggttcaacagccgcctcagatcgcgtgggccctacacccactacttgtcagaggttcgaaggccggccccccgaagggttccacggccgcctcaggctacccgggctccgcgcccattactgatcagggctcacaggagacaccatgttcggcgcccatcgagggtaacatggcgctttcccccctcctccttgcggaaaggcgacgcaggggcgtatgtaaaaaagccgagtctgtccctgatcgtcctctcgccctgtgcagaggctcgggggctgctctcgcaaacccggctccggccaaaccgttgacagcgtcaacataccagcccgagaacttgggccccgaccgtacacccgggctacgaccagttcgcatgagggaacaaccaggccagccgaagcattgtgcaaggcattaa

SEQ ID NO: 8755 - DNA, 2055 bp, Zea mays
  Peptide Sequence Number=SeqID_52130
atgaaggaggtggccgaggaaaggtgccttgacccgcagctgtggcacgcgtgcgctggcggcatggtgcagatgccgcccgtgcgctcccgtgtctactacttcccgcagggtcacgcggagcacgcgcatggcggcggggccgcggacctcgccggggcgcgagcgctcccgtcgctcgtgctctgcagcgtcaccggggtgcgcttcctggccgatccggagaccgacgaggtcttcgccaagatccgcctggtgccggtcgcgcccggcgaggtggagttccgagagcccgatgagttcagcgtcgaccccgcggacgcccgggagaagctttcttccttcgccaagacgctgacgcagtccgacgccaacaacggtggcggcttctcggtgccgcgctactgcgccgagaccatcttccccaagctcgactaccgggccgacccgccggtgcagacggtgcttgccaaggacgtgcacggggaggtctggaagttccgccacatttaccggggcacgccgcgccggcatttgctcaccacgggatggagcacgttcgtcaaccagaagaagctcgtcgccggggactccatcgtcttcctgcgcactgagcatggcgagctgtgcgtcgggatacggcgtgtcaagcgggtgtcctgtggtggcatggagtgcatgtctgggtggaacgccccggggtatggggccttgtcggcattcttgaaggatgaggagggtaagatgatgaagagtcatggtgggtacatgagaggtagggggaaggtgaagatcacggatgttgtcaacgccgcaagtctagcagcgagcggacaaccatttgaagttgtgtactacccgagagctagcacaccggagtttgttgtgaaggctgcatcggtacagaacgcgatgaggaaccagtggtgcccggggatgaggttcaagatggcatttgagacagaggattcgtcaaggatcagttggtttatggggacgatagcttctgctcagcatagcattgtacatccgtacattgagagaaatccaggcaccaacaataatatcgatatagcattagtttacccaattcgcaacctgctgttcttcgtctgtccttaccctagcacattttcgtttcttggaattgccttggtggcatgggatgaaccggacttgctgcagaacgtgaaatgtgtgaacccatggctcgtggagatcgtatcaagcattccaccgatccacctgggaccattttctccacctaggaagaagctgcgggtgccccaccatccggacttcccgttcgacggccagctgttgaatccgattttccacggcaacccactcggtccgagcaacggcggcggtgctcttcgctgtttctcggacatcgctcctgcaggcatacagggagccaggcatgctcagttcggtctaccactaacagaccgccagcttaacaagctgcacctcggtctgttccaaggcggcggttttaagcggcggcttgacgctatcactccaccatgccctatatccaggggctttgtgatcggcagtgcaccggtcgacgagagcgtctcttgcgtgctgacgatcggcacgccacgggccgcagagagatctgacgacaggaagaaaccacatctaatgctgttcggaaagcctatccttaccgagcagcagatgagctctagagggtcaagggaaacactctcccctgaggccactgggaacagttccgatggcagtgttcagaaaacgggaaacgtatccgatggctccggctcgtcgatctgcatcggttcctcgtcccgaggccgcgaggcttctaggctcgggttcgaatttgaagccgggcactgcaaggtatttgtggagtcggaggatgtcggtcgcaccatcgacctgtccgtctttggctcgtacgaagagctgtacggtcagttggccgacatgtttggaatcgagaaggcagaggtaatgagccacctttgttaccgtgatgctgctggcgctgtcaagcgtactggcgacgagccgttctggtga

SEQ ID NO: 8756 - DNA, 1782 bp, Zea mays
  Peptide Sequence Number=SeqID_52131
atggcgggttatcccgggcaggacgatgtcgaccgtcgcgggaagaaaccggcggcagagaccggagacgaacccgcgccggcggccgccccatcctctaagaagaggaagctaggtactgctatgggaggactgggggtctccgatagctttgctatggagttgatggggacatgcacggcccccggggggaggatgtcttcgctcgagctccgggagtcttcggcgcagatgctgaaggttaccgggggttggtggcctaagaacgttccgatcccccgcgcggctagcgaagacttttttacatctcgcatggttcgtgacttcagagtgtttccttatggacggaatattgctggtgttgtgtcaacagtgatggataaggatcgtcaggaagctgcacaaaagcgtcgggcggtcgtcaggctgcccgaggctaggccgaagagggcgcgggggaccgcgaaggctgccgcccccggcggtagccagccgacgctggcggcgaagtcggctggccctaggtccagcaaggtgctggatgtcgtgaaggcagctggcgccggcggagccaagtctacctcggccgaagccgcgaaggcccgagaattgcctccgccggggaagcgcattgccgatttcggcactgatattagtgtagatgattatctcactgtgcctgtggcgaagggtggcgctctcagcgctggtggtgagatttcagcgctcgctgctgtcaaggacgaggcgggcgctgtgtcccgccggctgaaggaggcgtcgcagcggctaagtcaggcggctgacttcgctgaccgcgtggcgtcagtcgatagacttcgggcgcaacatgctgaggccgtccgggaaaagtcggccgccgatagcaagtgccgcaaactggcggagaaggtggccgtgctggagggcgagaggactgagctccggcgccacctggcagaggagaggagggaagctaatcaggccctcgccaaggcgcagtctgcgcaggcggaggccaatgtggcgcgggtggagggtagcctcaccaggcaacgcgccgaggagtgggaggagcggttcaacgctctgcaggcccgcgtggagagggccgaggcttcgacgcgctcggaggctgagcgggcgcacaagcagcttatggactcataccacgagctgggcgcgtggaccgctgacttcgaagtgcctgaccgagagtcaggccttcgttgcctcgagtggctgcaagaggagttgttggcgctcccgaccattgtggagggatttatgtcctatgcctccctggtcacctgcgaaggggcgatgaacgcgctgtcccacgaagggtgccgtcactatgaggtcttcgaccgatctgatgaggatttcgaacgcgagatttacaaggttgaggaccctgtggtgaaggaatccgcgggagccctctttgaccggatgtggggcccccacgatcgggaggtggtcagggagcggtccgacacggtgaggggtcaggcggcgcgtgacgagaaagtggatgacttcggggctttgaacagcgtgcggcctgaggcggagtcgaacccggtggcggctgggcccgaggtcgctccggcgccacccacagaaaccgtcgaaggctcccctgatgcccccgcagccactgcggccggcggtggctcatcgccaaccgctgcgccgacagctgaggatccctcgaagacggcggcgaagccggcagtggaggatcccgcggcggctgggtcttcgcaggtggcttag

SEQ ID NO: 8757 - DNA, 300 bp, Zea mays
  Peptide Sequence Number=SeqID_52132
atggggccagtatttgctcacgatgagccgactaaaagtagcaaggctattgttaatgagctagctattcaggccgattacatggatgacatggtggagagggaaaatgatgaagcagacgtagaaactacccccgtacgagaagacgtagaaactgccctcgtacgttgccagaggcattataagactgaagaagacttgattgatgtcactcctttagaggttgtggcagagggcaaggagaacaatggtcttgaggatgtatgtcacacccagttttggaaggcaaaccgaatgtga

SEQ ID NO: 8758 - DNA, 210 bp, Zea mays
  Peptide Sequence Number=SeqID_52133
atggcaatagctctgttaatctggcctctcaagggcactgtgcggggcgaggacggcggaggcatcgagcgaagggtggcgtcttcgccttcgccccaacatttgccctccgagggaccagttcgactaagtcatctggtgccgaagacgtcgttagatggcggagatgctgccctcgctcgaagtggttccgcggggtttttgacatga

SEQ ID NO: 8759 - DNA, 1355 bp, Zea mays
  Peptide Sequence Number=SeqID_52134
ctgctcactgctctctgcgctctggcggttacctcctcatcgccggcgacctcccctcaccggcgtccactgtcctccggcgacctcgacctcctgcgcacatcccttctccctctgtgatcttgcctgcccgtgagccatctcctatcctgcctggattttcacctctcgtttgtcaggtcaggatgccacgcacgaagaatgtgtcgacgccagggggaggcgatgatgaggatcctcgtcgccccttcaagcaggtcaagggaaagaccgtatacttggagcagcaggaaggccacaagaagcggcattgcataccgagttcgtcgcctcgcctcccggtctcgctcctccactcccatcactgcttccactccaccacccactttgactgctcccatcacccctgttgcgccatccaccaccacagccatacccgctacctccactacaccagcttccactgctcctcctcccgctcccgctcccgcttccgctcctcctatcccaccacctcgattcccgggagcgcgatgagactgaggtacgaccacttgctgcggatcccagactttttgacttcagcgtgctacagcggcacggaaggggaccctgatgcagttgaccttttcagcacccgtattcaggagtcctttttcagagctcagatgtctgcacagattgatctgtgtgtgcaccggcttttggaccttccagcttttctgctagccgccggtgctgactctgaggtgcaccactcatatctacctagtcttctcacccttttgactaccagcggcagattcgccagctatttggatttcacgagtcatcgactcatcttcacagcttatgctacggcacctctgaccctcctcgtcgccctcacggtggtgttgctccggcttatgagacggacacttctgccgtggatgggatacagggaggctaccacacatatccatctctggctccttggtgccctggtctctcactccgagtttgatgttgttgatttccttatttgtgagatcgaggacaccgttctggatgcgcctgagcatcctgtgccagctcctgctctagtttttgacactcaggccaaggacactgctcttcatcagttcaaagctcaggatgcagcagttgatgatgatgatgatgatgatgatgatgatgattttgggattccacctccgcctccgcctcctatgcctcctcgctcacatgatcatgaggctgggagttctcatgctacccctgctgcccctcctgctattgaccctgctcttgcttcgattttccagacacttactcagcaacaggctcaattggcagccgagcagacccgctag

SEQ ID NO: 8760 - DNA, 696 bp, Zea mays
  Peptide Sequence Number=SeqID_52135
atggctcttatgatacagaattctggtgtatcgattcccccagttcagtctgcacctcctccacctcttcaggcttctgttgtgccagcgattcagtcaggacaccctctccctactattggtctgtcttcctctccgctccggctggtcaccctggctttgacgtcaccggttctcagctccgtctgccctcagccgtcagtggcaccagcttctgctgttaccactacttctgtggtggtgtctgtgaccacttcagatccgatagcttctgtagcgccacctcagtccgagtcagtaccagctccagcttctacagcagatcctggatccgagactgactctgacccccaggagccgccgacgacccccgccgcctgtgctcgtggccagggtagctccgaccacctccgacgccgacccgcacaccgacgtgaccgtcgcgacctcccggacgtcactgaccaccccgccggagctctactgccgccgaataatcatccaaaaatgttcaaaccaattttgctagattctggaaattatgaactatcagactgtaatcttgctgacggagagtacatcctcgtgccagagcaaggagctgctcaggaggtagccccagatccagcacccgagcctgcaccagaggacctgcctgccactgctttggaaggcaagccccggttttatgcataa

SEQ ID NO: 8761 - DNA, 115 bp, Zea mays
  Peptide Sequence Number=SeqID_52136
acattgtggtacaggtggcaatgagattgatggttctggttatgattatggtgctggcgaaggtgaagctgtggaaggagacttccaggagttccaagattacgacgagttctag

SEQ ID NO: 8762 - DNA, 108 bp, Zea mays
  Peptide Sequence Number=SeqID_52137
atggcaatagctctgttaatctggcctctcaagggcactgtgcggggcgaggacagcggaggcatcgagcgaagggtggcgtcttcgccttcgccccaacagcgggat

SEQ ID NO: 8763 - DNA, 324 bp, Zea mays
  Peptide Sequence Number=SeqID_52138
atggacttcgaaacgaagcgacagaaaagggaccactaccgaagtgtgaaccacgtcgctctcactggcccagtagtgcaaacaaggtggtctcatgtaccactcaccttcgatgccagagacgttgatttgcgtagcgcccctcacatcgacgccatgcacccaatgcacgaagtgagcaggtcactttcgatatcgtcaacatggtatacccatttgggccagggctccatcaacaagtttgaggcggccattcacggactctacctctgcatgaaaattctaggtccgcaaggcgtgatcacagtttatggcaaccagtag

SEQ ID NO: 8764 - DNA, 549 bp, Zea mays
  Peptide Sequence Number=SeqID_52139
atggctgccggcggcggtcaccactcgttgagaaaacaacgggagcctcccatcgtcattccggaggagcgcccgcataaaacgacttgctggcacaccaaacccccgctcatggaaggagacgaaactcagcacgtaccccggcggcgggttcgggtcagccccgctcggagggaccatccactccggccacaggacatcagagagggggcggagcaagccatcggcaacaagggcctccaggtcgtccaccgcgacagtggaagaaggccatgggtcgcgcggcggaacgatggttactcggccggccatcgccaagcgaaggaggtggcggcggggcggacaaggacaggcgacacctttggcaggcaaagcgggcgacgcttcacctccgccataatgaccgcgtcgaaaaaggtgcgccacgtcgttcaatttagtatcctttttctcttcccctttctctctctaaatacatggaccgggaaaagggatactctgaaagaggtccatctcgcgaaggaaacaggcctcgagccctcctactga

SEQ ID NO: 8765 - DNA, 333 bp, Zea mays
  Peptide Sequence Number=SeqID_52140
atggggaagaaggcaccgaagctggacacggacttcacctaccccttatgcaaccacccagacatcgtccagtgcaccatcttcttcaaggaatgtcgtcttttcgtcgtggcgtcttgcagcgtctgcaaggagacctacgccactaagcaggggtcgatctacaccccgggccacctgggcacggcgccgaggcagagcgcatggggcgggaaaaccagacagggcacccgccaggcgttccatgtcggggatacggttattcccgtcggccgccgacgggaatacgtaatccccgtcggccaatatcgagccgacgggaataagggctaa

SEQ ID NO: 8766 - DNA, 333 bp, Zea mays
  Peptide Sequence Number=SeqID_52141
atggctgggctggccggtctacggtggcaggggctcgggtggccgcgggcacgtcgcgtatgggcaaacggcggcgaactgagctccggtgagtgttcaaatgtcgccagaggtcgcaaacgtgcgaatctttgcaaaagtccggcgcagacctcttcctggcacctagggctgtcactcaactgtgagacgccggggcagatacggcctagggagggagatcttcgggtgccaaaacaggtgaaacctgatgttgtttttaaggaggctgctttaaactctacactaaacctgcagtatagtaaagagtgtatgagaatagaattggtgtaa

SEQ ID NO: 8767 - DNA, 528 bp, Zea mays
  Peptide Sequence Number=SeqID_52142
atggctggagcacaccttggcactcaagactatgatcacatgtggaagaacttaaggagcaaaagccgtatctgccccggcgtctcacagttgagtgacagccctaggtgccaggaagaggtctgcgccggacttttgcaaagattcgcacgtttgcgacctctggcgacatttgaacactggaagaaacaaaccgccacgtgttcgacgccgtctgccgcgccagagcacgcccgcgcgcgcgcccgcgccgcgcccaagccaagccagtgccctgccattcccaaccccgtccagccctcggagaagactgtgcacgtctccgtgaagctccccgagcgaggaatcgggctctgcttcaccggagaggccgacccaaggtcaccggatttcaaccgaccgccggcaaccgtggaccgaggttctctggaggacatggttgctggagtgacttggccgtccaccttgccaccgggttggactgttgagtgggaccccgcctcggctgaggaggagcatgaggagtga

SEQ ID NO: 8768 - DNA, 639 bp, Zea mays
  Peptide Sequence Number=SeqID_52143
atggcggccattgatgaggactggagcagggagagacaccagggcacagacgagcgcggcctggggccctgggcaccagagctgagctcgcgtcggagctgccagaagagagcacgccacacgcggctggaggaggagcgcgtcgcgcagtcgggcctaggcgcagcgtcgatgaagcttgactggggcgaggtccaggcgcttgttctggagattcaaggagatagatatggtgaacacaccaagaaagaggtgcccactgaggaaaagctcgattctttgggaaagaagcatgaaggcaagactttgtcaaaggaggtcaagatatccggtgacaagcacaaggaggacaaggaagaatccaccgactccatcaagtcgcacaagaataagggcgacaagaagaaaaagaagatgactaaggtggtctactatgagactgactcattcgcgtcctcaacctctgacgctgcatcaacatcttcaaagtgtcaagtgtcggggaccataattaggggtaccctcaaggctcctaattctcagctgagccgaagtgaccgccgtaacttcgccgctccactgaccggcctgacagaaggacagcgccgcctgcgccgctccgactgcggcgccacttga

SEQ ID NO: 8769 - DNA, 375 bp, Zea mays
  Peptide Sequence Number=SeqID_52144
atgggcaagaacaacaagcgcaagcatgagccgactcctccatcggaggagtttggtgattcggaatactcagaggaggagttctcctctgagtccgaggggtctccggctcccatccccctgcgtgagtcgtctgacgactcagacgactcccaggggcttgcggcggaggtctggacgtacatccgggccgtcgagcgctccgggctcgaaggctcggatgagtcggagtactcctcggatgaggaggactcggacggcggtgacgagggtgaagacgacgacgacgacgacgacgacgacgacggcgacggtgacggcagcggcagtggcaggggcggcggcgacggcgacggcagcagggacagcacctag

SEQ ID NO: 8770 - DNA, 516 bp, Zea mays
  Peptide Sequence Number=SeqID_52145
atggctgaaaggtaccaactcccacggagttgcgttcctgcaacgatgaggcggaaagacggcgggtatcccccatccgggggcttggaaggtggaaagacacaatgcataagggagcgcgaagacatggtcgccttccaagggggtcaccctccttttaaaggcgactctccttacttgcgtccccaaccgtcgcgggctgagtcttctccaacacgctccaagggaccgggaaagggggataccccgaaaaggatccttccccgtgaaggaaccaggctccgagcctccctactgatcagaggttcgaaggctggcccctcgaaagggttcgacagccgcctcagatcacgtgggccctacacccactactggccagaggttccaaggctggcccctcggaagggttcaacgaccgcctcaggctactcgggctccgcgcccactactgatcaggggttcgaaggctggcccccgaagggttcacagccgcctcagacacagagcgagggatga

SEQ ID NO: 8771 - DNA, 81 bp, Zea mays
  Peptide Sequence Number=SeqID_52146
atgcagcttcatacccttagagatgatgtggttatataccctcagaggtgcttgttgctcgtcaagggaagtgggaagtag

SEQ ID NO: 8772 - DNA, 330 bp, Zea mays
  Peptide Sequence Number=SeqID_52147
atgacaacgggtcggattcgggtcgggtataataaatatccgcacgcgactataccaacgggtactagccatacccgcccgcaactgtacccgcgggagcagctatccactgatattcaggagttggaggaactggtgggcaccagggagaacaccatcgaggttctcgaggatcagctccttaacactcagcaacagcttgctgaggctaacgagcacctggacatgcatcaccaggagatccaggaccaggaggccaacgaggacgctcttagggaggagatgagcctgcctccagtgtggacactgctggctcggacgaatctctag

SEQ ID NO: 8773 - DNA, 2259 bp, Zea mays
  Peptide Sequence Number=SeqID_52148
atgtctgtgtggcagagaattggccctcagctaccgccgtcgaagttttctcattctccggcagcagaggcaagcttggtggagagcaatatctcgagtcattctggtaagaagaggaggcgggctaaacgtcataaggaggtttcttggcagtccacagctccagtgggtgccgcttcgaccttggagccctcgccaggagtagggacgcagtcgagagtgaagacctgtgtgcttgagttctccactgctatggctcgggaggaggcggctcttcgccgggctttgttcgtctctattgttggcagcaggccggagatcagtggagctgaagtgcgggatgaagtggctcgggcttttggaattgacgttaattcaatatcgattcatcagtcattgccagaagatttcctattgttgttaccggatgaaagtttggctgatagagtcttcagcggaggaaaattgtttaggggccctcttttcaatcttcaattcagacggtggtcgcggttggcttatgctgaggcggctaggttgccagcactggtggaagtcgaggttcatggcatccctgcccacgcatgggaccgttctacggcggagtatctgctccgtgactcttgcattatcacagacattcatccgggcacgtcattgaagaatgatctgtcttccttcaggcttcgtgcatggtgttcgaacacagatttgttccctcggtcgatgaagctcctcattgttgagccggggacggaggtgcaggagaaaagatgtctttcctatgatattgaagtggctgttactgctgtgatggttccgacgaatttcgacccccctccaactcattcccctgcggctgatggacgggatcggcatgaggatggcggcgataggcattcggacgaccccaattctccacgtccggacgacgggcggcatcagcgcccaattttccagcgtctggaccccaggggacagtcaacgtttggtggccgtggtgctgctttccagcgctgtgctctctcggccgcgagcccgactgaaggaatcgaggtggtggcctccccaacgcgcctgacgattggcgcaggagccgaggaggaccttgctgcgggggtcgaggaggcgcgacggctgcattgccccctcccttcattgctggttgctgcgggggtcgaggaggtgcctccccctgtgcggcggctggctgttaattctgtggcgggagtcgaggaggtggcctcttcaatgggacgggcggtctattctccttcattgttggcggcaggcacaggaaccgaggcgcacattgggagaatgctggcggccgacacaggaaccgaggcgcactttgggggaatgctggcggtcagcacaggagccgaggtgcacactgggagcatggtggccgttcctgccatggatgtgttggctatccagatggaactcacggcagcagacatgggcacaggtctcgggacagactgctcgaaggttggccctgtgggctgtgctgttgatgctccagttgtgcaacagccgcagatggatgggcacaggggccccatgtggacaaggttggctgggtcgctgaaatcgcttgggtcgggctctccccgacagaggtttgtcgggttgcagaggctgaccaagaccgtttcgccccgcaacagtttcaatgtcgggattgagttggtcccccggctgccctcaactcaatctttggttgggacgtcggaggcggacagaaactctcccgctggaatgtcacttgatgctcaggtccttgagagccccagactgaaggtgtactcaagattgaaaaagggcagactacagatacctacatcggtttcatcccagatggaggtgtcggcaccagttttggatctggtacctgctggtgtttcttctcagttggaggaggcgacccccgttatgaagctggtggctaatatcactagggacattgactgcttgcttccacaacctccaattcaaaaaagaagaactaaacagcttccgccagattttgtcccacgtcgcagtagtcgcttgtcaaagaaaagggaaggcttaaattcaacagtcagacaagtccaggcggagctcatgttgaagttgaacgtcacaaactcacaagtggttgttactgatgaaatgctggaggaatttggacagctgtttgacaaacccctttccaactcttacatcaaggcccctggcagctttgtttggatggccggtcccagataa

SEQ ID NO: 8774 - DNA, 462 bp, Zea mays
  Peptide Sequence Number=SeqID_52149
atgggcaagaacaacaagcgcaagcgtgagccgactcctccatcggaggagtttggtgattcggaatactcagaggaggagttctcctctgagtccgaggggtctccggctcccatccccctgcgtgagtcgtctgacgactcagacgactcccaggggcttgcggcggaggtctggacgtacatccgggccgtcgagcgctccgggctcgaaggctcggatgagtcggagtactcctcggatgaggaggactcggacggcggtgacgagggtgaagacgacgacgacgacgatgacgacgacgacggcgacggtgacggcagcggcagtggcaggggcggcggcgacggcgacggcagcagggacagcaccaagggcgacagcagcaggggcagcaccaagggcagcagcaggggcagcaccaagggcggcggcggcagcaggggcagggccagtggctag

SEQ ID NO: 8775 - DNA, 438 bp, Zea mays
  Peptide Sequence Number=SeqID_52150
atggagtcgacctggtttagagataagtgtatcctcctcaagtacgcttcagtagctcacccgagggtcaatggtcaagtggagggagataatggcttgatcttggaggcatcgagtaagaaggtttttgacaagaacgagaacttgcagggacaagcgggtgatgcctcattaacgttggttgggaaggcttttatagaggggttctactggtcaacaaccaagcgagatggagtcgacctgaagtgtatcctcctcaagtacgcttcagtagctcacccgagggtcaatggtcaagtggaggaagataatggcatgatcttggaggcatcgagtaagaaggagatacatcatcctagtactccgcaagactcgagagaagagtgcaaggtgatagagcatgagatactgcttgtagaagaatatccaactaactag

SEQ ID NO: 8776 - DNA, 1266 bp, Zea mays
  Peptide Sequence Number=SeqID_52151
atggcacatgaagagaaagggaagcttgctgaaatctcaaatctcaaattggggtaccagggcggcggcgcacagggctctcgggcggcgcggcacagggctccccgcgcggcaggcaagaacaagcgcgcgaaacgcggcaaaacgagccattggatcgttgttggagggcagatacggaggggcaagccgagcaccctcgccctctctctcgccctgtgcacgagtccaggtagctccgccgctgctcaccgaagcccgccgtcgagcctgcgcctcgcccgttgcctcgttgagttccacctcgtcgtcagcaactcggggcacctctcggttcgcccccagcccttctggtttgcctggttcacgctcaccggggtcttttctgtgcagccggtgtccgccaccgtcgaccggaggcatcaccgcgtccccaccgtccccccaagaactcatgagtttgcactcgagagttcatctgcgccgccgttagatcgcctcgccgtgttccgcgccctctggtgccctcgcaccgacaaggagcagcccgtggttcctgagtgtgttgccaaagaacttcctgagcaacaacctggcggaggcaatcacctggagagactgcatcgtcgcctgcacaaggagcaggagcgtcgatgccaggagcaggagcagcaggactcttccccctcgcctcagcaggaggtggagtctgggaggcagccttcccctgcacctcagccagagatgccccctgcaccaccacagggcatcccggctgctggaggagacctagacggagacagagacaacgacgacgccggtggcagttcgagcaacaacacggagctatcagaggagcaggagccggagggatggatcgctagacccatcactcgcgacgccgctcgcgggtgtcacttccacgacgctctcgacaccttgctgcatcgggccttcgaccggcacacttggtccatcgagtactattgtgtagtctaccagcatcgtcacgggttatactcggatcagtgggagctacttgcttggtgcgccgttcggacaatgatctccggcggggtaggtgatggccttgacctgaagtactaccctcatcgttcgaccggcagtgctggaggtgtgattgtctcgcctgttggtgagggcaatcctaggctgaacaacatgcacccttaccgttcgtcgccccgtggtcacttcgattatggtacccctaactgcaggacccagatagatttggatccatag

SEQ ID NO: 8777 - DNA, 147 bp, Zea mays
  Peptide Sequence Number=SeqID_52152
atgtacccaagcacctactgcacccacctacatcccaaatccctcactagcaagcacgaatttcggattctccccaatccggttctaaaacaccgtgaactcaaccccgccgtggtcagcccaactcaggtgataggagttgcttga

SEQ ID NO: 8778 - DNA, 249 bp, Zea mays
  Peptide Sequence Number=SeqID_52153
atggctggtggggcgctcggtcatagccaaggtgagggcactgggcacactgcgtgcaggggctactgctgtgccgggctggggggaagttgtcggccatgccgcgccatggggcaagatggcttggtcgcagttgcttggaccttcagatactcgagaccaattgatgcaattcttgaggatcccttggacctatgggttatgggcccacacacgctttcgctgcgccaccttgatcttgttggctga

SEQ ID NO: 8779 - DNA, 76 bp, Zea mays
  Peptide Sequence Number=SeqID_52154
ctcggcgccatagatcttggcgccgagctcgatgccacgtcgacgccgcgtcagctcgtggacgactgcgtgtcag

SEQ ID NO: 8780 - DNA, 333 bp, Zea mays
  Peptide Sequence Number=SeqID_52155
atgaagataaagaagaaggaatttctatcactgaagcaagggagcatatcagtcagcgagtatcgcgacagatttattcaactatcaagatattcgccagatgaagtggctgaggatgaaaggaagattgctagtacccgcgtccaaaacaagcaccagactccaggttttggcaagggattcagcaatgccagggttaatcaagtcagtgctgatgctaccgctgatggagctgacatcgcaattgcaatactatttgattctggtgctacacattcatttatttctgctcgatatgccaacacaaatgagttaccccttcaaaatatgtaa

SEQ ID NO: 8781 - DNA, 168 bp, Zea mays
  Peptide Sequence Number=SeqID_52156
atggggagtcatgatctccgggcaaaatgggaatcacgactcatgggtaatgtgtgcatcctctacagagtgttagaaactggtatattagccaagctcacgtgctcaggaggagatgctggcaacatggaggactttgaggagtttcaggactacgacgagttctag

SEQ ID NO: 8782 - DNA, 774 bp, Zea mays
  Peptide Sequence Number=SeqID_52157
atgccccctgcaccaccacagggcatcccggctactagaggagaccctgacggagacgacgatgacgctagtggtagttcgagccacgacacggagctcttggaggaacaggagatggagggatggatcactatacccatcactcgtgacaccgctcgcgggtgtcacttccacgatgctctcgacaccttgctgcgtcgggccttagaccgacacacttggtctattaagcaccgttgtgtagtctaccagcatcgtcgcgggttatactcggaccagtgggaggctacttgcttggtgcaccatccagacgatgatctccggggtgcagaggccttcttagagcattattctatcactgagagggatactgccgaggcagccatgcaagatgctgcacgatgtgcactctcacagtattgctcgttgttcagcggggtagctgacgacctcaacctgaagtactaccctcatcgttcgacaggcagtgctggaggtgtgattgtctcgctcgttggtgagggcaatcctaggctgaacaacatgatcaacctggtcgccgtgctcaacaccgagctggaccacgcccttgatgaggtgggcaaggttcgagcggaggttgcggaattgcgtgctaagcgcgcagcgcaccactatcaggatggtggttctcctgctcatgtcgggattcagcacccttaccgcttgccgccccgtggtcgctttgattatggcacccctgactgcagtacccaaatagatttggagccatag

SEQ ID NO: 8783 - DNA, 285 bp, Zea mays
  Peptide Sequence Number=SeqID_52158
atgtccgtgcgtttcctggcaatgacccacgcgcccgagccttttctggaccccgccctcgttcactcgcccttccccgctcagttgcgccctcagccaagcaacctcgccctctctcttgctctgcgcacgtgcctagggagttccgccgccactcgccgtggtctcgcgcttgttctgcggtcacagtcgagcccttgccgtatccgttgcctcggggactcaggccattttcctgagtacctctccataaggacctgttcgttgagtgaccacccgggataa

SEQ ID NO: 8784 - DNA, 1405 bp, Zea mays
  Peptide Sequence Number=SeqID_52159
ctccatctccgtctccggcggcgctcgcgcagcacagacgctccacccgctggcgctcaagtccgggcgcgcctcggaggctcgcgtggcgaccgcgctggccgtggcgtacgcgcggtggggcctcgtcgcgcacgcacgccgcgtgttcgacgaagcgccgcgcagggacctggtcctctacaacgccatggtctcctgctatgcctcccacggtctcgcgcgcgaggcctgggcgctctttgccgccgcgcggcgctccgggatcgcccccgacgggttcaccttcagcgccctgctccgtccgccgccgcgccgtggccgccacccaaccgccggcgccgtcgatgacgggctgctgctcaggatgggagccctggcgcacagcctcgtgctcaggctgggtctcctcgcagacgtggtggttgccaccgcgctgctcgacatgtacgccaagtgcggccgggttgacgaggcgcgctgggtgttcgacgctatggcggtcaggaacgtcgtctcatggaacgcgatcgtagtctgctatggtcgggttggtggaggcaaggacgctgttgagctgttccggtggatgctgagagacgggagctgctgcccggatgagctcacgcttgccagtgtgctaagctcgtgcgccagcgtggcggcagcaaacgaggctactcaggttcatgcttatgccataaagagggggtttcacaggtttctgcaggtggccaatgctgttatcacagcgtacggcaagaccggttttgctcgagaggcggggcaaatgtttgctatgatctgcgacccagatgtagttacgtggtcctgtatggtttcgtctttggcgtaccttggactatgcaaggatgcagttcatgtgtttgagagaatgctccaacaaggcgtacagcctgacagcgtcgccttccttggggttctttctgcctgcagccatgccgggctcgttgaagaaggcctgcactatttccttatgatggcgaggggctacaacatcgatccaaattcacagcaccttgcttgtctggttgatctcttggggagagctggtaggattcaagatgcttacaacattgttatcaagctttcttgcgagaacaatgctgatatcgttggagctttccttggtgcctgtaagctgcggggcaaaattgagttggcaaagtgggctgccgataggcttttatgcctggaaccaagtgaggcagtaaattatctgcttatgtctaacgcatttgctgctgcaggagcttggaacgagcttgcagaagtaagaagtgtgatgagacatagtgttgtggacgccttcatagggtgccagtacaggcatcggccttggcatccaccaaggcccaaccgaggctacattggcctgttttag

SEQ ID NO: 8785 - DNA, 720 bp, Zea mays
  Peptide Sequence Number=SeqID_52160
atgggcggtggccgcgaatttggacgagacacgcggcggtcggaggtgaagaagaagcactggccgcttatagtaacaccaggggtgttacagttcaaagaccctgcaccggctcctgcgccgacgggcgaagccgacccgaaggtggtggccgagccggctgccgagccagcagccgaagaccccacagccatggccgggccttcgcaggttctagggtctgggcctgcgcacgcaaccgctactgataatgatatttttgtggtggcttcgatcatggctactgatgaggattcgtttggctatgtgtctaagtgttttgagtctgatgattctgggagttcgattgcgtggatggaggagtcttcagatgaagacttggattattttgcggcgttggatgtggctgcaacggagccttcgccgcgcgcggagggttccaaggaacttccgggcgtgagtactgggtataggcggcggagggcggtggtgaagcggagagtgagtgaagtatcacgaagtggtaagcgttaccgaagcgaggtggagaggggtcgtcttcgtgtgggtgggactggtaagcgagaattgttgtcctcgccgattggggtgagtgtgggtgagggggagctacgaaatctgtttgagggtgaggaactgaggataatgctgttcaactacagggagatgggtaccatcccgaaggttgagccaatgtaa

SEQ ID NO: 8786 - DNA, 537 bp, Zea mays
  Peptide Sequence Number=SeqID_52161
atggggaagcctccatccacacggggttggggtggaaaccccgatggggagcgagagaagcgtcgctgggtggccaagaggatggtgggtaggggcccgaggttggagatgaatgggggcacgtcgatgggcgggagggaacccctggccaccagttctaaaaagtctagaggtctctacggccatcagagttcagaggtctctagggtcattggagcattctcctatagttttcattactcaaattatggaaccatccatataacacattttcatgacaaaaatgcaagttttactggtgagaatgtccgaaagctagttaggagccccagacctagcatgcatgatgagaatgtccgaaaactgtgttttgtgcctgctctaatttgcaactggatgatccttctccattcactgaagctgctcctgaacgtcgcatgggagacgacgtcactcatgggattttggaactcggaccacacatctacctcccgcacacccttggagcctcaagaggtcacccactctcccatttga

SEQ ID NO: 8787 - DNA, 259 bp, Zea mays
  Peptide Sequence Number=SeqID_52162
atgtggccgggccaggcccccagcacttcccatcctctggtgctggcgccggctctcctgactacgccgcccaccaatggcatgcctccatatggcgtgccacctctgaccccgccccagctcctgctttcggggcagtctaccatgacaccatggtccccgttcgctgccggctgggaccctaccgccttcgcctccgcctccgcctacagcaccatggctttggccccaccgccttccgactgggtcatcgactcag

SEQ ID NO: 8788 - DNA, 654 bp, Zea mays
  Peptide Sequence Number=SeqID_52163
atgggggtcaatcaggctaagcctaaatccaagcttcattctgtgtggattatggctgaaaatgtccctgaggaacttcaaaactatcaggctatttgtgaattgggggggaaatctgttaaagaagagttgagactcgaaaacattggggatatgatgtctcaaggcaaatcttctggttggggacctgaattgggtgataacaatgaagacttgaacccgatttctgaagataaaggctatgacaatgatcctataaatgaagatgaagagtttcatgagagtgaagatgacctcttgagttctcaagatttggaggaatttgccaaagatgacgagggggttatacctccatgccaaggaaaaatcagcaaatctcctttgggtgctcaagctgaaggttctggaaaagctgaagctgaaaaacaagttatgaacatggaagtggagcatggtgaaggcattaggaggagcagcagacttgaatccaatgatgatatgaagattgctaacaaagctatggcgagatctatggctaaagatgccttcatgaacaaagaccggatttcaaagatcttatctggaacaattggtctcttccggttagaagtcgatcaagtatcgatatttggaaggagaaaattaagagattga

SEQ ID NO: 8789 - DNA, 489 bp, Zea mays
  Peptide Sequence Number=SeqID_52164
atggcggccgggctggcagggtcacagccgcgcaaggcggcgcaccgtgcgccctcaggcgtcagcgcctcgacggcacgctgctgcctgctggcgaccagtcgccactccctggcgaccagccgccactccctgccccgccacctccggtcgcccgcccctcccctcctcctaggcgctgccacctccggtcacctgcccctcccctcctcccaggtgcagtcgccgcccctctcccggccgtgcgggcctcctgcactgccgccgaggctgcgctgctgccccgcgctggtcgcgtggctgttcgccacctacgcgcccgccgtgccgctcgacccagcactagacgcgaccccggtgcagcccgccgttccggggggcacgatcccggcgttccccgagcagtcggactcgatggtgggttcctcgtccccgtgcccgcttgccccttccccgacgctcctcctcgtctcctccctctatctctaa

SEQ ID NO: 8790 - DNA, 581 bp, Zea mays
  Peptide Sequence Number=SeqID_52165
atggcatacatatctctttttcattgcattcatttagattgcaacctcgctaacggagagtacgtgctcatccccgagcacggagctgccaaagaggaagcccaggagccagctcaagagcctatcaccgaggatctccccgcagccccagcttttgaaggcccctctggcagtgattcggtctcctcgcgcgcgtggatagcggctctctgtgcggtgggccaaggcgatttgggtagtcctccaccggtgctgctcttcgtgttgccggtgtccgctggctcgaggtgtgaaagtcaatactcgccggggtccctgggggttgatgcgagcgatcttggagcctggagtgcactggtgactccagaatttctcaccatcgccgtgcgtccgctgcgcgccgcgggcaagcctgggcaccgctcagatttcggtatgaacctcgtcaatacattcgcaatagtaccgtcttcgtatatgagtgttccgattgaagttcgagagcagaaaattgagattggcgggcaccggcgatggcgccgccgtgccaacgttgctccgccgcgcgcggtcgggcgatg

SEQ ID NO: 8791 - DNA, 216 bp, Zea mays
  Peptide Sequence Number=SeqID_52166
atggtgtacctggtagcccggtctacgcgcggtggcgggcggccgaagtccggcgagggtgatcccgctgctccggtgaggcagggtctcggttcttgcttggaaaagcttcacggcccacggaggagctatccaggggctcgggtgaggctagggatctacgggaatggcgggccatggtggccggtgctcgggtggctcaggcgggtggcgtag

SEQ ID NO: 8792 - DNA, 1443 bp, Zea mays
  Peptide Sequence Number=SeqID_52167
atggagaaggaccgtcaagacgctgagcagaaacgccgggcgatcgtcaggatggtggatccaatgcgcaaggcgaaacgggcgcgggggagcgcgaaggctgctgcctctggcggtagcaagccggtgccggctgcgaaaacagccgcccccgggcacggcaaggcgtcggcgagcacgaaggctgtcgcctctggcagaagcaagctgcccccgggcggggtcgtgaaagggcgaaggccgctttcgccggcgcgacgcgttgctgacttcgacacggacatcagtgtcgacgattatcttgttggttcgggtgaagggcaactggctgttgtcccgcctccagtggtgaccacttcgccaacggcgatggtgagggcgaagggtgccgcacgggaccagtgggccactttctgcgcaagcggcgaaattctgtcggccgctgccgctaaggacgtcgtgggctccatgtctcagcggctgagggaggcgtcgcaacagctgtcacaacagttgaagcatgcagccgactttgccgatctcgtcgtgtcgggtgccctgactgcggacgttgctgccgaggtagaacgtttctgggcacagcatgcggatgctgtgcgggagaagtcggctgcggaaagcaagaaccgcaggctgatggagaaggtggccgccctggaggccgagaagacggatctccggcgccagctggtggaggagcggagggaggcgaacaaggccatcgtcgatgcgcaggctgcgcagtccgaagccaaagtggcgcaggcggagggcagtctcgcctgcgaacaagctgaggaactggaggcgaggttcaacgccctgtgcggccgcgtggacaaggctgagtcctcgacgcgcgcggaggtggagcgaacgcacgcgcagtttgtggatgcgtaccgcgagctgggtgcgcggactgctgacttcgaggtgcctggccaagaagcgggccttcgcttcctcgaatggttgcaggaggagctgctggtactcccgaccattgtgacgggcttcatgtccttcgcctccctcgtcacctgcgaaggggccatgaatgctttgtcccgcgaggggtgcaggcattacgaggtcttcgaccaggcggacgaaaactttgaatgtgaaatcttcaaggtcgaagaccctatggtgaagcagtcagcgggggcactttttgataggatgtggggtccgcacgaccgagaggctgtcagggatcggtcggaccgggcgatagagcagatggctcatgccgaagacgtcgaggaccttgttggtctggacggcgcgctacccgaggccgcggagggcggtccggtgccaccgtcagatgccggtgaaggcacctcggcgatccctgcgcccgctgcgaccggcgaatgtaacacccctggtgttactataactaaaacttga

SEQ ID NO: 8793 - DNA, 702 bp, Zea mays
  Peptide Sequence Number=SeqID_52168
atgaccctgggtacgtccgttacatggccaaggctcgggttacgctcccgaggtaccctaggaaatttccgagaccagcgggaacgatttgtaatggaatcccaccggagggaggcaccgagccctcggaccctatcaaatgggtccgggtccagcaaatcacctgcagaaaacagcactattcaccctattccgacaactgtgccaaccaccagggtgaaactaacgacaggagctccacctcgcccgacctcaggcctcggcctcggcctcggcctcgagagaaggtctccgcctcgcccaaccccaggcctcagcctcagcctcagcctcggcctggggagaaggtctccgcctcgcccgacctcaggcctcgacctcatccttggcctcaggaggagtcacaacctcgcccgacctcagcctcggcctcaggagaagtctccgcctcgcccgaccttggcctcgaaccgactacaccacaggggatacatcattaccctacccctagctagctgcctcaggctacgaaggaacaagactggtgtcccatctagattactccagcaacaggggatgtccaaggccttcctaggggggagggcggaggcgaaggaggccaactcagacggctcactccaaggccaaaccctctctcgcgaagcttgtaacccctactacgagcaccccggtgcaagataa

SEQ ID NO: 8794 - DNA, 1155 bp, Zea mays
  Peptide Sequence Number=SeqID_52169
atggcagggttggtgaaacgggtcccgcttgtcgatggggccgaggtctccaggaccacacagggtgcaggcggggtcaacggtgccgtgcatggcgtgggaaggttcgacatggctgcacgcggtgcaggaagggtcaacggggctatgcgaggggcgggaagaatggcgagcgggggcatcgatgccgacggagccgcacacgaaggcggtgaagccgcacttggcatgggcaacggtgcgaggcgaggtgcctggggaacgggtactcaaattagactcaaggaggtagttgagattggtgggtggggaggagccagcaaggggaaacacatcttcgtcgaggatgacatgacgagagatgatgatgcaatggaaggtgagatcaagacagcaataccccttgtggttaggagagtagccaaggaagaggtagcgagtggagtggggagacagcttgtgaggggtagtggcggaagtgttgggatagcaggcacaaccgaacaccagaagggcctgtgcccagtagctggcagggagatactcctagaagaggaggcagtggatcatgttggtggtagtgcaaatcatgcgctctgccgggccattctgggcagaggtgtatgggaacgagaggcgcaactggacgccatagaggactccaactccaactcttcgctctcgggaattttcggaagccggcgcgctataattcaccggactgtccggtgtgcaccggacatgtccggtgctccaaggaagcgcggtctccggaactcgccagcctcgggttcgcgcggcagccgctccgctaaaattcaccggactgtccggtgtgcaccggactgtccggtgtaccagcggagcaacggctcttttcggcgccaacggctccctgcggtgcatttaatgcgcgcgcagcgcgcacagatgtcagacatgcccataccggtgcaccggacatcaaacagtacatgtccggtgtgcaccggacactcaggagggcccagaagtcagaagctccaacggtcagaatccaatggtagtgatgacgtggcaggggcaccggactgtccggtgtgcaccggactgtcccggtgcgccatcgcgcagacgcctccagccaacggtcaagtttggtggttggggctataa

SEQ ID NO: 8795 - DNA, 141 bp, Zea mays
  Peptide Sequence Number=SeqID_52170
atggcgccttacacttcacatgaactcccacctttggtgagttcatgccacattattccccacgacttgttgagctatgaacgagaagaacaggtgatcgaagaggagccgcctaattttgaggcattcgacttgatctag

SEQ ID NO: 8796 - DNA, 1008 bp, Zea mays
  Peptide Sequence Number=SeqID_52171
gaagggatgaacgtcgtcgagggggtttcgaccgtgcaggggagggacagtgggttcggcgtcgagcagggaacgacgcgatcctcgtgctgcgttcaacggagctccggtggggttccacggatggcgaacggcacgggctccggcgacgggcacggctgctccggcgatgaaggacacggtggccggctctacggtggcgcacggcaagagaacatgagagaaagtgaggagcaggcgaagagcagaggagtaaatggacagcgcttggtcgggcttcggtccttgggcacggcgtgttcctggcttgtgcgcggcgtcggctttcggtcgggctcggcgtgcaggggcgggatcggtgccgtcggcggctcggtcggcttcgagggtcacgcagctgggcgcggtcgcgggctgctcggcctcgcactggttcctggcggcgcggtcagcatcgggtcctgtgggactcgaccgcggccggcgtcgggcttggcgtcctgcgcgtgggcgcgatgtttcagaccggccgggcagcatcctgtgaaggcccttcctcggtcccgcccatcggtttcttcccgcgactgtcggcggcgtcttccccgggataaccactcgccccatgatccttgctgcaccgtcttccgcttcacgaacgaatgcggcgggatctcggccacgcaaatccagcgcgaaggcaggacttcgcaccagctacccgccccgggagggcatctcgcgagggcatacttcgcccagcgcccagccatgtgccaagggccataccccatacccgacaaattcctcaacaagatcgcacccgctactcatgcgtgcagcgcaccgaagggctccttcatcctcatcatcctccgctacctcaaactgcggggaaccaactccacgacttccatcgaagtcttgccggtcttcggcgtaaatgtgcacgacccaaattgtgcaatctcatgtccaattttcctcttttgccaatgcagacaataa

SEQ ID NO: 8797 - DNA, 181 bp, Zea mays
  Peptide Sequence Number=SeqID_52172
atgtcggctgcgaaactggccgcgcccggatccggcaagtcgtcggcgagcgagaagacagccgccactagcgggaccaagcctcccccggtcgaggctgtgaaagtacgggagctgccctcaccgggaaaacatgttgccgacttcggcacgaacatcagcgtggaggactattttgttg

SEQ ID NO: 8798 - DNA, 219 bp, Zea mays
  Peptide Sequence Number=SeqID_52173
atggctgttggactagtggccttcctcttctggcttcgggcttctcgaagagaaagggtctcctggtttgggtccaatggctacagagcggcagcccctgtcgctgaagctttcttcggtggcatgatgaagctcatttctattttattatcatggaaaaatagaaatgatatcaagttacaaatgtaccttcggcttgaaagaagtactcaagtttaa

SEQ ID NO: 8799 - DNA, 954 bp, Zea mays
  Peptide Sequence Number=SeqID_52174
atgccagattcatcagatgcaatcgatgtattatttgatggtaaggagttcactgagcttcgtggtcagcgtataaagacccataacacacatggaaccggttgcacattagcatcatgtattgctgctgaattagcaaaaggtgcaacaatgctgcacgctgttcaggttgcaaagcaatttgtggagtctgctctttatcacagcaaagatcttgtgattggaaatggacctcagggaccttttgaccacctcttcgaactcaagtctccattatacaagacgggatcactgcaaaagttcaatccaggtgacctcttcctgtatgcagtgacagactctgggatgaacaagaagtggggtcgttcgataaaagacgccgtgaaagctgccattgaaggtggcgctaccattgtccaattgagagaaaaagacgcagagacacgggagttcttggaagctgccaaggcttgtgtggaaatctgcaagtctagtggagtgccgctactgatcaatgaccgcatagatgttgctctggcatgcaacgcagacggcgtccatgttggtcaatcagacatgccagcatgggaagcacgggagctcctagggcctggaaaaatcattggcgtctcatgtaaaaccctggcccaagccgagcaggcgtggaaggatggtgcaaactacatcggctgtggcggtgtcttcccaaccagaacgaaggcagccaatcccaccctagggattgagggactgaggaccgtctgcttggcttcgaagctaccagtggtggccatcggcggcatcaatgccggaaatgcagtttcggtaatggagcttgggctcccaaatctgaaaggtgtggctgtggtctctgctttgtttgaccgggaatgtgtcgcgacggagacaagaaacctcagatccatcctggagaatgctcactccagatcttag

SEQ ID NO: 8800 - DNA, 98 bp, Zea mays
  Peptide Sequence Number=SeqID_52175
atggaggggctggcggccgtgctgctcctctacgcgctcctcgtgttcgccctcgagtcgccgcgcggtctccacccccgctctccggggggctggcg

SEQ ID NO: 8801 - DNA, 804 bp, Zea mays
  Peptide Sequence Number=SeqID_52176
atggcccgtatcaggtgcactgcacataagtctgtgatcccccttttgccttctcgcctggcggagcgtccactacgtcgcacggtgccagacggagacgacgacgacgccggtggcagttcgagccacggcacggagctctcggaggagccagagccggagggatggatcgctagacccatcactcgtgacgccgctcatgggtgtcacttccatgacgctctcgacaccctgttgtgtcgacacacttggtccatcgattaccgttgtgtagtctaccagcattgtcgcgggttatacctggaccagtgggaggctacttgcttggtgcgccgtccggacgatgatctccggggtgcagaggccttcttagagcactattctattactgagagggatactgccgaggcagccatgcaagatgcagcacgacaggcactttctcagtattgctcgttgttcagcggggtagctgatggcttcgatctgaagtactaccctcgtcgttcgaccggtagtgcgggaggtgtgattgcctcgccagttggtgagggcaatcctaggctgaacaacatggtcaacctggccaccgtactcaacacagagttggaccacacccttgatgagttgggcaaggttcgggcggaggttgcgaaattgcgtgctgagtgcgcagcacgccactatctggatggtggttctcccgcccccgtcgggattcagcacccttaccgttcaccgccctgtggtcgcttcgactatggtaccccaggctgcaggaccctgatagatttggatccctag

SEQ ID NO: 8802 - DNA, 160 bp, Zea mays
  Peptide Sequence Number=SeqID_52177
atgtccggtgcaccagaggactccaacttcaaactcgtcaccttcgggaaattccagaggcgactccgctataattcaccggactgtccgcggggcaacggctactacggcgccaacggctacctgcaggcgcaattaatgcgcgccaacgcgcgcagag

SEQ ID NO: 8803 - DNA, 573 bp, Zea mays
  Peptide Sequence Number=SeqID_52178
atggagcttgggaggcgccatcattgcctatctggcggagctggtcagatgggacaccggtcttgttctctgcggcccgagtcggttcggggtggagtggtgatggcgctccctgttgacgtggcgggcccgcgcccgaggccgggcgacgtgggggctcctccgaagctggggtcgtatctgtcttccgttgccgaggctgagtccgagcccctgggtcgggcgaggcggaagtcgttcggcagaggccagggcggagttcgtcgtcttccggggccgagcccgagtccgagccctggggtcgggcggagcggagttcgccgtcttccgggtcttagcccgagtccgagccctggggtcgggcggagcggagttcgccgtcttccgggtcttagcccgagtccgagccctggggtcgggcggagcggagttcgccgtcttccgggtcttagcccgagtccgagccctggggtcgggcggagcggagttcgccgtcttccgggtcttagcccgagtccgagccctggggtcgggcggagcggagttccctatggcgcccctggcgaggcctga

SEQ ID NO: 8804 - DNA, 420 bp, Zea mays
  Peptide Sequence Number=SeqID_52179
atgacggtggcagacgcgcgggagcagtgggcacgtcgacagccaagctcacgtcccatctgggggcagcgagagagccccctctcacggtgtgaagacaacgcgcccgtgatccattcctcgaacggctcgcgcacgcccaacggctgccccgccaactactcgccccgtcgcattaactccgcggctggacagggactgggaaagggggataccccgaaagggatccttccccgtgaaggaaccaggctccgagcctcctcactgatcaggggttcgaaggctggccccccgaagggttcaacagccgccttagatcgcgtgggccctacacccactactggtcagaggttcgaaggccggccccccgaagggtcccacggccgcctcaggctactcgggctccgtgcccattactga

SEQ ID NO: 8805 - DNA, 804 bp, Zea mays
  Peptide Sequence Number=SeqID_52180
atggtgctgatgaacggaactggagatggacagacgaagcaagtatcgggacaaaggatggtcgtcaagcctgatagatcaaggactatcttaactggccacatgccctggaaatgggacagggtcgggtgcgcttgcagtagggggttacaagcgtccacgcgggtgagggaagcgagcggccccaagagagcgcctatccccgtcctcgtccccgcgcggccaacattctctaagaaggctctggtccttccttttataggcaggccgagtccgagcccctggggtcgggcgaagcggaggtcgtcagcagaggccgagtctgagcccgtgggtcgggcgaagcggaggtcgtcagcagaggccgagtccgagcccctgggtcgggcgaggcggaggtcgtccgcagaggccgagtccgagcccctggggtcgggcgaagcggagttcgtcgtcttccagggccttagcccgagtccgagccctgggtcgggcgaagcggagttcgtcgtcttccggggcttagcccgagttcgccgtcttccggggcttagcccgagtccgagccctgggtcgggcggagcggagttcgccgtcttccggggaggcccgagtccgagccctgggtcgggcggagcggagttcgccgtcttccggggcttagcccgagttcgccgtctttcggggcttagcccgagtccgagccctgggtcgggcggagcggagttcgccgtcttccggggcttagcccgagtccgagccctgggtcgggcggagcggagttcgccgtcttccggggcttag

SEQ ID NO: 8806 - DNA, 2004 bp, Zea mays
  Peptide Sequence Number=SeqID_52181
atgggggtgtctgataattttgctgtggatttgatgaggacgtgcgcagcccccgggggaaggatgtcttcgcccgagctcctggagtcttcggcgcgaatgctggaggttaccgggggtcggtggcctaagaatgttccgatcccccgtgcggctggtgaagacttctatacgtcccgcatggcacgcgacttgaggggtgtttcctacggacggaatattgctgctgttgtgtcgacagtgatgaacaaggatcgtcaagacgctgcgcagaagcgtcgggccatcgttaggatggcagatcctgcgcgcgaggcaaagagggcgcgggggagcgtgaaggctactgcctccggcagtagcaagccagtggcatctgcgaaggcaactgctcccagacccagcaaggcgtcggcaagcgcgaaggctgccgcctctagcggaggcaggcctcccctgggcgaagctacgaaagggcaggagctgccttcgccggggagacgtgttgctgacttcggcacgaatatcattgttgaggattatcttgttggtaagtttttttttgaccgaagatatgttgcagggtcgggtgagggacagttggttgttgtcccgccttcggtggcaaccacttcgccatcggcggtggtaagggcgaagggggtcacgcaggacccgtgggctgccttctgcgcgagcggcgagattccgacagccgctgcctctaaggacgtggcggacaccatgtcccaacggctgcgggaggtgtcgcagcagctgatgcagcagttgaagcaagcggccgacttcacagatcgcgttgcgtcgggtgtcctgactgcggacgtggctgccgatgtcaaaaggcttcggacgcagcatgcggatgccgtccgggagaagtcagctgcggaaactggcggaggagaggaggggaggcgaatcaggccatcgctgaggcataggctgcgcaagcggaggccaaagtggcgtggggcagagagcagccttgccagtcaatgcgtcgaggagcaggaggtaaggttcaatgccctgcgcagccgtgtggacaaggccgaggcctcgacgcgctcggaagttgagcggacacacgcacagttcgtgggctcgtaccgcgagctgggtgcacggactgctgacttcgagatacctgacggagaggcgggccttcgcttcctagaatggttgcaggaggagctgctagtgctcccgaccattgtggagggttttatgtacttcgcctccctcgtcacctgcgagggggccatgaatgcattgtcctgcgagggctgcaggcactacgaggtcttcgaccaatcagacgagaactttgagcgtgacatctttaaggccaaagaccccgtggtgaagcagtcagcaggggcactgttcgataggatgtggggtccgcatggtcgggagtcggtcagggagcgatccgaccgggcgagagaacagatggagcgtgccgaggatgtcgaagaccttggagatctggtcggcgcgccgcccaaggctgaggtcaacccggtgccgccttcgagtgccggtgaaggctcctcggctgcacccgtgcctaccatggccggtgaaggccctttgccagcccttgtgccgacagccgaagatcccccgaaggtggtggctgagccggcagccgaagaccccatggtcgcggccgagccttcgcaggttcaagattttgggcccgcgcacgcaaccgctactgtcaatgctaattttgtggcggcttcgaccgtggttgctgaggatgattctgatgattctgtgtctaagtgttttgagtctgatgattctgggagttcgattgtgtggacagaggagtcttcggatgaggatttggattattttgcggcattggacgtggctacgatggaggcctcaccgcgcgtaatgggtgatgacgatcctccgggtgcgagtgttgggcataggcggcgaagggcggtggcgaagcggagg

SEQ ID NO: 8807 - DNA, 363 bp, Zea mays
  Peptide Sequence Number=SeqID_52182
atgggcaagagcaagaaaggcggaagctcgtcgcaccactccggcgacaagcggaagcgtgagccgacccctctctcggaggacttcggcgattccgagtactcggaggaggagttttcctccgagtccgaggggtcgccagtcgtcgagcgctacgggctcgagggctcggatgagtcggaggtctcctcggacgaggagaactcatctgactcgtccgaggaggggagcggcggtgacggcgacggcgacggcgacgacggaggcgacggtgatggtgacgacgacggcagcaagggcgacggcaagggcgacggcaagggcggcagcggcaaggccagtggcaaagcgccactggcttag

SEQ ID NO: 8808 - DNA, 1929 bp, Zea mays
  Peptide Sequence Number=SeqID_52183
atggccgatcctgacgacctcggccgccgcctcgccgcggtcgccgtatccgagtctcctaccgccgccgcggctgcgctggagagcagcaacaacaacctgttccaggtgatgcgcgccgtggaggacgcggaggccaccatccgccagcagctggaggagaacagccggttgaaggacgagctgatgctcaagacgcgggagctccacagaattaggtcagaagccacagaccaagcttcctctcatgggatccgtatccatcaggatcgcgctcttggtgcccacacagacacctcctccactgctcccatcaggactaccgctacagcagcagaggccttcgaatggggagctggggatgccggcatcaaccacaagtaccttgaggccaaccaggctaatggaattccccgtaaatcaccgagcgctcccgatagcgctttcccatctcagctatctaccccgtcttcgcgatccctttcaccaactaggcaccacaaagaaacagactatgattctaggctcaacttatccggacaaggcgcactgcctgtttcagacctcaactcaaacgtcgtcatctggaagcaggatctccttgttaaggtcaaagaacaaggggaggagattgcacagctgagaaggcatctttctgactactctgtcaaggaggcccaaatacttaatgagaaacatgtcctggaaaaacgcattgcatatatgcgcatggcatttgatcagcagcagcaagatctggttgatgctgcatcgaaagctttgtcctacagacaggatattatcgaagaaaacatccgtcttacatatgcattgcaggcagcacatcaagagagatctacattcgtatcttctttattgcctcttctatcagaatataaccttcagcctcctgttcttgatgctcagtctattgttagcaatctgaaggttctgtttaagcatttgcaagaaaaacttattattactgaggagaagctgaaggaatcacaataccagattactccttggcatgctgaatcttcaaataatacaagtgctgctgcacagtcgccttctcatcctcctggaaatgcattgatcaaagccaaccttgacattgtgccccagcaagcatattctcatgtacattctccagtttcttctcctgttcaaactaggcgtgactgggatttgttagggaatgaaaatcgtcaggtcattcgaagtgaggttgccacaacaagtgcagagcatgataatgttgggaggacctctccttcaaccagcagccataatatgaaggatgcccctcaaagaaccgatcatgattcccgtgctgttcgatttaacattgaatccaaggatcaaaacccatcattcaaggaccttattaagagtgatgcctcagaaagtctggagggagctgaggcccaaattccacaagaactttctgcgcagcaggattctggaggctcacctaatttgacatctggtcttgatgacgcaaatccaccatacccttatcttcctactgtccttgaggagcctagttcttctttttccgaagttgcagaggatgatccgcttccagccatagaaggactgcgaatcacaggtgaagcctttcctggaagagaacttcaagcaagtgggtactctatccatggaaccacaagttgtaattttgagtgggtacgccatttggacgatggatcaataaattttatagaaggtgcacggcagcccacctatttagtatctgctgatgatgtggactttgtactagcgattgaagtccagcctctggatgacaaaaaaaggaaggcctctgtcatggaccttcggtccatggggatagctgtcttctccggcgaggttatacccctctaccgcaggcttggttctagggtagcagccctaggcgcttga

SEQ ID NO: 8809 - DNA, 579 bp, Zea mays
  Peptide Sequence Number=SeqID_52184
ctatccccatggacacctggtatcagctccaggttatcctcaccaccaccagccgccacgccatctgccgccgcaacgccctcccacccgccctctccaactccagatgcattcactcggctcgaagagaagtgggatcaattcgttgtgatgttccaccgctacaaggagaagacagagaaggaactccaagcagcggtgcggcttcaggcggcagcgcgagggttcctagcacgccgtcaggtacagtcccttcgtggggagaagcaccttgctgtggcctccagggccaccccatggccgtcatcacatgagcaggctgtcgtgcgcctgcaagccgcagtgcgcggcttccttgttaggcgggcggtgcggaagctgtacttgctgatcagctcatcgctgcaccaactcgcagcctgcgtgcccaaccaccaggtctcgtctatactttttgaaccccctgcagaagtcgagatctggctcgaggacgagctggtcctcaagggagggggagatgtcatgggcatcatagggagcgagaggcaacagccaggctcggataaggctagagaataa

SEQ ID NO: 8810 - DNA, 504 bp, Zea mays
  Peptide Sequence Number=SeqID_52185
atggggatagctgtcttctccggcgaggttatacccctctacggttctaggggcgagattgtgaaggtttatgctaatgatcaaagaaaaattacatgtgaccctgaaaccaaggagcatattaagaaaattctctctctggggcatgtctcttatgaagttctattacctgttagatttttagatatgtgggaaccagctattttggcaataaagagggaaggttacagcgttaagtgtaatggacagcgcggtgtcgttgtcatggagaaatttcagcaagcgatgaccatttcatctcaatcttccatcatggtgaacttgatcaatatcccatttgggcgtcctactgagttttcaattttgtctgctgatggtgctgagtacaatttaaagcctgcagagaatgccccatcacgagatgccattgttctaatactaaggctattcaggatgaaggtcatcagcgtgccaggaaaaagaattcgagataatataccctag

SEQ ID NO: 8811 - DNA, 282 bp, Zea mays
  Peptide Sequence Number=SeqID_52186
atgaagcatttgagaacaagtccccaacatcggccggatcggccgggcaccgacctgtcctgggacgagctggcagtccaggtgggagggatcactggggaaacttttgtccctgagtccctgatcctcccccagaacatccctgcgctctgcgacgacctagggctgaggacggcgatcttggccacgctgccgaccctcgaccagagcggcgtggcggttcaccagactggcggggcgggacccccacagcgggatccggatttcagatgcaccgactag

SEQ ID NO: 8812 - DNA, 1080 bp, Zea mays
  Peptide Sequence Number=SeqID_52187
atgtcgttcgggctggtgaaccagcagcacaggcacaatctcctctacaacgacgcgatccggcgcttcaagaggtcgctgaccacgaactctggcaccagggatggcttggtcctccacaacttgcgatcaagcactggcccatcgcttggcaggacgaggcggtcattggcctcggcgctgacaatcacccagtctctacaccagttttcccacctcgcgccgccgaggcacgaagaagtggcggaagagagaagtgcagggagccacccctatgaacatctcgcagaggtggatgaagatggccgcctggagaacggagtggggcgtgaggtgctgaagctaaagcccgaactcctccagcagcagcaagaagaagggcgagattggcagcgccaacccacagaagatgtaggaggtgaacagcacgaactccccagcggtgagatcgccgaggggagcggcgccggcgcggattctttcggtgagccccggcgcgctccacccgagcaggctgcacaccaggttaagcgcttccttagactagaaatggtcagggtgaccaagcgaagccatggcttgtgctgcagcgcgagtggggagcagaggagcaagaaggcaaaggggcgcaagcgattgggagagaatgcgaaaggcaacgaggtgccccgcgcgtggcacgacgaaaccaccaggcgtgggggccgcgggtcagtcagccgcgaggacagatatggtagttggtgtgacctaaggctcgcatcctcccctgaggtgggcccgggggccactgttggtaccctgaaactaggtagccgggtgcggatcgctggcaccactcccagcagatgcctgctgctgagagccagacccgtcggtgggcctggaaactggcggaggagaccttctagtgaccctggaagcgagatcgccgctcttgctgctgctgctggtgcccctggggggatatcacccccaaattgtggtggtggcggtgggaccgatggtggtggtggtggtggtggcgatgggcccgatggtggtggtggcggcgggaccggaggactgatgcgcctctag

SEQ ID NO: 8813 - DNA, 2502 bp, Zea mays
  Peptide Sequence Number=SeqID_52188
atggcgaccttggccacgctgccgaccctcgacgagagcgacgtggcggtttgccagaccggcgagcgagacccccaccacaggatccggatttcagatgcaccggctggaggtccccagcccaccggtgcggctcccagcgcccccgccgtggcccccagccccttggacaagggggcaccagcagcagcaacaatagcagtagcagcagtagcaagagcggcgatctcgcttctaggggcttcttccccctctgctcccaaggacacacctcctccacaggtttccaggcccaccgacgggtctggctctcagcagcaggcatctgctgggagtggtgccagcgatccgcccccggctgctaccaagacaacgccagcagcttcccatgccccagctgggggtccggcggcagcggctccagcgtcgggcagtgtcgcagcggtggaggaggccccagttggggggtctacgccccctccagacgctgggggcgacgtaggaggcacatccagctccaaccctctgcctgctcctgaggagatggaggtggtgttcgggcgacgaatctggtctggtgccgagcaagaagctgcgccagtccccctcccccgtatgctgtcccgcgcccaccaggtccttagcgacactggggcagcaatcttacgggagtgggaggcgcttgaggctgagcaccagcgcctcagcgactgggagctggaggcgtctcggagggagaagaaggtgaccaggagggaggaggccgtgtctcagcgggaggccctcacaacagaataccaggccaagctgagtgccctggaccagaccctggaagcccagcggggaagaaatgcttactcggcggggcgtactgttggccgagcacgagccgaggcggaggataaagagaagaagctggaggagcgaatccggcagttccaggcggcgcaggcagtggaggccaccaggaaggcccttgaagatcttcaggcggagcaacacgccgaggtccagcgcatcgccgcatgggccggcgaggcgagcacgacactggtgccgctagggatgagccccatcccggtgtcggagctgtcgacgtctatctccgacgcgctcccggtgctggactctgccgctgttcgcctccaatgcctggaccagattcttggtgcccgcctggaggcagagggcggcaagctctgccgggcggtgattgaatacgtcttgacatgcttccggagccacgacccgaccatatctttggagccggtgatcgctggtccggaggccgccactaaagacgctacccgagagagcgaaccggcgcccaaggtgggtgactcatgggcccaggcccccatgccagagactgggctgtcggtttcggcgggggcgaagaggcgcactaccgcaggcagtggcgcgctcttcacgcgtcggttcgccttcttcgcacacagaaaccagcgcgccaggtacatgacatgtgggcctgggcccccatgccataggttgaaccgctggttgcggcgaagccgagggggcgccctaccacggagcggtagcacgctccttgtgcggcggttcgccttcttgaccgttggtcgtggcgaagatgaaggggcgcactaccgtggggcggtggcatgctccttgtgcattggttcgccttcttcgcactcgaagaccagcgcgccagctgatgttcaccagcctcgcggtggtggagagcgagctgagccggggttccgcctctcacatgggctggtgaccctcctcttcctccagcattcggaggaaaaggatgatcaccagccttgtgaaggttggaggcaaacttcggctacgcggtcccggccagaccgcaagcacctcctgtcaccatgctcccagctccatggcttggatggtcttgtcctcacccccgtaggagggcgggggcaaggacctcttcgccatggggcacgcgctgaggtggccgccgtcactggcaagctgccggtgcagaggtggtcgccgctgctggtgaggctgcccagtgcagaggtggtcgcctccgctggcgagccgctcggtgcagaggtggtcgcctccgctggcgagccgctcggagcagagaccagcatacctaagaaagagttggcaatggcccccaggaggcccacggtacgggaccaggctgagtggctacatggctccggaccaccccaggagacaaatgtctattctctagttccagaccccaaggctaagcggccacacaggctccggaccaccccatggaacgggctcccgctctttagagccgacccccaggctgtcgggcactcctacttttgcagagaggtcctaaactgcaagcctggctattcaattcagatgtcatcataccaacaggccgggcttatgagggcggacctcaccgggttggcgtacatgtatgcgttacctagttacaaaagggagaaaaattcgacccctcagacttgctcctatggatag

SEQ ID NO: 8814 - DNA, 258 bp, Zea mays
  Peptide Sequence Number=SeqID_52189
atggcgctcggcacccagtgtctctgctcacccttggcgaccgaacagtgcccgagctccctcccctgtggcctccgctcggtgcgcccctctctgctcctctgccgtgtccctgctagcgcctgccgtcaaccacccgccgtccgagcagacaccgggcgccagcaaactacgtggaggctagctagaggtgccggggatccagccgcacgcatcgcgtccctcggctggcgtgattcaccaccggagggccggtga

SEQ ID NO: 8815 - DNA, 282 bp, Zea mays
  Peptide Sequence Number=SeqID_52190
atggctcgaactgccaccggcgtcgtcgtcgtctccatctccatcaagggggcatatctggctgaggtgcaggggaaggcggcctctcagactccacctcctgctgaggcgagggggaagagtcctgctgctgctcctagcgtcggcgctcctgctcctcgtgcaggcgacgatgcagtctctccaggtgactggactgacctggcaccgtgcgacgcagtggacacttcgccaagcgagaaggcaaaaaggggatcacagacttacgcgcagtgcatctaa

SEQ ID NO: 8816 - DNA, 666 bp, Zea mays
  Peptide Sequence Number=SeqID_52191
atggagctctcggaggagctggagccagagggatggatcgctagacccatcactcgcgacgccgctcgcgggtgtcacttgcacgacactctggacaccttgctgcgtcgggcctttgaccgacacacttggtctatcgagtaccgttgtctagtctaccagcaccatcgcaagttatacccggaccagtgggaggctacttgcttggtgcgccgtccggacgatgatcttcggggtgcagtggtcttctcagagcattattctattactgagacagatactgccgaggcagccatgcaagatgcaacacgacgtgcactttctcagtattgctcattgttcagcggggtagatgatggccttgacctgaagtactaccctcgtcattcgaccggtagtgttgtatgtgtgattgtctcgcctattggtgcaggaaatcctaggctaaatagcatggtcaacctggccatcatgctcaacaccgagctgaaccacgcccttgacgagttgggcaaggttcgggcggagattgcggaattgcgtgctaagtgtgtagcacgccactatctggatggtggttctctctcccctgtcgagattcagcacccttaccgttcaccgccccatggtcgcttcgagtatggtacccctgactacaggacctag

SEQ ID NO: 8817 - DNA, 1554 bp, Zea mays
  Peptide Sequence Number=SeqID_52192
atgtcttcttcctcgtccactgcgagtgcgtcgtcggccgatccatcgtccgaggataccttgagtgatttggcggagatgcagcagcttggatattttggtgatggcgtcgggcgggttccgggcatagaggaaatccctgagcctgagggagatcttcgtctcccggcgcatcgcttcgtggtggaggtcttgcagaggttcggcgtgcaggtccaccaattgacgcataacgccgtggtggcgctggcgaactcccgaggagaggatgtcttcgcccgagctccgggaaacttctgcgcgaatgctaaagaggtctccatggatgattgtgtggatgactaccttgtgggtgggctcatgatgttcgacacccatacagggcggggacttgtcgggtcgaaagctgggcaactggctgttgttccggcgccggtggcggctaagtcggtcgcggcgacgaccgaggcgaaggggtcttcgcaggacccatggtccaagttttgcgccagcggcaagattgcttcggccgccgtcgctaaggacgtggcgggctcggttgcgcggccgctgaagcatgcaacgcagcagctgaagcatggcggggccttcgccgaacatgttgcgtcgggcgccttgaccatggagttcgctgccgaaaggcgacggctcgaggggaggattgaacacctccggacgcagcacactgtggctgtgtgggacaaatcagccacggagaacaagagccgcaagctgatggagaagttgtcggctgcggaggacgaaaaagaggacctcggccgtcggctggcggtggaaaaggaggatgcagacaaggcctgtgcggaggcccaggccacacatgtcgaggccaaacttgtgcgcgctgaggccaacctcgctctccaacgcgctgcggaggcggaggcgaaccgcaatggcctgcgcggatgcttggacaaagcggagacctctaccgcacagaggtcaaccgagcgcatgcgttgctcgtggacgcgtaccgaaagcttggaggaactggaggtgcttccgacgattgtgacgggcctcatgtccttcgcctcgctcatcacctatgaaggggccgttaatgccttgtcccgtgagggatgcaggcacttcaaagtatttgaccgatcggacgaagacttcgaacgcggaatcttccaggtcgaagacccggtgctaaagcgatctgctggggcgctttatggtaggatgtggggccctcacggccgtgatactgtccaggaaaggtccgaccgggcgatggagcagataccgcatgatgaggaggtcgaagacctggagagcacgttgcctctggcggtggatgcgagggtagggattgaggagcagccggcgccgccgactgatgctggggagggccccgtggtggcctccgcgccgacttgtgttggtggggaccctgtggcagctgccacgtcgactggtgaagacacatcggtggcggtcgcgccagctgccgaagaccctgcagcgtcggtcggcccttcgcgggtggcgggatag

SEQ ID NO: 8818 - DNA, 264 bp, Zea mays
  Peptide Sequence Number=SeqID_52193
atgcagtcggcatgcaaccgcgccaagtgggcgcaccccttcgactccaacgcgctcagcatggaggcccaggcccacacgtcacgctaccggcgcgccagttgctgcgtgcgagcagccgcgccgccccttgcgccactaccgcgcctcctcgactgcggaaccagtaccgcgactcgaggcaaccctgcggaccgggaaagggggataccccgaaaaggatccttctccgtgaaggaaacaggccccgagcctccctactga

SEQ ID NO: 8819 - DNA, 807 bp, Zea mays
  Peptide Sequence Number=SeqID_52194
atggatacgttggtcacggaatcgaccacgagggccacgacaaatcttcaggctcgaaaggctacctgtcgagcttcggcgacgtcgtcagagactgctcggaccatttcaagagtgtctgtggagaacaggctgaagaaaaggttcctctacggcttctccatgggaggaaccgtggtgcttcagctccacaggaaggatcctctctactgggacggtgccgtgctgcttgccccaatgtgcaagccaacagtagtgtcgaaggagcacaagatgaggtgtgagcacaaagtggccagcaagaatggagtcatggaacatgggcaggaggggtcctcgcaagaaccaagtgctcactacgagatgatcctttgccactccggcacggtggatccctcgagactgcttacaaacttgagtcgggtcaccaacaagatcttcacggtgatcaccgagctcccaatgccaccaagccgtctaggtgatgccgatcaccaagaagagtacgtcctcgtgccggagcaaggagctgctcaggaggtagccctggatccagcacccgagtctgcaccagaggacctgcctgccactgctttggaaggcaagccccgtagactttgcccctcacgcgacctgagacgtggtctcccattccggttatggtgggtacaagtgcggtcactgcacgacggcagtcggggttctctggaggaaatggttgctggagtgacttggccgtccatcttgccaccgggttggactgtcgagtgggaccccgcctcggctgaggaggagcatgaggagtga

SEQ ID NO: 8820 - DNA, 345 bp, Zea mays
  Peptide Sequence Number=SeqID_52195
atggagagtcatctccaggggtcaccggctgtcggcaattgccggagcagcggtggcaacggtggcggcggcaggaggatagacctcacccgcagaagcaacaacacaattaaaacgttacctgatagacctgcaggtggggtctatcctcctttttgtgagaggggctgcaaacattctggtttgcagccggctgcaccaaattttttttcgctcaacggcggcactactttctttgtcgtttttgactttttgctgcaaggtagaaggagaggcttaggaggaagctggctcggcttcttgcgcactagtttgggaacaaaagggagcttggggctcacctag

SEQ ID NO: 8821 - DNA, 307 bp, Zea mays
  Peptide Sequence Number=SeqID_52196
atgcacatgaggtggcataaagattgtacggacagacaagatgggttaatggaagctacgagtggccaaaagcctagtgacattgaggtctaccaggagggccacaaaggaccagacccgaacaaccttgaccagctctgcagccagacagccacggatcgcttggtcatggaattaccactagacgcgcagagcagcggaagacgtctcgatgtagacgaacgcgtcgagcagtgccgtgcagtcgccggcgtccttcacgtcctcgcacggttcgtccaagtgctccagatgcagcacctccgag

SEQ ID NO: 8822 - DNA, 255 bp, Zea mays
  Peptide Sequence Number=SeqID_52197
atgcgcgcagccaccccggctatgcgctcccgctcccgcacctgccgccatgcgcgcacagaagcccacctgcaggcccagctccctcccacgccggtgaagcgtcggacccaggacgagaagaagcggcgcgatggcggtgggcgacctggcgttcaaggcgcaacgactgggctgggtgtcgccacgctctacctcgccgccaccttccccgtcaacgtctactgcggcctctcgtggcactccgagcagttc

SEQ ID NO: 8823 - DNA, 657 bp, Zea mays
  Peptide Sequence Number=SeqID_52198
atgccccctgcaccaccacagggcatcccgactgctggaggagaccatgacgacgacgatgataatgctagttcaagccacatcacgaagctctcagaggagcaggagccagagggatggatcgctagacccatcactcgcgatgccgctcgcgggtgtcacttccacgacgctcttgacaccttgctacgttgggcctttgaccgacacacttggcctatcgagtaccattgtgtagtctaccagcatcgtcgcgggttatacctagaccagtgggaggctacttgcttggtgcgtcatccggacgatgatctccagggtgcagaggccttctcaaagcattattctatcactgagagggacactgccgaggcagccatcggggtagctgatggcctcgacctgaagtactaccctcgccgttcgaccggcagtgctggtggtgtgattgcctcgcccctggaccacgcccttgatgagttgggcaaggttcgggcggaggttacggaattgcgtgctgagcgcgcagcgtgccactatcaggatggtggttctccttccctagtcgggattcagcacccttaccgttcgctgccccatggtcgctttgattatggtacccctgactgcaggacccagatagatttggatccatag

SEQ ID NO: 8824 - DNA, 411 bp, Zea mays
  Peptide Sequence Number=SeqID_52199
atggcgcctgaggccggacttggctgctgtcagccgcactctgtcgagtggcacagcagtcggagcggcgcaggcggcgctgtcctcttgtcagatcggtcagtggagcggcgaagtgactacggtcacttcggctctgtcgactggagggcgtgcgtcaggataaaggtgtcaggccacctttgcattaaatgcccctgcgatttggtcggttggcgtggcgatttggccaaggttgcttcttggcgaagactgggcctcgggcgagccgaagtcgatattgatctgaaaatcagtagtggtcggcattttagggaaaaagttcaatggaaggggaagggcctaacaacatgtaacaatgagtccccatccacatctaagcagaaaggaatattaaagaagcttccatag

SEQ ID NO: 8825 - DNA, 459 bp, Zea mays
  Peptide Sequence Number=SeqID_52200
atgtcggtcgctaaagcctttagcgacggcacttacaacgaccatacttatgggtcgctaaaagtttttagcgaccaactgagaagaagctcctccgacgccctttgctgccgaagtagtagaaattttgaagcttcggcggctaagactgtgactgctgcgggtgccgaagctaaagctaaagctgctgtcgaagccaaggacgttggtgaagccgaagctacaatatcagatattgacaggcttatatcagatgtaattaaagatgtgactatagaggacatggccacagatccaggtaaagaaagggaaattgataccgatcctccgggtggaaaagatttcgaccttcggcacctgggcggtcaggagctttctgaagaagagaagtcggagttaaaagaattttctatgtcgtgcggataccaaccggggtcttttgctcttcggcgaggttga

SEQ ID NO: 8826 - DNA, 273 bp, Zea mays
  Peptide Sequence Number=SeqID_52201
atggatggtctagctgctttatgtgaagggaaaaatctatcaccagcatgggataagttggtatttaacaaaataaaagctagaccctgtggacgagtgagctatgtaattgacccaaaaggcacttcaagtgggcaggaaagtctaaggcccttactaagtacttccaattggtgcataaggctgcaacaccgcctagtggagggtgttgtggacaaagaaagcttgtaccttaaaacaggaggatacaagaagctggagtggttgtcttaa

SEQ ID NO: 8827 - DNA, 1188 bp, Zea mays
  Peptide Sequence Number=SeqID_52202
atgtcttcgcgctcccttatgcaccgtgtctttccaccttccaagcccccggatgggggacacccacaatccttccgccttgtcgttggaggaacgcaacttcgtggaagttggtacctttcagccatcgttcggcttcaaggattttcatcaggcagcccggctgcatcccctcgccggtggtcacccaagacggtgaccaccagcccctgggtggggagaagcaagccgggctgcgatcttggtcccgccctcagcttcaaggatgttcatcatccttgctggggcggaggccgggctgagccggagctctccctcccgcgcgggttcgtgggtcagcctctccttcagcattcaagggagagggcgctcactagccctgcgagaggggcggacttcgacaacgcggggctggtcgacggcgggcgtcgtcagcttcagcgcgttgggctcgccggcttggctccctgtgccccctcccgccgcaagggcggttgtcgcgccgcgcgtatgggaggactgcccaagacgtcgcgcgctgctagagcggcgttcgtgttctggggctgccctgcctttgcaccggtacggcgcccccacgcggaggttgcggcgtccgccctgaggccatcgctgctgctgtttggccacccggagcggggttcgttgtcgctgctgccggagcgggcgacggcgagccacccgtcggccttctgttgctccgcaggccccccaatcgtgtggggttactcgcctgttggttatctgaaccgcttcaccaagtgtgagtcgcctcgtgcgaaggtgatgagtgagctcgatcagaggcagagttggcttcgaaaagaagacttggtcggccggagcctggccgggtcgtccgctggtgggagcgacgccgggattgagttgccgagaccacgggccgggctcatgtcttcgggggacagccaccccgaggcctcggggtggccggccgagccgtctgctcgagctggattcctggagaagaccctggtggcgatggcctggcgtggtgctgatgtcgtccttcagagtggagatcctccgaccgcgtcgccgtccgaggctaggtcggatctcgccgatggtgtagttgacgccgagggtgctgctgctcccttcaactgtgaagatccgagcctgcaggatcagattatcttgtag

SEQ ID NO: 8828 - DNA, 951 bp, Zea mays
  Peptide Sequence Number=SeqID_52203
atggcgcctccagttgacgtggtcggtccgtgccctaggttgggcgatgtggatgctcctccgaggtcgaggtcgagtctgtcttccgaggccgaggtcgagtccgagcccctgggtcgggcgaggcggagaccgtcggctgaggccagggctgagtccgagccctggggtcgggcgaagcggagttcgtcgtcttccggggctgagcccgagtccgagccctggggtcgggcgaagcggagttcgtcgtcttccgaggctgagcccgagtccgagccctggggttgggcgaagcggagttcgtcgtcttctggggctgagcccgagtccgagccctggggtcgggcgaagcagagtttcctatggcgcctgaggccggacttggctgctgtcagccgcactctgtcgagtggcacagcagtcggagcggcgcaggcggcgctgtcctcttgtcagacctgtcagtggagcggcgaagccacctttgcattaaatgcccctgcgatttggtcggttggcgtggcgatttggccaaggttgcttcttggcgaagactgggcctcgggcgagccgaagctttgtgctgatgggggttaccagctgagatttaggagtcttgagggtacccctaattatggtccccgacatgggtgcgcgcgagcgcacccgccgggtgtagcccccgaggcctcggaggagtggtttgactccttcgagggtcttaatgcatttcgcaacactttggcaggtctagttgttccctcatgcgagctggcctctgcacagggcgagaggacggtcaaggacagacttgacttttttacatacgcccctgcgtcgcctttccgcaaggaggagggggagaatgcgccatgctgccctcggagggcgccgaacatggtgtttccgtcccctttcgacggggtccgaggactcgatgcctccctctga

SEQ ID NO: 8829 - DNA, 480 bp, Zea mays
  Peptide Sequence Number=SeqID_52204
atgcgtgccaagcgcaagccttctctaactcataatgaaaggctagatctgcaagtctacgccagacggtggtgccagaagccagttccgcgagctctcaccctttcgcaggttaaagcacggattatgatggttggggaccaccgggaggataagaaagaggaatgttttgtccggtttgggcatggtggtggccttgttccttccggtataatcgctaaggtaaggatgtgcaaggaaggaaagagtttcgacattcggatctcacgacggtggttaagtacgaagtactcacccttgcttatttgttatttttcagagaaggaaatcattgatcggaatttatattacactgataccttcggcttgatcaaaggtggtgatgcgatggcaggaccttcggtggagaagaagaccccaacagatggtgttttgcaaacaagaatggatggaagctcgcggaagtgggcaacaccctag

SEQ ID NO: 8830 - DNA, 3234 bp, Zea mays
  Peptide Sequence Number=SeqID_52205
atgccgctgaggggtcgatcacgccgccaagatgcaaactcagtaatgcatcatgcagggaacgtcgacgatgcgaaaggagaaaatcctgatgattttatgactttggtggctaattgtttaggccttggacgaggttatcagcttgttactgaaccagcacatgaaattattggaaaagaacgaaaaaatcggaaacgatgtcgtgttccaacttcgtcgaggaccctctcgaccaccaccccggataatattccctttggcattcaaaagaacccacaagaaccgtctgtgtcagattacgctggtcgtgcacacattcttcacccggtactggactcatccaagaggtcactcgacattcctagctcgacctccacactagcccaaaaaatggtcaagcatccctcatcaaggtggttcaacgactgtcggccgcagcttcgattggatgtgcctgtatgtcggaagatgttaatatgggcccgtatgatgctggtgaaccacgaagaccgaagtatgctgcaaaaatctgatatctatcgcggtgtactagcttcactttattgttttcaagctgacccatcattggtagctgccttcttgacatattggaatgttgacggacatacattggttaccagtcaaggggagatgggatatccactacataccatctctgatgcgatggggatccctatttcaggtcgtctttatgaagaatttattcctccttgctctgacgtccatggtcacttggagactctttatgctatttatgctagcttatgcccatcagagctgcagccaggcccaggattagtgagtcttaccgcttggttagaccacttttttgatgataaagctgattcttttggcagtcctttattggatggctttgctgaccctaaagatccgttacttcagaagcttcgtttccatgtcgcggttcaaggtgactgtcttgcagccattcttggtgccgagacattatcttaccgatctatatatccttcaacggtttactgtgctgcatttatagcagcttggctatgcacttattgcattcatgtcgaagctggccaatacattcgtcctgaggtatttcatatggccgttcagatatcagaaggcgttcgcagagcaattggtgtcgcaagcttggcttttctatataattgtttggataatattcatgataatataattagtgggacacggtccgcgagcgagtgttccctttttctcccgggtcatttcatcatgggctggttcgcctctttttggaagcaagctcggaaatcagcgaccttacattgtccagttaaatttcctccttttgtcatagatttgacgaagttggaacagcccatgcctataacagaggcacatcatatattttgggattttgatggtgatggtcggggactgcgctcgctagattttttgggccgatcctcgctgcgattcccaggaggtcaccgactggtatttattcgagatggtcgtacgaagaatgagaaacaaccattttccatatcagtttctgcaatggagctacttatgagcagcctctttggtggtattactcataggcgtggcgaacgttctgacaacctggtgtattatccgcatcgctccgcacacatatttaactatgatcaactcatcccatattttgattatcgtgctgctgataatgtaattgatagtttgaactttcgaagttactctccctcgagccgaaaggaaacacttcaaatttgtgttcggcggcatctttcttattatgatcaacctgagggacatgctctcgtggtgcaaccttctaatcttggaactagacgttcgtacaattatattatctggtgcaacaatgcttttcggtttcttcgagatccttcattcttttgtgataggatttttatgtcagctgtaatcgaaacaacagtagctgcccctgcagagggtgacattgatcaacctgctaaaggaacagcagtcgtcaaatattctcttctccctggtgatagtgaacctgaccgggaagatacgacccccacaactgtgtccggacttggtcaaggaaaaaacattagcataatacaagctcatttgcaagacaaggcatctgctctgaactcttcgtccgaattatctttgccagggtcacgtgcaaacactgatctacttgatgatacattatcagatggcagcttggcatgtcctccggatgacccagatttcctgaatgacttcgtcttcactggagcgctggagccctttacagatctattcacagacctcccaaatgaggtcatggagatgcaggcctcgcatactcaggtgctaacatcaggccacttagaacagactgatatggtgcatgtttcgcaaccggttagttcaactggactaatgtcaagcctcgaccaggatgtactctcgacgcaacctggctcgagccaagctagtgtgcgtaagattctgaaacaattatggaatgaggttgaacaagccatcagcttatttcgagcacaggcaagtgccactgatgtcattggagagaagccaaattatagcgaatttgatgctcggcagcctgtgcatatatctgagcctacagatgttccggcaccacgctttatgcaatatgctcatggggatcttgatcgcttccaacgtcgtatacgcgaacgccccttcaacaaagacattgtgatctcggagatagccgatactatgaaatggtggaaggagtggtttaacccagctccgccaaaaatacaaagattaatagatgggttcaatgctctacatgagactctctctgaagatccagagcactccactaccagcatcattgacaagaggaagcaagtacgtcaaaagattgatgacataaaagcttctcaagcctctgttgctactgcttgttcttccatgattagtattaccaaaagccttgaggcgcaaattaatttgcatgaactaaggcggcaacaacatgtatctcgtgctgaggaattacaagcccaaataaagaaactgtcttcccagctcaaagagactgaggatgaattggaggcctcctctgttaaaagtcagagtcaacttcaggatgcagaaaaaactattgccggcttcactgatcaggacgaggaaggacttaccaactatgtccactcccttcttgacttttttgcgtcctgcaccttcggaccatatgcatga

SEQ ID NO: 8831 - DNA, 138 bp, Zea mays
  Peptide Sequence Number=SeqID_52206
atggcgagcaaggctcgggggctcaagtggcccgagggcgaggttggggcgagccccacgcgcgacgtgggtgcggagaccgcggcacgcacggcggcggtcaccaagttatatgatagccagcaacggtgccactaa

SEQ ID NO: 8832 - DNA, 1251 bp, Zea mays
  Peptide Sequence Number=SeqID_52207
atgaatagggcgcacagcagcagctccaagctcatcaacgagaagctcgtggaacaccggatctccactgcgaagcactgcccccactgcggcgagaaaatcgacagcaaaccgttatgcacctcctcagccagcatgagacctggtggtggtgcaacttgttttgatgggattaattgctgtaactgcaagaaggattgggtggggctgccggcaggcgtcaagttcgatccaactgaccaggagctgatcgagcacctcgaggcgaaagtgaaggatgaaggctcgagatctcaccctctcatcgacgagttcatacccacaatagatggggaggacggcatatgttacacccaccccgagaaacttccaggtgtgacgagggatggcctaagcaagcacttcttccaccggccgtccaaggcctacacgacgggcacgaggaagaggaggaagatacagacggagtgcgacgtccacaagggggagacgaggtggcacaagaccggcaagacgcggccggtgatggtgaacggccggcagaaggggtgcaagaagatattggtgctgtacaccaacttcggcaagcaccgcaagccggagaagacgaactgggtcatgcaccagtaccacctcggcgacctagaagaggagaaggagggggagctggtggtgtgcaagatcttctaccagacgcaacccaggcagtgcagctggtcctccgaccggggcgccgccgccactgccttggcagcaacggcggcagcggcggcggcgcaggagcagcataggagggatagtggcagtggcagctgctcgtctagggaccacgaggtgtcagccacatcgttcccagccggatacacagtcaccacggccgtcgagatgcagcagcatatgaagcagcctgcggaccatttcagcttcgcgcctttcaggaaaaccttcgaccaggaggttggtataggtggtgatcaggtgccatctaatcagcttggacgttcagagccgcatcatgccggcctggggcagcagccacacggcccggtgctcgcgacgaagacggctgtgcctgctacagctttcctgatcagtaggccatcgaaccctgtctcgactatagtgccacctgcaatgcagcacgcatcagttgttctcgatcatgatcagttccatgtgccagcaatccttctccatcaccatgacaaatttcagaaaaatatgttttgttacgaaaatggaaaacgttaa

SEQ ID NO: 8833 - DNA, 1077 bp, Zea mays
  Peptide Sequence Number=SeqID_52208
atgaatgctgtggtaacttcacacctacctgcttgtttatatagtactgcaggtaagaaggcgaagcggcggaattgttacaccaggcgcgccgtaacttgtactcgctgcgcagtggaccgcaaggatcaaacagtaactctgcaaggtgggaccgacacgcgctcggaagtcggatcgtttctccgcaacgagctcagggaaggtgttttttggaccttcggcttcccgaagctgaagaggcttttttcacgggtcaagctcgttacgaagaacgatctagcaccgcgaaaggggctactgttggggtcgtgcttcggtgcgccgaaggtctcacacgaagaagcagcttcggctgaagtcgtctccaagagatggccgaagtcggcccgccttgcgcgcgcccgcctcccgctctctctgctcgcccggccccacctgtcggcgctgccgcttcccccgcacagcgccgccgccgtaaaccccgccgttccgagctcggttcccggccgccgttggagctccgccgtgtccattgccacggtgagcttcgccccgacgtccgcaacccggaacgcgcaccaatttccccttaccctccctatttcgctctgcccgcgctcacccgccgtcctccgtgcagccgccaccgtcgccccgggccgccgtcgcgtctccgtcgccaccgaggagtccccggaggccgctttgaggtcgccccggggacccgcagggcccccgcgcccctcgtctccggcgagttctccgccgcgggacgagcgccgccgcctcagctggctggggaagaagacaggagccagctgccccatctccgccgtccatcttagatcggacgaccctgtttcaaatagcccgaacccagcctcagccgttcgcctgagatccaacggcccagagccgtttcccccgcgccctgcctccctgccaactgggccccgcctgtcagcccccgccccgctgcccgcccggccccgcctgtcagccctcacgccgccgcccgcgcgcccgcccgcaggatctaatcctggtcgtccgtttgagatccaacggctgtaa

SEQ ID NO: 8834 - DNA, 855 bp, Zea mays
  Peptide Sequence Number=SeqID_52209
atgacctcccatgggtcctccgatgacggaaatgcactgacccacacggacggacttgcacgagagggttttccccgcattttgtgggaggtgcttcagggggctggatacacgacaccccctcagtacgcggtgcagcagttcgagaagcaccgagtgccccgctgtagggtgaggatgaccttggagcctcatcccctgcagccaggctggcgctccttggactccgagtccttcggataccgagcggaggacacgatcgaggcgatcgcgctgcatggactgactaccttctgtggattccatcccttggagctggctacccatcccattggcttgttccccgctgaaaaggaggacgacccaatgtggaaggatcgggtggaacatgccaaggacatctgggccatctacccagggcagactgcgcacttgacagtgcggtgcatgaatgctctgtaccgtctgcaggtgatgcgcggtgaggccatgtcccacctgatggcactgctggaggccaccaagatcacattggataaccgagaggagcttgtggtcgacttgtcgcaagaaatggtcgagaaagatttacaagtggagcagctgtctggtgagattcatgagttggaggagctagtgggcacccgggagaacaccattgaggtcctagaggatcagctcctcaacactcagcagcagcttgctgaagcaaatgagcacctagacatgcaccaccaggaggatgacgaggacgtcgacattgagggaggagatgagcctgcctccagtgtggatactgctggctcgggaagaccaccttcccccgagtccagtgttgcttcgttcgctcactag

SEQ ID NO: 8835 - DNA, 1016 bp, Zea mays
  Peptide Sequence Number=SeqID_52210
atggggaagcctgtcccatcactcctcatgctcctcctcagccgaggcaggcagcatggatcaagcagtctcattaactgcgagaagcagacgattcgaatcgagtttttaaaccttgcaagaacagggctcaccgccttggcgtacaatgcctcactgaccccgactggccgtcgtgcagtgaccgcacttgtacccaccataaccggaatgggagacctcgtctcaggtcgcgtgaggggcaaagtctactgccaggttcaatcaggtcctcctgagttggctctggtgctggatctggggctacctcctgagcagctccttgctccggcacgaggatgtactctccgtcagcaagattacagtctatcgaaatgcaatgaacatcggcggtcggagctgctcggtccacgtgcgcaggcggcggaggtcgacggcgatgcctgctccggccaaaccacggcgggggagttcaatcaatgggcacgaggagctccacgggatgacacagaggccatacgcgcgaggaatcggaaaatggcaaaggggtttacccggtccacgcgcgccggcgggttcgggaactccggtgagcgcgattcggcttctccggtgacgtgggctctcggttcaagcttgagccaagctcacggtctcaccaggaagctatttgggtgcttgaatcgaacggagggtggctggagaggggttggccacggcggtggtgctcgggcggcactggcggttcgcggggaggtcgccggaggcaacggctggctcgggcaaatccggcgaagtacggacgaggcaacgggggaagcaaccgagcgctggggcgggttttatagccttggcgcgggcgtggtcacggggggggccgcgggcgcgcgggggttcgcgcaccggcgtgcactgagcgcgcccccgggtgccagcatgcgtcgaacacgtggatggttgcgtctgccaatgttcaacggccggtttgagcgccaaggcgtgcatatctcggcaag

SEQ ID NO: 8836 - DNA, 162 bp, Zea mays
  Peptide Sequence Number=SeqID_52211
atggggctcggtgtatgcggctcgctctgccaaggtggcaatgagattgatggttctggttatgactatggtactggttgtcagcattgcaaccactgctcaggcgaagatgaagctgtggaaggagacttccaggagttccaagactacgacgagttctag

SEQ ID NO: 8837 - DNA, 231 bp, Zea mays
  Peptide Sequence Number=SeqID_52212
atggcaacctggtgttttgtgaaagcaagggtaaagcaatatcataaactaaccatgataacccaaaaggtaaacaaggatgagtcgaagaaacggtatcttcggactcgtatcagaaagggagaagctcaaaagatacgaaggttgacacagcgccgaagctgtgaagcagtaaagcttcggcatgttcgcagaagagggaaccgacttaaagatgaaaaggccatttag

SEQ ID NO: 8838 - DNA, 2814 bp, Zea mays
  Peptide Sequence Number=SeqID_52213
atgggctccgcagcggcggcggacgtggtcatcccggcgtgcgcggcggtgggcatcgccttcgcgctgtggcaatggttcctcgtctccagggtgaagatgtccgcctacgcggcgcccggcaacggcggccaccacgggggccccgtcttccggatggaggacgacgaggaggacgtcggcatgggcggtgccggcgaccgcgacgaggaggaggaggagaccgccggcgacggcactgtcgccgtggcgcgctgcgcggagatccagagcgccatttcggttggcgccaactcattccttttcacacaatacaagtatctcgccgcgttcacggtagtcttcgccgtggtgatcttcctcttcctgggctccgttcaccggttcagcactgacagccggccgtgccagtacaccagtggtcgcacctgtaaaccagcgctggcaaacgcggtgttcagctctgtggccttcctcctcggcgccgccacctctgtggtgtccgggtacctcggcatgcggatcgccacctacgcgaacggcaggaccaccctggaagctcggcgtggcgtgggcgcggccttcgccacggcgttccggtctggcgccgtgatgggcttcctcttggcctccctgggcctcctcgtactctacatcaccatcaaggtgttcgggctctactacggcgacgactgggagagcctgtacgagtcgatcaccgggtacggcctcggcgggtcgtcgatggcgctgttcgggcgcgtcggcggcggcatctacaccaaggcggcagacgtgggcgcggacctcgtcgggaaggtggagcgcaacatccccgaggacgacccgaggaaccccgcggtgatcgcggacaacgtgggcgacaacgtgggcgacatcgccgggatggggtctgacctgttcggctcctacgccgagtccacctgtgcggcgctgttcgtcgcgtccatctcctcgttcggcgccgaccacaacttcgcggcggtggcctatccgctgctcatcagctccgcggggctccttgtctgcctggtcaccacgctcttcgccacggacctgttcaaggtgaagaccgtccgtggcgtggcgcccgcgctgaagctgcagctcatcatctccaccgtgctgatgaccgtcgccgcgcttgtcgtgtccttggcggcgctccccgccaaattcaccatgttcgatttcggagaagcgaagcaagtgaagaactggcacctgttcttatgcgtggccattgggctttgggctggtctcgccatcggcttcaccaccgagtacttcaccagcaacgcctacaggacgggcgctgcgaccaacgtcatcttcggcctcgccctcgggtacaagtccgtcatcgtgcccgtcttcgccatcgccgtgtccatctacgtcggcttcacgctggcatccatctacggcatcgcggtcgccgcgctcgggatgctgagcacggtcgccacggggctggccatcgacgcctacggccccatcagcgacaacgccggcgggatcgctgagatggcaggcatgagccgcaggatccggcaaagaaccgacgcgctcgacgccgccggcaacaccacggccgccattggcaagggattcgccatcggatcggctgcgctggtgtcgctggcgctgttcggcgcgttcgtgagccgcgcgggggtcgaggacgtgaacgtgctcaacccgaaggtgttcgtcggccttctcgtgggggcgatgctcccgtactggttctcggcgatgacgatgaagagcgtgggcagcgcagcactgaagatggtggaggaggtgcgccggcagttcatcaccatccctgggctcatggagggccgcgccgcgccggactacgcgcgctgcgtcaggatctccacggacgcgtcgctcaaggagatgatgccgccaggagcgctggtgctgctcgcgccgctggtcgccggcaccttcttcggagtcagcacgctcgcgggactactcgccggcgcactggtttccggtgtccagattgccatatctgcttcgaacagtggtggagcatgggacaatgccaagaaatatatagaggagagacgtactggcaccctgcaagccgacgtgtcggtgcactgtgcggttgacttgcgcctgctgcatcgggtatgggctaaaggctgcttacggggtgcgtcagcgtccttgcacgggatgacgtcgagattccctgctgtgtttatcgagatcagagcccctgcttggtcgaggcgaaagtcttcccgaggcactaccacagttaggcggagtggccgtatgcgggattcgcgggtagtaggtggacgaggccgagctcaggcgaggcggagaatttgtctgagggccaaactcgtcgtcgggcgaggcggagaaatcacccgaagcctggacccggggtcgggcgaggcggagggattgcgcccgcgagctgaaccctgcttcgcgcgaggcggagagattgcgcccgagggccagtctgctctgcttgtcgtattaggcgtctcatcggaaggtggcaggcagcgagataattcggataaccctaattattacccgacactacgtctagcttgtgcgtctgatcacgccaagtctctgggccccaaggggtcggacgctcacaaggctgccgtgatcggcgacaccatcggcgaccctctcaaggacacctccggaccgtccctcaacatcctgatcaagctcatggccgtcgagtctctagtatttgcgccattcttcgccgcccatggaggcctgatattcaagtag

SEQ ID NO: 8839 - DNA, 627 bp, Zea mays
  Peptide Sequence Number=SeqID_52214
atggcctctcttttgtttcttctttcttttgacaatgatgaagaagattcaggctccggccggcgggataaacatgcacagaaccagcatagcaagcctaagcccaaggtccctaatggaagtgaagctgatgacactgatggcgcctctagacctaaatctgctggacttgtggactatgacgatgatgacgatgaagacttcaatccaccaccaatggagccttctacgcctgcagaggatgatgtgcccttaaacatatccccggtgaagcggaagccagtggatgtgaaacatgcagatggggagggtcgcaggaggcaaaaaatagaaaccagaattagttgtgctaaaattgctgctgttactagtaccattattaagcacacagatctacaaaacaagcatgcttgctacttgcctacatcagccgcgccaagtactgaacccaatggtgtttttagggagcgtggcactaactctgaggagcatcaacattctgtagagaacacagaaacttcacgacaagctggtggtgattgtataaaagacgggggcagtatgtctcccgagaaggctgtaaatacgacaacgacaagtgattcggagccttattcagtaagatga

SEQ ID NO: 8840 - DNA, 186 bp, Zea mays
  Peptide Sequence Number=SeqID_52215
atgtggcttcatatccttagaggtatgaaggcagaagtcatccttgcatttgcagtcatttgcactcatatgtttgatattattttacttgctgagatgtgtcatctcattctggtattactcaatgcaggtgaggagcaggtggccccagaggaggactactatgaggagttcgacgaggtctag

SEQ ID NO: 8841 - DNA, 240 bp, Zea mays
  Peptide Sequence Number=SeqID_52216
atgtcttcctccgtcgtcgacgtccacctccgcccagtttcgagggactacgagctcgcggcttcctccgtcgtcagcgtctacattcgtccattgtcactttttcagggttggcagttggtgtcgcgccttgcgggatggcggctgtcggggcgcgctggcgtgcgcggagtggtcgcggcgttcgcgggcgtggtggctggggttatcgcgaaccgcgcgcgggcgtgcggagcgtag

SEQ ID NO: 8842 - DNA, 333 bp, Zea mays
  Peptide Sequence Number=SeqID_52217
atggaattaccactagacgcgcagagcagcggaagacgtctcgatgtagacgaacgcgtcgagcagtgccgtgcagtcgccggcgtccttcacgtcctcgcacggttcgtccaagtgctccagatgcagcacctccgagggcatatttctaacagttttttcgccgaaggctcaaaaatgatcttctccgcagcttcgtttagaagcttgttgactgcttcatcaacagcttcttcgacaattgtaattgtttctagtcccgctttcatggctggatcggcctcgggatcatatggcttgggtggcggtgaaagtttagctgcaataaagtag

SEQ ID NO: 8843 - DNA, 439 bp, Zea mays
  Peptide Sequence Number=SeqID_52218
cagcagcagtgctaatggcccatcaccacgggaccatgatcgctggggttcgcctgatccctatggccgccgctctccctcttactcgtcaccccctaggtatggaggatatgatgattaccacgagaggaatggtgggaacaatgatgacaagagaccaccgaccccggtgagggatatgaagcctgagcatgtccttgctcgtatgcaccacctacagcagctgcttgacaggttccttgcttgccgccccactggtggcgcaaagcaaagcaggatggtgctggttgtgctgtatcagattgtgagagagagcttccagctctactctgatatttgcgaggtgctcgcggtgttgctggacaggttctttgacatggaggggatagagggcttcggagttctggctctaattgctctgactctttggcttatctag

SEQ ID NO: 8844 - DNA, 447 bp, Zea mays
  Peptide Sequence Number=SeqID_52219
atgggcaagagcaagaaaggtgggagttcctcgcaccattccggcgataagcggaaacgtgagccgactcctccctcggaggactttggcgactcggagtactcggaagaggagttctcctccgagtcagagggttcgccggtccctgcctctcccccggcgtcgtctgatgattcagacgactcccaggggatcgccgcagaggtatggacctacatccgggccatcgagcgtgcgaggctcgagggctcagatgagtcggaggtctcctcagacgaggagaactcctcggactcgtccgaggagggcgacggcggcgacggaggcgacggcgatggcgacggcggtgatggaggcgacggcgatggcgacggcggcggtggcggcaagggcggcagcggtgatggcggggacggtagcaagggcagcaacaaggccagtggctag

SEQ ID NO: 8845 - DNA, 210 bp, Zea mays
  Peptide Sequence Number=SeqID_52220
atggcggttgagggcgaggcatggggacgacggttgaggccggggcgcggcgacggcggcgacgatggtgtgggggcgcagcggtgtcggggcgcggaggtgtggggacgcggcggagtgggggcgtggcgcggcggcgggcggacggcgcgggcgagggagagggagaggggccgatgttgtgataaaaatttgagaatgtttcgataa

SEQ ID NO: 8846 - DNA, 174 bp, Zea mays
  Peptide Sequence Number=SeqID_52221
atggggagtagctctctccgggcagaaagggaatcatggcttgtgggtggcaatgagattgatggttctggttatggctatggtgctggttgtcagcattgcaaccactgctcaggcgaagatgaagctgtggaaggagacttccaggagttccaagactacgacgagttctag

SEQ ID NO: 8847 - DNA, 1077 bp, Zea mays
  Peptide Sequence Number=SeqID_52222
atgaccctggagcctcatcccgtacagccaggctggcgttcgctggactctgagtcttttggttacagggctgaggacactatcgaggcaattgctcttcacagactgaccacattctgcggattccaccccttggagctgtccactcaccccattggcttgttcccccctgagaaggaggacgacccaatgtggaaggaccgagtggagcatgccaaggatatctgggctatctacccagggcggatggatgtgcttgcagtagggggttacaagcgttcgcgtgggagagagcgagagcgagagccttatgcgtcggcccgttctcccgcgcggccaaccttctcgtacgagagccctagaccttccttttataggcataaggagagggtccagggtaatgatgccccccctgtgacgtggtcggtccgagccctaggtcgggcgaggtggaggctcctccgaggtcgaggtcgagtccgtcttctgaggtcgaggttgagtccgagccctagggtcgggcgaggcggagaccgtcttccgaggccgaggctgtctccgagccctggggtcgggcgaggcgaagtccgtcatcctaggtcgaggttgagtccgagccctgggtcgggtgaggcggagcttcctatggcgcccgaggctggacttagctgctgtcagcctcactctgccgagtggcacagcagtcggagcgacgcaggcggcgctgttttcttgtcaggtcggtcagtggagcggagaagtgactgcggtcacttcgtctctgtcgactggagagcgcgcgtcaggataaggtgtcaggcgatccttgcattaaatgctcctgcgatactgtcggttggcgtggcaatctggccaaggttgcttctctgcgaagactgggcctcgggcgagccgaagcgttgtgctgatgggggttaccagctgagattaggagtcttgggggccgtagcccgggtcatagtcgagtcccaagttctcgggctgggcgccgaacatggtgtctccaatgagttgctaacgggtaatctgagtggacgcccgtgccccattcgttag

SEQ ID NO: 8848 - DNA, 1503 bp, Zea mays
  Peptide Sequence Number=SeqID_52223
atgaaggcttccaccgaagcgaggtcgcttggcgggtcgaagctgaatccaaaaggcacgagatgggaatcggtcggtaccttttggtcgacgggcggtgacgaagtcgcgtcaggggtggactgcaccgttgtctcaggtacgagggcaacgcctagcaagtccttcgcgagcgtgctggcgtcgttcgtctgcttggggttggcatgttgcggggaaacggcgttcgtcttcgtctcagacgcaaggtcgaagcccgacgtgaccccgctggggcaccgacatcgtcgacttgctcgacagccgacgaggtgccgcctcctgcttggccatggttgccccgcctcctcctccgtcggtgagggaggtgacaggacaaacccggatgttgttcttccgccatccgccgtcgagggacatgaactcaagactcccgaaacggagcatcgtcccaggttggaaaggttgctagagactacccatctgaagcttgacgggaagctgttcgtcaacacgcagcaggcccctacctggcgcgccaactatcggagtttcgaccctggggggtccctggaccgacgaggtaatgatgccccccctgtgacgtggtcggtccgagccctaggtcgggcgaggcggaggctcctccgaggtcgaggtcgagtccgtcttctgaggttgaggctgagtctgagccctggggtcgggcgaggcggagaccgtcttccgaggccgaggctgtgtccgagccctggggtcgggcgaggcggagtccgtcgtccgaggtcgaggttgagtccgagccttgggtcgggcgaggtggagcttcctatggcgcccgaggctggacttagctgctgtcagcctcactctgtcgagtggcacagcagtcggagcgacgcaggcggcgctgttttcttgtcaggtcggtcagtggagcggcgaagtgactgcggtcacttcggctctgtcgactggagagcgcgcgtcaggataaggtgtcaggcgatccttgcattaaatgctcctgtgatacggtcggttggcatggcaatctggccaaggttgcttctctatgaagactgggcctcgggcgagccgaagctttgtgctgatgggggttaccagctgagattaggagtcttgggggctaccaagatcactttggataacagagaggaacttgtggttgacttgtccactgagatggtggaaaaggacttacaagtggagcaactgtcgaatgagatccaagagcttgaagaactagtgggaacgagggagaacaccatcaaggttctcgaggatcagttgatcaacacccagcagcagctggcagaggctaaccagcacctggatatgcaccaccaggagatccaggacatggaggccaacgaggatgtcgacatcgagggaggagaggagcctgcctccagtttggacactgctggctcagggagaccaccttctcccgagtcgagcgttgcctcgtttgctcactag

SEQ ID NO: 8849 - DNA, 459 bp, Zea mays
  Peptide Sequence Number=SeqID_52224
atgcaggcggcatgcaactgcaccaagggggcgcacccttttgactttgacacgtccagcatggggcccaggcccacacgtcatgtaactcgcgtgccggttactacgtgcgagaaattgcaccgccacttgcgccagtaccgcgccttctcgactgcggaaccggtgccgcgactcgaggcaaccctgcgcacggcccaacggtgccaaccgagcacatcggtcacgggccgggaccgggaaaggggatactccgaaagggatccttctccacgaaggaagcgggccccgagccctccaactgatcagaggttcgaaggctggcccctcgaaagggttcgacagccgcctcagagcactcgggctccgcgcccactactggtcagaggttcgaaggctggcccctcggaagggttcgacagccgcctcaggccactcgggctccgcgcccactactga

SEQ ID NO: 8850 - DNA, 342 bp, Zea mays
  Peptide Sequence Number=SeqID_52225
atgaagactctgacaactttttgtggctaccatcccctggagatggtgatgcaccccttgggacttttccctgctgagaagaaggatgaccccatgtggtgtaaccgccgggaactcaaagaggctaatgatcacttggacatgcaccacttggagatggaggccaacgaagccggaagcgagggagaagaggctcccgaggagttaggaccagcccctggtgccaatgggactacctctgtggcggaactgcccaaattattccaacttaagtgcctaagccccgccttagaggctagaccacacttaaatgggaataacccgtcaattcctcggatctag

SEQ ID NO: 8851 - DNA, 345 bp, Zea mays
  Peptide Sequence Number=SeqID_52226
atgggcaagaagtactcgaaggaggagttctcctccgagtccgagggatctccggctcccgtctctcccccggcgtcgtctgatgattcagacgactcccaggggattaccgcggaggtctggacctacatccgggccgtcgagcgctccgggctcgagggctcggatgagtcggaggactcctcggactcgtccgaggagggcagcggcggcgatggcggtgatgacaacgacgacggaggcgacggtggtggcggcggcgacagcggcaggggcggtgacggcggcagcaagagcggcaatggcggcggcagcagcaagggcagcaacaaggccagtggctag

SEQ ID NO: 8852 - DNA, 118 bp, Zea mays
  Peptide Sequence Number=SeqID_52227
agacattgtggtacaggtggctatgagaatcgatggttttggttatgactatgatgctggcgaagatgaagctgtggaaggagacttccaggagttccaagactacgacgagttctag

SEQ ID NO: 8853 - DNA, 1977 bp, Zea mays
  Peptide Sequence Number=SeqID_52228
atggagtcgtgcggtggaggccaagtcccggagatgccacgcgttcccaagtccgcgaggggcaagagatcggtcaggaagaaggaggcccagagcccggcccagatgtctgcaatcgaccttctcgcaaccgtggcagggaagctgtttgacgagggggcggggtcgctggggaacacgagcgccggtgccccggccttggctgcgttcgcaaaggatgccctggtgaagcaggagcagtgtgatgagcaaatgaagctgttcaagcatgaggcgacggatcaggatagctgcaatgagagtgcaatcctcccccacattgtgctccagcgggtggtgaataatgctaggaatgaggatcctaaggcgaagtctgaggtccaggacaaggaatcctccatgatcagctatacgaaggctgaattgggttgtaattttggtgtgatcgcagacaggtggtcgcctgaatccgtggaatcaggagccttcacaggagatgcagtggcgagactgatgatgacggccccggcaggatttcataagaatgcacccgaaatgtatagtttgcttgattcaatggatgtggatgtcaagccgcctcctttggtcagctctgacagcaccggcgagatgccattgcatggcgataaaattcaccgctcaacctccttaccgagggccccaaagggggtggggttttttgctgtagatagagatgatgacgacgacaagtcctctgggtgcactcatccgagcaccgccactaacaaggatttcacatccaattgtaaagctgagtataatagggtaaggaagctgctcactaatgtcgagcggaagccttctttccggtacaaaaaaatgcatacacgacagaggacacaaaggagtacattcaagcggaggaagctctttgatcgccatttagctctagcatctgaatttggtacagcaaatggaaagggaaacacaaaggttgccggaagaaactccaatgctgtgtctttggaagcaaacaaggggactaattcaatgccattccagaaatcttgtgggtcaaatgattgccatgtgaaacttagaattaagtcttttaacgtgcctgaacttcttgttgaaatcccagacagtgcaactgttggctcactaaagaaaactgttctcgaggcagtgactgcgattcttggaggtggcctacgtgttggtgttcttcaccatggaaagaaagtcagagatgatagtaaaacgttaattcaggctgggattggtcaggatgatatgctggacaaccttggcttttcacttgaacccaactgtactcaaaacccacaagtacaagctcctgaagatgtcagtttcctcgaaaacattgatactaccgaacccctcgcaagattggtgaactttgtctggtacaggatcacacctgctgactcgtcttctaagcttggtgaagttgacgtatcacaggagcttgcattaaccccattagcaatgaactaccagggcagtgatcatgattccgtgcactcccctggggctgtctcgtcgcgcgataaagactcgcgagccttatttctggttccagctgcagatcccaatgcaggagctgtagttccagcaaataagactaagaggtcaccagagcagggacaccgcagaatcaggcggccgttctctgttgctgaagtagaagcacttgtgctcgcagtcgaaaagcttggaaccggaaggtggcgagatgttaaacttcgcgcttttgacaatgcaaagcaccgtacctacgttgaccttaaggacaaatggaagacgctggtacacacagcgagcatctcgccgcagcagcggcgtggcgagccggtgcctcaggagctgctcgaccgggtcctggcggcccaggcctactggtcccagcagcaagccaagctccagcctaagacgccctcgctggctgaggctcgcttgctcacccaataa

SEQ ID NO: 8854 - DNA, 1506 bp, Zea mays
  Peptide Sequence Number=SeqID_52229
atggcgagggtgtcttttggcctcggcggccacaggaaacacacgctacaagacaatccgatcctgcaggctcgggtcttaacgctggaagggagcagctgcaccctcggcatcgacaacaccttcggcgaggtacgaacaaccccactcgatgggggggggcctgcggagcaacagaagaccgacgaacggcgcgccgtcgcccgctccagcagcggcgacgacgacgacttctgctctggggggccgaacagcggcagcgatgacctcagggcggatgctgctgctaggaagcccccgcccgtgcccaaactcgtgaggcaaggacgggcagaaggccgtagagttggaggtcggcccgtgggcggccctggctatcccgtcgacggaagaacctcttccagctgccgtggcggaagccggcgccgagaacggctccgaagccactcgggtccgagagccaggcatgctgcagctgccggcgccacggacgacagccgcccttccccccgatcactgacggaaggagcgggccaccacccacgcaggggccgatcccaactcggcacactcccctccccagccctggtgatgaaaatccttgaggctgagggaggggcagaggccgcagcccggctcgctttcccccaccatcaaactggaggtcaccgtcttgggggcttggaaggtggaaagacacgatgcataagggagcgcgaagacgtggtcgccttccaagggggtcaccctccttttaaaggcgactctccctgcttgcgtccccagccgtcgcgggctgagtcttctccaacacgctccaagaccaacgggcgaaaggggcaggcagccatgcaggcggcatgcaaccgcgccaagtgggcgcacttctccgactcccaacacgcccaggaccgggaaagggggataccccgaaaaggatccttccccgagaaggaaccaggctccgagccccccctactgatcagaggtttgaaggctggcccctcggaagggttcgacagccacctcagatcgcgtgggccctacacccactattggtcaaaggttcgaaggccggcccctcggaagggttccacggccgcctcaggctactcgggctccgcgcccattactgatcaggggttcgaaggctggccccgaagggttcacagccgcctcagacgccgagcgagggatgaccatgggtacgttcgatacataaccaaggctcgggttgcgctcccgagctcaccggagacaccatgttcggcgcccatcgagggcaacatggcgctttcccccctcctccttgcggaaaggcgacgcaggggcgtatgtaaaaaagccgagtctgtccctgatcgccctctcgccctgtgcagaggctcgggggctgctctcgcaaacccggctccggccgaaccgttgacagcgtcaacataccagcccgagaacttgggacccgaccgtacacccgggctacggccagctcgcatgagggaatga

SEQ ID NO: 8855 - DNA, 1515 bp, Zea mays
  Peptide Sequence Number=SeqID_52230
atgaacagacaacggcactcaaggtgccattacaaacggaactccggttccgtccccgagggcggcgctgacggcctcgacggtggggaagcttcctccagctgccaccacgtcagcatcgacggcggcgtccgcctctccaccaacgccgcaccggcaagcgcgggccgctccaaagcgcaccggcaggtcctcgctcccgtcctcgccacgaaagcgaggaggaggacagaacgttgcatcctagctgggcagcacagttcgccttccctggcatggctggaggacgcctcctccgcagaactggaggatggtttccaccaccagaagctggaagaggaggtggccagccgacccgtgcgggaggtagagccccgactcaccttgctccccgccccagcaaggatgatgaagatccttgaagctgagggcgggaccaagatcgcagcccggtttgcttctccccacccaggaactggtggtcaccgtcttggaagaactgcgagtgtcccccatccggggctcggaaggtggaaagacgcgatgcataaggggagcgcgaagacgtggttgcctttcaagggggtcaccctccttttaaaggcaactctccccacttgcgtcctcagccatcgcgggctgagtcttctccaacacgctccaaggtcctccccctacgatacgggggctgggtcccacgcgacatgcaagctggcccagggcagaagaagccaaaccgccgcgcgcggtgcacgcaactgcccagcggttacaagcattcctccactttcgcccagaccagcaggtgaaagggcggaccgccatgcaggcggcatgcaaccgcaccaagtggatgcgccccttcgactccaacgcgtccaacatggaggcctaggcccacacgtcattaccgcgactcgaggcgactatgcgcatgacccaacagtgccaaccaggcacatcggtcatgggtcaatcagccacgagaaaaggcgtgacggtcgatacgaccagaaatgggccggcagaaatggcggtggcaggcgagcggaagcagcggtcaagttgtcagctaagctcacgtcccctcctgggacagcgagagaaccctctcacggcgtgaagacggcgcacccgtgttccgttcccccaacggctcgcgcacgcgcaacggctgccccgcgaaccactcgtcccgtcgcattaactctgcggcaggacaggcaacacctttggcaggagaagcaggcgacgcttcgccttcgccataatgaccgcgtaaaaaaagggaccgggaaaggggataccccgaaagggatccttctccgcggaggaaacgggccccgagcccccctactgatcagaggttcgaaggctggcccctacggaggggttcaacagccgcctcagagcgctcgggctccgcgcccgctactagtcagaggttcgaaggtcggcccctcggaagggttcaacggccgcctcaggccaatcgggctccgcgcccactactga

SEQ ID NO: 8856 - DNA, 336 bp, Zea mays
  Peptide Sequence Number=SeqID_52231
atggcggcgccatggggaaacaagaccataagtgagtatgcgacgccgacgtctgttcatagacaaaatcaatgcttggatatcgtaacaatggtgcaggaagaagaacaaggagggtaccagttagcgtcagatggaattaagcatacagaatcagctactgctgtaaacgcaattactccaccggcagctttgagggccccaggggttgatgaacagaccatatttgaggcatcaaggatgacagtaactgaaggagggcagcaccttaatactatgcgtactattggtgatcatgaacaggacacaccagtgattctgcagagacattattga

SEQ ID NO: 8857 - DNA, 1026 bp, Zea mays
  Peptide Sequence Number=SeqID_52232
atggtgcggatcgttgagcaccgcgccgagacttcgatggatttcgaggtggaggaggaagttgtgtcttccacaccactggttcccaaccgccctgtgccgggcgctgctactgtgcacgccgcacgacagcatacggctgcacagacatcccggactccgtcgagggtgactccaggagcattgtcagcagccagggagttgctgcgacaccctccaagctccacaacctcaccaggggccatgaagcaatggcgagacgacgtcgaccgactgcacggcatggcacactctacctcgaccaggtcgaggccacggtcatcccggcgccaacatgaggcgtcggcatctatgcgctcaccctcagtaaggggcgcacagaccaacgaccttcaagcagaacccgaccgcaggcgtgcgagagaggacgccagggtctctttggagagggcgcgcgagcgccgccaaaacatcgagggccgcaaccttgatcaagacttcgttgcggcggcaccgcagactccaattgaaagtcgcctagagggggtgaatagggcgaatctgaaatttataaacttaagcacaactacaagtcgggtggaaaacttggatacaatgaatgttgggggggttggcctaattgcagatccttcctctaaaaacgttgcttctccatccttgtgtgagcaaggggtagcagatactgcggcgagctcaggcgcgtcgaagaagtcagaccagactcgaagagcgacctgcaagtccattacacatgctcagaggacaccactcgctgagcctgacaaggtaggagtggattcgacggaggatgggggtattctcccgcacccgaatggcacacttgaaagacagctgaaggagagtgctaaccgccaggtgcaactccagaaggggaagggactgggggcgaaggatctgcgcagcgcgtgctgtcggggagagttcgtcaccggtgaagtggggcggtacgagggggattcagtatcaaactgctcgatcagatag

SEQ ID NO: 8858 - DNA, 633 bp, Zea mays
  Peptide Sequence Number=SeqID_52233
atggtcagggcgtttctgtgtgccgttcctgaaattaacttaggggaaacattctctagcagtctctgcgacgctaccacgcccgaggggttcggtcccgagacctccaggtgggtgacttggtgcttcggctacgacaagacgcccgagggcgccacaagctcacgcctccctgggaagggcccgttcatcatcaccaagattttgaagcccggaacatacaagctggctaacagtcaaggcgaggttcagacatcagtagggggagcagcagcaccctcggcatcgactccaccttcggcagaatccgacccagcctcggacagcaacacggtcggaggatctccacctcgaaggaagatgtcaacactgcgcctgagccatcgccgccaggatctcctccaggaacctggcccgagtagacggctggaccggtcgctccgtagcctcagccagctgtcccccgaggacgccagcccggctcatggcctcggcagcccgactccagggttggttccgccagcggacgacccggccaggctccggccgacgaagttttcttctccagccgacttcgcctctgtccacgctcacaccgctgcctccggctccggctcatcgcagagcggctga

SEQ ID NO: 8859 - DNA, 996 bp, Zea mays
  Peptide Sequence Number=SeqID_52234
atggggagcgcccgcgttgcttttgtcttgttgttgttggaggagcgcaacttcgcggaagttggttacctttcagccatcgctcggcttcaaggattttcatcaggcagcccggctgcatcccctcaccaatggtcacccaagacggtgaccaccagttcgatggtggggagaagcaagccgggccgcgacctctgccccgccctcagcttcaaggatcttcatcatccttgctggggcggagggcgagctgagtcggagctctacctctcgtacgggctggcgggccacctcctccttcagcattcaggggagagggcgctcaccggcctagcggagggggcggacttcgacaacacggggccgattggccgcaagcgtcgtcagctccagcatgcctggttcgctggctcagctggctctggcacagcttccggtgccacctcccaccgttgggcggagtgcggctatctgcccaccgtacgggcggctgttgtgccgcacgcaccgggggaccgcccaagacgtcgcgcgctgctagggcggcgttcgtgttcttgggttgtcctgcccttgctccggcacgacgcctccgcgcggagatcggtgctcacccgtccgggaggacttgagtggagatctcccggtgggcaggtggctgccatcgtcggtgctgaggtggtggcggctgaagaagtcctcgtcgccgacgagatcgccgccgccatctgcgctccgggcctccggctctttggctttgatagcttgtcctcgcccctcgagtggggacgtgggcgagggccttgtcgcagcagcgtctaccctaaggtcatcactactgctgtttggccgcccggagcggaggtcgttgtcgctgctgcaggagtgggcggcggcgagccacctggaagttgttgttccgcaggccctccgatgtggggggttgttcgtacctgcgggagtggaaccggagttccgtttgtaatggcaccttga

SEQ ID NO: 8860 - DNA, 819 bp, Zea mays
  Peptide Sequence Number=SeqID_52235
atgctccgacaagcaattgccagccctggctctgcccatcgaggccatgggaatgttccttgtgatcttgtgaagctcctttgccacctcccaaagcccgaacatcgtcgtcatcgatttggtggtggctctcctcttggtgcgcattcgctcgacgtgcacggttctctcggcaacgacaacgagatgctcacggttggtgtgttgaatggcgtaagggtgcaggctggtggtatttatgctctagagcccacgagattcgccacaggaaaaagagatgacgatcctcggggcgcgctctgctataattcaccggacaagtccggtgagccaacggagcaacgcaccggactgtccggtgtagctacaggagaaaaggttccaacggtaaccgctccaaaccccaacggacatgctgacgcggcacacaccggatacctcaccggtgatctcaccgcagagggcgcccgccacctcaccgtggatcggccgtctcgagcaccctccgaccaaattaacccctccaccatgatcccctacccccacccgttcttagccacctccccgaccacctggaaccggaaccacggcggagaaccaccgtggaacctcgttggcgtctggtttttcccgaccccggccggttcacccccacccccgtccggccacccgacgccgtcagcctccccctccctctggcacatgggcccgcacccacggcgccgtccccgcgccgtcccccgctggcgggctaagctgggccgcctgccgcgcggccgcgcgcgcgccctggctaggacgaaatcccccccgacctag

SEQ ID NO: 8861 - DNA, 120 bp, Zea mays
  Peptide Sequence Number=SeqID_52236
atggagcagagtagtgatgggttgccaatcagccagcggagggctaacagttcaacaaaacactcaagcaagtcagatgaggttgctgaagacatggagggctacgtatcattatattaa

SEQ ID NO: 8862 - DNA, 417 bp, Zea mays
  Peptide Sequence Number=SeqID_52237
atggcgagcagagcgtgccgcacagggagcaaaggcgagcgctatggctgccagtggccgagagcaaaaggaaagaaaaaaatggagcagggaggggcgctgcttggggctcggctgggggagttcggctgtgggatttttttttttgggcgccatggctgccagtggccgagagcagggagctcgccggaagaaacacagcaggggcgctgcgcagagaagggcgcaaggatttgtggccatggacagggaggtcgctcggctgcttctcatccaagcaaggcgagcaacagcagggaacagggaagtccgcgaccaccatggcggggcgctgggataaaagaagggagtaggggtcctcccgccatgggaaaaaagggtacaggggcttggaccccatggattccgggagggtag

SEQ ID NO: 8863 - DNA, 255 bp, Zea mays
  Peptide Sequence Number=SeqID_52238
atgggcgagtccggggccgccacgtgtccagagaaagtgatatactccaaggcatcaacatacaatggatcaagcagtctcattagctgcgagaagcagacgattcgaatcgagtttttaaaccttgcaagaccacgcgtccccatggacccgtgtccacagaccgttaccattctgttatcaaagtggatacaaccaattcctgacctcgcgcgagtgctagaaaaatcactcgacttctaccgagatccctaa

SEQ ID NO: 8864 - DNA, 289 bp, Zea mays
  Peptide Sequence Number=SeqID_52239
atggggacagtggccaagacaagctccagcgtcacagccactgtggaccggtgttgggtggacgcaggcacctccaggcacttggacggctccaccaccccaaggatcgcagccagtcctgggatgggtgccaccggtctcccagccaccggcgggctctcagccatttcaagcgtggatggcaccgccaccgacgggggttcagtgtcacatgctcaaggatcggagggtgctgtcaacgtccaagacttcctcgtccatggttctggagggagtggccaccttcctg

SEQ ID NO: 8865 - DNA, 1974 bp, Zea mays
  Peptide Sequence Number=SeqID_52240
atggacgccgtcgcgttcccgccgccgcccgcgccgttcctcgacgacgacctcgatttcggggacttcaccttcgcctccgcgccgcagccgcagccgcagccgcccaccgccgccttcgacgacgactggggcgactttgtggcaagcgggctcggatccgacgcgggcgcatctgccccgacggacgcgccagccgccgctccctcctcctcgccttgggagaagccgcggggcccgctgcccctctccctgttcggcgccgatgccgacgacgacggccaggaggaggaggaagggccggccgggccgccgccgatggacacggcgccccagtgcgctccgtccgtcccgtccaacgggtcgcgccccgcggatctgaaggacctcatcgctggcctctacggatatcagccgccccacaccgccgacgcggtcccgcaggtgaaggcggaggaggatgaccaagggtttggagacgatgattgggaattcacggcggcgacggggcaacctgctgctgatcaggatggaggcggaccagggcatgcggatggatttggtaagatcgaggatatatcgaagtcattgagcaccgaccaggaagactggtcatcgtttaccagtgccgatggcaaattgaaccatgttcgtctaacaaccgatggtcttgggaatcatgagtccactggagaatttgtgagggcctccacttattcaccagctaatagttcggccatactcaacctgtacaaaggaagcaaacgggttgatgatgttgtcattgcccaaggctctgcagaaagtgtccagagttcatctgatctgttttctaataatgaaatgggagcacagaagggatctacaatctctgatgaaaacaacaaagcgactgcaatgggaggggatattcaggaaatatatgacaaactaaaagattcttcattgcccgaaggctttttcacagaggaacagccttggaaggatatatatatcacagaactccttaattgtatcaaagaggaacatctgaaggattttgaacaagagtattgtttagcagaaaagatagaaggggcaacggaggacacagatattgcagttgaactttataagctcagtatttccaccctagatctattgaaactagcatccaaagaggaacagggtgattatgtcggtgcatggtacagtatgcttctgtcctgtgctcaagaattgaagcatggcgtggcactttggcaagagttttatcatgcaaatgtctgcgacagagtagtttctgaaggcggtcactactttattgctcttggggagatatatagagttgcacagattttatacttatccttgcagcgtttcaagccctgggttcttgcagatcctggaatgttgagtaaaatgttgtcttgtttggacagctgcacttatgcttggactagtggtctggaaacggctcttaagatggtcattgacagcagtcacatagattcatcccttgctaaagctctgatggagtccattaagaatattacaaaacttgaggtgcccaatctacaaaaaaatattcccaacaatgagatgcaatgtagactaactctcttgccaagtagtcttctgccaggtcattcttttgtacaagttgtaatttacaacattctttccatagtgccggatgatgtcactaagtatagcaagtcgaaagggaatgacaagtttggaagtggacgtctggcaacgactgccaacaagtctctcgagattgcatccttccaacgactgtcaagtatcctttttgttttttttccccaattcaacggcataacagctattcgcaagattattgtgttcagaacaagtccagcgcttgaattcatggtgattgacataagaggaccgctgaggcagcagcaagtttcgttcaatgcagctgcagcttcatctatgatcatcaggcatgcagctgaaaattga

SEQ ID NO: 8866 - DNA, 1212 bp, Zea mays
  Peptide Sequence Number=SeqID_52241
atggatatttctgtggatgactaccttgttggcggagtcccaatattcgacgcccacacgggactaggtcttgctgggtccgggcaaatggttgttgtcccgacgccggtggtggctggtccggtggccgcgccgaccgtggcgaaagggtcttcgcaggacccgtggtccaagttctgcgctggcggtgaaattgcctcggccgccgccgcgaaggacgtggccgcctcagttgcgcagcagctgagacacgcgtccgccttcgccgagcacattgcgtcgggggcgttgatctcggagttttctgccgaaaggcagggactcgaggggaggattgaactggctccgaaccggaaaaggaagacgcggaaaaagcccgcgccgaggcctaggttgcccgtgctgaggccagcctcaccctcaagcgcgccaccgacgcggagttggggcaaaggagtctgcacagctttgcggacaaagcggaggcctccacccgcactgggtcgaccgagcacacgcgttgctcgtggacgcgtaccatcagcttggtgcgcgtaccgccccttcgacacatccggcaaagaggtgggcctccgcttcctcgggtggctgcaggaggagttggagttgctcccgtccatcgtgatgggtatcatgtcctttgcctcgctcattacctgcgagggggctgcgaatgttttgtcccgtgagggatgcaggcatttcgaagtctttgaccgggcaaacgaggacttcgaccgtggaatcttccagatcgaagacgaggtgttaaagcggtccgctggggcgctttatgataggatgtggggccctcatggccgtgatactatccgagagaggtccaaccggacgttggagcatatgatgaacgatgaagaagtcgatgacttcggtggcctggaaatattgttgactcaggcagaagatgcgaggatgggggttgaagagcaaccagcaccacaaaccgaccctggtggagactctgcagcggcagctgcgtcgactcgcgaagacgctccagcggcagctgcgccggctggcgaagaccctgcagcggtggctgctcctttgcaggtggcggggtcgtccaaaaaggctactcggactggatgcaccagacagtgtccggtgcgccaggctggctctggtgaaaaggccgctctcgggacttcgtcggcggcgtacgactaa

SEQ ID NO: 8867 - DNA, 741 bp, Zea mays
  Peptide Sequence Number=SeqID_52242
atggggcacgacgagggccaggcgcgccgatggggcacgacgaggggcggcgcggcgatggggcacgatccatcgtcggaggtgcaggagagggagcagcacttgaaccacctgcctcgtgatcatgtgagcatggagggcgagagaaacccgcgcgctcgcccctgtcctgccgcgggatcgcagttgccgtccgcttcatccccggacccggaggtaggcaccaggcaggcggcggcaatgctaccgggctcgccggtgaagcgcctgctgcggcgggcggccaaggggcggcgggagaaggccgagctggcggggctggccgcggcggccgccgcgctgctgctgctctgcgccgcctcgctccgctgctcggccaccgcgcgcgggaggctctgggccggtggggtctccatcgcggcggcggggagtggcggcgaggaggagtgcgacctgttcgacggggactgggtctgggctggcggcggcggcgggtacccgctctacgactcccgggactgcccgttcctcgacgtcggcttccgatgcgccgagaacggccgccccgaggcgtcctacaccaagtggcgctggcagccgtcgcgctgccatcttcccaggttcgtttcgttgctgtcttcttcctcgcttccgtcgtcccctgtccgccatctcaagaatgtagagattggtttgctaagcttgtcagagcggaagaagcgtgcgcgggcatactactag

SEQ ID NO: 8868 - DNA, 777 bp, Zea mays
  Peptide Sequence Number=SeqID_52243
atgccctggaaatgggacaggcatatccttgagagtcttttctttagtcagatgaatcaacaagaagctcctacaggagttggagagtttctacgagattttggtattccaatggtcctgtggcaactacttcaagaagttggatatattgaagcacctaaaaaaccatcttggccacattggatgttccatgctgaaggaatgactccttgggaaggtgctcaggtaactgccttagaggtgttgacaacaatatgttaccagaagtgggaagaaatacaggccacgtctatgaggttgttccctgcagttgccttaagcgacccagtggtgtatcatcaccaggctcgattaatggaaaacattcccattgggcaggattcggttgaatcagcatctgctcgagttttgatggtcgtgctagagttgcagcttactcgagggcacagtcgtcaaatgtggcagcagttgtacactgggagttatgcagcatttaagatgatggaaatggccaagaatagggcttgtacccaggcacaagaacaactggaggaaacaaagattcaagctaagcgaattattggattagagcatcaggtgacagaacttcagacgcaacaccaagttgatcagcatcgcattaaggagcttgagcatcagctaactaatgctcattctaaatcaaaagttttgagtcagcaacaagaagaaattcgctcgtatgctgttactattagggaagaacttaaagaaaccatgggcttcctaagtcattag

SEQ ID NO: 8869 - DNA, 147 bp, Zea mays
  Peptide Sequence Number=SeqID_52244
atggcgggcggaagagagctcgccagagctaaggagtggtgtctggctagcgaggaggggttagttagacatgattttgtcaatgggagcattaggattagagctaaggatcaaggtgaacacgctcgattttggttcaagggctga

SEQ ID NO: 8870 - DNA, 354 bp, Zea mays
  Peptide Sequence Number=SeqID_52245
atgacgagtccgtggaggttgagcgtaggaaaatctcaccccgtcgagtatatcctactgcttgggattggagttgagtccgaccaaggggccacagggggaaaaagaaccggaaggaaatatggttgtgcacacatgaagtggactgatgggtctgtaacttggcccaagcgcagaaaagatattcaatctagaagtaattcccaagattgcaatctcgctgacggagaatacgtgctcatccccgagcaaggagctgtccacgaggaagaccaggagcaagcttccgagactgccatcgaggatctccctgcagccccggctattgaaggcaagccccggttttatgcataa

SEQ ID NO: 8871 - DNA, 174 bp, Zea mays
  Peptide Sequence Number=SeqID_52246
atgaaacttggtcagagtgtttaccgtatggactggcagctatgcctggagagtggagataagtggaggtggcaccaccaattccttgatgtaccaggaatgtttggattcttgtattctgacattgtttggttcaacatattcaagttggagcgtcaggtctccaataattaa

SEQ ID NO: 8872 - DNA, 306 bp, Zea mays
  Peptide Sequence Number=SeqID_52247
atgtgtgcacccgatgatttttgcaagaactcgaagcaattaggaatcatggctaggtccgggttcagagagcttagaatttggggtgcttggcttcgaaaaggaagaacaggaagagaagggagcaggcatacctggtgggtaatagtctccggcaatgaggtggagaagcgaggcagcgttcgcccggccgtcgttggtggtaccggtgaagacccgaccgtggcggtggcagttgcctggttattcgttgcatggagagagatagcgagtgaggtgaaggaaaggacacttgggttgggttga

SEQ ID NO: 8873 - DNA, 372 bp, Zea mays
  Peptide Sequence Number=SeqID_52248
atggtgatgcaccccttgggactcttccctgctgagaagagggatgaccccatgtggtgcagccgtgccctgcagagcgacgctatggcacatcttgttaacctcgctcagaccaccaagctcaccctcgacagccgagaggacttcgtgcaggagcttgaggaagctaacgaccacctggacatgcaccacctggagatggaggccaatgaggccagaagtgagggagaggaggctcccaaggagttaggaccagcctcctggtaccaatctaggaagtgtcgtgggcagaacaagcaagttccctcgccacctcctccagctcccacggtgcaggagctgatggctcagcagaacgaaattctgcgatag

SEQ ID NO: 8874 - DNA, 198 bp, Zea mays
  Peptide Sequence Number=SeqID_52249
atggcctatttgcaaatgaacgctccacatggcccgacggttgcgccgccggttctggcggctgttgctgtctcgtggtgcacgcttctcggcttccgtgatcacgtgaaaatcgaccggccggcggagcaacaggcacacttctctgttacaccgtggttcttttctcgtggtgcatgcatctgcgttcacccttaa

SEQ ID NO: 8875 - DNA, 285 bp, Zea mays
  Peptide Sequence Number=SeqID_52250
atggcactggtctctggagaggagcaggtggagagccttggggatgaggaggtggcacttgtggccagacggttcacgcggttccacaacaatcgtatgagcccgcgacgtggtaggtccaaggacggatgctataactgtggcgatcccgaccacttcgttgccagctgccccaagaagggcaaagaggagtccggcccatgcgaccatcactttggtcggcgcaagggcaagtactccttcggcaagtacaagtccaagggaggattcaacaaggaggcttaa

SEQ ID NO: 8876 - DNA, 426 bp, Zea mays
  Peptide Sequence Number=SeqID_52251
atggcgagagtacgagaacttacacagttggctggagagaccatcgattatatgttctctaggttccagtcaatcgtgaacaagatatgtgccaacaaggcacagctaccctataacgatcatgagagagctctgaaattactacatgctctagatcggagggtttgggaggtgaaggtctcggtgatcattgagtcacccgactacgagactctcatcgtggacgagctcttcagcagctcaagtccacagagattgaccaccagactcgggccaagattgagaaccctggtgtcggcgtttcgaccccggggggtccctggaccgacgagtaaattgtcgctgcgtgtcccagcccagatgggtcggcgcgagatggaacacaagggggaaagagaaccactgctcgtgttatcctgcgcctag

SEQ ID NO: 8877 - DNA, 498 bp, Zea mays
  Peptide Sequence Number=SeqID_52252
atgatgctggtagactacacaacggtactcgatggaccaagtgttacggtcgaaggcccgacgcagctgggtatcgagagcgccgtggaagtgacacccgcgagcggcgtctcgagtgatgggtcgagcgatccatccctccgggctctggctcctctgaaagctctgtgtcatggctcgaactgccactgggcgtcgtcgtcgtctccgtctccgtcaagggtctcctccagcagtcgggatgccttgaagtggtgcaggggggcatctctggctgaggtgcaggggaaggtggtctctcatactccacctcctgctgaggcaagggggaagagtcttgttgctcctgctcctggcgtcgacgctcctgcttctcgtgcaggagacgatgcagcctctccagctgactggagtgacctgacaccgtgcgacgcaggggacgctccaccaggcgggaaggcaaaaaggggatcacagacttacgtgcagtgcacctga

SEQ ID NO: 8878 - DNA, 1011 bp, Zea mays
  Peptide Sequence Number=SeqID_52253
atggataaggatcgtcaagatgcggcacagaagcgccgggcattcactagggttggggaccctatgcgcgaggtgaagcgagcgcggggaggcgcgaagtccattgcccctggcggcagcaaaccaccgccggcagcgaagcctgccgtccccgggcccagcaagtcttcggcgggttcgagggctgccgcttctggcgcgggcaagccgccctcgactgaacccgcgaaggagcgaaggcctccgtccccggtgcgcaccgacaaggcggcggcgggtggtgctaattttgatacggacatctgcgtggatgattacctcgttgggttggatgcggagcagctggctattgtcccatctccggtggtggccccttcgcctgtggcggcggttggagcgaagggcacttcgcaggacccatggtccaaattctgcgctagcggcaagatctcgttggccgccgccgctagggacgtggcaggcattgtgtcccagcagctgaagcatgaggagctggaggtgctcctgaccattgtgacgggcctcatgtccttcgcctccctcatcacctgcgagggggccgtgaatgccttgtcccatgaggggtgcaggcacttcgaggccttcgaccagtctgacgaaggcttcgagcacgaaatcttccaggtcgaggacccggtgatgaagcggtcggctggggctctttttgataggatgtggggccctcacggccgagagactgcccgggagaggtatgactgggcgatggatcagatggcacatgacgaagaggttgaggaccttggtgatctggacagcacgctgcccgaggcatcgggggtggagttggcgccaccatccgatgtaggcgagggcccctcggcaaccctcgcaccgactggagctggcgaagaccccacgccagctaccgcactgacgggtgcggacgccctaaaggtggtggccgaaccagctgccgaagacccagggccttcgcaggtggcggaatag

SEQ ID NO: 8879 - DNA, 48 bp, Zea mays
  Peptide Sequence Number=SeqID_52254
atggacctcttcggacccgtcacctacctcagcatcgggggaatataa

SEQ ID NO: 8880 - DNA, 474 bp, Zea mays
  Peptide Sequence Number=SeqID_52255
atgggcaagaacaacaagcgtaagcgtgaaccgactcctccatcggaggagtttggtgactcggagtactcggaggaggagttctcctccgagcccgaggggtctccggctcccgtctctcccccggcgtcgtccgatgactcggacgactcccaggggatagccgcggaggtctggacatacatccgggccgtcgagcgcgccgggctcgaaggctcggatgagtcggagtactcctcggatgaggaggactcagacggcggcgacgagggtgaagacgacgacgacgacgacgatgatgacgacgacggcggcaacagtggcaggggcggcggcgacggcaggggcagcaccaagggcagcagcaggggcagcaccaagggcagcagcggcggcagcggggacagcaccaggggcagcagcaggggcagcaccaaaggcggcggcggcggcaggggcagggccagtggctag

SEQ ID NO: 8881 - DNA, 459 bp, Zea mays
  Peptide Sequence Number=SeqID_52256
atggcacccaagagagctagttcgaaggcagccccatccgtcgatgaagcagcgaaggtagcgctgctagccaagaaaaagggcaaggccctcgcagacaacaccccccaagaagtctgcgaagacgaagccctcagcaagagacagtgcaacgaccaacccactcccgaaggcaccctatgcacctgcagctccggaggacaaccacaagcaccacccctaggcttcgctccactagagggcgaagacgcaatagaggacggcgaagtcatcggcgtatcagccgaagaacagctacagctacgtgccctgcgcatcaagaaccgcaacctccaaaagcagaaagacgtcctcgaggccaagcgccaacgtgtcaccgcgcaagccaaggtgcgccagatgatacgagatgaggagcagagagcccgagaactcgagcaagagattgcgctcatgtag

SEQ ID NO: 8882 - DNA, 600 bp, Zea mays
  Peptide Sequence Number=SeqID_52257
atgcccgctacccgcctgcggaggtcattggcagagagggagaccaaggacatctgcgaaccctccaagtcgacccccggcatcatctccgaaagcggcaaccgccgctctgccaagggaagcaccctccagcggtggatggcggcaaccacccccgcgacggtcggccccgctcggagggaccatccactccgcctgtgggtcaccagagaggggacggagcaaaccatcggcaacgagggcctccagatcatatcgtccaccgtgacggtggagaaaggccacgggtcgcgcggcggaacgacagtcacccgatcggccatcgccaaacgaagggggtggtggctgagcggacaaggtgcacagttttctttctctggctattctcttaggttgcggaaaccaaagcaggagacgagcagcagagtaaagaaccaccgtcggtccctcttctgggtatataaaggcccgagcaagacccgttcaacacttcgctcgaatccgccgcgaaattcaaactcgaaggcgaaacgcccgttccttgaacgactcgcgcacgctcaacggtcgccccgcgaaccacccgtcccgtcgcattaa

SEQ ID NO: 8883 - DNA, 132 bp, Zea mays
  Peptide Sequence Number=SeqID_52258
atggctcaagaaatcattcaaagaagcgaaaaaggcatccatgatgctaggaagatagcagaggctgctgagaaaagcgcagagcctgaagggcaaaatagactttgtttgcggtttgtattagtaatatag

SEQ ID NO: 8884 - DNA, 441 bp, Zea mays
  Peptide Sequence Number=SeqID_52259
atggagaccaagtcacaccatcaaccaaatcaaggaggtacctgcaaaaattgtgccacaagcaaggctgagtatactaatactcagctagacttacccgtgaccgcacttgtacccaccatatctagaatgggagacccagtctcaggtcgcatgagggataaagtctgcgcccggcttcactcaggtactaggtttaccggttaccatttttcccgacatgtgtttagtacattcaaacgcttgacacagattcttagcaaagtcgaactgtgcaaaaataacaggtctgtccaggttggacagattcagacttgcgacttcaaaaattcacaactacaggttcaaacatccaaacaaattgatcctagactttctggaaagatcaccaaaaagagtgatccaagactttttgaaaagcttagcaaaagtactacatga

SEQ ID NO: 8885 - DNA, 1056 bp, Zea mays
  Peptide Sequence Number=SeqID_52260
atgggtcggcgcgagacggagcacgaaggggggaaaaaggagataggcaaaaggggaaacctacggcctttcgtgttgtcctgcgcacaggtcgggcgaggcggaggctcctccgaggtcgaggtcgagtctgtcttccgaggtcgaggtcgagtccgagccccaggtcgggcgaggcggagaccgtcgtccgaggccaaggccgagtacgagccctgggctcgggcgaggcggagttcgtcgtcttccggagccgaggctgagtccgagccttggggtcgggcgaggcggagttcgtcgtcttccggagccgaggctgagtccgagccctggggtcgggtgaggcggagttcgttgtcttccggagccgaggctgagtccgagccctggggtcgggcgaggcggagttcgtcgtcttccggagccgaggctgagtccgagccctggggtcgggcgaggcggagcttcctatggcacccgaggctggacttggctgctgtcagcctcactctgtcgagtggcacagcagtcggagcgacacaggcggcgctgtcttcttgtcaggtcggtcagtggagcgatgaattgactgcggtcacttcggctctgtcgactggagcgcgcgtcaggataaggtgtcaggcgatccttgcattaaatgctcctgcgatacggtcagtcggcatggcgatctggccaaggttgcttctcggcgaagactgggcctcgggcgagccgaagtacaatggatcaagcagtctcattagctgcgagaagcagacgattcaaatcgagtttttatccttgcaagtgaccgcacttgtacctaccgtaaccggaatgggagaccatgtctcaggtcgcgtgaggggtaaagtctgcgggcaggttcactcaggtactaggcttatcgatttaccatatttctcggcatgtgctcagtacgttcaaaagcttgacacagatcacgcatccccatggatccgtgtccacagaccatcatcattctattatcaaggtggatacaatcaattcccgacctcgcgcgagtgctag

SEQ ID NO: 8886 - DNA, 888 bp, Zea mays
  Peptide Sequence Number=SeqID_52261
atggcgccccgcacgctctgtgacgacggcggctctccgccccttacgaaagcaagaggacgccagcaaggactcgacagccccgatagctgtccttccgccagactccagcgctcctccgacggccacgacaccgcacgaaccgggtgccaaaacctctccggctgccacgacggcatacgttcacagcccgtcagtggtgcacggttctgccgtggggcaccctgcatcccgcccgcctcgccctcccccggcaatctcggcgctcgccccagcggcaatctcggcgtccccgcgacaatctccctcccccgcggcaatcccgccgtcccctgcggcaatctcgccctcccccgcgcaatattgtgccccatcccccggttcggcgtccgtgcccctgtcgcgctctcctacctccatgcccccgcccactacacccgcctcctgatgccccgccacggtgagaagtctggatcaggcactgaccagcacccatacgcccccaccagtcctcgggtgcccccgcctcacgccctcaccgccgttcctcgtcacccgtcgcgcgcgacgtcggtccgctgcagggagaaaggagcaggcgtcggcaacatccgtccgccgcgtgagtgtgctcttagcggcgtcggtcagaccatccgcctctctccttccagcatcaagaactacaccaaacagaagggctcgtgctcacgaaccatacttggctccggatgtgtgcagtgtgctcttagcggcgtcggtcagaccatccgcctctctccttccagcatcaaggcctcagtgggcgtgtcacactcttctttgttcaccatggacactgatgctaggccaatggattcgagaaggtcaagcactggaaaccaatag

SEQ ID NO: 8887 - DNA, 258 bp, Zea mays
  Peptide Sequence Number=SeqID_52262
atggcctcctcgtcggcatcttcgaggcaccaggtcaccatcaccctcggccgcagcggtcaggctgaagccccgcttacagttactggattgttgaattcgttgggtcttgagaagtatattgttctctttcaggctgaggaggtggatatggctgcattgaggcaaatgggggagagtgacctcaaagacatggggggcccgaggaagaagattctccttgcagttggccctcagtcgaaacaacggcaaatatga

SEQ ID NO: 8888 - DNA, 891 bp, Zea mays
  Peptide Sequence Number=SeqID_52263
atgggctcctttggcctcgttgccacactccatgtggccaccgcgatgctctggctcgatgtcgaggtgggactgcttcactcacccatgacgttagaaagagctcctaaccatacgctggggaatgctaccattttgccacaacactgcttttcagctccagtaattaagcccagtgctacaaatgtcgcgaactcgagggcgataggcacaacattatctccaccacctggtgtgatggttccagttcataatgcagtaccatctgacttatcagttaaggatgagagggaattgaagcgcgaaaagaggaagcaatcaaatagggagtctgctagacgatcaaggctgagaaaacaagctgagacagaggagttggctacacaagtggagtctcttgcagcagagaacacgtcccttagatctgaaatcggccggctaacagagagctcagagaagctcagacgagagaattcagctctaatggcgatttcatgtcaatcagcctttcctctgacgcgaggtgcactgtcacttatcaggtcccagccaaagagcaagttaatgcactatcaaaggaattgtttgcgctttcaagtgtcacaggtctcagccaaagggcaagttgatgcactatcaaaggaattgtttgcgctttcaactgtcacagacaatagatgcacatcctatgacacagtttaccacgagagtaatggctcttcaggagtttacaacctttttataagagctctctcaagctatcctacggatgtgagtgaatcttggacagaaaatgcagattacataatggaagaatgtgaattgctgggttcttggggcccaggtgaatgtcctcatagcagagtggtgactgctatagctctttgttag

SEQ ID NO: 8889 - DNA, 1221 bp, Zea mays
  Peptide Sequence Number=SeqID_52264
atggcggagctgaaggttgttcttgcgcgcctgctgagcaagttctcgttctcggtgtcgcctgggtaccagcactccccgatgtttcggttgaccattgagccggagtccggcatgcctcttgtgatatggagtttgggttctccagatccaaacttcacacttgatgggcatcaaaagggtgtcaactgtgttgactacttcactggtggtgataggccctatttgattactggttctgatgactccaccgcaaaggaggtagggagggcgtccacaccctcaccacggcctcgcccggacgtcgcgcaagccccgctgcccgcctgcccccggaaatttcacccgcaccgtgcccccgaccgcctccccatcgtgacagccgcctcgacgtcctcaccacggctcacaatgcccccgtcgatctatcgtctgtgtcccccttcctccctgggtctccctctcatcctctatcgcggtctgctcctcggcaagatccacggccgggtctcctcctcggcgagatccacggccgggcaagcccatcctgcccacgctgctctccatggaatagcggtcccagcagatctcctctcccccgcggtccactcccccaacgagctgctctccatggaacaccggggtcgcggtctcctactcggcgagatccatggctggcgtcctctgctgctgagcccacctcccgcctctctgatcgaggtacgctacctacgcctgatatttgaggaggtcagcgctgggactcagattcatggtgctcctaatgcacggaagcaaagtctccaggctgcaaatgtagtggtcagggaagacaaaagactgctgaccgtcctttttccagatggccgtgatggtcgcacctttaccttgaaggcagccaggcccggcctcaggcaccataggaaactccgcttcgcccgacccagggctcggactcgggctaagccccggaagacggcgaactccgctccgcccgacccagggctcggacttgggctcagccccggaagacgacgaactccgctccgcccgacccagggctcggactcgggctcagccctggaagacggcgaactccgcttcgcccgaccccagggctcggactcagccctggcctcagccgacggtctccgcctcgcccgacccaggggctcggactcgacctcgacctcggaggagcctccacatcgcccaacctag

SEQ ID NO: 8890 - DNA, 861 bp, Zea mays
  Peptide Sequence Number=SeqID_52265
atgaacaaaagaccggcactcaaggtgccattacaaacggaactccggttccacctccgctgcagcgacaacgacccccgctacgggtggtcgaactgcagcagcgatggcctcagggcggacgccgctgcgaccttgccctcgcccacgccgacgctcgaagggcgaggacaagggccgtcagccctctggcagatccccactcagatcctcccggacgagtggggcactgacctccgcgtggaagcgccgtaccggtgcaaaggcaggaccgccccagaacacgaacgccgccctggcagcgcgcgacatcttgggcggtcctcccgtgcgcacggcgcgacaaccgccttcgcggcaggagggggcaccgggagccaagccggcgagcccaacgcgctgcggctgacgacgcccgccgtcgaccagccccgcgttgtcgaagtccgcccctctcgcggggccggtgagcgccctctccctcgaacgttgaaggagaggctaacccacgaactcgcgtgggaggtagagctccggctcagcccggcctccaccccagcgaggatgatgaacatccttgaagctgagggtgggaccaagattgcagcccggcttgcttctccccacccaggagctgaccagcgggtgaaagggcgggcagccatgcaggcggcatgcaaccgcgccaagtgggcgcacttctccggcttccaacacgcccacgcgtcatgcaaccggcgcgccggtcgctacgtgcaagcaactgcaccgccactcgcaccactaccgcgcctcctcgactgcggaaccagtatcgcgacccgaggcgacccagcgcacgacccagcagcgccagcctag

SEQ ID NO: 8891 - DNA, 396 bp, Zea mays
  Peptide Sequence Number=SeqID_52266
atggagctcaagtcactatctcaaagaatcgaatgcgtgaagttggagtcttggagtcttagaatgtttcttacgactgttgcagctctggggcagttggcgcaccggacactgtccggtgccccctgccgactgttggcgcgggccacgcgtcgcccgcggattgcgcgaccgaccgttgcgctggagaccgttggctcaccggacagtctggcaatcaggcccgacctcaggcaccataggaaactccgctccgcccgacctagggctcggactcgggctaagccccggaagacggcgaactccgctccgcccgacccagggctcggactcgggctaagccccggaagacggcgaactctgctccgcccaacccagggctcggactcgggctaa

SEQ ID NO: 8892 - DNA, 204 bp, Zea mays
  Peptide Sequence Number=SeqID_52267
atggccgccccgcgaaccactcgccccgtcgcattaactccgcagcgggacaagcggcgcctctggcaggggaagcgagcgacgcttcgcctccgccataatgaccgtgtcaaaaaagccgcctcagagcgcgtgggctccacacccactactggtcagaggttcgaaggccggcccctcggaagggttcaacgaccgccttag

SEQ ID NO: 8893 - DNA, 642 bp, Zea mays
  Peptide Sequence Number=SeqID_52268
atggagtatcatgtcgtaactgccgtcgagggacatgaactcaagactcccgaaacggagcaccgtcccgggctggagaggttgctagagactgcccatctggagcttgacgggaagttgttcgtcaacacgcagcaggcccctacctggcgcgccaactgtcggcgtttcgagaccggggggtccctgggccgacgagttgggcgatgtggaggctcctccgaggtcgaggtcgagtccgagcccctgggtcgggcgaggcggagaccgtcggctgaggccagggctgagtccgagccctggggtcgggcgaagcggagttcgccgtcttccagggctgagcccgagtccgagccctgggtcgggcggagcggagttcgtcgtcttccggggctgagcccaagtccgagccctgggtcgggcggagcggagttcgccgtcttccggggcttagcccgagtccgagccctgggtcgggcgaagcggagtttcctatggtgcctgaggccgggcctggctgcctgtcagcctcgctctgtcgagtggcacagcagtcagagcggcgcaggcggcgctgtccttctgtcaggccggtcagtggagcggcgaagtgactgcggtcacttcggctctgtcaactga

SEQ ID NO: 8894 - DNA, 1307 bp, Zea mays
  Peptide Sequence Number=SeqID_52269
tgagaaggacttctgaactatcgctcgaaactatcgacgacggagatcgagccggaacgctcggctattccaaggcagcgctcggcacgcccggcatacatccccggcggcagtcggcaaaccgtcacggcctcacaacacaagacaccttcccctcacctgaccggcgcgaagatcccgccgaagaagtccccgctcctgcccggcgcggagaccccgtccccggcctccacccgctcgaccccgtccccgtcccctcccccggcctcgcgacgatctcgcccgcccctgctcgcccgcggcggcgaccgctcgcccctgcccgcccggcggcgctccccgcccctcccccgcgcgcggtggcgatcccgccacccagctcggctgccatggccggctcggccgcccccgcgccctgccccgtgcccgcccggctcggccgcccccatgcccgcccggctcggccgcccctggccggtggttatgagatcgatgattctggttatgactatggtgctggtaagtgccgcccccctgcaccaccactgggcgccccagcttctggagtagctgctggaggagacccagacgacggagatggcgacgacagctcgagccacgacatcgacttctctgctaaccttgagccggaaggatgggttgctcgacccatcactcgcgacgctgctcgcgggtgtcacttccatgatgcgctcgacaccctgctacgtcgggcatttgaccggcatacttggtccgtcgagtatcgctgtgtggtctaccagcatagtcgcggggtctacccggaccgctgggaggcaacttgcttggtgcgctgcccggagaacagtctccagggtgcggaggcctgctcggagcactattctatctctgagcgggactcagctgaggcagccatgcaagatgctgcacggcgtgcgctttcgcactactgctcggttttcggtggggcagctgatggtcttgacctgaagtattacccccgccgtccatctggcagcacaggaggcgtgattgtctcgcctgtcggtgagggcaatcctaggttgagcagcacagtcaacctagccgtcgtgctaaacacggagctggaccatgcattagacgagctgagtagggctcgtgctgagatcgccctgctgcgggctgagcgcgcggaacgtcgtcacctggatggtggttcccccgctcccgtcgggactcagcacccgtaccgctcacctcagcgtggacaccagtcttatggcaatcccgcctgcaagaccaagataactctagaaccatag

SEQ ID NO: 8895 - DNA, 78 bp, Zea mays
  Peptide Sequence Number=SeqID_52270
atggagaaccacccggaaaaacagtgctaccacaagtgtggtgtatggggtctgatcaactccgtggcaaatgggtaa

SEQ ID NO: 8896 - DNA, 357 bp, Zea mays
  Peptide Sequence Number=SeqID_52271
atgaagccacggcgtcgccgcaagatcatgcactggagcgtccgccgccagcgcaagaggccccgcaccccgcgcggacgcaggagaccgtccgaactggtacaaccgcctccgttgcagccgaacctgctgccgtcgcggcggacaggcccgaacctgcggcacctcctcccgatccctcgcctttgccccaacaggcgccccctttggcctcagcggcgcctggggagaagaggaggcggctgcgggaacggaaggatgcggggagcagcgctcaaggtggggcagatgctgagcatccaggacgaatcccttgtacctccgccggtgctgatgttatgccaaggaagcagctaa

SEQ ID NO: 8897 - DNA, 726 bp, Zea mays
  Peptide Sequence Number=SeqID_52272
atggcggggcaccagcagcagcaacaacaacagcaacaacaacaacaacagcagcagcagcaacagcaacagcaacaacagcggtcaccccgcttccagggtcgctggaaagtccagggccccaaccgctgctcagacagcgccagcggcttctcatgctccagccggggtccgacggcggcggtgctagcatcaggcggcgtcaaagcaatagaggaggtcccagctgggggatctgcgcccgcctccgacatcgcgcccactcctgacgttgggggtgacaccgaaggcgcatccagctccaaccccccgcctgcaccggaggagttggaggtggtgttcgggcgacgactccagtcaggtgccaaggaagaagctacgccaatccccctcccccgcatgctgtcccgcgcccaccaggtccttagtgacactggggcagcaattttgcgggagtgggaggcgcttgaggctaagcaccagtgcctcagcgactggcgcacccagctggaggagcgcaccaggatggtgtccctccaattcatctctgagcggtcccaacttgagcgggaccgtaaggagtacaaggaggacctcctaaaggtgtatgctagggagctggaggcgcaccggagggagaagaaggtggccaggagggaggaggtcgtgtctcagtgggaggctctcgtgatagagttttgggccaagctaagtgccctggactag

SEQ ID NO: 8898 - DNA, 213 bp, Zea mays
  Peptide Sequence Number=SeqID_52273
atgaagtgtttgaaacctgatcatagaccattgcaaggtcttgttttgatggagagtgcagaacatgtacaacaattgatgaaagaacatgagggcctaaaggaaaaaatcaatcctaatggatatgatagtgagaacttagataatagtgaggcatgggaagtcgaagaaggatatgatgcatggaaagatgaagaaggatatgtcccatga

SEQ ID NO: 8899 - DNA, 747 bp, Zea mays
  Peptide Sequence Number=SeqID_52274
atggcccgcgcccgcgcttataaaaccctcccagacttagattgtacccttccgcgcaccctcaaacctcaccggagtctagctcgtcgccgtttgctcgtgcgcagcgagtccgcggccgcccaatccctctgccaccgtagaccggccagtggagccattcccaactccgtccagccctcggagaagactgtgcacacctccgtgaagctccccgagcaaggaatcggagtttgcttcgccggagaggccagtccacgctcgccggagctctcaaccccgccggagtacgtggaccgggtaaaccactccaccatccttcgattccttgtgcacacggtcgctacgttaccccgtgaagctcaccatgccctcggattgaaccagttcgccgtggtttggccgcactgtaatcttgctgacggagagtacatcctcgtgccggagcaaggagctgctcaggaggtagccctagatccagcacccgagcctgcaccagaggacctgccagccactgctttggaaggcaagccccgtggactttacccctcacgcgacctgagacgaggtctcccattccggttatggtgggtacaagtgcggtcactgcacgacggccagtcggggtcagtgaggcattgttctctggaggaaatggttgccggaataacttggccgtacaccttgccaccgggttggactgtcgagtgggaccctgcctcggctaaggaggagcatgaggagtga

SEQ ID NO: 8900 - DNA, 288 bp, Zea mays
  Peptide Sequence Number=SeqID_52275
atgcaagatgcagcacgatgtgcactttctgagtattgctcattgttcagcggggtagttgatggcattgacctaaattggatctttgtaatgattgtcatcaaggcagtccaagcaattggtcagatcctagcagcaatgcagcaggtgcagcagcagccacccccacctcagcctcaagtgcaagttcagatgccacaagtgcccagagacaagtggacaaaattcatgaggggccatccccctgtctttgcccactctgctgattccatggacgttgaagattag

SEQ ID NO: 8901 - DNA, 324 bp, Zea mays
  Peptide Sequence Number=SeqID_52276
atgcaggatgctgcacggcgtgcacttttgcagtattgctcgttgtacagcgggatgactgacggtcttaacctgaagtgttacccctgccgctcgactggcagtactggaagtgtgattgtctcaccagtaggtgaaggcaatcctaggttgaacagcgtagtcaacctagtcattgtgctcaacacggagctggaccacactctagacgaggtgagcagggctcgtggtgagatcgcagagttgaaggcggagcacgcgaagtgccttcataaggactataattctcctgcccccgctaagacacagcacccgtacctgtaa

SEQ ID NO: 8902 - DNA, 498 bp, Zea mays
  Peptide Sequence Number=SeqID_52277
atgtccgcactcgacgctaccgtcccatatcagccgttgacacgtgttagcgctggcgcagaagccgcccccgccatcggcgcagcagactaccgcggagggcaggcgcgagaacatgctggcgtgcatggcggcgctggaggccacgctgctgccgtgcttgctcgcgcgctccctccagtccgtcgaccgctccctccagtcctcccaccagagcacggagcgccgaccccccatcgtttcctccctctcttcttctctacttcgctctgcgctgctacggtactagccaagcctcgtggtgctcgttcggtccacggcgtcgtcgcgcgccaggtgcacgcgagggatttcatggaggctgcgaagaagctccagtcttatttcatcagcctgcagcgtgaggatcaaccaactgcagaagagatgcttcgaaagtttatcttggttacttttgtggatggacatcttggtcgcttttatggttggcttttgtag

SEQ ID NO: 8903 - DNA, 1269 bp, Zea mays
  Peptide Sequence Number=SeqID_52278
atgctggacgcgtcggagtcgaaagggtgtgcctccttggtgcggttgcatgccgcctgcatggcggtccgccctttcacccgctggtctgggcgaaagtggaggagcgcttccatcgctcggcttcaaggattttcatcaagcagcccggctgcatcccctcgccggtggtcacccaagacggtgaccaccagttcgatggtggggagaagcaagccgggctgcgacctctgccccgccttcagcttcaaggatcttcatcatccttgctggggcggaggccaggctgagccggagctctacctcccacgcgggttcgtgggtcaccttctccctcagcactcagaggagagggtgctcaccggcttagcggaaggggcggacttcgacaacgcggggccgagcggccgcaagcgtcgtcagctcccgcgtgcccggttcgctggctcagctggctctggcgcagcttccggtgccaccttccaccgctgggcggagcgcggctatctgcccgacgtacgggcggctgtcgcgccacgcgcaccgggggaccgcccaagatgccgcctgctgctagggcgacgttcgtgttcttgggctgtcctgcctttggtctggtacgacgcccctgcacggaggtcggtgttcgcccgtccgggaggactcgagtggggatctgccggtgggcagacggctgccatcgttggtgccgaggtggtggcggctgaagaagtcctcgtcgccgacgagatcgccaccaccatccgcgctccgggcctctggctctttggctttgatagcttatcctcgcccctcgagtggggatgctggcgaggaccttatcgtagcagcgtctgccctaaggtcatcgctgctgctgtttggccgcccggagcggaggtcgttgtcgctgctgccggagtgggcggcggcgagccacctagggagttcctcggctcggtcggccttgccgcccgaggcttctcttgctcagttaaagaaaccttcggccgctctgcgatgagccggaggcagcggtgtcagcatggacagaggcaaagttggcttgaaaagaagcatcgtcggccggagcctggccgggccgtccactggctggaccagctccagagtcgggttgccgaggccatgagccgggctgatgtcctcgggggacagctggctgaggctacagagcggccggtcgaggcgtctgctcgggccgggttcctggaggagaccctggcggcgatggccccggcgcggtgctga

SEQ ID NO: 8904 - DNA, 894 bp, Zea mays
  Peptide Sequence Number=SeqID_52279
ctcgccgtcgcgctggccccagctcgttccctcccatggcgccctcccctgcaagcagtggtcgagctcctcttcctccccatcgcggcgctccagctcgcccggtcatggctgtcctgctccctgctccgaccaagttcgcccaggtcttccacttcgccggcagcaggagctgcttctccctcagctcgccctagtgctcacccagctcgcctccacctcccctgttgccgacgaccgcgtgctctgctagccggatccgaggtcgtcctcgtctcttccccatctccggtcgccgtgacccccaactcgccacccctgctcatgcacatggcgtccaccgtggagttcgccgagtgccgccgtcctgcagctcgtcttctcctatcgccgtctctagctgatgcagcatccgacgtcgacttacctgtggcgtggcggcgacttcctgtgtcgtcccctggttcgcgcactggtgtggagaatcgctcggtgctgctggccgtgtcgagctcaaggccctgctcgctgtcctccagctcgctccggccgcgggcgccgtcgaaccccatcctcccctgctcggccacgcccagcagcttgatccttggcccctcgccatggccacagtttcctccccgtctgccaaatcgccgtgcctccctagcgctcctcaacgtcggctgtcgatctccctcggcgttgtctcctcccgccgccaattcgccagagtgcgtcgcctccttcccatttatcctaccttgcgacctcacctgtgcctgctccttgttggtgctcactcggatccgcatctatagatggccaaaaagcacgaggcccgtgagcccggcacgaagcccgctttttaagcccggtccgagcccggcacggtag

SEQ ID NO: 8905 - DNA, 252 bp, Zea mays
  Peptide Sequence Number=SeqID_52280
aggatctggggtgtagttcgcttcgccatcgtgccgtcaatggggctcggtgtatgcggctcgctctgccaagtgagaccctgcctactcaccttgggagtgttcaagggtccgtacaacctgaggcgaaaagtgaatcacggctcatgggtggcaatgggactgatggttcttggttctgactctggtaatggagaagatgaagccatggaaggagacttccaggagttccaagactacgacgagttctag

SEQ ID NO: 8906 - DNA, 624 bp, Zea mays
  Peptide Sequence Number=SeqID_52281
atgacgggtgaaacgctcttgggaaagttttccccttatggagatatgccaccgcacacgaggaaaactgcacgtaagtccactggacctattggcgtacctcggcatcagttggctccaagacatgaagagagcagcagcggcagtaacgaccccattggagacctagaagtccaagtggagcaacttcggacggagctacatcaccgaaacagggtgtgggtagaagatggtcagcgtatgaatgagttgagagctgacgtcagacatctgcaagacgagcttgctgaacgggatttgacaatcgattgggctgtcaattcacgttcgattgcttgggaccgggaagccaaagctcgtgcccgtgtggcagagcttagtgtggccattgacaacttgcaggtgtattacaataatttacatgaggaagtccatgtactatattcgcgactgcacccagacgtgcctgccgaccctgttgcaatgggagtcggaccctcaggaacagcacgtgaaggacttggtggggaattggaactttttaagcccactccttctatgaacctggctgacgagcagtcctctacaacagacagtgaagcaaccaaagacgataaatactag

SEQ ID NO: 8907 - DNA, 216 bp, Zea mays
  Peptide Sequence Number=SeqID_52282
atggcgatctccatcgtcctgctcagtgtcaccgccgtagtcctgctccatctttgtggtcaacgcatcaaggcgtgccaggatggtgtcgagtgtgacaacgagcagtccgaggttcctgagtgtgttgttggagacctccctgagcagcaacctggaggtgatgctggcaacatggatgacttcgaggagttccaggaatatgacgagttctag

SEQ ID NO: 8908 - DNA, 141 bp, Zea mays
  Peptide Sequence Number=SeqID_52283
atggccatgatgggttcaacatcggaaaagatgtacctctgccaggtgaagaagcaacaaacttttgttgcttctgttccaaggtggtgcccaaagatgaaaatcaagactaaagctgtaggaggaagggtcctccgttaa

SEQ ID NO: 8909 - DNA, 618 bp, Zea mays
  Peptide Sequence Number=SeqID_52284
atgaccgccatcgcagcaaaatcatcccaaggacctccctacactgaccactcccctactgcccttgcccctttcgggtaccaggatgatcttcagatgacacgtgtcctcactgctaaacgtagcaatacagacatacatggtacagccgcctatgtagccgtcgcacgagcagggcaacctccgtacctcccggctgcagtccacggcgccaacaaaagcagcagcataggtacgtcttcttccaacacggcgcacacccggattgcccaggactgctgggttccatccacggctacggtcgctctcggctactatggtggcgctgccaaccaacggttcacgctggcgtctatctcctcggtggtggccaaaccttatgctgatccggtattcacggagcggtcagcgacaaacgcggcgaggaagacggctccggaagtggctcaatcgtaccccggcgacggcgacggtggcaagggcggtggtgaaggcgacggtggcagcggcggtcgacgcgatgacggcggtgacggtggcgacggtggcggcaagggcggcagtggcgacgtcggcagtggcagcggcaaggccagtggcaaagcgccactagtctaa

SEQ ID NO: 8910 - DNA, 564 bp, Zea mays
  Peptide Sequence Number=SeqID_52285
atgataaagatatttctagagaccgaagtgggggagaatcccgagaaaggcctcgcacagatgtacgaaaatggaaatttgcataatggaattagggttcagatgcgtcaagttcaactcatagaaatcaaggagaccgcggaaaatgggggagatgggaagagcaagcccacgaatgagaaaaggaacgtaaacgatagattcatgggtatcctctattggaacggtgacaccgcggcaaatccgccaagagcagagctcttttggaagcaaaaccccaacatcaatgagatgaaagaggtcggattcagaaatgataaacatatggttacgagcgaatggaagctggttgttggggtcgttggggaggatgattgcagcagcggtgctctgcctcttccgctttggtgccatcgtgatctttctggcggaacgagcaggagcgaaatcttagggaagcagaggagtggttcgaagggaaaaagtgaagttagggctcagaaagcaaaaaagcacgtcgacgcgagtataaatggggtttcctgggtcgggcactatttctaa

SEQ ID NO: 8911 - DNA, 258 bp, Zea mays
  Peptide Sequence Number=SeqID_52286
atgccgactttagtccgagggtacctgttcacacattgtactacagaaatactgttagatcctgtttttgaggaccttcggacgccgaaggtccccaacaaccaccaagagccaaattgcaacctcgctgacggagagtacgtcctcgtgccggagcaaggagctgctcaggaggtagccccggatctagcaccagagcctgcaccagaggatctgcctgccacagctttggaaggcaagccccggttttatgcataa

SEQ ID NO: 8912 - DNA, 678 bp, Zea mays
  Peptide Sequence Number=SeqID_52287
atggggaggctagaaccccgggcagaatgggaatcacggcttgtgggtaaagtgtgcaacctctgcagagtgttagaaactggtatatcaaccgtgctcacgatggcccgtatcaggttcactgcacgtaagtctgtgatcccctttttgccttctcgtctggcggagcgtcccctgcgtcacacgatgttaggtcagtccagtcacctagagagactgcatcgccgcctacacgaggagctggagcaccgacgccaggagcaggagcaacaggactcttccccctctcctcagtgggaggtggagtctgagaggccaccttcccctgcacctcagccagagatgccccctgcaccaccacagggcatcccggctgctggaggagaccctaacggagacggagacgatgacgacgctggtgtcagttcgagccacggcctggagcgttcagaggagacggagctggagggatggatcgctagacccatcaatcttgacaccgctcgcgggtgtcacttccacgacgctctcgataccatgttgcgtcgggccttcgaccgacacacttggtctatcgagtaccgttgtgtagtctaccatcatcgtcgcgggctatacccagaccagtgggggctacttgcttggtgcgccgtccggacgatgatctccggggtgtag

SEQ ID NO: 8913 - DNA, 141 bp, Zea mays
  Peptide Sequence Number=SeqID_52288
atgggcaagaacaacaagcgcaagcgtgagccaactcctccatcggaggattttggtgactcggagtactcagaggaggagttctcctctgagtctgaggggtctccggctcccatccccctgcaggtagctgacgagtga

SEQ ID NO: 8914 - DNA, 744 bp, Zea mays
  Peptide Sequence Number=SeqID_52289
atgtcgcggcgctcgccgagtgctgccgctttttcttcagcatctacaaacaccactgcgatgctgaggatgcggtatagatgctggctaccccgtgtggagctctgtttttgtgtttctggccattttcccctgtcgcttcctgttgggcggggggccttgacccgcggtcaccgttgcagctccgctctacctcatacatacccttccctcccttacctagttcccgccgccgccaccccagcaggcacagccgaggaggagcaggacccaacaagcccgccgggctggaggactgaggtgtttgtgcgaacgtggcggcggcacggcgggcgatggggagatgaggaaagaggagtggtcgagagtggaggcgcagatctgcggggaaacgcgaagggtgggatggcgggtggggaaacgcgtagctcgacgcgagaggggtggggacacagagctcacggcgaggagatctgcggggaaacacgtagctcggcgcgagaggttggcaaggctcatggcgaggagatcaagctggaggttggcgtggagctcagccggccgagatcgtcgcggcgaggagggtggaagttgcagagcgcatcgaggacggggaagggctggtgggcgagggggagagcgatgcggggatcgtgggagggtgggcgtcggtggaggactagagagagcgcgcatcggacgggggaggagctccacggcatattggacgatcgagatagctag

SEQ ID NO: 8915 - DNA, 477 bp, Zea mays
  Peptide Sequence Number=SeqID_52290
atgatgttggtagactacacaacgatactcgatggactaagtgtgtcggtcgaaggcccgacgcaacagggtgttgagagcgtcgtggaactccggctccggctcctccgagcgctccgtgtcgtggttcgaactgccaccagcattatcgtctccgtcttcgtcagggtctcctccagcagccgggatgccctgggggtggtgcagggggcatctctggctgaggtgcaggggaaggcagcctctcagactccacctcccgctgaggcgagggggaagagtcttgctgctcctgctcctgctcctggtgtcggcgctcctgctcctcgtgcaggcgacgatacagtctctccaggtgactggactgacctgacaccgtatgacgcagtggacgctctgctagacgagaaggcaaaaaggggatcacaaacttacgtgcagtgcacctcatacgggccatctacaaatacatcataa

SEQ ID NO: 8916 - DNA, 423 bp, Zea mays
  Peptide Sequence Number=SeqID_52291
atgatctccggggtgaagagaccttctcagagcactattctatcactgagagggacactgccgaggcagccatgcaggatgcacggggtagatgacggccttgacctgaagtactaccctcgccgttctaccggcagtgttggaggtgtgattgtctcacctgtcggtgatggcaatcccagactgagcagcatggtcaacctggccgtcgtgctcaacacagagttggaccacgcccttgacgagttgggcaaggttcgggcagaggttgcggaattgcgtgttgaatacgcgacacggcactatctggatggtggttctcctacccctgtcgggattcagcacccttaccgtttaccgccccgtggtcgcttcgactatggtaccccagacagtaggacccggataggtttagatccatag

SEQ ID NO: 8917 - DNA, 1062 bp, Zea mays
  Peptide Sequence Number=SeqID_52292
atgaacgcgctctctcgcgaagggtgccggcactttgaggtcttcgaccaagctgatgaggattttgagcgagatatctacaaggttgaggaccctatagtgatggagtccgccggagccatctacgaccggatgtggggcccgcacggtcgagaggtagtcagggagcgggccgagacggcgagggctcaggcggcgcgtggcgagagggtggatgatttcggggcgttgaacagcgcgctgcctgacccggagtcgaacccggcggaggccgtgtccgaggccaccctggagccgcccccggagactgccgaaggcgctcctgatgcccccgcagccactgcggccggcggaggcccgcccctagagaccgccggaggcgcccctgatgcccccgtagccgctgcgccgagggctgaagatcctgcgatggtggcggcggaggcaacatcggaggcgacagcagaggctcccgcgacggctgggtcttcgcaggttcaagattttgggcctgcgcacgcaaccgccactactatttttttggcggcttcgaccgtggatggtggtagtaaatatgatgggtctgcatctgagttttctgattttgctgactctgggagctcggttgagtggactgaggagtcgtcggaggaggacttggactattttgcggccttagatgtggcagcggcggaggcttcaccgcacgctgcggacacagaagatgtgcctggtccgagtactgggcgcaggcggcgaagggcggttgcgaagcgtagagtgagcggggtggagggcggtcggcttcgtgcttgtatgatgaagttgtgtgccctcgcacatttggctatgctcgcgaaggcgttacgtgcttggtcaggtgtatttgttatgctggactggtgcgtatatagtcggtcttggcgcggacagtttggtgtggtcgtttttgcttttgttacgcttcgtccggctgtgccctcgggcaacttctgcgcggatggtctttgcagtggacttcggtttttcgcacttgctgtgctagtccggctgcacccttag

SEQ ID NO: 8918 - DNA, 306 bp, Zea mays
  Peptide Sequence Number=SeqID_52293
atgacctccgccgtggtggggcgcgacgccgccgtgtgcagttttggttgggcaaagatggtcaataccaggaagggtggtggaattgatctaccccccaatcgacacagtcggaggatatttagacaaccaaaacaacaacaagcagagatggatcctctaaatcctccaccagccggagctggtccagcacttgcagcccagatgcggataatgcaacagatggtcgatactatggcggatatgcacgcgcagatgcggcaggaatgccaagagatgcgccaagagagggaggagatgcgctaa

SEQ ID NO: 8919 - DNA, 231 bp, Zea mays
  Peptide Sequence Number=SeqID_52294
atggccggtacagacctcgtcggtgatgaacggggagcgcgccgtgaccaggggtactcgtggagaagaattagaaacccaagggcctttctgcaatccgtcagtgacttgagaaaacagatccactttagtaagcatttctgcaaaacagagtctttgaatattgaaaagccttaccttgactcccacataaccagcatacccttgagagtcttttctttagtcgggtaa

SEQ ID NO: 8920 - DNA, 858 bp, Zea mays
  Peptide Sequence Number=SeqID_52295
atgcaggcggtgtgcaactgcaccacggggatgcaccctttcgacttcgacgcatccagcatggaggcccaggcccacacgtcatgtaaccagcgcgccggttactacgtgcgaaaaactgcaccaccacttacgccaatgtcgcgcctcctcgactgcggaaccggtgtcgcgattcgaggcaaccccgtgcatggaccaacaatgccagccgagcacgtcgtttacggggcagccgacacctttggcaggcgaagcgggcgacgcttcacctccgccataatgaccgcgtcaaaaaaagggaccgggaaaggggatacttcgaaagggatccttctctgcgaaggaagcgggccccgagccctcctactgatcaggggctcgaaggctggcccctcggaagggctggcccctcggaatggttcaacagccgcctcaagccactcgggctccgcgcccactactgatcaggggttcgaaggctggccccccgaagggttcgacagccgtctcagaacacgcagagcgagggatgactctgggtacgtccgatacatggccgaggctcgggctacgctcccgaggtacctaggacatttccgacaccaacaggagcgattctgtaacggaatcccatcagagggaggcatcgagccctcggaccctatcaaacgggaccaggtccagcaaatcacctgcagaggctcgagggctgctctcacaaacccggctccggccaaaccgttgacagcgtcaacataccagcccgagaactcagaacctgaccatgcacctgagctacgaccagttcgcatgagggaacaaccagaccggccgaggcgtcacgaaaggcactaa

SEQ ID NO: 8921 - DNA, 240 bp, Zea mays
  Peptide Sequence Number=SeqID_52296
atggcgcgagtaagaccatcgtgtgccctgaattcctcgacggagttcggttgggccgccgacgtcaaggagtgccacggtgatgttgttacttttattctactatttaattgggttggtcaagaacaggtaccacaggatgaggcgcttggaggatgctgtgatgtgttcgtgagagatctaggccgtcgtgtcccagtcaactttgggttgctggaccgttgtctccttataatgtaa

SEQ ID NO: 8922 - DNA, 144 bp, Zea mays
  Peptide Sequence Number=SeqID_52297
atggcggcatctcctgcttctctctacgctccctcatctccctctcggttcggcgatggtacacacggtcaatcggttctatgcgatgcaagagagctgagagggggcaagttttatagggtcagaggcgagcccgagatttaa

SEQ ID NO: 8923 - DNA, 366 bp, Zea mays
  Peptide Sequence Number=SeqID_52298
atggcagggcatcccgctcgccaatggcccagagaagagggattcggccgggttttatgcccctcccgcaggcggaatccaccccccgaggaacacggcagaggggatgaggctccaggcgaatttttcaccgcactgttgaagccagcgccgagaagacggcgcggttatcacaaggaccaggttgaagacctccctaaccgtggggcccatgagctagtgatagctcatccaggcgcgcacacgcccaagcacagaaaggtggtgaccgacggggtgaccccacgcgtcggcgtcaatccccctctaagttgggctgacacgcccgagatgaatgggtcgaccggttgggatttagtgggctga

SEQ ID NO: 8924 - DNA, 153 bp, Zea mays
  Peptide Sequence Number=SeqID_52299
atggccgtgatgggttcaacatcagaaaagatgtacctctgccaggtgaggaagcgacaaatttttgttgcttttgctctaaggtggtaccaaaggaagagcgcaaggaatgaagtgcgggaggaaaggatcctccatatagaacttttataa

SEQ ID NO: 8925 - DNA, 294 bp, Zea mays
  Peptide Sequence Number=SeqID_52300
atgacgaagcggcaaaagtcattcctaagggagcacagagtaagttctgaagctgcaaaagtcgttcctaagggagcgcatagaatattaatcaggtctgatggtgaaaggctgaaggttggcttgtttactatcttcgcatgcgtgcatccgaccttcaagaatgcagtagctgtgccgcgagaagctagtagagcacagaagtcaccatgtccagctatcacttcatcgagtgcatcaacatcattttcaatatgcgtgaagttccttcttctcttgatcgaagcactctaa

SEQ ID NO: 8926 - DNA, 279 bp, Zea mays
  Peptide Sequence Number=SeqID_52301
atgaagtacaggcatcttcctctgcgtattcgtggagaaagccaaaccagctttgttctaggtggagctcgagaagatcgcatcaacaccctagctggtgcggtggcaggtcttaacaccaacctggatagtgctaccctggacctctctagggtacacttggagctagaggatgcacacacaaggagtgcagccctggaagctcagcttgatagaaggaatcctcctgaagttcaagtcccagctgttggggacttgttctcaaatgctaagagttaa

SEQ ID NO: 8927 - DNA, 603 bp, Zea mays
  Peptide Sequence Number=SeqID_52302
atgacgaagacttcgcagatgacattgatgagttttgagtctaacgatgcgtcagtcacatatgtgtggaaaatggatcctggcccacatatgttatgcattaggttttgcccccagaaccggatggttcgtactatccaaaccactcggatcaacaccaactacatccctccgccacgacaagttcctgtctacctagtggtagtcgaggaaatccctgtggatctccctcgcattcgtgtggagaacagagtcattctggaggacagctcggaggagtttctgcctacgcccaccccgttggcagaatcactagccttcgcagctagatcatcatcttcaacaccgccagcaccagccgtccaagcccctgctcctggaggcgacgacccaaacgactctggtgacgatgatgaagacgaccaagaagaagaagatgaggagaacatcaatgaagaagccaacgatgaacaacaggactactacgtggggttatggcctgtcactgaacattatatatcaatgttcgagatggaacacttccctaacctgctgcaggatgttttgcatgcgttgggaacctacgtccgacccctgtattag

SEQ ID NO: 8928 - DNA, 1020 bp, Zea mays
  Peptide Sequence Number=SeqID_52303
atggatccaaagggcagaaaccctagctgggatcgttggggtcagaaggatgtcccccaaggctcccagacgtgggggaagaatcgtaatctcagttggagattgaaatcgactctaggtaaatcagataacaaggaagatatcatgacatcttcattgggtgatggcggtcaatcagaggttgtagcagaaaatgttcgagaagaacttcagaattaccaagctatttgtgagttgggctccacaattggcgatgttgaagaggttgacctattatccttagacactaaggatattgtgaggttcaaagtgcatgttaaaagtgttgcaatgatccccccaattactgaggttggtgttaaacccttcttatatgacatttattttaaaattgataatatcactgaagagggatggaatgatgattccatcaatcttggtaaaaatcctaggcgatgttctgaggtgacagatggaatagaagatgtgaagcctattgatggcgataaagggtatgatgataatcctgttaatgatgaggatgattttaatcagagtgaagatgacttaatgagttctcaagatctggatgaatttgctaaagatgaagatttagttttaccctcatctcaagagaaagagaacaaaacgctggttgaattacatactgaaggagttgccaaagatgctggggaaaaaggtgtcaatatggaggttgaccatgttgaaggcatcagaaggagtagtaggcttgaaacaaatgatgagatgaagattgctgataaggctatggcaagagctatggctaaaaatgcattcatcaacaaagtggtaatagaaactttgcctggttctggaatcctgctaatgggagatctgggtggcctccttgtgggatttgatgcagaagtttttgatgttagagagaaagaaatgggggaattcatgatcaaaattcttgtggttcataaggaaaatggcttcatttggaatttcatcaatgtttatggagctgcataa

SEQ ID NO: 8929 - DNA, 210 bp, Zea mays
  Peptide Sequence Number=SeqID_52304
atgagcaggtgtgttctggttagtcctctggttgctgttcttctagggtgtctgttggttacgccttgggtagttgttagcatagtggccaagtttgccacactcgaaacaaccattaggttgtacaagggtagttgtgttgttgttcttggccgagcgctgtatgttgggggccttcggcttccgaaggtcctcaaaaacatgatttaa

SEQ ID NO: 8930 - DNA, 201 bp, Zea mays
  Peptide Sequence Number=SeqID_52305
atggaattaccactagacgcgcagagcagcggaagacgtcttgatgtagacgaacgcgtcgagcagtgccgtgcagtcgtcggcgtccttcacgtcctcgcatggttcgtcctagtgctccagatgcagcacctccgagcaagagctagaactcgggcagaaagcaacggccacgtgttcgacctgccatggcaatgctag

SEQ ID NO: 8931 - DNA, 408 bp, Zea mays
  Peptide Sequence Number=SeqID_52306
atgctgtcctgctgcaactgctgctgtcctgcagcagtcaaaaggttgctgctgctgcgcagtcaaaagactgctgctactgctgtcctgcgcagtcaaaagactgctgcatgttgtcctgctgcaactgctgctgtcctgcagcagtcaaaaactgcaactgctgctgaccacatgacttattccatcatgtgcgacgttggtctggccacgtcgtggctgtcgacagtccctgtcccagtggccaagcttgccgcagttgtgacaaccgtcgtctcgtgccggcttcttgttgccgacggcgccgccttgggcaccaccctcagcatgtcctcgcgccccggcctgggcgcctccacgcgccttgcgcgtgtaataccccaggtgttacgtgaactaaaactctga

SEQ ID NO: 8932 - DNA, 183 bp, Zea mays
  Peptide Sequence Number=SeqID_52307
atgaatgctgtggtaacttcacacatacctgtctgtttatatagtgttgcagcatttgagaacaagtccccaacaccaggtactctggagaatatgggtgctggagtgacttggccatccaccctgccaccgggctggacagtcgagtgggaccctacctcagcaggagaggagcatgagtga

SEQ ID NO: 8933 - DNA, 1065 bp, Zea mays
  Peptide Sequence Number=SeqID_52308
atgcagcccggctgcacccctccgccggcggtcacccaagacggtgacctccagtttgatggcgggggaaagcaagccgagctgcggcctctgcccctccctcagcctcaaggattttcatcatcaatgctggggaggggagtgtgccgagttggggtcggcccctgcgtgggtggtggcccgttccttccctcagtgatcggggggaagggcgttcgccgttcgtggcgctggcagctgccgcgtgcccggctcccggacccgagtggcttcggagccgctcccggcgccgccttccgccacggcagctggaagaggttcttccgccgacgagatagccggggccgcccacggaccgacctccaactctatggccttctgcccgtccttgcctcacgagtttgggcacggggcgggggcctcctggcagcagcatccgccctgaggtcatcgctgctgctgttcggccccctcggagcagaagtcgtcgtcgtcgctgctgctggagcaggcgacgacgtgtcgttcgtcggtcttctgtcgctccgcaggccccccgatcgagtggggttgttcgtacctacggaggattccctcggctcggtcggccttgttgtccgaggcttctcttgcttagttaaaggaacccctcggccgctcttcgatgagccgaagccaggggtagcggtgtcagcacggacagaggcagagttggctcgaaaagaagacttggtcggccggagcctggccgggttatccgttagcgggatcgacgccggagttgatctgccgaggcctcgggccgggctgatgtcttcggtggacatctggccgatgcctcgtggtgaccagccgagccacctgctcgggccgaattctcggagaagaccctggcggcgatggcccgggcgtggtgatgacatcgtccttcagagtggagatcctcggaccgcgtcgccgtccgaggctaggtcggacctcgccgaaggtgtagtcgacgccgagggtgctgcggctcccttcaactgtcgagatctgagcctgcaggatccgattatcttgtag

SEQ ID NO: 8934 - DNA, 633 bp, Zea mays
  Peptide Sequence Number=SeqID_52309
atggcgcttcctgttgacgtggttggtccacgccctaggttgggcgatgtggaggctcctccaaggttgaggttgagtctgtcttccgtggccgaggtcgagtccgagcccctgggtcaggcgaggcggagaccgtcggctgaggccagggctgagtccgagccctggggtcgggcgaagcggagttcgtcgtcttccggggctgagcccgagtccgagccctgggtcgggcgaagcggagttcgtcgtcttctggggctgagcccgagtccgagccctggggtcgggcggatcggagttcgtcgtcttcaggggctgagcccgagtccgagccctgggtcgggcgaagcggagtttcctatggtgcctgaggccgggcctgactgcctgttagcctcactctgtcgagtggcgcagcagtcggagcagcgcaggcggcgctgtccttctgtcaggccggccacctttgcattaaatgcccctgcgatttggtcggttggtgtggcgacttgcccagggttgcttcttggcgaagactgggcctcgggcgagccggaactttgtgctgatgggggttaccagctgagaattaggagtcttgagggtacccctaattatggtccccgacagtag

SEQ ID NO: 8935 - DNA, 399 bp, Zea mays
  Peptide Sequence Number=SeqID_52310
atgcaggcggcatgcaaccgcgccaagtgggcgcacttctccgacttccaacacgcccacgcgttcatgcaaccggcgcgccggtcgctacgtgcaagcaactgcaccgccactcgcaccactaccgcgcctcctcgactacggaaccgcgggacgagcggcgcctctggcaggggaagcgagcgacgcttcgcctccgccataatgaccgcgtcaaaaaaggctccgagcctccctactaatcagaggttcgaaggctgggcccctcggaagggtttaacagccgcctcagagcgcgtgggctccacacccactactggtcagaggctggccctcgaagggttcacagccgcctcagacactgagcgagggatgaccatgggtacgttcgatacataa

SEQ ID NO: 8936 - DNA, 51 bp, Zea mays
  Peptide Sequence Number=SeqID_52311
atgaccagctcgtcgaagtttgagtttgttggggaccttcggcgtccgaag

SEQ ID NO: 8937 - DNA, 297 bp, Zea mays
  Peptide Sequence Number=SeqID_52312
atgcacgcggcatgcaaccgcgccaagtgggcgcacttctccgacttccaacacgcccagcatggaggcccaggcccacgcgtcgtgcaaccggtgcgccggatgctacgtgcgagcaactgcaccgccacccgcaccactgccacgcctcctcgactgtggaaccagtaccgcgactcgaggcaaccctacgcacgacccagcagcgccagcctggcgcgacgggaccgggaaagggggataccccgaaaaggatccttccccgtgaaggaaccaggctccgagcctccctactga

SEQ ID NO: 8938 - DNA, 1125 bp, Zea mays
  Peptide Sequence Number=SeqID_52313
atggcgggggaaagcaagccgggttgcggcctctgcccctccctcaacctcaaggattttcatcaccagtgctggggaggggactgccgcgtgcctggctctcggacccgagtggcttcggagccgctctcggcgccggctcccgccacggcagctggaagaggttcttgcgccgacgagatagccggggccgcctacagaccgacctccaactctacggccttctgcccgtccttgcctcacgagtttgggcatgggcgggggcctcctggcagcagcatccgccctgaggtcatcgctgccgctgtttggccccccggagcagaagtcgtcgtcgtcgccgctgctagagcgggtgacggcgcgtcgttcgtcggtcttctgttgctccgcaggcccccccagcgagtggggttgttcgtacctgcggaggagtccctcggctcggtcggccttgctgcccgaggcttctcttgcttagttaaaggaacccctcggccgctcttcgatgagccgaagtctggggtagcggtgtcagctcggacagaggcagagttggctcgaaaagaagagttggtcgatcaaagcctagctgggtcatccgttagcggggccgacttcggagttgatctgccgaggccccgggtcgagctgatgtcttcggggacagctggccgaggcctcggggtgaccagccgagccgcctgcttgggccggattctcggagaagaccctggcggcgatggcctgggcgtggtgatgacgtcgtccttcagaatggagatcctcggaccgtgtcgccgtccgaggctaggtcggacctcgccaaagtatctggacttcttcgtcggtaacagaattgtctgtgtgagcgagacttgcttctcgcggaaggtgaagagtgagggttctgtcaccgatgcagtcgagaaggctcgaagaatcgcttcggcagaggagctttcgaacgtgaagtcttgttcggtccgcggaatcacttatccgaacgtgagttacttatcgcagaaggtgatgagtgagaaaatttcgacgcagagggggttcccccttttagcccccgagggagggtcgggccttgccgaggcaaggctgacccttccttga

SEQ ID NO: 8939 - DNA, 564 bp, Zea mays
  Peptide Sequence Number=SeqID_52314
atgaccggggataaacaaaggcaaaagctcaagcaaaagccatcaagcaaaatctccaacacctacatcaaaaaggtgaacaaaaaggatgctactccatatttgatcaagaagaaaaagaacggaaaggtgatagcaatcaagaccaacaagcaagccaacaaaggaaagggggccaaacgcatctgggtgccaaaggagataatttcaaccatgaaaagcaccaagaaggtttggatcccgaaagcgaatttattgccaagtgggttagtgaaaattttggacccaaatttcccacccatgactaagttcacaggatgcgaagagaattggaccaaggcaatgaggatgcaacacctcaaaagaagacataaaaagatgcatagaagtccaagactcaagaacaaagaagcccgaagaaatcagcgaagaaatccaagaaagggctgtcagccagcgccaggtggtgcaccggacatcggtgtccggtgtgcaccggactgtccggtgaggcaccggacagtctgcgcggagaggccgcagaaaggcactctctggctgtag

SEQ ID NO: 8940 - DNA, 555 bp, Zea mays
  Peptide Sequence Number=SeqID_52315
atgtgccacgggggtttttctggtgatgggcaggggcggcggtcgggttttataagcagtcccgcgaggatcgagtccaagggggccgcgagttccacggcgagggaggtcggcaggaggcagttgcgccaagctcgcagggttgttacgagcagcggccatatccatgactgtggagaagagaagtccgacgcttgggccccacatgtcattaccgtggattttgggtgggttgttggcaaggttactgccagatgggacccggccgtcagtgtggccatgcgcgcacccaggatggtggacagggccgacgcgaggtgcttggtggagctggtggtggtggtggaggttgttgttgtcgttgtctctccaaccgcgcttggcttatttcttggcggaccagacgtatttcctcgcgtccttgtcttatctgattttgcatctcggtcactaggtctgtcaattgtcgtattactagtctttgggcagcaaccacttgatcgatttcaacaggtcgaggatttggaggattcatttctgtttgctgttgtgtga

SEQ ID NO: 8941 - DNA, 222 bp, Zea mays
  Peptide Sequence Number=SeqID_52316
atggccgccgtcgcccgtctacagtactccccatgccgcgcccagctcgcgaagtccctgcgtgtcgtcgttccgcctcccacgccggtacgtgaattaaccacgcgatgcggagaaccagaactgagtcgaccacaagatgatgctgatgaacggaactggagatggacagacgaagcaagtatcgggacaaaggatggtcgtcaagtgatcgacacctaa

SEQ ID NO: 8942 - DNA, 1822 bp, Zea mays
  Peptide Sequence Number=SeqID_52317
atggcgcctcccgttgtcgtggctggtctgcgccctaggttgggcgacgtggaagctcctccgaagccgaggtcgagtctgtcttacgtggtcgaggtcgagtccgagcccctggttcgggcgaggcggagatcgccggctgatgccggggcggagtccgagccctggggtcgggcgaagcggagatcgccagctgatgccggggtggagtccgagccctggggtcgggcgaagcggagttcatcgtcttctggggccgagcccgagtccgagccctgggtcgggcggagcggagttcgccggctgatgccggggcggagtccgagccctggggtcgggcgaagtggagttcgtcgtcttctggggccgagcccgagtccgagccctggggtcgggcgaagcggacccaagtccgagccctgggtcgggcggagcggagttcgccgtcttccggggcttagcccgagtccgagccctgggtcgggcggagcggagttcgccgtcttccggggcttagcccgagtccgagccctgggtcgggcgaagcggagtttcctatggtggcttcgaccgggcctgactgcctttcagccttactctgtcgagtggcaccgcagtcggagcggcgcaggcggcgctgtctttctgtcaggccggtcagtggagcggcgaagtgacggcagtcacttcggctctgtcggccggggggcgcgcgtcaggataaaggtgtcaggccacctttgcattaaatgctcctgcggcttggtcggtcggcgcggcgatttggtcagggttgcttcttggcgaagacagggcctcgggcgagccgggaacacgttcgccgctggaggggggcctcgggcgagacggagatcctccgggctttatgctgatgggggttaccagctgagaattaggagctttgaggcgctgatcaagttcctcatcgccgacgccgttcgtagtactgcactgcgtatatctgtctgcgacgacttcgagttcacaacggggcgcggggatggaggaggcccggaagagcggacacctgggagtgccggccgtggacgcttcgctgtggctgaagaagacagcgacctcgcgtcgtcccaggcttgttgcattccgtcaagggcctgcggcggcagcagcaaggcagagctcgtgtctacccaaggggcagaggccgggtggcgagcgatcccgggccgcgcagaggaatttctcagaggcgaacgtccgctctgccctccacgagtaagcgtggcgtcgccgtcgccgtcggggcggcgcttcccgtcggacaccacggcgatcgcgagctggcttccgtcgcccgccggcgccggccggggggacgacctctcgctgggtttcaatgccggcgccgcctccgcctcgtctggcgcctcgctggcggcagggctctggggctccgcggcgtcgcgccaggccgcggctgctgccgctgccgccgccgccgccgcggcgctcggctacggggcgataggccccaccggcgacgtcgggatgctcgtcgtcgcgcctccgggctcgttccaccaccagtgggcagccgacgacgacgactcgtgctcccgctcgtcaccgcggcgcagcgcaccctcgtcaacgcagacgccgcctccggcggccacggcaatccgcccgtgtcgtccgcgggtgccatccagttttggcaccaggagccggccccggatgggcatgggtcccacggcgagaaggccgtcgccatgctggatcacgccagcggcgggcccgggtccgggcgtggcgacgtgccaggactggcggcaaccag

SEQ ID NO: 8943 - DNA, 853 bp, Zea mays
  Peptide Sequence Number=SeqID_52318
atggtcgccttccaagggggtcaccctccttttaacggcggctctccctacttgcgtccccagccgtcatgggctgagtcttctccaacacactccaaggtcctcccctacggcgcgggggctgggtcccacacgtcatgcaagccggctcagagcagaagaagccaaaccgccgcgcgcggtgcgtacaaccgcccagcggttacaagcgactctccacttttgcccagaccaatgggtgaaaggggcgggcagccatgcaggcggcatgcaaccacgccaagtgggcgcacttctccgactcccaacacgcccagcatggaggcccaggcccacgcgtcatgcaaccggcgcgccgaatgcttcgtgcatgcaacagcaccgccacttgcgccactaccgcgcctcctcgactgcggaaccaataccgcgactcgaggcgacccagcgcacgacccagcagcgccagcctggcgcggcggtcaatgcggcaaaaaatgggctggcagtaatggcggtggcaggcgggcaggagcagcggccacgtcgagaagcgggcgacgcttcgccttcgccataatgaccgcgccaaaaaagggaccgggaaagggggataccccgaaaaggatccttccccgtgaaggaaccaggctccaagcctccctactgatcagaggttcgaaggctggccccttggaagggttcgacagccgcctcagatcgcgtgggctctacacccactactggtcagaggttcgaaggccggcccctcggaagggttcaacggccgcctcaggctactcgggctccgcgcccattactgatcaggggttcgaaggctggcccccgaagg

SEQ ID NO: 8944 - DNA, 615 bp, Zea mays
  Peptide Sequence Number=SeqID_52319
atgggggatatccgccgtctttccgcctcgtcgttggaggaacgcaactccgtgggagttggtacctttcagccatcgttcggcttcaaggattttcatcatacagcccggttgcacccctccgctgacgggctgaggaggggagtgtgccgagttggggtcgacccctgcgtgggcggtggcccgctccttccctcagtgatcggggggaagggcggttgtcatccgtggcgccggccgctgcagcgtgcctggctctcggacccgagtggcttcggagccgctttcggcgccggcttctgccacggcagctggaagaggttcttccgccgacgaaatagccagggccgcccacggaccgacctccaactctacggccttctgcccgcccttgcctcacgagttttgggcatgagcgggggcctcctggcagcagcatccgccctgaggtcatcgctgccgccgtttggccccccggagcagaagtcgtcgtcgtcgccgctgctggagcgggcgacggcgcgccgttcgtcggtcttctgttgctccgcaggctccccccatcgagtggggttgttcgtacctgcggaggtggaaccggagttccgtttgtaa

SEQ ID NO: 8945 - DNA, 1035 bp, Zea mays
  Peptide Sequence Number=SeqID_52320
atgcaagccggctcagagcagaagaagccaaaccgccgcgcgcagtgcgtacaaccgcccagcggttacaagcgactctccacttttgcccagaccaacgggcgaaaggggcgggcagccatgcaggcggcatgcaaccgcgccaagtgggcgcacttctccgactcccaacacgcccagcatggaggcccaggcccacgcgtcatgcaaccggcgcgccgaatgcttcgtgcatgcaacagcaccgccacttgcgccactaccgcgcctcctcgactgcggaaccaataccgcgactcgaggcgacccagcgcacgacccagcagcgccagcctggcgcggcggtcaatgcggcaaaaaatgggtcggcagcaatggcggtggcaggcgggcaggagcagcggccacgtcgtcagccaagctcacgtcccgtccgggggcagcgagagaaccctctctcacggcgtgaagacaacgagcccgagaagcgggcgacgcttcgccttcgccataatgaccgcgccaaaaaagggaccggggaagggggataccccgaaaaggatccttccccgtgaaggaaccaggctccgagcctccctactgatcagaggttcgaaggctggcccctcggaacggttcgacagccgcctcagatcgcgtgggctctacacccactactggtcagaggctggcccccgaagggttcacagccgcctcagacgcctagcgagggatgaccatgggtacgttcgatacataaccaaggctcgggttgcgctcccgagggctcggactcgagctaagccccagaagacggcgatctccgctccgcccgacccagggctcggactcgggctaagccccggaagacggcgaactccgctccgcccgacccagggctcggactcgggctcggccccagaagacgacgaactccgcttcgcccgaccccagggctcggactccgccccggcatcagccggcgaactccgctccgcccgacccagggctcggactcaggctcggccccagtag

SEQ ID NO: 8946 - DNA, 459 bp, Zea mays
  Peptide Sequence Number=SeqID_52321
atgggcaagaacaacaaacgcaagagtgagccaactcctccatcggaggcgtttggtgattcggagtactcaaaggaggagttctcctctgagtctgaggggtctccggctcccatccccctgcgtgagtcgtctgacgactcagacgactcccaggggctcgcggcggaggtctggacgtacatccgggccgtcgagcgctccgggctcgagggctcggatgagtcggagtactcctcggatgaggaagactcggacggcggcggtgaggacgaggacgacgacgacgacggtggcggtggcgacggtgatggtgacggtgacggcagcgacaagggcggcggcggcagcagcaaggacggtgacggcagcggcagcaggggcagcaaccggggcggcagcagcaggggcagcaccaggggcggcagcggcagcggcagcagcagggccagtggctag

SEQ ID NO: 8947 - DNA, 237 bp, Zea mays
  Peptide Sequence Number=SeqID_52322
atggacatggagcacgccgagatcgggcctaggagatcctgcgcgcaggggcaaaggctccctgttggggaggttcacaggggcgtgccatggagcagggaaggtcgcagccaagaggaggtcaagggcgccgacatgctcccagggagctcggccatggctgcatctgctgggcgccatggaaaagcaggggcacgggcgccatggctaggaggaagctcctgcgcgcagccgtga

SEQ ID NO: 8948 - DNA, 267 bp, Zea mays
  Peptide Sequence Number=SeqID_52323
atggctaggaggaagctcctgcgcgcagccggaaggagggtggggaggaagatgaacatgcgctggctgggagaggcgacgcctagaggagaggagccgccatgggaggggcacggctccctgatggctgttgctgccgtgaagaagaaaggcagggaaaagctgtggcggctggaaatttttgaggggtgggagtgcaaaataaccatgtgcaaggagagagggctgctatttatagaagaagccctagggttagggttcccttag

SEQ ID NO: 8949 - DNA, 234 bp, Zea mays
  Peptide Sequence Number=SeqID_52324
atggagcctggcggagggacagctgtcggagcggttgggtccttgctgacgtcctcttgcttccgttgggcgatgcggaggctcctccaaagccgaggtcgagtctgtcttccgtggccgaggcccaagtccgagcccctgggtcgggcgaggcggaggtcgtcggctgaggccagggcggagtccgagccctggggtcgggcgaagcggagttcgtcgtcttctgggacttag

SEQ ID NO: 8950 - DNA, 552 bp, Zea mays
  Peptide Sequence Number=SeqID_52325
atggtagaggaccagatggtggtgaagacggttcgggaggagtgcccctgggagtcgctccccaatcgccaccatactccagtccgcgccatcgattctggccgccgccaccacgccatcgtccccggtcaccgccacacggagctccgctccccgcatgaggaggaggccagtgagattggaagctcttcgtgggtgggatcccggctggtgcgacgggtttccatcgccggcgtcgtgccgctgatgggccactccacgatgcttcaataccaaaggaaggtggttttcagcatcgagtcattggcattgagcgaccggcagccgcccgcgtctttgtcttcgtcgccggcggcacccgccagagtcgtcgcgtccggcttgctgctgctgcatgaagaggctgctggaggaccgggacatcttcatctacctgtgagtgagctctgctggggtgagaaggccttctacagcgacgagtgcaggaacgggctcatcgaggaggcggcggaggaggaggtcatgattctggatcctgctcgaaatctttga

SEQ ID NO: 8951 - DNA, 402 bp, Zea mays
  Peptide Sequence Number=SeqID_52326
atggtcaagagcaacaagcgcaagcgtgaaccgactcctccatcagaggatttcggtgactcggaatactcggaggaggaattctccttcgagtccgaggggtctccggctcccgtctctcccccggcgtcgtccgatgactcggacgactcccaggggatagccgcggaagtctggacatacatccgggccgtcgagcgctccgggctcgagggttcggatgagtcggagtgtctcatcatcaagcatgacaaatttctcaagctccccatcgagaagctcaataattattgtctttcttatggccttagtgccttgatgagccactttgagagtgtcctatatttgttttgtgctcttcaagccatctaccttgtcatactcttcttggttgaaagatga

SEQ ID NO: 8952 - DNA, 822 bp, Zea mays
  Peptide Sequence Number=SeqID_52327
atggaattaccactagacgcgcagagcagcggaagacgtctcgatgtagacgaacgcgtcgagcagtgccgtgcagtcgccggcgtccttcacgtcctcgcacggtccgtccaagtgctccagatgcagcacctccgagccgccgtcgagggacatgaactcaagactcccgaaacggagcaccgtcccgggttggagaggttgttggagactgcccatctggagcttgacgggaagctgttcgtcaacatgcagcaggcccctacctggcgcgccaactatcggcgtttcgagaccggggggtccctgggccgacgagtgagtgtcgccgcgtgccccagcccagatgggtcgaggggttacaagcgtccacgcgggagagggagcgagcggccccaagcgagcgcctgtctcgtcctcgtccccgcgcggccaaccctctctaagagggccctggtccttccttttataggcgtaaggagaggatccagggggctgagagccgccgtcgtcacagagcatgcggggcgccatcattgcctatctggcggaactagccagatgggacgccggtctggttcctcgtggcctgagtcagctcggggtagggtgatgatggcgcctcctgttgacgtggctggcctgcgccctaggttgggcgatacggaggctcctccgaagccgaggtcgagtctgtcttccgtggccgaggccgagtccgagcccctgggtcgggcgaggcggaggtcgtcggctgaggccagggcggagtccgagccctggggtcgggcgaagcggagttcgtcgtcttccgggacttag

SEQ ID NO: 8953 - DNA, 1044 bp, Zea mays
  Peptide Sequence Number=SeqID_52328
atggaggacttgagtcaaatgaccctgaccattgtgattggaaaaattgtgaggagccaaccacttcaaggacatatactttcgcatgtgatgaaaagagcaaagggaagaagaatgctcccaccccaagctcctcaagtgaagaagaggaggaagaagaaagtgattatgatgaagacaatcaactatcaacatcatcctttgaggatgaagaaacaatctgacgcgtcagaaaggtcgatgatcttctctttaacactgacaggaaaatgcaaagaaagagaggatgcttctcatgcggggagaagggccacttcagggacaactgtccaaacatgtctgaacccacaaaggggaggagcaaagccaaggcgcttacaagtgtcaaaacttgagataactcttcaagcgaagatgaacctccaaggacacgcaaccaccaatccttatcacgcccatcacggtcatcacgcaagtgccttatggcaagaggctaagttagctagctctcaagaagcaattgaaaacttgctagagaaaatggaaattcttagcatacaaaataatgagctaactactaagctagaaaagatcggtagcaccttagaagtatttttagttgaaatacctaaaattattgaaaaggatgcttctacttcttgctttgatttaattgatgattataacccctacaaccaagttcttgttgagaatgttgttatagaaacatgttcgaacgaggtttcaaaggagaatgagcaattaaggcaagaagtggctcgccttggcaaggccctgtatggcaagaaaggcaaagccaaacaaatccaaactcctcagggtaacaccactgcaggagtgaacaagcctgtggagggaggaactgtgatttgtaggatatgccacgaggaagggcacaagtcttatcaatgcaaggcgaagaccggggataagcaaaagcaaaagctcaagcaaaagtcaaacagcaaaatctccaacacctacatcaacaaggtggataaaaggctgctacaccatatttga

SEQ ID NO: 8954 - DNA, 174 bp, Zea mays
  Peptide Sequence Number=SeqID_52329
atggagagtcatgatctccgggcagaaagggaatcacggcttatgggtggctatgagatcgatggttctggttatgactatggtgctggttgtcagcattgcaaccactgctcaggcgaagatgaagctgtggaaggagactttcaggagctccaagactacgacgagttctag

SEQ ID NO: 8955 - DNA, 1113 bp, Zea mays
  Peptide Sequence Number=SeqID_52330
atgtctgccatctacatgagccagctctccactgccctccctctcatggagggagatcaccaagatcatcatcaccaccaccaaggccacttccaggccttcaccctgccaaaggaaacaccgatccttttcccctttgtgatcagcaatagtagcgccagcgaaggcagtttgagctatggatcggctgcagaccatcacttgttgaggcagcgtcatcaagctatgctggagccccaacatatgattggaggatcatcaactgcgactgggaatagtgtcttctcgacgccgttcccgaccgtggagagcatccgcgacgacatgatcgagcctgcctcgtacgatccatacgatatggggaagctgcaggtcggcgggtcgatggatgcttgcagctggacgccggcggcagccaagatgaggatcacgaggaaggccactgccgatcccagtgcggggaagaagccaaggagaagggcgcaagcagggtacgacgacaccatgagcggccaaccgaatttgggtgttattagggtgtgctccgactgcaacaccaccaagacacccttgtggaggagtggtccttgcggccccaagtcgctctgcaacgcgtgcggtatcaggcagcggaaggcgaggcgggcgatgatggccgccgcctccggctcggtgtcagcagttcccactgacagcggcaaggcctcgcccagcaacgccgccgtggccgcagcagcagcacaccccaaggtgaagaaggagaagagagtggacgtggaccggtcgctgccgttcaagaaacggtgcaaggtggtccagcaaggtcacggtgcggccgtcgtcgttgcagctcctgctgctgccaccgacagcgcgactgtcgtgcaggccaccgccgaggatggtgatgacgacacctgtccgagcagggatctgcttgtcgacgacattggtgggctcatcagctggagcaggagtccggcggcacccgcctcagcggctgcggccacctgcagcttccgggcgtcgccggcgttgcccgtgcagcaggacgagatcacggacgctgccatgctgctgatgacgctgtcctgcgggcttgtccggagctga

SEQ ID NO: 8956 - DNA, 243 bp, Zea mays
  Peptide Sequence Number=SeqID_52331
atgaccgggaaaaagaccacggcttcctctgacggcagcactccaaagaaagccaaggtggtggtggaggatgaggaagaggcggggttggaggatgaggaagaggcgactgtgacactatccgtggagaaggacgcgctggagtgcgacatctgctgcctacccttccagtccgaagttttcatggcaatgcaagaacgggcattctggatgtgcaaagtgctgcatccgcacggacggtaa

SEQ ID NO: 8957 - DNA, 492 bp, Zea mays
  Peptide Sequence Number=SeqID_52332
atggaggacttgagtacaatgatcctgaccattgtgattgggaaaattgtggcatttgagatgtcgcggaaaatgggtcgtcaagaggagccaacttcctcaaggccatatgttttggtatgtgatgaaaagaagggcaaaaagaaagctcccgctccaagttcctcaagtgaagaagaggaagaagaaagtgatgatgatgaacataatcaaccatcaacatcatcctctaaggatgaagaaacaatccgacgcgtcggaaaggtcgaggatcttctctttaacattaataggaaaaagcaaagaaagagagaatgcttcgcatgcagggagaagggccactttagggacagctgtccaactatggccgatcccaaaaaagagaggagcaaaggcaaggggctgacaagtgtcaaaacttgggatgactcttcaagtgaagatgaacctccaaggacgtgcagctaccgaacctcatcacgctcatcatag

SEQ ID NO: 8958 - DNA, 744 bp, Zea mays
  Peptide Sequence Number=SeqID_52333
atggttgatttacaggtggtgacgaggatgatggttatgattatgcttatgatggctcgtattagacacaccgcacggaagtcagtcattcctttattgtcttctcgtctcgcggagcgtccgcttcgccgtccggtgactggtcagtctagccatttggagatgctgcaccaccgcctgcacgaggagcaggagcgtcggcgacaggagttggagcagcagggctcttcttcctcgcctcagcaggaggtagagtctctgaggagctgctctcctgtgcccccgctggaggcgtcccctgcaccaccactgggcgtctcgaccgctggagtagctgttggagaccccagcgacagaggtgacgacagcagttcgagccacaacaccgacctttcagaggagcaggagttggagggatgggagggatgggttgctcgacccatcactcgtgacgccgctcgcggtgtcacttccacgatgtgctcgacaccttgctgcgccaggcacttgaccggcgtacctggtctatcgagtattgttgtgttgtcttccagcacagtcgcggggtttacccgaaccgctaggtggtggcttatttggtgcgccgttcggagaatagtctccggggtgcggaggtctgctcagagcattactctatctctgagcgggactcagctgaggcggccatacaagatgccgcacggcgtgtgctttcgcactactactcaatgctcggtggggtag

SEQ ID NO: 8959 - DNA, 714 bp, Zea mays
  Peptide Sequence Number=SeqID_52334
atgacttcccacggatcctcagacgacgggaacgcactgtcccacactgacgggcttgcgcgagagggctttccccgcattttgtgggaggtacttcagggggccggatacacgacgcctcctcagtacgcggtgcagcagttcgagaagcaccgagtgccccgctgtagggacacgatcgaggcgattgctctgcacaggttgaccactttctgcggatttcatcccttggagctatccacccaccccattggcttgttccccgcggaaagggaggatgacccaatgtggaaggatcgggtggagcatgccaaggacatctgggctatctacccaggtcagacttctcacttgaccatgcggtgcatgaatgccctgtatcgtctgcaagtgatgcgtggtgaggcgatgtcccatctgatggcattattggaggcaacaaagatcaccttggacaacaaagaagagcttgtggttgatttgtccacggagatggtggaaaaggacttgcaggtggagcagctgtccaatgagatccaagagctggaggaattagtggggaccagggagaacaccatcgaggagatccaggatacggaggccaacgaggacgtcgacattgagggaggagaggagcctgcctccagcttggacactgctggctcagggagaccaccttcccccgagtcgagtgttgcctcgttcgctcactag

SEQ ID NO: 8960 - DNA, 375 bp, Zea mays
  Peptide Sequence Number=SeqID_52335
atggcgcagtggcttgcccggtctacgctcgccggcggtcggagggagtccgacgaccgtggactggcctctccggcgaagcaaacttcgattcctcgctcggggagcttcaccgaggcacgggccatggcgtcggctggcctttggcgcgacgcggggcacgcgaggtcgggcgcgggcgtgctctggcgcacgcagaacgcgtcgaacatgtggaggtgttcatctgcccgtgttcaaacgcctgctgagatcgcaaacgtgcgaatattggcaaaaatccggcgcagacctcttcctggcacctatggctacctcttatataacttaagtggttttggtgccatcttcaaggtgaacatgggggatctgtag

SEQ ID NO: 8961 - DNA, 102 bp, Zea mays
  Peptide Sequence Number=SeqID_52336
atgaagaatgtgattttggagtgttacaagtacgcattgaggaagctcaacacctcgcagcctgaggtggaattgaccacctggtcgatgcaaggggggtaa

SEQ ID NO: 8962 - DNA, 1071 bp, Zea mays
  Peptide Sequence Number=SeqID_52337
atggtggtgacgcagtgcatctacgccgctctagcgctcttgtccaaggcggcgttcaccggcggcatgagccccctggtgttcgtcgtctacaggcaggccgtcgccaccattgtactcgtccccgtcgtcatcgcggccaacaggaagaagatgaaggagatgacgacgggccttggactgacgggcttctcgctggtcttcgtcgcctcccttgtcggggcaacggtgaaccagtgcatgtactaccaaggggtgaatctgggctcgtcgtcgatggcaacggccatgaccaacttgatccccgccatcaccttcgtcatggcggcatcagtcgggaggccgaggagcctggccaagatcttcggcacggccgtctgcgtgagcggcgccatggccatggctttcttcaagggcccgaagctgctcggcgacggcccgaacgctctccagctcctcctccacgcgggcggcggcggcaggtgggtggccggcgcgctcttcctcgtgggcagcagctcctgctggtcgctctggctcatcctgcaggtgcccatctgcaagtcgtacgtggagccgctggctctgtcggcgtggatgtgcgtcctgtccacgctccagtccgcgctgctcgtctccttcctcctgccggaccccagcgcctggaggatccactcgctcttcgagctctcctgctgcgtcttctcgggcgtgttcgggtccggcgtcacgttctacctgcagtcgtggtgcatctccgtgaggggcccgctctactccgccatgttcaacccgctctgcaccgtgatcaccaccgtgttcgccgccgccgtcctccgcgaagagctgcacgtcggcagcttgctgggcgcgatcgccgtcatcgcggggctgtacgtggtgctgtggggcaaagcgggcgacgccaacaagggcggggtggagccagagcaccactcggacgatctggagaagacgtcatcagcgcggtcggatcccaattcgacggccggcgtcggcagtggcatcgccgagcccctcctggcgggcggcgatccaacggagaagtag

SEQ ID NO: 8963 - DNA, 567 bp, Zea mays
  Peptide Sequence Number=SeqID_52338
atgcccatgagtatgtcatccataccgtcgtcctcccaatccgggaagctctatggctgggtcgaaagaattggtaacaaggttccccatccttttctgctctttatctatttgattatcgtactcatggtgacgacggcaattttgtcggcctttggcgtcagtgcgaaaaacccgaccgatggtacgccggtcgtggtgaaaaacctgctcagtgtggaaggattacactggtttttacccaatgttattaaaaactttagcggttttgctccacttggtgcgatcctggcgctggttttaggtgccggtctggcggagcgcgtcggcttactgccagcactaatggttaaaatggcatcgcatgttaatgcccgctacgccagttatatggtgctgtttattgcttttttcagccacatttcttccgatgcggcgttagtgatcatgccaccgatgggtgcgctgatttttctggcggtgggcaggcatccagttgcaggagggccacaacgcaccccaaagcagactctgagacagctaactgccggtagtcgtaaagtgtag

SEQ ID NO: 8964 - DNA, 357 bp, Zea mays
  Peptide Sequence Number=SeqID_52339
atggtcagaacccaacggccggctgacgtggctggcgcaccgaacagtgtccggtggtgcaccggactgtccgattcgccctattcacccccttctaggcgactttcagcaacctttgctgagtttgctactgcaaacaatttggactatgctacaatctcagttgtgattgatttgtttactgaggacaactttgaagaatatgagcagttctatgagctagtgaggctgggcattcctaggaggtttggtgagactgcaggactgaggcatcatcctgctgtcattaacaagattgccagagtaacaattctcccaaagagtggagataagagcaagatcagagataagttctag

SEQ ID NO: 8965 - DNA, 504 bp, Zea mays
  Peptide Sequence Number=SeqID_52340
atgggcgcggacgagccggcgcaaccgcgtactcccagagccagagacgccgagatcgagaagcggacagcaggattgcaagaacatggcagtctgtttcggagctttcggctaggcaagggacacgagttgccagtcctgtacctggagcagtgctgtgtcactgtgtgcttgccctgcttggccagtcggcctccttcatctgttgtttcctcccataccgtttggtctggctctggcgatcagtgtctgatggcgtggtgcaggcctgaagggggagttttcgagtttggtgaccatgcgtcacgggctcaccggaaggctacgaaaaccgccgcttcttggcattgccggtacgtgcctatgcataaagaggagagggcgagaagaggtagcgagtggcaccgcgcacgaggcaggggaaaggccaacagcagtgggaacgccaagagcgaacgagaacgaggagaggtggcgacgagggagaggaggggcagcggctga

SEQ ID NO: 8966 - DNA, 90 bp, Zea mays
  Peptide Sequence Number=SeqID_52341
atggccatgcaatgcgacgaactgagcgaaaggccaagtgaacctgaacacactgagaacggcggatttctggatgacagaagatgctga

SEQ ID NO: 8967 - DNA, 216 bp, Zea mays
  Peptide Sequence Number=SeqID_52342
atggatggtcgatttcagggcatgttgacccatatggaccagcgcatggataggatgcaggctcactttgatgataactttgatgggctgcacactgagcttactgagcttcgcactcacatccaagacattgttcatgatccaattatgactagaatgaacaacatgcagcaaagctttcaagataatatggggggccttatccagtcagtttga

SEQ ID NO: 8968 - DNA, 462 bp, Zea mays
  Peptide Sequence Number=SeqID_52343
atgagggaacgtcaagagatggaggcaaggatgatggcggagcgggaggcccgcctggtagatcagcataggatgacggagatgttccaatacatgaagaaccttagcgccgcacagggtttcgctccagcacctccattgttccctacagttgaccctactttcttccatactcctatgagtatcaaaaatgtagttagatgttgggccaatctggggcggcatccaacaaccctcatggatcgcccgacccatcgccgctctagtccagccgcccacctcgatgagagttatattcttagtgttgagacttcagtacttgtgttgaatacttatgtttgtgttggatacttatgtcagagcttgagacttatgagacttatggtcttgatacttatgtttgtattaagaatttggatatttatgtttgtgttggatatttatgtctgtgatgatatctga

SEQ ID NO: 8969 - DNA, 855 bp, Zea mays
  Peptide Sequence Number=SeqID_52344
atgtcttcgcgctcccttatgcatcgtgtctttccaccttccaagcccccggatgggggatacccgccgtctttccgcctcgtcgttggaggaacgcaactccgtgggagttggtacctttcagccatcgttcggcttcaaggattttcatcatgcagcccggctgcatcccctcgccggtggtcacccaagacggtgaccaccagcccctgggtggggagaagcaagccgggctgcgatcttggtcccaccctcagcttcaaggatgttcatcatcctcgctggggtggaggccgggctgagccggagctctacctccgcgcgggttcatgggtcagcctctccctcagcgttcgagggagagagcgctcactggccctgcgagaggggcggacttcgacaacgcggggctggtcgacggcgggcatcgtcagcttcagcgcgttggattcgccggcttggctcccggagccccctcctgccgcaagggcggttatcgcgccgtgcgcacgggaggaccgcccaagacgtcgcgcgctgccagggcggcgttcgtgttctggggcggccctgcctttgcaccgatacggcgcctccacgcggaggtcggtgccccgctcgtccgggaggatccgagtggggatctgccggcgggctgacggcccctgtcgtcggtgccgaggcggaggcggctcgagaagtccccgtcgccgacgggatcaccgccaccatccgcgcttcggggctccggctctttgtacttgtcctcgcccctcgagcgtcggcgtgggcgagggcagggttgcagcagcgttcgccctgaggccatcgctgctgcagttcggccacccgtag

SEQ ID NO: 8970 - DNA, 213 bp, Zea mays
  Peptide Sequence Number=SeqID_52345
atggcgagagtagcgtgtaccctccgtggcaagaggctagacggtggtgtatatgtgctctcggttggtatcctcggactaaagtcggcattgcagtggaccggaataatacgaaggttgactcagagccgaaggtgcgagcaggaaggcttcggcgcgacagcaaagagtggaaccgacttgaagatgaaaaggctattcagacctcaatag

SEQ ID NO: 8971 - DNA, 645 bp, Zea mays
  Peptide Sequence Number=SeqID_52346
atgaccacgtcaaacaaaaaaagggaccgggaaaggggggataccccgagaaggatccttctccgtgaaggaaccaggctccgagcctccctactgatcagaggttcgaaggctggcccctcggaggggttcaacagccgcctcagagcacgtgggctccacactcactactggtcagaggttcgaaggccggcccctcggaagggttcaatgaccgcctcaggctactcgggctccgcgcccactactgatcagggcgggaatgatcttgtaacggaatcccatcagaggcaggcatcgagccctcggaccccgtcgacaggggaccgggtccggcagatcacccacaggcagtcaggcccggcctcaggcaccataggaagctccgctccgcccaacccagggctcggactcgggctaagccccagaagacggcgaactctgctccgcccgacccagggctcggactcgggctatgccccggaagacggcaaacttcgctccgcccgacccagggctcggactagggctcagccccggaagacggcgaactccgctccgcccgacccagggctcggactagggctcagccccagaagacggcgaactccgctccgcccgacccagggcttggactcgggctaa

SEQ ID NO: 8972 - DNA, 183 bp, Zea mays
  Peptide Sequence Number=SeqID_52347
atgacgatttcattaggcactatgggcgcttgtgctctcagacgcaagaaccttcggacatacgcctggagcttttgccatgatgtgattgttcctggccgaagagaggagtaccaggtttgcacaacattcttgactgccatgacgaaggatttcgccatgactgttgtattacccccatag

SEQ ID NO: 8973 - DNA, 972 bp, Zea mays
  Peptide Sequence Number=SeqID_52348
atgggcagaagaacacctccacgtgttcgacgcgccctgagcacgccagagcacgcccagcgcccgaccccacgtgtcccgcgccgcgccaagccacgaccgtgtcccctgcctgcgcccgcgcctataaagccggccaaggcttcagtcatacgcccccgcgcgctctcgacctcaccggagcacgagatcaccggagtcgactctttagcatcccgtgaagctccccgtgcctttggattgacctatatcgtcgtggataggccggagcactcgccgctgacgagctcgcccgcctgcgcacgtggaccggccgattccggccatcaccttcatcgagctgtacctcgctgtgaccgcaaggacctcccgaagccaaccccacccttcgctggacctccctcaccaccgggagcaggttacacgacgcctccccagtacacggtgcagctgttcgagaagcaccgggtgccccgcagtagggtgaggatgaccctggagcctcatcccttacagccaggctggcgttcgttggactccgagtctttcagatatcgggctgaggatactaccgaggccattgctctccacgggctgacgaccttctgtgggcagacggctcacttgacggtgcggtgcatggatgccctgtatcatctgcaagtgatgcgaggagaggcaatgtctcagctaatggcattgttggaggctaccaagatcaccttagacaacaaagaggaacttgtggtagacctatccacggagatggtggaaaaggacctgcaggtggagcagatgtccaacgagatccaggagcttgaggagctagtgggaaccagggagaacaccattgaggttctcgaggatcagctaatcaacactcagcagcaacttgcggaagccaaccagcatttggatatgcaccacctggagatccaggaaatggaggccaacgaggatgttgacatctag

SEQ ID NO: 8974 - DNA, 336 bp, Zea mays
  Peptide Sequence Number=SeqID_52349
atggccgtcggaggagcgccggagcctggtggagggacagctgtcggggatgtcgagaccttgctgacgtcctcttgcttccgtaagggggccgagaaccgccgtcgtcagggagcggtgatgatggcgcctcctgtcgacgtggtcggtccgcgccctaggttgggcaatgtggaggctcctccgaagtcgaggtcgagtctgtcttccgtggtcgtggtcgagtccgagcccctgggtcaggcgaggcggagaccgtcggctgaggccaggactgagtccgagccctggggtcgggcgaagcggagttcgtcgtcttccggggctgagccctag

SEQ ID NO: 8975 - DNA, 528 bp, Zea mays
  Peptide Sequence Number=SeqID_52350
atgtggttgaggcgagcagtggctagggcgtcccgcagcgagctcgcgcggccaaagctgagtagcgagaacacctggacgcggtgggggcttgctgttttggtgggaaagataggaggagcagggccatgtgtcgcggccatgcgcagggaaatagcaggttcggcagaggtcgcgcagagcgctcatgaggagcacgcccgtcggaaggaaggatcccggcgccatggggaagaaggccgtggagagggaggagggcagggcgtcggcaaggggcttcaacagaggagcgccatgggaggatctcgcgcagcgtccactgcaggggggtggaggctcgcgccgtggaaggaaaacaacgctggttgtgctccctgctgggcgccatggaaaggggagcagaggtgctgcacgtggggaggagggcttcctgctgccgtgcctgaaggggggcgccaaggggagagaagggggcgccatgggaaggggctcggcggccatggagcttcagcgctggctgctgtgtga

SEQ ID NO: 8976 - DNA, 150 bp, Zea mays
  Peptide Sequence Number=SeqID_52351
atgggcggggacctcctggcagcagcatccgccctgaggtcagtgctgccgctgttcggccccccggagcagaagtcgtcgtcgtcgctgctgctggagcagggatgtttgtgcgagcgagagatgcttctcgcggaaggtgacgagtga

SEQ ID NO: 8977 - DNA, 831 bp, Zea mays
  Peptide Sequence Number=SeqID_52352
atgcaggcggcatgcaaccgcgccaagtggacgcgcttctccgactcccaacgcgcccagcctggaggcccaggctcacgcgtcatgcaaccggcgcgccggatgcttcatgcaagcaactgcaccgtcacttgcgccaccaccgcacctcctcgatcgcggaaccaataccgcgactcgaggcgacccagcgcacgacccagcagcgccagcctggcgcggcggtcaaagcggccaaaagagaagcgggcgacgcttcgccttcgccgtaaaaaccgcgccaaaaaaggctggccccccgaggggttcaacagccgcctcagatcgcgtgggccctacacccactactggtcagaggttcgaaggccggccccccgaagggttccacggccgcctcaggctactcgggctccgcgcccattactgatcaggggttcgaaggctgacccccgaagggttcacagccgcctcagacgccgagcgagggatgaccaggggtacgttcgatacataaccaaggctcgggctgcgctcccgagctcaccggagacaccatgttcggcgcccatcgagggcaacatggcgctttccccccccctccttgcggaaaggcgacgcaggggcgtatgtaaaaaagccgagtctgtccctgatcgccctctcgccctgtgcagaggctcgggggctgctctcgcaaacccggctccggccaaaccgttgacagcgtcaacataccagcccaagaacttgggccccgaccgtacacccgggctacgaccagttcgcatgagggaacaaccagaccagccgaagcattacgcaaggcattaa

SEQ ID NO: 8978 - DNA, 306 bp, Zea mays
  Peptide Sequence Number=SeqID_52353
atggaggccaagtcacaccatcaaccaaatcaaggaggtacctgcaaaaattatgccacaagcaaggctgagtatactaatactcagctagacttacccggttacaatggatcaagcagtctcattagctgcgagaagcagacgattcgaatcgagttttatcctttgcaagacaacgcatccccatggatccgtgtccacagaccatcatcattccgttatcaaaaatggatacaaccaattcctgacctcgcgcgagtgctagaaaaatcacccgacttctaccgagatcctgatttagcatag

SEQ ID NO: 8979 - DNA, 630 bp, Zea mays
  Peptide Sequence Number=SeqID_52354
atgacgataccatcgaggctcctgccgttcgatgaaggggcactcggaagggccactttgtcctacctccatcagcgcctgcacaatctgaagctcggccaatgggatgacatgtcttttgacgaccgaggaattgtcaccaactcgaaaggtgtggtggttccttgcactggttggtcgcacttcgcactagctccacatgctacatatggaacagctcaaggcaccgtcaagcacgacttttggagacgctattgtgtggaacctgaggctcaagagcatgaagaccgagtattagagaaaaatgcgaagaaggtaactcttccatggatgaaacaccggccgcaggcttacaaggctttgtgtgagatatgggcttcgctagagtggattgagaagtcaaacaggaatcgacatagacagcgccatcagcaggacgaggacgatgatgaggtcgtagtcaaccatacctatggggctgatggacacattcagttggcaaaacgaatggagacatacgggcaggagatggttaggaagtatggagaagactacgattggcgaggagcgcctaccatcgatgctgaagttgtgcattctattgaaggaaaggcgcatggacggtattaa

SEQ ID NO: 8980 - DNA, 450 bp, Zea mays
  Peptide Sequence Number=SeqID_52355
atgtccggtgcgccagccacgtcaccaagccattgggattcgaccgttggagcttctgacttctgggcccgcctggctgtccggtgtacaccggacaagtactgtagattgtccggtgcaccgttccgcgcatgcctgacttctgcgcgcttctggcgcgcattaaatgcgcctgcaggttggaaaggtgctagtgctcgactccttgaactacgacccttcaacctatacaaaattcctcagtatattagagtttgccacaagcaaccacaaggatcggtcctatgtgggttctatgcgtgcgagtttatgagaatgaacggacgatacatcacaaaccctagcaaggaatttcaaaaaggaaatccggagaacttgaccgaaggtgcattgtatggtatagttgaagacttatgcacattcatattaaaaaaggtcattcccacttaa

SEQ ID NO: 8981 - DNA, 240 bp, Zea mays
  Peptide Sequence Number=SeqID_52356
atggccggctcggccgctcggtcggccccgcgccctaccccgcgtccctgcgcgcccagcggctcggccgccccgcccccctgctcggccggctcggccgccccgtgcgccgcccgccctcgccagcccgaccgcacgccgccggctcagccgccccggctcggccgcccctgcgcgccccgcatagggccggttcaaccgcccctagggccgttaattgtttaccctgtgcaatgttga

SEQ ID NO: 8982 - DNA, 309 bp, Zea mays
  Peptide Sequence Number=SeqID_52357
atggcccaagggcacatttccctttcaattccgccgccggcgggtgggctgacgaccgccattgtcgctgtcgcgcggcggaggaaggagtatcatgtcatagctgccgttgagggacatgaactcaagactccccatctggagcttgacgggaagctgttcgtcaacacgcagcaggcccctacctggcgcgccaactgtcagcgtttcgaccccggggggtccctcgaccgacgagtaaattgtcgctgcgtgtcccagcccagatgggtcggcgcgagacgggacacaaaggggggagaacagtaa

SEQ ID NO: 8983 - DNA, 636 bp, Zea mays
  Peptide Sequence Number=SeqID_52358
atgagtgcgacgaggcaaacctcgcagctgcgctacttcatccatggaagggatcgagtgggggaaaaacagggggagatgcagggaggggcgtcggcttccatggggaagaagggggcgagctcacgtgctgctgcattggagaggggcgagcgggataggcagtccatgagggagaaggagaagaaggggcgcgctagccatggagcagaggcgtcgctgcgggaaaacgtcgacctgctcaagccagggcagaggcatggagcgcccaagaagaaccgggaaggagggagctcgtggggaggtaccctgctgccgagcgccatgggcagagagggagctcgagcgccggccatggaggagagtagggcgtcggcgtggtcccagggagctcagccatggctgcatctgctgggcgccatggctgggaggaagctcctgcgcgcagccgtgaggaagacaggaacagggagctcgcagggaggagcggcgactggaaggggagctcggctggcgtccagcctggaggaaggagctcgccgcaggggaagtggagctcgcgcccatgggaggagaagggcgcctgctgctgcgcgtgggaggaagcagccagggagaaatgaaagtggcgactag

SEQ ID NO: 8984 - DNA, 873 bp, Zea mays
  Peptide Sequence Number=SeqID_52359
atgtcttctccctcccttatgcctcgcgtctttccaccttccaagcccccggatggggggaacccgccgtcttttcgcttcatcgttggaggaacgcaactccgtgggagttggtacctttcagccatcgttcggcttcaaggattttcatcagccagcccggctgcacccccccgccggcggtcacccaagatggtgaccaccagttcctgggtcgggagaagcaagccgggctgcgatcttggtcccaccctcagcttcaaggatgttcatcatcctcgctggggtggggaccgggctgagccgacgctttacctcccgcgcgggttcgtgggtcaccctctcccgcggcgttcgagggagagggcgctcactggccctgcgggcgacccggacttcgacaacgtggggctggtcgacggcgggcgtcgtcacctccagcgtgtcggagtcgtcggcttggctcccggcggcccctcctgccggagggcggctgccgcgccaggccggtgccccactcgtctgggaggatttgagtggggatctgccggggggctggtggcccctgccatcagcgccgaggcggaggcggctcgagaagtccccgtcaccgacgggatcaccgccaccatccgcgcttcgggcccccgccgaggcctcggatcgggctggcgcccttggaagatggttgaccgaggccccaggggtaaccggccgagccgcctgctcgggctggattcccggagaagtccctggaccgcgtcgccgtccgaggctgggtcgggcctcgctgaaggtgtcgtcgatgccgagggtgctacagcccccttccagcgtgaagacccgagcctgcaggatcagattgccttgtag

SEQ ID NO: 8985 - DNA, 1410 bp, Zea mays
  Peptide Sequence Number=SeqID_52360
atgcaggcggcatgcaatcgcgccaggtggacgcgcttctccgactcccaacacgccagcatggaggcccaggcccacgcgtcacgcaaccgaacaggcggcgcttctggcaggagaagcgggcgacgcttcgccttcgccgtaataaccgcgccaaaaaagggaccgggaaagggggataccccgaaaaggatccttccccgtgaaggaaccgggctccgagcccccctactgatcagaggttcgaaggctggccccccgaggggttcaacagccgcctcagatcgcgtgggccctacacccactactggtcagaggggttcgaaggctggcccccgaagggttcacagtcgcctcagacgccgagcgagggatgaccaggggtatgttcgatacataaccaaggctcgggctgcgctcccgagctcaccggaaacaccatgttcggtgcccatcgagggtaacatggcgttctcccccctccttgcggaaaggcgacgtaggggcatatgtaaaaaagccgagtctgtccctgatcgccctctcgccctgtgcggaggctcgggggctgctctcgcaaacccggctccggtcgaaccattgacagcgtcaacataccagcccgagaacttgggcccgaccgtgcacccgggctacggccaggctcggactcgggctcagccccagaagacgacgaactccgcttcgcccgaccccagggctcggacgccgccctggcctctaccgaacgaccttcgcctcgcccgacccaggggctcgggctcggcctcggccatggaagacagactcgacctcggcttcggaggagcctccacgtcgcccgacctagggcgcaagccagccacgtcaacaggaagcgccatcatcaccctgccccgatccgactcgggccgcagagaacaagaccggaggacgtcagcaaggactcaaccgctccgacagctgtccctccgccaggctccgttgctcctccgacagccacgacatcacaccagctgggtgccaagatctctccggctgccacattggcatggccttcttagagaaggttggccgcgcggggacgaggacgagacaggcgctctcttggggccgctcgcttccctcacccgcgtggacgcttgtaaccccctactgcaagcgcacccgacctgggcacgggacgaacacgaaggccgcgggatttccacctctctcacgcccgtctccggccacctcgcttcccccttcgcgctcgcccacgcgctcgacccatctgggctggggcacgcggcacactcactcgtcggcttagggaccccccggtctcgaaacgccgacaacgatatcgcgcgcgagcgtagaggagaagtgaccggccgccgcgggatagcgttcctctacatctag

SEQ ID NO: 8986 - DNA, 855 bp, Zea mays
  Peptide Sequence Number=SeqID_52361
atggggattattcccaagattaatctaatgggtgtgcccctgcaggtcaaggatcttctctttaacattgacaggaaaaagcaaagaaagagaggttgcttcgcatgcggggagaagggccacttcagggacaactgtccaaatatggccgaccccacaaaggagaggagcaaatgcaaggcacttataagtgtcaaaacatgggatgactcttcaagcgaagatgaacctccaaggacccgcagccaccgatcttcaccacgctcataccatcatcacacaagtgccttatggctagagggcaatgatgtaccccctgcggcgtggtcggtccgagcccaaggtcgggcgaggcggagactcctcctgaggccgaggccggggtcgggtaaggacgtgattcctctcgaggtcgaggttgagtccgagccctggggtcgggcgaggcagagaccgccttccgagttcgaggttgaggctgagccttggggtcggccgaggcagagaccaccttccgaggccaaggtgggggccgagccctggggtcgggcgaggcagagcttcctgtggtgcctgaggttggactcggctgctgtcagcctcaccctggcgggtggcacaacagtcggagcaaggcaggtggcgctgttttcctgtcaggcgatccttgcattgaatgcttctgcgatacggtcggttggcgaggcgatctggccaaggttgcttcactgcgaagcctgcccgagctgggcctcgggcgagtcgagggtgtggtcgttgcttgaggaggccctcgggcgaggctctacagcttgtgctgatggtgattaccagccgagtttaagagtgttgggg

SEQ ID NO: 8987 - DNA, 483 bp, Zea mays
  Peptide Sequence Number=SeqID_52362
atgaagacaaatttgtcaccaagatttgggtttaaattggaatttaagtttgaatttgaaatggataggaaaaataaaatagagaaaaaaaggaagagtgtgactgagacttgggccaaatctgcacctggtggcccatttaacccactctcgcgcgaccacatgattaaatggcgccgatacctgggccccgcccgtcagtcgacgcatgcgctccgctcacaacctggcgccgacatgtggggtccccctggacaaccactcctctcccgcgcttgctttttcgcctcccagcaaccactggcgtgtgggcaaggttgtcagccactcgctagtcgcccagtccgcgtcgtgcacccgctacgccgacaggtggacccgaccgtgcaggttcgtcaacgacctcccgcatggagcgcggcatgggcggacctgctgaatcccacggacccgccgctgaccgagctcgaccagggtatataa

SEQ ID NO: 8988 - DNA, 306 bp, Zea mays
  Peptide Sequence Number=SeqID_52363
atgcagttgaaggtcgagtttgacttctctccttccttgacgaggttgagcttgttcttctctggtcttggtctcattgatgtaattgtggatattactccacaactcatcacactcaatcaaagatccaaatcaaacaagtctcctagtcctaaagtcactttaggcacaggatttcaaagtgtgagatccatatttgtctttagaaaggaaaggtttcgtcctacagtcaacattcctctgataccacttctgtcacacccgggttttaggggtccaaagcccgggcgcgaacataaacaccag

SEQ ID NO: 8989 - DNA, 735 bp, Zea mays
  Peptide Sequence Number=SeqID_52364
atgaaaaggttgctggagactacccatctggagcttgacgggaagctgttcgtcaacatgcagcaggcccctacctggcgcgccaactgtcggcgtttcgaccccggggggtccctggaccgacgagtcgggtgcgcttacagtagggggttacaagcgtccgcgtgggagagagcgagaggcttatgcgcgccgtcccgttcccccgcccggccaacctcctcgtacgagtgccctggaccttccttttataggcgtcggggtcgagtccgaaccctggggtcgggcgaggcggagtccgtcgtcttccggggccgaggccgagtccgagccctggggtcgggcgaggtggagttcgtcgtcttccggggccgaacccgagtccgagccctggggtcgggcgaggcggagttcgtcgtcttccggggccgagcccgagtccgagccctagggtcgggcgaggcggagttcgtcgtcttccagggccgagcccgagtccgagccctagggtcgggcaaggcggagttcgtcgtcttccggggccgagcccgagtccgagccctagggtcgggcgaggcggagcttcctatggcgcccgaggccggacttggccactgtcagcctcactctgtcgagtggcacagcagtcagagcgacgcgggcgacgctgtcttcttgtcaggctggtcagtggagcggcgaagtgactgcggtcacttcggctcagtcgactga

SEQ ID NO: 8990 - DNA, 831 bp, Zea mays
  Peptide Sequence Number=SeqID_52365
atggcgacagaagctaaacaaggggaagcaaggtgggaaaagatgatggtgatgttggagaggttgacagggaaagttgaggctatggagaaggttgccgatgagaggacaactctatccatgcgtgtggaggagaacgggaaggcgtttgctaggatgaggttagaagctatggcaagagagatggaggatgttggaatgggaccagagtcatcggatataggaggtagaagaggggcattaccgaaccaggatcaaggaggaagggagttgcaacagcatgtacctaagatgcttttccccaagtttggaggcaaggaaccggcaatttggttgaatcgatgtgaggactacttcaacatgtatcaggtcccaggtgcaatgaagtttatgaaagtattgaagaatgagatacaaggtcatgtaatgtcccagattccttccactgttgatagggctattaggttggtgctggtgcagcaggagattgtggtaaagaatagtggtaggaatagtaagatagaccaaggaggtaggggagtgacaggagttaggactgaagagaaggtagtggatcaaggggcatggagtaaggagagacaagtgaaagaatacatgaggataaatggactctgctatacttgtggtgagaagtttgagccagggcaccaggctaaatgtccaaaaagagtaatccctcaactcaatgtattgaccactaaagatttggagatggtattgtctgaggagcagctagggcagatagaaaaggaggagttctaccagtttcatcagccaagttatggtggacaagttaaaactagccactga

SEQ ID NO: 8991 - DNA, 111 bp, Zea mays
  Peptide Sequence Number=SeqID_52366
atggctaagctgaacttcaacttcaactggggtctaggcaggttcaaccggggtccagagaggttcaaccggggtccacagaggtttaaccggtgtccagggaaagtttag

SEQ ID NO: 8992 - DNA, 396 bp, Zea mays
  Peptide Sequence Number=SeqID_52367
atgacgtgtcacagctgcgagatcaaggcagtagtgacaacaaacttaaggctcacatcaccaacaccatcgatccaagtcttagcaaaaaaacatggtagcgacactggagaagtgtcccagaccaactccgggcaggttgccggggtccaggcgagatgccggggaacaacggccggaacaacggctaagtcatcggggtgcagccagggcgggagccgattggtgttgccgagctggggctactgctgctccatggagtttgtggctagaggagtgagagagcagggatggtggagaggggaagatgaggagtcggtcgagcacaggaaaccgagcaggtggggtgtccaggaaggagatgccatggggaagaagaggacctgggtgcggtag

SEQ ID NO: 8993 - DNA, 324 bp, Zea mays
  Peptide Sequence Number=SeqID_52368
atgtccttaaatccgaagctcagaagctcagaaaacttaagaaacaaagcaactgttggaaagcaagagctaagaaatcaagcaaagcaaagtaccttcggactcggatcagaaccacaatatgaagaagtacaaagaatgcgaaggttggcgcagagccgaagctatgtgcaggggaccttcggcgtgatatcagaaaggggaaccgacttaaaagggaaaaggctattcagacctcgatggattactatagagtcattagcaaatgtaaagggcatgagtgtaattttacatgggctgcgttccgtgcctataaatagatga

SEQ ID NO: 8994 - DNA, 174 bp, Zea mays
  Peptide Sequence Number=SeqID_52369
atggagagtcatgatctccgggcagaaagggaatcacggcttgtgggtggcaatgagattgatggttctggttatgactatggtactggttgtcagaattgcaaccactgctcaggagaagatgaagccgtggaaggagacttccaggagtttcaggactacgacgagttctag

SEQ ID NO: 8995 - DNA, 744 bp, Zea mays
  Peptide Sequence Number=SeqID_52370
atgcagtggctttttggggcaacatcatatggcaatattgtagatggcatattgctctacaactttgctgcagagcttgaacgtgaagaagaaatagaagtcaccgaagacaggacaccaccaccttcggaatctcaggccgagaattgtttctactttgatatctgcggatccgagcctgatttacctgtgaacgaaggcaagccctggatccactttagtaagcatttctgcaaaacagagtctttgattgttgaaaagccttaccttgactcccatataaccagcatacctttgagagtcttttctttagtcggtttatgtaattgcttccgcatttctttatctctgatgttctgtaatgtctgcaagacgggtgagacgttcctggatcatcttgctgatcgagacttagcacttgactgggccatacagtctcgtttgctagcatgtgctaaggaagcaagggctcaggcccgaattaaagaacttagctcaactgtcgacaacctgcaggtctactgcaatacgttgcatgaggaagtccatatactatactcacaattacaccctagtgtgcctacacaccctgctgaggcggaagccggaccctctcacgttgcgggacgcgcgctgggtggggagttagacctttttgagccccctccttctttgaggttggttgatgtctggactcccacacctgacgatgaggccgccaagagtaatggaaagcaggaataa

SEQ ID NO: 8996 - DNA, 423 bp, Zea mays
  Peptide Sequence Number=SeqID_52371
atggctctggctttggtaattagctctatagacatagtgcttagcaaccctacctttaagatgggcaagagggggcgacactgtcattctggaggacaactcggaggagtttctgcctatgcctacccgttggcagaatcactagccttcgtagctggatcatcagcttcagcaccgccagcaccagcagtccaaggccctgctcccggaggcgacgacccagatgactttggtgacgatgatgaatacgatgacgaagaagaagaagatgaggaaaacctcaacgatgaagccaacgaagaacagcaggaccactacgtggggttctggcctgtcactgaacattacacctcaatgttcaagacagggcactttcctaacctgctgcagaatgttctgcacgcgttgggaacctacgtctga

SEQ ID NO: 8997 - DNA, 252 bp, Zea mays
  Peptide Sequence Number=SeqID_52372
atgagccaaccgtgccaggggaagaacctcctcagcgagaagctcggcgatgaaggaacagacgccagaatattcgacgacatcatgaggctggggagcgagacccagcgcagcccctgctcattcgggcagctaatcatcttctacccctcgctcatcccccaagcgacctgcgacacgccatcaacagtcgccgagacacatgaagctctatcaacgcttcacgcgatcagcgacacgagaatgagataa

SEQ ID NO: 8998 - DNA, 1140 bp, Zea mays
  Peptide Sequence Number=SeqID_52373
atggggggcgcggagcccggttccttcgcggagaaggatccctctcggggcgaaggtgaagcgtcgcgcgctcctcctgccagaagcgccgcgtgtcccgccgcggagttaatgcgacggggcgagtggttggcggggcggccgttgcgcgcgggtgatccgttcgaggaatgggtcacggcaactggcgtgccatttgctcgacgcgtgggcctgggccccaggctggcgtgtcagaagttggagaagcgcgtccatctggcgcggttgcatgccgcctgcatggctgctcgccccttctgcccgttggtctgggcgaaaatggggggtcgcctgaacacaactccatgggagttggtacctctcagccatcgttcggcttcaaggattttcatcacgcagcccggtcgcaccccttcaccggcggtcacccgagatggcgacctccagcttgatggtgggggaaagcgagccgggctgcagcctctgccccttcctcagcctcaaggattttcatcaccaaggctggggaggggagagtgccgagttggggtcggcccctgcgtgggcggtggcccgctccttcactcagtgatggggggagaagcgggcattgcccgtggcgtccggcagctgcagcgtgcctggtcttcagccgcgagtggcttcggggccccttgcggcgtcggcgtctgccacggcagccggaagaggttcttccgccagcgcggcggccgggaccggccacgggctgacctccaacttctacggccttctgcccgtccttgcctcacgagttttggcacgggcgggggcctcctgacagcggcatccaccctgaggtcagcgttgccgctgttcggccccccggagcagaagtcgccgtcgtcgccactgctggagcaggccgggggtagcgatatcagtatgaacagaggcggagttggctcgagaatggggaacctggtcggccggagcctagccgtgtcgcccgtcagcggtgccgacgcccaagagcccctggacctcggcgccgcccgaggctgggtcaggctttgctgtagacgtcgtcgatgccgagggtgctacggctcccttcggcgtgaagacccgagcctgcaggatcagatcatcttgtag

SEQ ID NO: 8999 - DNA, 480 bp, Zea mays
  Peptide Sequence Number=SeqID_52374
atggggagcgtccgagaggagccggaagcagagcaccacttgcgtgtggagaaggctcgcggctctctacgtagttactcgaccatggtgcttggacctcgcgtgagctacccattgcgtaggggcaccaacgagggtgtactgttgaagccggccaacgaactcggctacgaatatgcggcggaatccacctccgtgggtggcacgacacccgtgcctataaacatgagcccatattgccccgcttccatcgatctcgcgtgcaccgagaatgtcatcaccgctcgggcaagcagtactactgttggggacgattcttgcatacgacgccatcgggccctcgcggtgagatttgaatttggaaccctagaacaccgtgtcatgcctctccggcgagggcgccgccgtgctctgcagtcgcagggatcgggcagccccaggacgatctcggctattttaaatctataccgtatagattag

SEQ ID NO: 9000 - DNA, 969 bp, Zea mays
  Peptide Sequence Number=SeqID_52375
atggcgaatgcgagggatcagatcctaccgacggcattatcgcagaggatccggtcgacgatggtcttcggctccacgacggtgcaccagccacggcaagcaattccggcagtctggagcatggcttcgcacgagaaaggccacggtcgagtcacgcgcagtatggcgaagctccctagcccagatccgaggcccgaacggctacccaggcgaggagggagtttcacaaagtggatcagatgcgcgaaggagtcggcgaaggggagcgccacgacggcccaaaagaagggggttcgagatgaccacgacgagactgacgccattggagcggagcttgaagtgcatggaggtcatggccctcaacagaaaacagatccttttgatctggaggagttctcctgtggatatggtggaggcggtcgcggactcccagctcgtgttacgaggaaacggggaagaagcttccatcaggcccgaggtcgcagcggctgggaaggggtcctgaagcggcgcaacaaccctgcgcgatttcctggttcggttggactccagcgtgaggtagaggatgacccagggaagccgggcccacatgtcattatctcagccagtggatggaatcaagtagagatgggccgccaggtgcggtttcccctgggccgagcgcgagggcagtactgggctgggagcttggaatttagcccaggcaggtgccaaaggttcatatacaactacactaaatcgactgtccggaataccgtagattattccggacaggagaagctttttggaaaaacaggccaagcgcggaccgtccgggcccttgcggcggaccgtccgcgacacgaggatgacactcggacagaatcaatgcgaaaatccaagtctgcactatggaccgtccggagaaaagggcggaccgtctgggtcctcgtgcggaccgtccggcctctagcgcggacagtccggtag

SEQ ID NO: 9001 - DNA, 204 bp, Zea mays
  Peptide Sequence Number=SeqID_52376
atgggccgccaggtgcggtttcccctgggccgagcgcgagggcagtactgggctgggagcttggaatttagcccaggcagggtagaggaagcacttcaagattcggattgggtgctggtgatgcaagaggagctcaacaacttcacgaggaatgaggaaccaagtgggtcttccacaacaaacaagatgagcatggtgtggtga

SEQ ID NO: 9002 - DNA, 1698 bp, Zea mays
  Peptide Sequence Number=SeqID_52377
atgcgggggccggcgtcggtgaaggcggggagccggccgccttggctggggctgggggcggccgcgtgggtgcaggtcgcgggcggcgccagctccacgttcgcgctctactcgcacgcgctcaaggtcgccctaggcgccgaccagagccgcctggcgctgctcggggtcgcctgcgacgtcggcgagaacctcggcctgctcccgggggtgctctgcaaccggctccaccccgcgctgctactcctcatcggcgccggcgcgtgccttctcgggtacggcaccgcgtggctcctcgtctccggcgtcgcgcccgcgctgccttactggctgatttggtttgcgttatgtcttgctacaaatggtggtgcatggttggcgactgccgttctagtgaccaacatgaggaacttcccgctcagcagaggtgccgttgctggcattctgaaagggtactcgggtttaagtgccgctgtttacactgaaatatacaccggagtgctccgtgattcacccatcaaccttttgctctctctcgctctgggaattcctgccgtgtgcctcctgggaatgtactttgttcagccctgcgaaccctctctggtggagacgaacgcagagcaagtccattttatgtttgcgcaagtggcaagcgttcttcttggggtttatctggttggggctacaatattggatcacgtcgtggctgtcaatgacattatgaactattctctgcttgtcgttatggttcttctcattttcgctccactggcaataccattgaagatgacgctattcccgaagaaaaaaaacccattggattcacactctccaacagttgataatgatcacacacagccgcttttgccttcttcctccgaatcaaacctcggtaatcttgaagaagatgattccacagacatcgatgtcctcttagccgagggtgaaggggccataaagccgaagagaagaagaccaagaaggggagaggatttcaggtttcgcgaagcgatactgaaggccgatttctggcttctgtttgcaatatgctttgttgggattggatctggaatcaccgttcttaataatctggcacagataggaatcgccgcaggtgctgtcgacacaaccatctcactctctgtcttcagtttctgcaacttctttggccggctgggaggtggtgctgtttccgagtatcttgtcaggtcaaggacactcccacgaagcgtcctggtcatatgcacccaggtagtgatgataatcacgtacctgctcttcgcgttgggccggctcgccacgctctacgtctccgtcgccttactcggcttatgctacggggtcctgctctccgtggtgatctcgacctcgtcggagctcttcgggctgaagcacttcggaaagatatacaacttcatcacgctggcgaacccggtcggcgcgtacctgttcaacaccctcgcggggtacgtctacgacctcgaggtggagaggcagcacgccgccgcggcggcggcagggtcggacgtcgtcgcgtgccacggccctagctgcttcaggctcacgttctgcgtcctcgccggcgcggcctgcctgggcacgctgctgagcacggtcctcaccgtgagggtccggcccgtgtaccagatgctctacgcaggggggtccttcagccagcccaggaactctgcgcattga

SEQ ID NO: 9003 - DNA, 1896 bp, Zea mays
  Peptide Sequence Number=SeqID_52378
atggacaggacaggagccagcgagcacggaatggtggtcgcagccgcagagtcgcatcgcacggtggagtggagcatttactatttagccgaggtgtgggtgggggcgttggcggcaaccggcaacaccgtcctcccctccccctcctcctcccgcgtgctctcctctcctatcctctctgcccccggcattgcctgcgcggcttcttcctccgccggcgtcggtccgcgagttgttggcatggccgccgcagggacgcagctaggccggcttctgggcggcctatggttcctggccgcgttgctaggacgaccgggcgccacggcggcggccgccgggcagccggcggcaccagcggtggccgccgtcgacgggcggcgcgccgtcgcggcgaccggggaggacttcgtgtgcgcgacgttggactggtggccgccggacaagtgcgactacggcacctgcgcctggggccgcgccggcctgctcaacctggatctctccaacaaggtcctgctcaatgccgtcagagccttctcgccgccgctgctgctccgcctgggagggtcgctgcaggacaaggtgatgtacgggtacggcgccgggcggccgtgcgcgccgttcgtcaggaacgcgtcggagatgcacggcttctcgcagggctgcctgcccctgcgcaggtgggacgacctcaacgccttcttccggagatccggtgccaaggtcgtgttcgggctcaacgcgctcaacggccgcgtcccgttgccggacgggtccatgggagggccgtgggactacaccaacgcggcgtcgctgatccggtacaccgcgaacaagggctaccgaatccatggatgggagcttgggaacgaactgagcggcactggagtgggagctcgggttggcgcggaccagtacgccgcagacgtgatcgccctgaaagcgctagtcgacgacgtgtaccggagcgagccatcgaagccgctggtggttgctcccggaggattcttcgaccaagcctggtttactgagcttgtcgtcaagaccgggccggatctactgagcgtggtcacgcaccacgtctacaatctaggaccaggcacgctcgcggctactttgcgtcgttcatgcgacctccagcggctgctcaagtccacggggacgtcggctgtggcgtgggtcggggaagccggaggcgcctacaacagcggccgccacctcgtcactgacgcgttcgtgttcagcttctggtacgctgacgagctgtccgatcagcttgggatggcagcgaggttcgacaccaagagctactgcaggcagagtttggtcggcggcaactacggcctgctaaacaccacgacgttccagcctaaccctgactattacagtgctctactgtggcatcgcctcatggggaccaaagttctagcagtaacattcagcggcacgaacaagatccgcgcgtacgcgcactgcgcgagagattcaccaggaatcactctgctgctgatcaacctgagcggcaacgccaccgcgcgggtctcggtgacggcccaaggggctgccgcggcgcacgcgcacaggcacaggcacgacgcgaggaagcacggcggcggcaggaagttccggcacgtgcacgtccccggcttcgccggcggcggcgaggcggcggcgggcgccgtgagacacgagtaccacctcacccccaaggacggcgacctgacgagccaggtcgtgatgctgaacggcagggcgttggccaccgacgcggcggggaacatccccgccctggaggcggtcgaggtggacgcggcgcggcccatcgccgtcacgccctactccatcgtgttcgctcgcgttccgcatttcagtgccccggcgtgtagggtagaccggtag

SEQ ID NO: 9004 - DNA, 1227 bp, Zea mays
  Peptide Sequence Number=SeqID_52379
atggatatcgagtcgaggcaagtttccaaaggggacgccatagctgctgctgtctctgttgactggaagggaaggccctgcgaccccctcaagcacggcggcatgaaagccgcggtcttcgtcctagggatccaggcgttcgaaatgatggcgggttgcggcggtggggaacaacctgatcacggtttcatcctactggcggttcaggcgcacctgccgcagcttcgaccgccgccatgcgacatgatggcgccggggcaggcgtgcgaggaggcgagaggcttgaaggccagcatcttcttcgcggcgctctaccttgtggcgctaggcagcggctgcctcaagcctaacatcatcgcgcacggggccgaccagttccggcggggcagcggcagcgacgccgcccgccggctgtcgagctacttcaatgcagcctacttgagcttctgcgtgggcgagctggtggcgctcaccgtgctcgtctgggtgcagacccgctccgggatggacgtcggatttggggtctcggccgccgccatggccgtcggcctgctcagcctcgtcgctggcgttgccttctaccgcaacaagccgccacagggcagcatcttcactcccatagctaaggtacgtgtagattgtattactggtgctctacgtaccactgtctcgtactttattggaagcccaggccagacagtgcaatccggtcgagccggaccaggtccagacgtctataaaaggaaatccgtagtgctagggatccgtttttacaccccatctcgattcattagcgacagttgccaggccggcggtggcggcggttcccaggccgacggtggcggcctcgatccagagggcgagcggcggcgacagcgcccttatgtggtggcggcggtttccaggccggcggtggcggcccccgatccagagggcgagcggcggcagcgtccttgtgcggtggcgacgattcccaggccgctggccgcaactccattacctcgacgcgcggtggcggaggttcctcgatccgcagcgaggcccttgtgcaggcaagcggcggcgtccccgaagtcccgaggaggcggcacttccaaggccggcgagcaagcgacgcccgtcgacgtgcgagtagcgacggcgacgcatgaggcgcgatgttcgagcgagcgacgtcacggaaggggcgagatgcgcgcagcaatgattgcgcgtgacatcctctaa

SEQ ID NO: 9005 - DNA, 654 bp, Zea mays
  Peptide Sequence Number=SeqID_52380
atggccgaggtcgagttcgagcccctgggtcgggcgaggcggagaccgtcggctgaggccagggctgagtccgagtcctggggtcaggcgaagcggagttcatcgtcttccggggctgagcccgagtccgagccctggggtcgggcgaagcggagttcgtcgtcttccggggctgagcccgagttcgagccctggggcacgcggcgatggaaatgcatcgctggaggatgcccgaggggctgcggtggtagagctccttcccgtctcccagcaagacgaacgacttggcgcgccacgccaaccgccgagctttggctcggtcgaggggtagctctcctcggtggagatattgcaggccgaggctttctcgggctcgggcgtgtcgttggtcttgacggagggtcgatgcaggtctcgggagaagacgtccgggggaaccgttgttcgccccgaggctattttagccagctcgtccacagtctcgttgtagtgtcgggcgatgtggttgagctcgagcccgtagaacttgtcttccaagcgccgaacctcatcgcagtaggcttccatcttcgggtcgcggcagtgggagttcttcatgacttggtcgatgacgagctgcgagtcaccgcgagcgtcgaggcatcggacccctag

SEQ ID NO: 9006 - DNA, 498 bp, Zea mays
  Peptide Sequence Number=SeqID_52381
atgaccgagtactgtatacggttccgtgcacctagactgttgattctaagtcatttttcctccattatttctccaattgacttcaactatttggagggcttgaaagggaaatgtgcccttgggccatttctaagtattttggtgattgagtgccaacacaagtggtcatgtgttaatctatgccaaatgatggacaaagtgcaaatcgaaagtaaagtgtccggtgcgccaacggctctgaatctccaacagtcggctacgccaaaacaggaaagaaatccgcaccggacagtgtccggtggtgcaccggactgtccggtgcgccaggcgacagaaggcaagaattgccttcctggaatgctctcaacggctcctagctgccttggagctataaaagggacccctaggcgcatggaggagtacaccaagcattctctaagcattcctaagcaccaagactccaattcctcgcattcgtttctttgtgatagcaattag

SEQ ID NO: 9007 - DNA, 414 bp, Zea mays
  Peptide Sequence Number=SeqID_52382
atggatcttgatccggacgccgaggcggcggagcatgagcttgaggatcacaacgagcgtctggatgaattggccttgtttgaaactggcactggctgtaatgcaactgtggccatagatgttgatgtggcgctgccgagcctggccgaaacggtgactggctcctcgagccccactgccactagtagcactgcccgtgacaaccggtggaggaagaggctagcgacatctagggtttgggctgacttcgaggaagtaactgggatcgatgagaaaggtaagaaggtaaggatatctgctatttgcaaacactgcaaaagtaccttgtctgctagatcttcatctggtactggaacttacttaggcaccaagaacattgtaaagctaaaattgaacatgaccaagcaagcatag

SEQ ID NO: 9008 - DNA, 558 bp, Zea mays
  Peptide Sequence Number=SeqID_52383
atgaagaggattctggcccttgctccttgtagcttcagtgaccgtcaaagtacatcttctagacctccattgattcgagggatacctaatcttggagggcccgaggacttcgctgatgaagtagacggggtgttgagctggatatgcatgtccttcttctacccgctcgactaccaacatggtgcttaccataatggcttcaatcttctctggattagcctcgatccctcgatttcttacaatgaatccgagaagtttcctgactggtaccccgaaaacacatttctttgggttaagcttctagcggtagcgcctcaagctattgaaaacctgctagagatccttgatgacatcatccgggttcatggttttgattactacatcatcaataatctggacgagtgcgctttcctatttggcagtgaggttggagctgatgattatagtcttgcgctcgtcggagaaaccaaggtgccatcaagggtctggttgagagagacatttggatggccccccgaaagcactccgcagctccctggaagtcagcttgaatggtga

SEQ ID NO: 9009 - DNA, 687 bp, Zea mays
  Peptide Sequence Number=SeqID_52384
atgacacctggtatcagctccaggttatcctcaccaccaccagccgcccatccctcaccaccaccatctgtcgcgccatcagccgtcgcaacgccctcccacccgccctctccatctccagctgcattcactcagctcgaagagagttttggccgtttcgcacagaagtgggatcagttcgttgtgatgttccaccgctacaaggagaagacagagaaggaactccaagcagcggtgcggcttcaggcggcagcgcgagggttccttgcacgccgccaggtacagtcccttcgtggggagaagcaccttgctgtggcctccagggccaccccatggccatcatcacatgagcaagccgtggtgcgcctgcaagccgcagtgcgtggcttccttgttaggcgggcggtgcggaagctgcacttgctgatcagctcatcgctgcaccaactcgcagcctgcgtgcccaaccaccaggtctcgtctatactttttgaaccccctgcagaagttgagatctgggtaagtctatggcagctcgaggacgagctggtcctcaagggagggatagatgtcatgggcatcatagggagcggtcaccaccatgcagtccgcacccgcaggaaaggaaagcaacaatcggtgccaaggctaggaggaaagagaggattagttgctatccaaggctag

SEQ ID NO: 9010 - DNA, 546 bp, Zea mays
  Peptide Sequence Number=SeqID_52385
atggagctagggctccgcttgaaagcggatgtaatacttctgctttttgtaaggccagcatacctaagaaagagtttggcggtggcccccaggaggcccatggtacggaaccaggctgagcggctacatgggctccggactaccccaggagacaaatgctttcgggtacggaaccaggctaagcggccacacaggctccggaccaccccatggaacggggtcccgttctctagagccgtctcccagcttgtgaggccctcctgctttcgcagagaggtcctaaactaccaacaggccgggcttatgagggtggacctcaccgggttggcgtacacagatgctccagaggtgaggaagaggtactctttcagtcatagcaagatagtcacccccgggttggcgtattcccgccaccttgaagggtccttcccagctgggggagagttgcagagcccttctagccatttccgcatggatttgtcagaggcctcgacccgtggggagtccaaaagggtttctgggggaaggcaggcttcggccccgtag

SEQ ID NO: 9011 - DNA, 1179 bp, Zea mays
  Peptide Sequence Number=SeqID_52386
atggactactctgcaccagcagggtcgcgttcgaagctagctccgggcagcctcaccagcagtggcgaccacctctactccgagtggccgcctctgcaccaacggcttgccagcaacggcggccatcttcgccctggtggcttgccggcaacggcggccatcacagtgcgcacgaagaggtcctcgctcctgtcctcctacgggggtgaggacaagaccatccaagaacgcggccgccacctccatagcgtacaacgtcttgtacgaccccccggacggcgtcggaacagtgcggctgacagcgcgggggacgccacgtatgtggcggacctgcgcacggcgcgaccgtcgcccatgcggtggacggacagccacgccccgatcagcgacgggaggcagcgtcagaggtgccaccaaagccatcaaagccaaagagatggagccgcagcacggctcgcttcccaccccaagatactggggggcgcatgggatggagtcgtggctcagcctgctgcccacctccacgaggctggtaatcatccttcccctcgaatgctggaggaagaagcgggaaagaacattgcctccacggacatcccgcggaaaaaggtcgccgaaaggagagaccccaacacaagtcctcccagcaaataccagcgcattccatccaagcaggcggtataccatttcgagcactcactcagtctgggcacgctcgggatgaagtcacaaggccatggtaaactatggcgacacaaagcagaaaccttgaaggcaaaggggcacaaagagctcgaagatgaaagggcaccacgagtgggagagaagcaagacatggctgctactcgaagggtggacccctttttaaaggcagatttcctcgctcgtgccccgaagcgtcacgggcaaggtctcccccaatgcgcaccaggattcccatcctatgacatgggggctaggcctcacatgtcatacaagctggcccgaagcgcgaagaaggtgaaccgccacacaaggagcgtgcaaccgccctgtggttatacgcccttccatctttggcgcaaccagcggtcaaggaggcaactgccgcacaaggagcgtgcaaccgccccgcagttaaaagtcgcactgccgctcgggccaataccatgcctcctcaaggccatcgcagaagactga

SEQ ID NO: 9012 - DNA, 285 bp, Zea mays
  Peptide Sequence Number=SeqID_52387
atggcgtccgccatactctgcgagcgtggggtggaaaacgagtgcagcgaggttacgagtcacttgaagaccaagttggtaaagtacctgggaatctcgagtatcgtattgttaattggaacatggggaaccacccgggaaaacagtgctaccacaagggtggaatgggacgcccttggccaagtaattatgaaagctagggagagattaccttacccggaaggagcaagcgaggaggcgtcactgctagagtatagggaggtccttaggttgaactgtatgtaa

SEQ ID NO: 9013 - DNA, 294 bp, Zea mays
  Peptide Sequence Number=SeqID_52388
atgtctccaacaaatgctccagtatcctctccacttgttccaacccttgataataagcaacatgatcaggaagtacatgttcctactgatgatatcaaagtatcagaacaggctcccacaaccgacaagcttgctgctcctgaattaacaccaaacataaatactgtcagaaggacaaaaactgttaaacatgatactcctgtatctggtgcaccccagtttgacaaaaccccattgacagaagcaactactgaacttgtttcaaaggatagttcctgtcacacccggttttag

SEQ ID NO: 9014 - DNA, 282 bp, Zea mays
  Peptide Sequence Number=SeqID_52389
atgccctttacatttgctaataactctatagtgatccatcagggtctaaatagccttttcctctttaagttggttttcttttctgctatcgcgctgaagctctcctgcgaacagcttcggctctgcgccatccttcgtattctttatgcttcttcacactgtggttttgacctaagtccgaaggccctgagccgaaggtccgaaaaacaccttcctcttgctagaatagcaacagtcaatggcaagcgggaccctcccacttgcaatgccctgggcgtataa

SEQ ID NO: 9015 - DNA, 243 bp, Zea mays
  Peptide Sequence Number=SeqID_52390
atggcgcttcacgtctggcgcctccttggagaggctctccaggtcggcgatgagggcctcggattcggcgagggcctcggcgtactccacgcactccacgtcacattcgtacgcgtgtcgccctcagagaagactgtgcgcccctccgtgaagctccccgagcgaggaatcggagtttgcttcgccggagaggccagcccacgctcgccggagctctcaaccccgccagagtacgtggaccgg

SEQ ID NO: 9016 - DNA, 810 bp, Zea mays
  Peptide Sequence Number=SeqID_52391
atggtggggagaagcaagccgggctgtgatcttggtcccgccctcagcttcaaggatcttcatcatcctggctggggtgggggccgggctgagccggagctctacctcccgcgtgggttcgtgggtcaccttctccctcagcattcaagggagagggcgctcaccggcctagcgggagggttggacttcgacaacgcggggctggtcggcggtgagcgtcgtcagcttcagcgcgttgggctcgctggctcagctggctttggcttggctcccagtgccccctcccgccgcaagagcggttgtcgcgccgcgcgcaccggaggaccgcccaagacgtcgcgcgctgctagggcggcgttcgtgttctggggctgtcctgcctttgccccggtacggcgcctctgcgcggaggtcggtgctccgctcgttcgggaggatccgagtggggatctgccggtgggcagatggcttccgtcgtcggtgctgaggtggtggcggctgaagaagtcctcgtcgccgacgggatcaccgccaccatccgtgctccgggcctccggctctttggctttgatagcttgtcctcgcccctcgagcggagacgtgggcgagggcattgttgcagcggcgtctgccctgaggccatcgctgctgcagttcggccacccggagcggaggtcattgtcgctgctgctggaagcggggcgggcgggtgaagcgaccctgggagcccttattcgcccccgcggggcccctcccaatgtggggggttttttcgtacccgcggaggtggaaccggagttccgtttgtaa

SEQ ID NO: 9017 - DNA, 1566 bp, Zea mays
  Peptide Sequence Number=SeqID_52392
atgaacagaaacactggcattcaaagtgccattacaaacggaactccggttccacctccgcatgtacgaacaaccccactcgatgcgagggggcctgcggagcaacggaaggccgacgaacggcgcgccgtcgcccgctcaggcagcagcgacgacgacgacttctgctccggggggccgaacagcggcagcactgacctcagggcggatgctgctgccaagaggcccccgcccatgcccaaactcgtgaggcaaggacgggcagaaggccgtagagttggaggtcggtccgtgggcggccctggctatctcatcggtggaagatcctcttccagctgccgcgacagacgccggcgccgcgagcggctccgaagccactcgcgcccgagagccaggcacgctgcagctgccggcgccacagacgacgaccgcccttccctccgatcactgagggaaggagcgggccaccgcccacgcaggggccgaccccaactcggcacactcccctccccagccctggtgatgaaaatccttgaggctgagggaggggcagaggccgcagcccggctcgctttcccccaccatcaaactggaggtcaccatcttgggcccacgcgtcatgcaaccggcgcgccggatgcttcgtgcatgcaactgcaccgccacttgcgccaccaccgcgtctcctcgactgcggaaccaataccgcgactcgaggcgacccagcgcacgacccagcagcgccagcctagcgcggcggtcagcgcggccaaaaatgggctggcagcaatgacggtggcaggcgggcaggagcagcagtcacgtcgtcagctaagctcacgtcccatccgggggcagcgagagaaccctctctcacggcgtgaagacaacgcgcccgtgttccgtcctcgaacggctcgcgcatgcgcaacggccgccccgccaaccactcgccccgtcgcattaactccgcgatgggacaggcggcgcctctggcaggagaagcaggcgacgcttcgccttcgccataataaccgcctcaaaaaagccgcctcagatcgcgtgggccctacccccactactggtcagaggttcgaaggccggcccctcggaagggttccacggccgcctcaggctattcgggctccgcgcccattactgatcaggggttcgaaggttggcccccgaagggttcacagccgcctcagacgccgagcgagggatgaccatgggtacgttcgatacataaccaaggctcgggctgcgctcccgagctcactggagacaccatgttcggcgcccatcgagggcaacatggcgctttcccccctcctccttgcggaaaggcgacgcaggggcgtatgtaaaaaagtcgagtctgtccctgatcgccctctcgccctgtgcagaggctcgggggctgctctcgcaaacctggctccggccaaaccgttgacagcgtcaacataccagcccgagaacttgggacccgaccgtacacccgggctacggccagctcgcatgagggaacaaccagaccagccgaagcattacgcaaggcattaa

SEQ ID NO: 9018 - DNA, 345 bp, Zea mays
  Peptide Sequence Number=SeqID_52393
atggccccccctgtgacatggtcggtccgagccctgggtcgggcgaggcggaggctcctccgaggtcgaggtcgagtctgtcttcctgaggtcgaggtcgagtccgagccccgggtcgggcgaggcggagaccgtcggctgaggccagggctgagtccgagccctggggtcgggcgaggcggagttcgtcgtcttctgggcgaggcggagttcgtcgtcttccgggaccgaggccgagtccgagccctggggtcaggcgaggcggagttcatcgtcttccggagccgaggccgagtccgagccctgggtcgggcggagcggagttcatcgtcttccgggacttag

SEQ ID NO: 9019 - DNA, 411 bp, Zea mays
  Peptide Sequence Number=SeqID_52394
atggtcccaacagcgtcaaaattttcctcggaaaagatcttttctgccagaacgtctttcgtgctttttgactacttcgaaagtgggatcctgaaaacgatggagtacacgcttggacctcgacggagggggagcagcagcaccctcggcgtcaactacaccttcggcgaagaatccagctcgagcagacagctcggccggccaccccgaagcctcagccagctgtcccccgaggacatcagcccggctcgtggcctcggcaactcgactccggcatcggtcccgccagtggacgacccggccaggctccggctgacgaagtcttcttttcgagccaactccgcctctgtccgtgctgacaccgctgcctccggcttcggctcatcgaagagcggccgagggatcatttaa

SEQ ID NO: 9020 - DNA, 942 bp, Zea mays
  Peptide Sequence Number=SeqID_52395
atgaaactggcgcgccggttgctacgtgcaagaaactgcgccgccactcgcgccactaccgagcctcctcgactgcggaaccagtaccgcgactcgaggcaaccctgcgcgggcggaagcagcagtcaagtcgtcagccaagctcacgtcccctccagggacagcgagagaaccctctcccacggcgtgaagacggcgcgcccatgttctgttcctcgaacggctcgcgcacgcgcaacggccgccccggaccgggaaaggggatacctcgaaagggatccttctccgcgaaggaaacgggccccgagccccctactgatcagaggttcgaaggctggcccctcggaggggttcaacagccgcctcagagcgctcgggctccgcgcccactactggtcagaggttcgaaggccggcccctcggaagggttcaacggccgcctcaggccactcgggctccacgcccactactgatcaggggttcgtaggctggccctctaaagggttcgacagccgcctcagacgcagagcgagggatgaccctgggtacgttcgatacataaccaaggctcgggctatgctcccgagtcacttcgccgctccactgaccggcctgacaagaggacagcgccacctgcgccgctccgactgctgtgccactcgacagaccccggaagacgacgaactccgcctcgcccgaccccagggctcagactcggcctcggccccggaagacgacgaactccgcctcgcccgaccccagggctcggactcagccttggcatcagccgacggtctccgcctcgcccgacccaggggctcggactcgacctcgacctcggaagacagactcgacctcgacctcggaggagcctccgcttcgcccaacccagggctcggaccgaccacgccacaggaggggccatcattaccctacccctag

SEQ ID NO: 9021 - DNA, 234 bp, Zea mays
  Peptide Sequence Number=SeqID_52396
atggagcctggcggagggacagctgtcggagcggttgagtccttgctgacgtcctcttgcttccataagggggctgagagccgccgccgtcacaggctttatgctgatgggggttaccagctgagaattaggagccttgagggtacccctaattatggtccccgacaacctcaaaaccagatactggtggagagggatgaagaaagagatagtacaatatgtggcccggtgtga

SEQ ID NO: 9022 - DNA, 1731 bp, Zea mays
  Peptide Sequence Number=SeqID_52397
atggctgaaaggtaccaacctccacgaggttgcgctccttccaacaacggcaagagcaaaacaacgtgggcgctccccatccgggggctcggaaggcgaaaggacgcgacgcatgaggaaacatggaggcccaggcccacatatcatgtaaccggcgcgccggttactacgtgcaaaaaactgcagcgccgcttgcgccagcgccgcgccttctcgactacggaaccggtgccgcaactcgaggcaaccctgcacgcggcccagcagtgccaaccaggcacgccggtcacgggtcagtcatccgcgggagaaggcgtgacggtcaacatggccaaaagtgggccagcagtaatggcggtggcaggcgggcggaagcagcagtcaaatcgtctgcaggctcacgtcccctcctggaacagcaagagagccctctcccatgggaccgggaaaggggatactccgaaagagatccttctccgcgaaggaagcgggccccgagcccccctactgatcagaggttcgaaggctggcccctcgaaagggttcgacagccgcctcagagcactcgggctccgcgcccactactggtcagaggttcgaaggctggccactcggaagggttcgacagccgcctcaggccactcgggctccgcgcccactactgatcaagggttcgtaggctggccccccgacgggttcgatagtcgccccagagcacgcagagtgagggatgaccctgggtacgttcgatacataaccaaggctcgggctacgctcccgagaggctcgggggctgctctcgcaaacccggctccggccaaaccgttgacagcgtcaacataccagcccgagaactcggaacctgactatgcacccggccaccctggcaacgaccagaacggtagaccaaggcagattcgcgcctcgcccgaggacgcgtgctctccagtcgacaaggccgaagtgaccgcagtcacttcgcccctcgacctcggtagacggtctctgcctcgcccgaccccagggcccggactccacctcgacctcggacgacggtctccgcctcgcccgaccccagggctcggactcaacctcgacctcggacgatggtctccgcctcgcccgaccctagggctcggactcaacctcgacctcggacgacggtctccgcctcgctcgacccctgggctcggactcaatctcgacctcggaggagtcaccacctcgctcgggctgaccatgccacaagggggcatcattaccctacccctagctacccagggcccggactccacctcgacctcggtagacggtctccgcctcgcccgaccccagggcccggactccacctcgacctcgaacgacagtctccgcctcgcccgaccccagggctcggactcaacctcgacctcagacgacagtctccgcctcgcccgaccccagggctcggactcaacctcgacctcggacgacgggctcaagcgctcctccgacggccacgacgccacaggaacagggctccaacacctctccgacagccacgtcagcaagtacatagggctctggctcctctctgctagacacgacaacacgaggccgcgggttccccttactgtttccccccttgtgtctccgtctcgcgccgacccatctgagctggatcacctattcaccccccctctaggtgctctcaattggtatcggagccgttctcttcacataagggactaa

SEQ ID NO: 9023 - DNA, 1230 bp, Zea mays
  Peptide Sequence Number=SeqID_52398
atggctgaaagcaagaccaaagcgacgcaagcgctccccatccgggggctcggaaggtggaaggacgcgacgcatgaggaaagtgcgaagacatggttgccatccaagggggtcaccctccatttaaaggcgactctccccacttgcgtcctcagccgtcgcggactgggtcttctccaacacgctccaaggtcctccccctacgacacgggggctgggtcccacgcggccacgcgtcatgcaagctgccccaggacagaaggagccagaccgccgcgcgcggagcgcacaatagcccagcggttacaagcattcctccactatcgcccggaccaacaggtgaaaaagcggaccaccatgcaggcggcatgcaaccgcaccaagagggcgcacccttccgacttcgccgcgtccagcatggaggcccaggcccacacgtcatgtaaccggcgcgccggttactacgtgcgagaaactgcaccgccactcgcgccagtcccgcgcctcctcgactgtggaaccggtgacacaactcgaggcaaccctgcgcatggcccagcagtgccaaccaggcacgccggtcatgggtcagtcagccgcgggagaaggcgcgacggtcgatacggccaaaaatgggccggcagtaatggcgatggcaggctggcggaagcagcaatcaaatcatctgcaagctcacggaccaggaaaggggatactccgaaagggatccttcttcacgaaggaaacgggccccgagcccccctactaatcagaggttcgaaggctggcccctcggaagagttcgacagccgcctcagagcacttgggctccgcgcccactactggctggcccccgaagggttcgacaaccgccttagagcacgtagagcgagggatgaccctgggtaccttcgatacataaccaaggctcgggctatgctcccgagcctcgggcgacataggaagctccgcctcgcccgaccccagggctcggcccccgtctccgcctcggaagatggacttcgcctcgcccgaccccagagctcggactcggcctcggcctcggctccggaagacgacgaactccgcctcgcccgaccccagggctcggactcggctccggaagacgatggactccacctcgcccgaccccagggctcggactcaacctcgacctcggaggaatcgccacctcgctcgaactcgggttcggaccagccatgtcgctag

SEQ ID NO: 9024 - DNA, 783 bp, Zea mays
  Peptide Sequence Number=SeqID_52399
atggatctggatcaactctccgtcaatccggaaaacagcgccacctgcgctgctctgactgttgtgccacccgccagggtgagactgacagcagccaagtcccgcctcgggcgccataggaatctccgcctcgcccgaccccagggctcggactccacctcgactccggaagatggtctccgcctcgcccgaccccagggcccggactccacctcgacctcggaagacggtctccgcctcgcccgaccccagggcccggactccacctcgacctcggacgacggtctccgcctcgcccgaccccagggctcggactcaacctcgacctcggacgacggtctccgcctcgcccgacccccgggctcggactcaacctcgacctcggaggagtcaccacctcgctcgggccgaccacacaacaaggggggcatcattaccctacccctagctagcccgggctacggggaacaagaccggcgtcccatctggctcgccccggtaaaacaagtaatgatggcaccccgcgtgctccatgacgacggcggttttcagccccctacggaagcaaggatacgtcagcaaggatccaacagccccgacagctgtgcttctacagggctcaagcgctcctccgacggccacgacgccacacgaacagggctccaacacctctccgacagccaagtcggcatgtacatagggctctggctcctctctgctagacacgttagcacactgctacaccccccgttgtacacatggaccctctccttacatctataa

SEQ ID NO: 9025 - DNA, 792 bp, Zea mays
  Peptide Sequence Number=SeqID_52400
atgggcaccgtaggctactggaattcagttgctgttcacagcatccgcccgccgccgccatttgcagcagcagtgccaacgccgttctctgcagtaactgtgccacggctgctccttgcagcagcgcctccgtgcggtctgccgccatgtgctgccatctccacgccctcctccggcaacgatgcaccagcgtccacaggcccgaagctattggaaagccccggcacatgcccggtgcggatccagccgcggcttggagccgccgtcgcgcccgcagtatcgctcatcggagccctccgtggggaaaccatctcagtggttaccgccgcggcaggaggaggcgtcgtctctggcggtggaatgttccacccgtgcaccgggcaaaaccccggcggaaactcagtgccagcagggtatgccatcggtggtgggatgacctgcagcggcaccggctggaggaagtccgtcggtacgggtacgaaaaaccgtctccgtggccctcggcacgcgcacacgacgatgatgaagccctgcaacgccgctgcggaggaggctgcgccgtatggcggcccggagacgagcgcgagccaggatgccgaagcggttcccacgacggaactcgcgaaccacaacagctgtcaccatggaaaccacaaggttgatgttcggcatctcacctttctggttcttcacgaactcctcttatgcgttggttgcttctcttggttggagcgaagtgctgataacgtgtttgaagaaatgacgaaatggagagaactgatctttcattaa

SEQ ID NO: 9026 - DNA, 171 bp, Zea mays
  Peptide Sequence Number=SeqID_52401
atggagagtcatgatctccgggcagaatgggaatcacagcttgtggatgacaatgaggatggttatgattatgcttatggtaatggttgtcagcattgcaaccactgctcaggcgaagatgaagctgtggaaggagacttccaggagttccaagactacgacgagttctag

SEQ ID NO: 9027 - DNA, 621 bp, Zea mays
  Peptide Sequence Number=SeqID_52402
atggagagtcatgatctccgggcagaaagggaatcacggcttgtgggtggttatgagatcgatggttttggttatgactatggtgttggtaagtggtattctttccgtttggaaaggatggctcgacttagacacactgcacgaaagtctgtcatccccttcttaccctcccgccttgctgagcgtccgcttcgccgtcccgtggccggacagtccagccacttggagagactacaccaccgcctgcatgaggagcaggaacgtcgacgacaggagcagcagggctcttccttctcgctccagcaggagatagagtccgtgaggagctactcccccgtgcttcctctggaggcgccctctgcaccaccactgggcgccccagcttctggagtagctgctggaggagacccagacgacagaggtggcgacgacagctcgagccacgacaccgacctttctgctaaccttgagccggaaggatgggttgctcgacccatcactcgcgacgctgctcgcgggtgtcacttccacgatgcgctcgacaccctgctacgtcgggcacttaaccgggcattgaaagggaaatgtgcctttggggccatttctaagtatttttggtga

SEQ ID NO: 9028 - DNA, 171 bp, Zea mays
  Peptide Sequence Number=SeqID_52403
atgccgttaatggggctcggtgtatgcggctcgctctgccaaggtggtgatgaggatgatggttttggttatgcctatggtaatggttgtacgtgttgcaaccactgctcaggtgaagatgaagtcgtggaggaggacttccaggagttccaagagtacgatgagttctag

SEQ ID NO: 9029 - DNA, 546 bp, Zea mays
  Peptide Sequence Number=SeqID_52404
atgtcggtgttgattcaaacctgcaaatgtgattatccatcgttggttggtcgtcgctttccctgcctcccaaagcctaggggtacgggtaccttgcccagcttgcgaaagaatcctcatggactgcaccgcattatatcgacgtgtgcttggtgtgtcctgtggcctgaggggaagagcacggggactccgattggacgacatcttctctgcctcgccatcagcaatgtcttcccctctgatgctgttgatgaaggcagatctggagaagacgtgaggccaagtgagggaactggtggaggagcgacgcttcatgaccaagcgactagagcggttcctggggaggctggccgagaagaaggcggcgtggaagtcccggaggtgtgggaggcggcgaagcaggatgcgcaaagctatgagatggagcgcaagacgggggagctgatggaggacgtctggtctgaaatcacgtgggaggcggaggaggatcaggccgaggtagagctgctcttcggggagatggacgaggagctccacatgctgtag

SEQ ID NO: 9030 - DNA, 1119 bp, Zea mays
  Peptide Sequence Number=SeqID_52405
atgacggcgtccaggggagtaacggcgcgagggcacgaagagaaaaggaaatgtgctaatgaccatttagagggaccgatgctaaatgttcaaagcggggaatggagtgcttacggggctggtgttccactggtgttaaatgacagtgactctgttattcagtattatgtgccatatctttctgctatccaactatttgcggacccatctagaccagcttcaagaaacaggcgtcctggggatgaaagtgatggggaatctatggatactagcagtgagagcagcattgagaatgatgttgagcggctaagagtctcatcattactagaaggtacacatcgattggaaaatggtggcgtacgaagtgatgatggtaaaggtgatgcatcttcaagctttccaatatttgagtatatggagagggatcctccatatggtagagagcctctgacagacaaggcatcaactcttgcacatagatttccagctctgaagacgttcaaaagctgtgatctgctgccatcgagctggatgtctgttgcatggtaccccatatatagaattccaacagggccaacactgaaggatctcgatgcctgttttttgacattccattgcctagcaacgccttgcaaggattgtgaccctcctacgccagcatgccctggctttggggggatcaaccgctgcacagctgcatctgggaagctatctttgcctacctttgggctggcaccgtacaaattccgtgcctccatttggatacctgacggaacccaagaacaggaccgcgtcacctcactgatgcaggaggctgacagctggctccgcagaatacgagtagaccatccggacttccggttcttcgtctcccgttccagcagtcccgggcaagaggagcagctgcgggacggacggggcgcccactgctcctccactctcgctaaaacaattcaattcgcaccagctgctgggatcggagacatcgttcagcgtcagcgcagcgtgccgccctcacctgctcgatatttaaaatttctccagaagaagcggcatgccaatgccaatgccatgccaagcaccagcgacgaaagcagccttttcacgtctcgccgctag

SEQ ID NO: 9031 - DNA, 801 bp, Zea mays
  Peptide Sequence Number=SeqID_52406
atgccggttgcgaaaccggctgcgcccggatccggcaagtcgtcggcgagcgcgaagacagccgccgctggcaggaccaagcctcccccggtcgaggctgcgaaaggacgggagctgccctcgccgggaaaatgtgttgccgacttcggcacaaacatcagcgtggaggactattttgttgggccgagcgagggacaaatggttgttgtcccgcctttggtcgtgatcacttcgccatcggcggtggtaagcgcaaagggaaccgcacaggacccatgggcccccttctgcgcaagcgacgagattctgacagccgctgcagctaaggacgtggcgggcaccatgtcccagcggctgagggagacatcgcagcggctgtcgcagcagctgagtcaagagttgggtctcatgtgtttttgtctggcggccgacttcgccgaccgtgttgcgtctggtgtcctgactgcggacgtggctgccgaagtcgagagacttcgggcgcagcacgcggatgccgtccaggagaagtcggctgcggagagcaaaaaccgcaggttggcggagaaagtggccgccttggaggccgagaagacagacctccggcgccagctggtggaggaaaggaaggaggcgaaccaggccatcgctgaggcgcaggcggaagccaaagtggcgcgggcgaagggaagtctcgccagccagcgcgccgaggagtgggaggcgaggttcaacgctctgcgcggccgcgtggacaaagctgaggcctctacgcgctcggaggttgagcggacgctcgcatag

SEQ ID NO: 9032 - DNA, 653 bp, Zea mays
  Peptide Sequence Number=SeqID_52407
atggagcgtgacgaggacgtcgaggaccttggaggtctggtcggcgcgccgcccgaggctgcggaggtcaatctggtgctgccctcggatgcctgtgaaggcccctcgcccgtgcccgtgcctgctatggccggcgaagaccctgtgtcggcccctgcgccgacggtcgaaggtgccccagaggtgggttttgggcctgcgcacgcaaccgctactgacaatgctaattttgtggcggcttcgaccgtggttgctgaaaatgattctgatgtttctatggctaagttttttgagtctgatgattctgggagttcggttgtgtggtcggaagagtcttcagatgaggacttggattattttgcggccttggatgtggctgcggcggagacttctccgcgtgtgatgggtgctgaagttcttcctggtccgagtgctgggcgtaggcggcgaagggtggtggcgaaacggagggtgagtgaggtggagggtggtcgtcttcgtgtggacggggctagcaaacgggaattgttgtcctcgccggctggggcgagtgtaggtgagggggagttgcgaaatctttttgagggtgaggagctgaggataatgttgttcaattacagggagacgggtatcatcccgaaggttgagccaat

SEQ ID NO: 9033 - DNA, 192 bp, Zea mays
  Peptide Sequence Number=SeqID_52408
atggctaagctttggtactacatcgagttctttgtggattcattactcttggagcttctagctcttagacgactaggtgtctcttatgttgatcctagggcaatagatcttgccatgagaatcgccgaaaggatgttcctaaaaatgaaggaagatgaggcgaagatcaaaattgaagaagaaaatgattga

SEQ ID NO: 9034 - DNA, 2046 bp, Zea mays
  Peptide Sequence Number=SeqID_52409
atggcaggcggcggtctccagggagcgaagaagcgcaagcgcgagcacgcggaagggaaggcaaagcctcggaagcaagtcaagggaggcggggacggagcgaagcggaagagccactcggccgccggcggctacacggcccatggcggcgccggcgaagttgtcgcgaggaagaagaccccggttacccccaaggagaagcgcctcgcggccaaggaaatgtcggaggccaggaagatgaagaggaggcagcattacagccttgagaaggttgctaaattcaatgcttgtttgctctgtttgaccctgaatactggccaggaactaacgaaattgtgggaaaagatgagatgtcacgatgtgagcaaagaggagaggtccaaggcagtaagtcaggctatccataaaatggatgggaaatatttggacattgccacatcacatgttactgcacgtgttcttcaaacatgtgtaaagtggtgctcggagtcagagagggatgctatctttgatgttctacagccacatttgcttaccctttcttgcaagaaatatgccgtttttcttgtaaagaagcttatagaactcgcctctaaaaaacagtttgccagtttcatatcttcccttcatggtcgtgttgccaaccttcttcatcatactattggagctgcagtcgttgattatgcatttcagcgaggaacacaacgtcagaaaaggcaattgttagttgaactgtactcccctgaacttcagctattcaaggatctgactgtgcaaagttcctcctgtttgatagatacaatttccaagcttgggttgcagatatcatctgtcctgcttcatatgactattgtgattgataaaatcttggagaaaggtactgttgagtacttaatagtgcacacggccatattggagtactttacaattgcagataagacctcagcctcggatgctatttgtcaacttatcccccttcttactcaaggggcattaatcatagatggagatgaacctacaaacgctccagaactaccaaagaaagcaaaagctaagaagaaaaggtcgaaagagccacttattgttcggatcatgcagacaagggaaggattaaaactaggaattagttgcgtcaagtatggcagtgcaaaggacaggaagaagattattaaaagtttgaagggccacattatgaagcttgctctaagtgattttggatgtctttttcttatctgcattatttctattgttgatgacacaaagcttgttaataagattgtcattcaagagctggtaaaacatttaaagcagctcatttttgacaagaatgggagacggccattgctgcaactacttcaccctttttgctcacgctatctttctccgaatgatctagcttgtctgaactacaatgtgccttctcttagttcaacagaggttgagacatcagagagtgctataggagttataacagaaaataaattagatgatgtgactgctcaagatcccaatggcttagaaggcaagcaaattgtgtttgagagcaagaaggatccattacaaaggcgacatgaactgttgataaaaagtgagcttgccgaggctctcgttcagtcatgcattgaaaatgttggagaattacttcgaacaaattttggcaaagaagtattgtatgagatggctgttggtggtaaagacaacgttctggatggcctcaccgataggatccacatgttgcacgatgcaatagcgtctgatgcggcccaaccgaagactgaagatacggaacatgcatttgaaaacttcttttccagccgtgtaatcagaagaatggtaatcgattgcccagcgtttgcagtcactctctggagaaaggctcttcaggggaagtgcaagatatgggctgaaggacacagttcgaaggtggttgcgagtttcctggagtcgccaagtacggaggtcaaggatcttgcaaaacctgagttgcagccgctggttgatgctggcatccttaaagtgccagaccctaaggttgttcaaaaatga

SEQ ID NO: 9035 - DNA, 783 bp, Zea mays
  Peptide Sequence Number=SeqID_52410
atggagcctgatggagggacagctgttggagcggtcgagtccctgctgacgttgtcctgctgccggcgacgtggggtttcctccgaagccgaggttgagtcttgccttcagttgccgtggccgagcccgagccagggggtcgggcgaggcggaagtcgtccggccgaggccagggcggagtccgagccctggggtcgggcgaggcggagtttcgttgtcttccgggtcttagcccgagtccgagccctggggtcgggcggagcggagttcgccgtcttccgggtcttagcccgagtccgagccctggggtcgggcggagcggagttcgccgtcttccgggtcttagcccgagtccgagccctggggtcgggcggagcggagttcgccgtcttccgggtcttagcccgagtccgagccctggggtcgggcggagcggagttcgccgtcttccgggtcttagcccgagtccgagccctggggtcgggcgtcggagtggcgcaggcggcgctgtctttctgtcagactggccagtggagcggtggagtgacggcggtcacctcggctctgccgggggcgcgtgtcaggatagaggtgtcaggccacctttgcgttaaatgcccctgcaatttggtcagtcggtgtggtgatttagtcaaggttgcttctgagcgaagccaaggccttgggcaagccggtgatgtgtccgccataaaaaggggggcctcgggcgagacggaagtctctcgaggtcggctgccttcggccgaggctgggctcgggtga

SEQ ID NO: 9036 - DNA, 2115 bp, Zea mays
  Peptide Sequence Number=SeqID_52411
atgtgctcgcattattactcagcatacccgcagtttgaagtggtggaggaggatgcaagcgaaggggcccttcggtgcgcggccggcctgagcagcgggcgcgatttggttgagcagtttatggcgtacggggtgtggcctttggcgcatggctgggcgctgggcgaagtatgccctcgccagatgccttcccatggtgggaagctggtgcgaagtcccgccttcgcactggatctgcataaccgcgatccggccgcctttgtgcgtgaggcggaggatggggcggtgcagatcgttggtcggtacgtgccgaagacggagggccagcgtagctgggatatacgcgggtctaatgaccgcttgaacagggtcttcgagttgaaccgtctgccgtatgacggttatcccgggcaagacgatgtggatcgtcgcgggaagaagccggcggtagaaactggagacgaccccgcgccggcggccgccccatcctctaagaagaggaagctaggtattgctatgggaggactgggggtttccgatggttttgctagggaattgatgaggacatgcgcggccccagggggaaggatgtcttcgcccgagctccgggagtcttcgacgcggatgctgagggttactgggggttggtggcctaagaatgttcctatcccccgcgcggccagcgaagacttttttacatctcacatggttcatgattggagagtgtttccttacgggcggaatattgctgctgttgtgtcggcagtgatggacaaggatcgtcagggagctgcgcagaagcgccaggcggtcgtcaggctccatgaggccaggccgaagaggccacgggggactgcgaaggctgctgcccccggcgggagccagccgccgctggcggcgaagtcggccgcccctgggtccagcagggtgccggaggctgcgaaggcgactgccgccagcggtactaagtctgtcccggcgggagccgtgaaggcccgagagttgccgccgccaggcaagcgcgtggccgacttcgccaccgatattagtgtggaagattattttgttgggtcgggcgaaggccaacttgttgttgttctgcccgccgtgtcgaccacggcggctgccgtggtgcccagggcgaagggtagtgctcttagtgccggtggcgagattccggcactcactgccgtcagggacgaggcgggcgctgtgtcccgtcggctgaaggaggcattaagtcaggcggctgacttcgcagaccgcgcggcgtcgggggcccttacggcagttgtgtctgtcgaagtcgagagacttcgggcgcaacatgctgacgccgtccgggaaaagtcggccaccgacagcaagtgccgcaagctggcggataaggtggccgcgctggagggtgagagggctgacctccggtgccaactggcggaggagaggaaggaggctaatgaggccctcgccaaggcgcagtctgcgcaggcggaggccaatttggcgcgggcggagggcagtcttgccaggcagcgcgccgaggaattggaggagcggctcaacgctctacagacccgtgtggagaggaccgaggcttcgacgcgctcggaggttgagtggacacgcaaacaacttatggactcataccatgagctgggcgcgcggaccgctgacttcgaagtgccagaccgagagcccggacttcgctgcctcgagtggctacaggaggagttgctggcgctccccgctatcgtggaggggttcatgtcctatgcctccctggtcacctgggaaggggcgatgaacgcgctttcccgcgaagggtgccggcactatgaggtcttcgaccaagcggatgaggatttcgagcgcgatatttacaaggttgaggaccctgtggtgaaggaatctgtgggagccctctacgaccggatgtggggccctctcggtcgagaggtggtcagggagcggaccgagacggcgaggggtcaggcggcgcgtggcgagaacgtggaggacttcggggctttgaacagcgcgcagcctgacccggagtcgaacccggtggcggctgtgtccggagccgcccccggaaaccgtcgaaggcgtcgctga

SEQ ID NO: 9037 - DNA, 459 bp, Zea mays
  Peptide Sequence Number=SeqID_52412
atggcctcccccggactccagacgccgagggctatcagcggctgttcactcgggcagccaaccaccttctacctctcgcttatctgccgagcgatctacgacacgccatcaacagtcggcgagacgcacggagctccatcaacgcctcgcgcgaacgacgacacgagaacgagatccggcaccgggaagaatatgaccgggatcacgacatccctacacggagtcaggccaccagaactgagtcggcaatggcttctactggtggcacaacccagggacggtcgaggcaccacgacaacaactcccctccctgagacagacatcatcatcgacgacaggaggacacgtgtggagtatcggcactcactccacgcctcagggcccttcaatggccccctaacttcaaagtctccaacgtcgacaagtacaagcctaagcaggatccgggaggctgactga

SEQ ID NO: 9038 - DNA, 444 bp, Zea mays
  Peptide Sequence Number=SeqID_52413
atgggcaagagcaagaaaggtgggagttcctcacaccattccggcgataagcggaagcgcgagccgactcctccctcggaggacttcggcgattccgagtactcggaggaggagttctcctccgagtcagagggttcgccggtccatgcctctccccctgcgtcgtctgatgattcagacgactcccaggggatcgccgcagaagtgtggacctacatccgagccgtcgagcgcgccggggtcgagggctcggatgagtcggaggtctcctcggacgaggagaactcctcggacttgtccgaggaggggggcggtgacggtgatggcgtgggcgacgacggaggcgacgacgatggcaacgacgacggcggcgaaggtggcggcaagggcgacagcggtgacggcaaggacggcagcaagggcagcaacagggccagtggctag

SEQ ID NO: 9039 - DNA, 786 bp, Zea mays
  Peptide Sequence Number=SeqID_52414
atggcccgcgcccgcgcctataaagccctcccaggcttcgactgcactcttccgcgcaccctcaaacctcaccggagtttagctcgccgccgtttgcccgtgcgcagcgtgtccgcggccgcccaatccctctgtcaccgtagaccggccaatagagccattcccaactccgtccagccctcggagaagactgtgcacacctctgtgaagctccccgagcgaggaatcggagtttgcttcgccggagaggccagtccacgctcgccggagctctcaaccccgccggagtacgtggaccgggtaatccactcaaccatccttcgattcctggtgcacacggtcactacgttaccccatgaagctcactgtgcccttggattgaaccagttcgccgtggtttggccggtacactcgccgccgacgagaacacccgcctgcgcgcgtggaccgggcgattccggccatccccgacgtcaagccgtacctcgacgtgaccgccagagtctccccgagccaaccccacccttcgtcggacctccctcgccgccggataacttagaaaaaccctacaaaaataaccccaagggtacaagagcaatacaaattccctatatttatcctcaacaaaaacataagcctaaggactgtaaccttgctgacggagagtacatcctcgtgccggagcaaggagctgctcaggaggtagccccggatccagcccccgagcctgcaccagaggacatgtctgccactgctttggaaggcaagccccagttttatgcataa

SEQ ID NO: 9040 - DNA, 912 bp, Zea mays
  Peptide Sequence Number=SeqID_52415
atgtcttcttcctcccttatgcgtcgtgtctttccatcttccaagcccccggatggggggtatccgccgcctttccgcctcctcgttggaggaacgcaactccatgggagttggtacctctcagccatcgttcggcttcaaggattttcatcggccggcccggccgcacccctacgccggcgatcacccaggatggtgaccaccagtttctgggtggggaagagcaagccgggctgcgatcttggtcccaccctcagcttcaaggatgttcatcatcctcgctggggtgggggccacgctgagccggcgctctacctcccgcgcgggtccgtgggtcacccttttccgcggcgttcgggggtggaggtgctcgctggccctgcgggcggcgcggacttagacaacgtggggctgatcgacggcgggcgtcgtcacctccagcgtgtcggagtcgtcggccaggctcccggcggcccttcctgccggagggcggccgccgcgccatgtgcacgggaggaccacccacgatgccgcgcgctgctagggcggcgctcgtgttctggggtggccctgcttttgcactgggacggcgccctcgcgcagaggctggcggaggcggctcgagaagtcctcgtcgccgacgggatcgctgccactatccgcgccccgggccactgcgccggcgccttccccatggagtggggtcgttcgtacctgcggagggggaaccggagttccgttcgtgatggcactttgagtgccagtgttttttgttcattgtggctgttgaggcctgaacatgaatccctcggctcgatcggccttgttgtctggggctcctctagcttagttaaagagacccctcagccgctcttcgatgagccgaggccaggggtagcgatatcagtatga

SEQ ID NO: 9041 - DNA, 1035 bp, Zea mays
  Peptide Sequence Number=SeqID_52416
atgccgcgcacgaagaatgtgtcggcgccagggggaggcgatgatgaggaccctcgtcgccccttcaggcaggtcaagggcaagacagtttacttggagcagcaggaaggccgcaagaagcggcgtacggacagagcagcccgtgcagcagcagcagcagcagccgctgcgcaggccgagcttggagatcagccgcagactccgtcagatcagatcgcatatcgtgttcgtcgtctcgcctcccggcctcgctcctccactcacacctctgcttccactccgccacctactctgcctgctcccgtcactcctgttgcgccatccaccaccacagccatacccgctacctccactacgccagcttccactgctcctcctcctcccgctcctgctttagctcctcctgtccctccacctcgattccgggagcgcgatgagactgagagggaccctgcagcagttgacctgttcagcactcgtattcaggagtcatttttcagagctcagatgtctgctcagatagctctgcgagtgcaccggcttttggatcttccagcctttctgcttgcagccggtgctgactctgaggcacacctcacctatctgcctggccttcagacccttttgactaccagcgacaggtatgttgaggagtgggtacgagtcttctatgcctctgtatggattgacccggatcatcactggatgaggtttcgttttgagcgcgaggatgtcaccattactgccagtcagatccgccagctttttggatttcccgagtcgacgactcgtcttcacagcctctgctacggcacttctgaccctcctcgtcgccctcacggcggtgtggctccgggtacaactcacgtcgtggctctgttccgcccgcccttcacagatgggtcgcgacgttcaccggcagattttactacagcagccaagtatttatatgagcttatcagacggactcttctgtcgaggatgggatacagggaggctaccacacatattcagctttggctccttggtgccctg

SEQ ID NO: 9042 - DNA, 1146 bp, Zea mays
  Peptide Sequence Number=SeqID_52417
atgaaggaggcgttgtggcataagagaggtcatcctcgggagttatatccgaacgtatctagtaaggatgctcttgttcctcctgaactccccgtgcctaactgtgactgtggcagactggcttgggggcgcctgaggtgtttctttttccagtggatcgacggtcctgataaatttgacactcgatatcttcttttcgcttattggttgtgtggaaggactagtcatgagcgttttaagcgttgggtacctcctcccccgaatcctccaccaatgatggatgcagaaaaggagccatacgggtggcgtaagtgtcgtttcagagagtggttgtatggtcctttgtcccattggctagagccagaggagacgaggaaatgcagttgggagagttacaacgacaaaggagaggtgatgcgcacaatagagtccaagagactaatgggacagaagatgcgttgtggatctcagctcgtcggttcatacattaacgatcgcatacgtgacatgcgtaggtacgcgaaatctgccttttatgacagcccgaagcgtgcagagtataggaggttgaaggcggcagatgagaagagagcacatgatgcaagggaatcggaagcggctcgagccaagaaacagatgttggataatcttgttgatcgcctcaagggaaagattggatgtggcgtaaactatttggccgatgaggcgcatgcaagatatgttcaggataaaatggcgatggttgagctgatggaggaggaggaggacgacacatctagattgagtgagattatcgctctcgcagaggcaggattacatggagaagacgaggacgacacatcaaggttgagtgagctcatcgcactagctgaggcaggattacatgctcaagaggaagaggacgagtttatgtctcaggccgctgaagaggtagaggcggcttattacaagcagaagtctgatgaggctgaggctgaggatgagctattctcccaagctgtagatgaagcagaagccaattattacaagagaactgttgacaagtgtgatgcaggacaatgcagcaagtggaatgaggttgtcgttgaggattgtgcgatggatgactccgaagatgagttacttatagattgtgattctgattga

SEQ ID NO: 9043 - DNA, 129 bp, Zea mays
  Peptide Sequence Number=SeqID_52418
atgaccctaaatggattcgaacccatgacctctcaggaggcgctcgtgttggcgtcgctcatcgacgacaagaagaagcttgacgactaccagttcgacctctggaagcagtcctacatggccgcatga

SEQ ID NO: 9044 - DNA, 348 bp, Zea mays
  Peptide Sequence Number=SeqID_52419
atggactacatgatgtttgaggttgctgaattagatgaagcatcaatgatttgtcacactaatagcaaaatgaaaggttatatgttggttttaaacatgtctcgtatgagaacaagagcaagagcgtggacaacgccggtggcggtcgtgtacatgtgggcgaacgaggccacctccaagctgatgaccaccggcactttgtcacacccggattttggggcaccaagacccgggcgcgaacataatcaccaggtgggagctcatgtgaagtgtaaggcttaccaaagaggatggttagagctgagcattgcttttaaagttggtcaaaattttattagcaattactaa

SEQ ID NO: 9045 - DNA, 426 bp, Zea mays
  Peptide Sequence Number=SeqID_52420
atgatgctaatgcatatgatgacatgtcaaagttttagttctcgtaacaccaggggtgttacagcccagaagtcagagctccaacggtcggaacccaacggctttggtgacgtggtgcagacgagccatctcatgcacacgctgcccctcccctctatcctccaatccaacttctctgtcgtcgacggccttgccagctccgccgcgggtaaccctgatgagaccaagctcttccccaacctgttgggccagccctcggtgtcaatggtgtcgctgagccggatactcagggaaaagcaatttgggattgagatgagccggatacaaggtctaccaggtgggaagagaatcaagagctacagccgtgatttgttcatgtttctgtacattcttctcatcatagccagtggcgaatctaggatttaa

SEQ ID NO: 9046 - DNA, 441 bp, Zea mays
  Peptide Sequence Number=SeqID_52421
atgtccaaaccggacaaaactttccccctccttatcctcccggtgctccccagccttcttaaccctggggttggaccgcacgagttcggattgagtgactgcccacacagtctcgagtggttgtacgataaaggagtacagggggttgggagggggctgcccacggagagggggcggagttccgcggtggggatcgccgccggtgggctctgggtgggggacgggggctggaaggtggtgcctcgggttcgtggctacgcgagggagctgctcggctcacttaattccctgccggaccaacagagaaggagagggaggaggaagggactcaccggagaggagaacgacgccgacgctttgcgaattgagctcgggggaggggaggagagggatggccgaagctggtgtgaggaagaaggagctcgggcgagctttttatag

SEQ ID NO: 9047 - DNA, 174 bp, Zea mays
  Peptide Sequence Number=SeqID_52422
atggggaagcctatcccatcactcctcatgctcctcctcagccgagtgaccgcacttatacccaccataaccggaatgggagaccacgtctcaggtcgcgtgaggggatatgtccactgccaggttcactcaggatttaataacattatgctaagagaagaaaaactaagttaa

SEQ ID NO: 9048 - DNA, 981 bp, Zea mays
  Peptide Sequence Number=SeqID_52423
atgaagaagaccttgatggagatttcgatgaatgctgagtctaacgatgcgccgatggttcgcacccttcaaaccacccgagtcaacaccaactacgtccctctgccacggcaagttcctgtctacctagtggtagtcgaggaaatttctgtagatctccctcgccttcgtgtggagaatggagtcatcttggagaacagctcggaggaacttctgcctacacccaccgcgttggcagagtcactagccttcgcagctagatcatcagcttcagcaccgccggcaccagcatttcaagcccctgctcccggaggcaacgacccggacgactctagggacaatgatgaagatgacaacaacgaagaagatgatgaggagaacgttaatgaagaagccgacagtgtgcagcaggactactacatggggttagggcctgtcaccgaacattatacatcaatgttcaagacagggcacttccctaacgtgctgcaggatgtgctgcatgcgttgggaacctacgtccgacccttgtacgagacaaggcaagtgtgtgagcctcctcgggcttgctactgcatcactcgcattcatgtcagggtgatggatgtaggggatagagggttcaggactctatcttcccatgagtccctgacactgctatccacctacgctgcttcggtcagcgatgcttctagggggactctgtggtctctcagccacacctaccggcaacagctgcatgacacgaagtacaggcatcttcctctgcgtctgagtggagggagccagaccagcattattctaggtggagctggagaagatcgcctcaacaccctagctggtgtagtggcaggtcttaacactgacctggacagtgctaccctggatctctctagggttcatttggagttggaggatgcccacgcaaggattgcagcccttgaagctcagctacaaggaagggatccccgtgaagcctag

SEQ ID NO: 9049 - DNA, 468 bp, Zea mays
  Peptide Sequence Number=SeqID_52424
atggaggtaggatgtgaggggtggggtggatgggagtggagtaacgaactagtggtgagggtagtgtggaaggaggccccggagtcaaccacccaatcggtggtggttcggggaggtggtgttggcgaagggtgcctgggcgcggctcaggacatggctggatgcgcggttccgggcgtcctgggcgacgcgacaagatggggcagagagggcgcggtcggcaggccgcatggcgccggggtcggggtggggaaggggcgcgctcggcgggcggggacggctggcggccgagcgcacgggcgcgacgcgagcgacggttcagccgccgggacggcacgagcaggctacgcgcggtcggtgtcgtggcgggcgctcggccgcggtccacgaccgggcgcgtcggggcgtgacgcgcgacgagcaggtggcggcggccggctagcagaggtgcagaggcggcggctgtag

SEQ ID NO: 9050 - DNA, 468 bp, Zea mays
  Peptide Sequence Number=SeqID_52425
atgacagctaggttccaaagattgcgtgagagaaatattggtaaccctttaattttagaggatttccaatgggacaatgagtgggtggacaatcaaaaagaaatacttagagaaggggatgatcttgcatgggctcatgtggatgatgcaatcggtgcttctagttcacttcaaggtcgcaacttcccaaaaagagcccgatatgagtctgtttattcaaggcgttggcaagctgctgctacacaggagcagagagttatagaagaggaagggcaaggcaatgaacaagatgatgaagaccgccaggcgccagccatcgcgcgctccagctatcgcgcccagacagccgccatcgcgtgctccaggccaggagccgccatcgcgccagacgtcgtcggctgccctccaggctccagctcctatgatcccttggctgctgatgttcataatcccactcatattgaataa

SEQ ID NO: 9051 - DNA, 2898 bp, Zea mays
  Peptide Sequence Number=SeqID_52426
atgccgctgctgactgtacgtagcaatgtcttcttcttcttcgtccgttgcgaatgcgccgtcgggccaatcgtcgtccgaggataccttgagcgatttggcggcagtggagttacacccaagccacacagtggagttcggcgtttcgaggatctcctcggttcacgtgcaagatatgcagcagttgggaagagaaaaattgggagcaagattgcacagtttggattgtgcacctttacgccgaggactgtcaagacttcggcggaagttgtggaactagttccctgcgcccgcaacaagtggggcaactggtatgaattttggttttatgtgtcgggaggcgaagtcgaagacctcctaggactcccagcggccgtgatgtgctcccactgttatgtggcgttcccgccgtttgaggtggcgaaggatgatagggacgaaggggcccttcggtgtgctgcccgcatgagtagcgggcgcgattttgttgaggaattcatcggttatggagtgtggcccttggcgcatggctgggcactgggcgaagtatgccctcgctatatgccctccctgggcgagcagcaagtgcgaagtccggccttcatgttggatctgcgcggccaggacccagccgcattcatgcgtgaagtggaggacggagctgtgaggattgtggggcggtatgtgctgaggacggaggctctacggaggtgggatattcgtggatccaacgttcacttgaatagggtcttcgagttgaatcgtttgccatacgtcggctatctcggggatgacgctattgtggccgtcgatcgccgcgggaagaaaccggtggctgcggctggggaaggttcttcacgggaggctgcactggccatgaagaagagaaaattaggtactacagctaaagggttgggggtctccggtcgttttgttgtggagttaatgggtaattgtgtggcctttgggggaaggatgtcttcgcctgagctccaggagtcttcggcgcgaatgctgagggttactgggggtcgatggccaaggaatgttctgatccctcgtgcggccggcgaagacatatttacgtctcgtatggctcgtgagttgaagatttttccttatgggcagaatattgctgctgttgtatccgcagtgatgcagaagggtcgtcaagatgcggcgcggaagcaccgggcggtcactagggccggggaccctttccacgaggcgaagaaggcgcggggaggcgcaaagtctgccgcccctggcagtagcaaaccaccgccggttgtgaagccggccgccctcgggcccagcaagtcttcgacgggtgcgagggctgctgcttttggtgcgggcaagctaccctcggccgagcccgcaaaggagcgaaggccgccgtcgccggcgcgcactgacgtggcggcggcgcgtgttgcagactttgacatggacatctgcgtgggggattatctcattgggtcggatgcgggacagctggctgttgtcccgactccggtggcggccacctcgccgacggtggtggttggtgcgaagggtgcttcgcaggacccgttgtccaacttctgcgcgagccgcgagatttcgtcggccaccgccgctaaagatgtggcgggctctatgtcccagcagctgaggcatgcgtcgcagcagctgaagcatgcagccgccttcgccgaccatgttgtgtcgggtgctctgactttggagctgctcaatcctgaggccaaacttgcgtgggcagaggccagtctcacccgccaacgcaccgaggagctagaggcgaggctcagcggcctgcgcaaccgcgtggacaaaaccgaggcctcgacgcgcgtggaggttgagcggacgcatgcgcagctcgtggacgcgtaccgcgagctgggtgcgcagaccgccgccttcgaagcgcccggccaagaggtgggcctccgcttcctcaagtggctacaagaggagctggggtcggacgagggcttcgaacgcgaaatattccaggtcgaggacccggtgcagaagcggacggcgggggcgctcttcgacaggatgtggggccctcacggccgagagacggtccgggagaggtccgaccgggcgattgatcagatggcgcacgacgaagaggttgaggatcttggcgatctggacggcgcgctgcccgacagcatgctccccgaggcatcgggggtggagccggcgccgccatccgatgcgggcaagggcccctcggtgacccccgcgccgactggagctggcgaagaccccgcaccagcccctgcgctgacgggtgaggacgcttcaaaggcaatgggcgaaccagctgccgaagaccccacggcggcggccgggccttcgcaggttccgacgtttgggcctgcgcaagcaaccgctgctgacaatactgattttgtggtggcctcaaccgtagtgcctaccgatgatagtttgtttggttctgtgtctgagtgttttgagtctgatggtgaatctgggagtttgttttcttggacggaggagtcctctgatgaaggcttggattattttgttgcattggatgtggctgcggcggagacttcgccgcgtgtggagggtgccggggatcttcctagtgcgagtactgggtgtaggcggcgaagggtggtgggaaaacatagtgtgggtgaattttcacgaagtggcaggcgtcgtcgtatggggatggagcgtggccatctccgagtagaccgggttggtaaacgagaattgttgtcctcgccgattggggcgagcgtaggcgagggggatctttggaagctttttgagggtgaggaattgaggataatgctgtttaattacagggagatgggtatcatcccgaaggttgagccgatgtaa

SEQ ID NO: 9052 - DNA, 603 bp, Zea mays
  Peptide Sequence Number=SeqID_52427
atggccggagccggcgactccgcgcaggcaaagaaggcacggggcggttgcggttggccggggggtctcagttcgtcggtgcggtaccggtaccggcgatcaccggtgactaatcaacgggacagagaaaacaagggagagagaaaaggaggtccggcggggaaattcaccttgggtggggcaggaacgatggcgatgatgtgcctggtggtagcggagcacgatcggggacggtggtcgagctctaccagtggcggattcaggcgtagggggcctagcaacggggaagctccgtcgagcttgaagaacgggtgtgcgcagctcggtaagggggatgaagggtgggtcgcgccggtcatcttgcctctgttggtgcagcgaggtgacgaagacctggagcgaagggtggcatcttcgccttcgccccaacatttgccctccgagggaccagttcgactgagtcatctggtgccgaagacgtcactagatggtggagacgctgccctcgctcgaagtggttccgcggggggttttgatgtgactattgatggacgtggtactgttggactgcgggcttcccgaagcgtcgcgccctatgtataa

SEQ ID NO: 9053 - DNA, 552 bp, Zea mays
  Peptide Sequence Number=SeqID_52428
atggctgggaaaagtcaggggttctggcgtaagttttccaagactcaaagaatagagtccatggactgcgggttctattctctaaaactagtcgtagttaaccagagtcgttgcatcgtggatctacggttcccaacaatcgtgaccctagacacgatcagagccgtccaaacccagatggatggccagggagtcgtcttctaccccgcgactggccacacagcggcgctgtgctacccgcggcggacgcccccggcgagctctggctgccgattcgcagatgcaaatgaggcacataaaattgaggatatctctctattattcttggggaaggcggcctcccagactccacctcctgctgaggcgagggggaagagtcttgctgcttctactcctactcctgctcttagagtcggcgctcctgctcctcgtgcaggcgacaatgcagtctctccaagtgactggactgacctggcaccatgcgacgcagtggacgctccgccaggcgggaaggcaaaaaggggatcactgacttacgtgcagtgcatctaa

SEQ ID NO: 9054 - DNA, 105 bp, Zea mays
  Peptide Sequence Number=SeqID_52429
atggcgacaatcgcgcggagcaggaagcagaactggtaccctaagacatttcttcagctgagatacatgaaatacatcatgaacatccgcaagatgatccggtaa

SEQ ID NO: 9055 - DNA, 432 bp, Zea mays
  Peptide Sequence Number=SeqID_52430
atgccccctgcaccacctcagggcatcctggctactggaggagaccctgacgaagacggaggcgacgacgacaccggcggtagttcgagccacgacacggagctcttggaggagcaggagcctgagggatggatcgctagacccatcactcgtgacgtcgctcgcgggtgtcacttccacgacgctctcgacaccttgggcaatcccaggctgaacaacatgatcaacctggtcgtcgtgctcaacatagagctggaccatgcccttgacaagttgggcaaggttcagctggaggttgcggaattgtgtgctgagtgcgcggcacgccactatctggatggtggttctcccacccctgtcgggattcagcacccttatcgttcactgccccgtggccgcttcgagtatggtacccctgactgcaggacctag

SEQ ID NO: 9056 - DNA, 714 bp, Zea mays
  Peptide Sequence Number=SeqID_52431
atggccaaatccttcattatagcacaaaggcctagccctcacatggtacacaagattgccgccattatcaatcgactcatggaaaaccctccacaacaagttcttgttaaattttcaaggctatctactatgcaatcgatcagtggtcttcgcgccggcgtcctatacagtcactgcataagagaccactcaaaaacttgcaagaattatatcagctgttcgaaaagtacgcccggtccgaagagctccaccaaagaaaaattgaatcacagcaagagcccaaggacactccgtagtccagcaggacatgggtcaggcctgcataatcggactcaggccggcaaaaccgtaaccagtcccaagtgcacaacatcaccaatcagcagcagactggagacacctctcgtcgtcatgaataccccacgcagcagggccccaacggaaacactagaggcagaggccgaggccgaggcccacaatagcaaaggttctattgccttttccatggcgaagactcagcacatcccaccagggactaccctgaaaccaaggacacaaaggacagaatggccaaaaaccaatcagctgacaaccaaagagttgtcgcccacaccaaccatccccaacaatacaatcatcaccaattccacaatgagcattaccatccccaccagcaaaaccacaacatataccagcaacaccaagaaatcctag

SEQ ID NO: 9057 - DNA, 372 bp, Zea mays
  Peptide Sequence Number=SeqID_52432
atggtaagacttgcgaaagtacacttcgtactcagggttttcgaacacatgttgttgcaggtgatgaaacaggacatgacttggaaatcctataatcatgcaccaaataagaaccaggattccatagaagtatttttaaagagcacaagacatccgaataagaaggttgccttaggcagagtacttagtcaggatcccaaaaccaaagttggagatgttgctctaggtaaagaaatttggatggtgcgtgttagtctggtatctgtgtgtgatgaaccactaataaggccatataacaacctcaaggttcttggagaagtaggcaataatcctattgcatggccttcaagttgtattgaaaaggttaactga

SEQ ID NO: 9058 - DNA, 378 bp, Zea mays
  Peptide Sequence Number=SeqID_52433
atggagagcaatggcctcgatagtgtcctcggcccggtatctgaaagactcggagtccaactaacgccagcctggctgcaagggatgaggctccaaggtcatcctcaccctacagcggggtacccggtgctcctcgaacagctgcactgcatactggggaggcatcgtataaccggctccctgcagtacctcccacaagatgtggggaaaaccctcccgtgcaagtccgtccgtgtgggaatgtgtgttccctccttccgaggaatcatgagaagccatctatgtaaggcttttaaggttcttgaccaattaccaagtagttttgaaataattgatgcatgcatgcgcgtcctaaacaacctcacaatcaacttatag

SEQ ID NO: 9059 - DNA, 900 bp, Zea mays
  Peptide Sequence Number=SeqID_52434
atggacagggagctgctgctcgcctgcagcaagggcgccgagttggggaggctgagcgcagggaggccagggaggagggctccatgggaggagcttcaacagtggggtccgaccaagagctgctgctcggccaagggagagaggggagctcgcagggggtcacttgcagggagatgtggcgtgcgcgaggagctggaaggaggacggcgccacgccatggctggccgagggaggaagggagagctgctgcgcaagcgagaagaagatagggacgtcggctggagaagagagaagcctctaggtggttcacctttccgtactgggcatgaggctgcccacggttgtttgctccttgctgaggtgcattctgtcttgcaggggcattgggagctgactgctgttgagctgctttctttgggcaatgattcgcctagtggccttgttccccatagtggaaacatccacggcctcctccttgcgctggagctgcttggttactatgattggttgctggggcaggaaggcgaggtgtctggttgttctagcgatactgctattggtgctgaaggaactgcctcttatactgctactggtgctggcgctgatgctgatgctagtgtccttgaggtgaagggggtcaaccaaacctctcagaaacctgtattgcctcttggcatcagtgttcacatcctcgggcacatcataatgacggaagttgtctctgaacttctctcaggtgatagcttcagggtcggtaagggtggcgaggcatctgcggcatctgcacttgcatctgaggttgaggtgggggttgctgttgttgcacctgctacattgctgctagagtctggccaatcgcttggactgcctaggtctgcactagaaacatctgctcaatag

SEQ ID NO: 9060 - DNA, 366 bp, Zea mays
  Peptide Sequence Number=SeqID_52435
atggcgaggtgtatggagtctgatcaactccgtggcaaatgggtaacacgacttgtgggtaaagatgcgcaacctctgcagagtgtaaaactggtcaagagcaggtacaacaggatgaggcgcgtggaggatgctatgatgagttcgcacttcgaagcctttgaccagagcaacgaggacttcgacgctggtgtattcctggtcgaagacgatgtgttgaagcgcactgctgtagcgctttacgataggatgtggtgtcctcccggctgcggcgtcgttcaggagagggccgaccgagctctggcacatacgatgagggatgaagaagttgaggacctcgccagcctggagagctcggtggcctga

SEQ ID NO: 9061 - DNA, 474 bp, Zea mays
  Peptide Sequence Number=SeqID_52436
atgtccggtgcaccagaggactccaacttgaactcgccaccttcgggaattttcagaggcgactccactataattcaccggactgtccggtgtacaccggacagtgtccggtgcgccaaggaagaggtcaggcgcgcccattccggcacaccggacagtaaacagtacgtgtccggtgtgcaccggacacccaggcgggcccacaagacagaagctccaacggcgactatcaaaaggcctgaacagccctggacgtggaggtggaaaaaggaagacgggagtgacggccaagctgacaagcatggcagaggtgctcagaagagccccgagtatagggtatgtcagagtggccggcaagctgcgacaggacgtcaggtccagggtgccctagcgacggtgccaaatggcggaggaggtggtggtagtagcagagcagagatgagctactctggtgtggggagtggtgggcagtga

SEQ ID NO: 9062 - DNA, 162 bp, Zea mays
  Peptide Sequence Number=SeqID_52437
atggatactttgtttatagatgatgatgatgatgatgataatgctggtttctattgtgattatgattatggttttctggtattctttccgtttggaaagggtaaagaaggtgtcgaggcggatctccaggggttccaggacttcgacgagtccgaggattag

SEQ ID NO: 9063 - DNA, 417 bp, Zea mays
  Peptide Sequence Number=SeqID_52438
atgcggcggtcaccctccggcagggggggccgccggaagcccggccgacgactccgacacgctggaggtgacgacgcccgccgtcgatcagccccacgttgtctaagtccgcggccgtccgcagggccagcgagcgcctccacccccaaacgccgtgggaggagggcgacccgcggaccccgcgcggaagggaccgggaaagggggataccccgaaagggatccttctccgcgaaggaaccgggctccgagccccccgttactgatcaggggttcgaaggctggccctccgaagggttcaacagtcgcctcagatcgcgtgggcccgacacccactactggtcaggggttcgaaggccagccccccgaagggctccatggccgcctcaggctactcgggctccgcgcccattactga

SEQ ID NO: 9064 - DNA, 1338 bp, Zea mays
  Peptide Sequence Number=SeqID_52439
atggctgaaaggtaccaactcccacggagttgcgttcccccaacgacaaggcagaagggctgcgggcatcctccatccgggggcttggaaggtggaaagacacgatgcataagggagcacgaagatatggtcgcctttcaagggggtcacccaccttttaaaggcgactctccctacttgcgtccccagccgtcgtgggctgagtcttctccaacacgctccaaggtcctccccctacggcacgggggctgggtcccacacgtcacgcaagccggcccagagcagaagaagccaaaccgccgcgcgcggtgcatgcaaccgcccagcggttacaagcggccctccacttttgcccagaccagcgggcggaagggcgggcacccatgcaggcggcctgcaaccgcgccaagtgggcgcacttctccgacttccaacacacccagcatggaggcccaggcgcacgcgtcatgcaaccggcgcgccggatgctgcgtgcgagcaactgcatcgccacccgcgccactgccacgcctcctcgactgtggaaccagtaccgcgactcgaggcaaccctacgcacgacccaacagcgccagcctggcgtgacggtcaatgcggccaaaaatgggccggcagtaatggcggtggcaggcgggcaggagcagcggtcacgtcatcagccaggcttacgtcccatctggggaaaggcggtgcctctggcaggggaagagagcgacgtttcgccttcgccataatgaccgcgtcaaaaaaaaggctccgagcctccctactgatcagaggttcgaaggctggcccctcggaggggttcaacagccgcctcagagcgcgtgggctccacacccactactggtcagaggttcgaaggccggcccctcggaagggttcaacgaccgcctcaggctactcgggctccgcgcccactactgatcagggcgggaacgatcttgtaacggaatcccatcagagggaggcatcaagccctcggaccccgtcgacaggggaccgggtccggcagatcacccgcagctcaccggagacaccatgttcggcgcccaccgagggcaacgtggcgctttcccccctcctccttgcggaaaggcgacacaggggcgtatgtaaaaaagtcgagtctgtccctgatcgtcctctcgccctgtgcagaggctcgggggctgctctcgcaattctggctccggccaaaccattgacagcgtcaacataccagcccgagaacttggaatccgaccgtgcacccgggctacggccaactcgcatgagggaacgaccagaccagccaaagcattacgcgaggcattaa

SEQ ID NO: 9065 - DNA, 1548 bp, Zea mays
  Peptide Sequence Number=SeqID_52440
atgccggatgcgatgaagccgaagggagggcgagctgagccggggttctacctcccgcatgggccggcgacccggttcttcctccggcgtttcgggggagaggggcatcctctagctgtgcggaggaggcgtcctccagccatgcgggggaaggcgaactgctgctgcttggacagggtgcagctgtccgtcctccaccccgggcggcagtcatgctgtgcgcgggtggctgctgtcaccggcctcgcggagggggtgaactttgacaacacgagcccgatcggccgcgagcgtcgtcagctgcagcgtgcctggcacgctggctcagctggctctagcgccgcctccgatgttgcctcctgccgcttggtccgggcgtggctgtccatccacctcatgggcgactgttgcgccgcgcgcaggtcgggcatcacgacgcctccgcgcggaggccggtgccggcctgtccgcgaggacttgagtggggatctgccagtgcaggttggggcggccgccattcgttggcgtggcgctggcgcgcaggtggccgctgtcgtcggtgccgaggtggtggcagccagagaaggtttctccgccgacgagaccgtcggcgccacctgcggtcagacccccgacactttggctttgatggcttgtcctcgcccctcgtgtgggggcgtgggcgagggcctttccacaacagtgtttgccctgaggtcatcgctgctgctgtttagccactcgaagcggaggtcgttgttgctgctggtgcagtggtcgccggcgagccacctggagtttattgtcccgcaggccctctggtgtggaggttgttcatacccacgggagtggaaccagagtcccaaccttcggccgctctgcgatgagctagagccggaggcagcggtgttggcgtggacagaggcttcgtcggctcgaaaagaggcttcgtcggcccaggagcaggtggcttcccaggccgaggaggtgcagcggcagcggctagagcttggccaggtcatctgcgagcaggaccaacctcggagtcacgctgccgaggtcgtgagtcgggctaaggtccccgggggacagctggctgaggctacggagcggccaaccgaggtgtctgcttgggccggggccctggcggagacccgggctgtgagggcccaagcgcggtgctggcgtccttcttcgaggtggagatccttccacccgtgtcgccgtccgaggccgagccagattccgccaaaggtggaaacgacgtcgagggtgctgctgctccctctgccgatgtctgaacctgcaggaaataatcgcttatccgagcgagagttacttttcgcggaaggattctattatcgatttagtcgtgaaggcacgaaagtcgttctggcagaaaagttttctagcgttaggactcgttgggtagcagaatcgcttatccgagcgaccccgctctcgaagcagttgaaaagcacaaaagacgttctcgcaaaagacttttccgaggaaaattttgacgcagagggggttccccccttctag

SEQ ID NO: 9066 - DNA, 702 bp, Zea mays
  Peptide Sequence Number=SeqID_52441
atgtcgtggctgtcggaggtgcggcggagcctggcggagggacagctgttgggagcggtcgagtccccgctgacgtcgtcctgcttccggcgacgtgggggttcctccgaagccgaggttgagtctgccttctgttgccgtggccgagccccgagccaaggggtcgggcgaggcggaagtcgttcggccgaggccagggcggagtccgagccctggggtcgggcgaagcggagtttcgtcgtcttccgggtcttagcccgagtccgagccctggggtcgggcggagcggagttcgccgtcttccgggtcttagcccgagtccgagccctggggtcgggcggagcggagttcgccgtcttccgggtcttagcccgagtccgagccctggggtcgggcggagcggagttcgccgtcttccgggtcttagcccgagtccgagccctggggtcgggcggagcggagttcgccgtcttccgggtcttagcccgagtccgagccctggggtcgggcggagcggagttcgccgtcttccgggtcttagcccgagtccgagccctggggtcgggcggagcggagttcgctgtggcgcctttggcaaggccagactgcctgtcagactcactctgtcgagtggcactgcagtcggggtggcgcaggcggcgctgtccttctgtcagactggctagtggagcggtggagtga

SEQ ID NO: 9067 - DNA, 798 bp, Zea mays
  Peptide Sequence Number=SeqID_52442
atggcgcctcctattgacgtggacggcccgcgccctaggttgggcgatgtggaggctcctccgaggtcgaggtcgagtctgtattccgtggccgtggtcgagtccgagcctctgggtcgggcgaggtggagactgtcggctgaggccagggctgagtctgagccctggtgtcgggcgaagcggagttcgtcgtcttctggggctgagcccaagtccgagccctgggtcgggcggagcggagttcgtcgtcttctagggctgagcccaagtccgagccctaggtcgggcggagcggagttcgccatcttcaggggcttagcccgagtccgagccctgagtcgggcggagcggagttcgccgtcttcaggggctgagcccaagtccgagccctgggtcgggcggagcggagttcgccatcttctggggcttagcccgagtccgagccctgggtcgggcggagcggagcttcctatggtgcctgaggccgggcctgactgcctgtcagcctcactctgtcaagtggcactgcagtcggccggtcagtggagcggtgaagtgactgcggtcacttcggctctgccgactgaagggtgcgcgtcagggataaaaggtgtcagggccaccttttgcattaaatgctcctgcgatttggtcggttggcgcggcgatttggtcaggggtttgcttcttggcgaagacaaggcctcggggcgagcgggaaatatgttcgtcgctgggaggggggccctcgggcgagacggagatcctccggggtcggctgcccttgtccgaggctag

SEQ ID NO: 9068 - DNA, 132 bp, Zea mays
  Peptide Sequence Number=SeqID_52443
atggcaaggtggcacgggcgtttgctatttatgctccagaacgacccagatgacaacggaaatcgggctaagcacgggatccttggcgacatagcagcaacgacaaaggacggtggggatcttgatcggtaa

SEQ ID NO: 9069 - DNA, 543 bp, Zea mays
  Peptide Sequence Number=SeqID_52444
atggcagtcggggtcagtgaggcattgtacgccaaggcggtgagccctgatctgctgacgggggatcgatggggacggttgattgttgtctccaaagatgtcaatttagaagaacttccgtatgacctgactgataggaggagaattatagattatcctggacttaagctgcaaggtcagataaggagaagtgaaacaaattccagtcttcttacttacatggctgcttttagtcccaagaactcttttggtgattttaaattgatctacattgacaatgtacaagctaatgaaagattctccaacttgaacaccttaattgagcttgttaagggagtttgcttagagggaataagatggatcctaaagttccaccagaacaaatcaaaacttgaatcacagatcagatttctcgagaaagttagggttttctcaaatgaacacaaaacgacatcaacttggatcatgaccaagaactgcaccaagagggcgcatgtagtgatccaaagagtgtatctctgcaccaatcaatccccaacataa

SEQ ID NO: 9070 - DNA, 956 bp, Zea mays
  Peptide Sequence Number=SeqID_52445
atgcactgtttaatatccggtgtgccagtgcgcgcgtgtctgacttctgcgcgcttctggcgcgcattaaatgcgctgcagccgctgcgttttcccgaggctggcgagttcctgaggcagctcttccttgaagcaccggacactgtccggtgcacaccggacagtccggtgaattatagcggagtgcctctggaaattcccgaaggtggcgagtttgagttggagtcctctggtgcaccggacactgtctggtggtgcaccggacagtccggtgtcccagaccagagcgccgctcaccccgctccgactaccgtgccagccacccgggcaaagctgacaacagcaagtttagactcgggcgcgacaggaagctccgcctcgcccgacctagggcctcggcctcgggaggaggtctccgcctcacccgaccccaagactcggcctcagcctcggcctcgggaggagatctccgcctcgcccgaccccaagactcggcctcagcctcggcctcaagagaagtctccgcctcgcctgaccttgggctcggaccgaccacgccacaggggatacatcattaccctacccctagctagctcaggctacgagggaacaagaccggcgtcccatctggctcgtccggtaacaggcaatgatggctccccgcgtgcgtccataacgacggtggttctcagccccctacggaagcaaggagacgtcagcaggatcccagcagcaccgtcagctgcgcttctacagggctcaagcacttctccgacgaccacgttatcgcatacgcagggctctagcacctctccgacagccacgttggcatgtacacagggctcaggcacctctctaccagacacgaatcgacggtcaagcttcggcgaccaagagatcaaactcttcgagttctacgaggctgaagatcctgagcatctatttggtgaaggcaa

SEQ ID NO: 9071 - DNA, 450 bp, Zea mays
  Peptide Sequence Number=SeqID_52446
atgggttcgaaggctgaccccccggaagggttcgacagccgccccagagcacgcagagtaagggatgactctgggtacgtccgttacatggccgaggctcgggctatgctcccgagtgcgcgcgtgtctgacttctgcgcgcttctggcgcgcattaaatgcgctgcagcggagcagccgctgcgttttcccgaggctggcgagttcctgaggcagctcttccttggagcaccggacactgtccggtgcacaccggacagtccggtgaattatagcggagtgcctatggaaattcccgaaggtggcgagtttgagttggagtcctctggtgcaccggacactgtctggtggtgcaccggacactgtccggtgtacaccggacagtccggtgtcccagaccagaggtaccttcggttgtccctttgctcctttgttgaatccaatatttga

SEQ ID NO: 9072 - DNA, 426 bp, Zea mays
  Peptide Sequence Number=SeqID_52447
atgggcaagagcaagaaaggtggtagttcttcgcatcacttcggcgataagcggaagcgtgagccgactcctccctcggaggacttcggcgactcggagtactcggaggaggagttctcctctgagtcagagggctcaccggtccatgcctctccctcggcatcatctgatgactcagacgactcccaggggctcgccgcagaggtgtggacctacatccgggccatcgagcgcgccgagctcgagggctcggatgagtcggagtactcctcggacgaggagaactcctcagactcgtccgaggagggcggcggtgacggcgatggcgttgacgacgacgacagaggcgatggtgacggcgacgaaggcgacggcgagggcggcagcaagggcagcaacaagggcagcaacaaggccagtggctag

SEQ ID NO: 9073 - DNA, 1035 bp, Zea mays
  Peptide Sequence Number=SeqID_52448
atggtgcacacgaagaatgtgtcggcgccagggggaggagacgatgaggaccctcctcgccccttctggcaggagcaagatgagaccgaggtgcgaccactggctgccgatcctagattgatcgatcttcagcgtgctacagcggccctgatgttagcccagattgctctacgagcgcaccgactattggatctccctgcgtttctgctagccgccggtgcagactctgagattcgccagttgtttggattcaacgagtcatcgactcgtcttcaaagcttgtgctacgatgggtcgcgacgttcttcggcagatttcactacagcggccaagtacctataccagctcatgagacggacgctactgccgcggatgggttatagagaggctaccactcatatccagctttggctacttggtgccctgatctcgcattcagagtttgatgttgttgacttccttatatgtgagatagaggatacagtattggatggacttcgtgcccggcatcagctgtcgtatgctcactatctctgctacatcttctcacagctgatccagccaccgcagttccagggcactcttgaggcctcgtgcctccactttggctcctaccgtccaacccctgaggacccagtgtcggtatctgatccagtaattgacactccagcagaggatgcagcctttcatcagtttgggactcagggcgcaacagttcctgacgacgaagatgatgattattattattttgggattccgcctccgcctcttgctcgactggcatctcaacaggctcgactggcatctgagcaggctcgtcaggaagcggttcagcagcagatgtccgagaggatgctttctctatttcagactattcaggacaggaaggacactttgcagcagcaatttttggcagatagggatgagcaccgggccttcatgactcacattcttcagcataccggtgttcagatccctcctgttcagtcagcaccccctccagctcttcaggcatcaattgtgccagccatttag

SEQ ID NO: 9074 - DNA, 883 bp, Zea mays
  Peptide Sequence Number=SeqID_52449
aggatctggggcgcttcaggtggtatcggagctgttaggttggccgcaggacaagtcagatggaggtctattgccaaaccagcttttgccagaagatggtttccccaagttgctgagagcatgcacagtttgcctcggaatcaggagccagccagaattcaaagacacctgccatgtcgtcgctcgcaaggcattgagggccctgtgtcaaatttatgaagaagaagtggccgacaccctgctcagattctttccgccctttcagagaaaccgtccagtttggatggccaggatgcgtgcattggaagagaagcagttgcttgaggacgacccttcagtcagaagtgcaaccgtcactgtggatctcaccacagctcaagctcgtgcaactgccttggaaagtcgtgaagtcattactgttgaagccctgaagcaagccaaagatgagcacgtccaaaagttgatggaggcctacttggtaacccataaccaacgtagagccctgcgaatccaagagcccgcttcatccaacccagttcaacccaggagagctgaagatccccagattcttgaaggtcacccggtctctatcagaggagaaaagaaggcttgggaactcccggaaggagccatagtcttggaaggaattccagtcttccctcaggctatgaataagcaagagcaccccgagtcctcccaagatcccccgctagagttgtttgagcccctcaccatgaagaagattttagcaccatccctcgaggtcaaggaagaagctgcaagaaccctgccagcaccgccgccctctgaggagctacaagagccagtccagcttgaagaagagttcaaccccgtgttgccatctcagtcactgccagaagaa

SEQ ID NO: 9075 - DNA, 360 bp, Zea mays
  Peptide Sequence Number=SeqID_52450
atgaggaaggagcagatacgctgggcacatggttgccgggtcctcgcgtcgtgggagagacggtttgaaggggagaggagtgggggcgcgtgggacccgcggctaggcagaggccaggcgcggacgctccgtgtgggggcgctgctatgtgatttggatctgggaggaggtgcatatccgtaccaagggaaaagagaaggaaagcgaagaactgagagagtaacacctgaatttggtggatattggaaaagaaattttatacccccaaattcagggtgttacaaatctaacccacttaagaggaatctcgccctcgagattcaagaagaggctagcaagaaaatgagattggttcattga

SEQ ID NO: 9076 - DNA, 120 bp, Zea mays
  Peptide Sequence Number=SeqID_52451
atggttggtttacaggtggtgacaaggatgatggtttttgattatgattatggtaatggtaaagaaggtgccgaggcagatctccaggagttccaggactttgacgagttcgaggattag

SEQ ID NO: 9077 - DNA, 408 bp, Zea mays
  Peptide Sequence Number=SeqID_52452
atggtgtctgcgagatcttctactttttccgggcgctacacagataaaaggaatgaggcgcacggcatggaggtgaccttaccatggatggtgaccgagacgcgtgcctacgacgagcgtctacaccggtgtttgcgagatccctcgaccaagtactccgaccacgacgcaggcaccacggcgctagctgttcctgggcttcgctggcggccagacacggcgaggcgatgcaagatgtgcggacggacgcgaagcggctggtggaaatcttaccggcgcacgggacaagggtggaagcgagccacggcggggttctggacgacgaagtgcggcggcgcgcccaacagctctggtcaagttattgtgtatggccaagttgatctaagtcaccaatttaggcttaagtga

SEQ ID NO: 9078 - DNA, 309 bp, Zea mays
  Peptide Sequence Number=SeqID_52453
atgtggggaaaaacatatgtaattgcttggcgcttaacatctgttactaagagggaccatttggacgccgacccgatggtcttttcgatgtcctctatggcggtgtggaaggatggtgcagaaatatatgacgacaacgaggaagacattctgctcatggtgattgcgtggctactgacctatgcaagagatatcacttacctagtgtggggtgaaagcatctatgcccctgaggcagatgttaagttaggtcgcattacctgtagatgtactacaacgaagaagacaatctcggagataagaacttga

SEQ ID NO: 9079 - DNA, 150 bp, Zea mays
  Peptide Sequence Number=SeqID_52454
atgaggaacgatgatggtgtggaaggaataccccgccacgtcggttctctggaggatatggttgctagagtgacttggccgtctaccttgccaccgggttggacagtcgagtgggaccctacctcagtaggggaggagcatgaggagtga

SEQ ID NO: 9080 - DNA, 701 bp, Zea mays
  Peptide Sequence Number=SeqID_52455
cgggcacacggctgcaagcatggagccgagctccaagctccaatggcggccgagctcctttcctgctccatgggcgcgggagctctccatggtgtggatcggcgcccttgctgtctcctccaatggtgcatggcgcagggagcagccatccctagctcgcccctctctccccccacaacagcagcaggcctgcgctcaccttccatggaaaaccagcaggagctctctcccccccatggtcgcgagcttccctcggccaccatggcgctggacgcctctttcccagatcgacgggcgtccatctccgtgcgtcctgtctcccatggactgaacgtccctccccctcgcagcacctccccttggcgagtttctttccctgcaaccctgcattttccccctgccatggacgcccaagaacagcagctcctccaactccccatggcgcgctgcagcagacgccgtggagcacctcccggcatctcccctgccatggctcgtgactcggcgtcctccctgcttgcgtgctgctgcgcagtgacccgcggtgcttgcaaggtgctcggcaaaatgcgcagcagccccgacgtctgcgcgcgctgtcggctcgctgttttgggaagccaagtggacagcacgccgtcgacactcgccggttgtttgctgtttttgcacagccccgtcgtcgtcgtcgttcacccccg

SEQ ID NO: 9081 - DNA, 204 bp, Zea mays
  Peptide Sequence Number=SeqID_52456
atggccctgatgggttcaacatcgaacaagatgtacctctgccagccttaccttgactccctcaagccagcatatccttcagagtcttttcttttgtcggggttgtccaaggtccttaggacaaggacaactgtaggtgggcctaataccttgggaggttctgtcacaacatgcaaggatcgcagccctagaagctcaacttga

SEQ ID NO: 9082 - DNA, 144 bp, Zea mays
  Peptide Sequence Number=SeqID_52457
atggccgagctccctgggagcatgccggtgcccctgctctccccttggccgccagcagccatggccgccagcccctggcgagctcaggttaaattaggtgaaaaacgtaaattacgtgacatatatttagtgtttggaagatga

SEQ ID NO: 9083 - DNA, 540 bp, Zea mays
  Peptide Sequence Number=SeqID_52458
atggacagggtgctgcagggagatgggagcgacccggaggttgaagacaacggagatagcgctgctcgcagggggaaaatgccatgggagagagaggtggacgagctgctggctggaggaagaagaaagggagccagctgggatttttctgggcgccgtggatcagagagcagggcagccagggagaagaacctgagctcgccaggggctggcggccatggctgctggcggccaaggggagagcaggggcaccggcatgctcccagggagctcggccatggctgctgcgcctggaaaaatggaggccacgccatggctgctgaaggggctggaccgagagcgtcggccatgggggggctgcggcggccatggagctctgcccctgcgcaagggaaatcaggggaaagggggcgcgcctgtgggggccctgctcccacgctggcgtgcggctgcattccagggagccgagtggaggacgccaggaggtgcttcggcacgttggagaagaagggcgccctgcaggggcagcacgccggctga

SEQ ID NO: 9084 - DNA, 1284 bp, Zea mays
  Peptide Sequence Number=SeqID_52459
atgtcttcgcgctcccttatgcatcgtgtcttttcaccttccgagcccccggatggggggcacccgcaatccttccaccttgtcgttggaggaacgcaactctgtgggagttggtacctttcagccatcgttcggcttcaaggattttcatcacgcggcccggctgcaccccctcgccggtggtcacccaagacggtgaccaccagcccctgggtggggagaagcaagccgggctgcgatcttggtcccgccctcagcttcaaggatgttcatcatcctcgctggggcggaggccgggctgagccggagctctacctcccgcgcgggttcgtgggtcagcctctccttcagcattcaagggagggggcgctcactggccctgcgagcggggcggacttcgataacgcggggctggtcgacggtgggcgtcgtcagcttcagcgcgttgggctcgccggcttagctcccggcgccccctcctgccgcaagggcggttgtcgcgccgtgcgcacgggaggaccgcccaagacgtcgcgcgctgccagggcgacgttcgtgttctggggcggtcctgcctttgcaccggtacggcgcccccgtgcggaggtcgatgctccgctcgtccgggaggatccgagtggggatctgccggcctccggctctttgtacttgtcctcacccctcgagcgtcggcgtgggcgagggcaaggttgcagcggcgttcgccctgaggccatcgctgctgcagttcggccacccgtagagggggtcgttgtcgctgctgctggagcgggcgacgactcgcctgttggttgtcggaaccgcttcaccaagcgtgagtcgccccgtgcaaaggtgacgagtgaggagtccctcggctcggtcggccttgctatccgaggcttctcttgcttagttaaaggaacccctcggccgctcttcgatgagccgaagccaggggtagcggtgtcagcacggacagaggcagagttggctcgaaaagaagacttggtcggccggagcctggccgggtcgtccgttagcgggaccgacgccggagttgatctgccgaggcctcgggccgggctgatgtctttgggggacagctggccgaggcctcggggtgaccagctgagccgcctgctcgagccggattcttggagaagaccctggcggcgatggcccgggcgtgatgatgatgtcgtccttcagagtggagatcctcggaccgcgtcgccgtccgaggctaggtcggacctcgccgaaggtgtagtcgacgcctag

SEQ ID NO: 9085 - DNA, 1019 bp, Zea mays
  Peptide Sequence Number=SeqID_52460
atgggggcccactcccacgcgtcacgcaaccggcgcgccagtcgctacgtgcaagcaactgcaccgccactcgcaccactaccacgcctcctcgactacggaaccggcggcgcctctggcaggggaagcgagcgacgcttcgccttcgccataatgaccgcgtcaaaaaagggaccgggaaagggggataccccgaaaaggatccttctccgtgaaggaaacaggctccgagcctccctactgatcagaggttcgaaggatggcccctcggaggggtttaacagccgcctcagagcgcgtgggctccacacccactactggtcagaggttcgaaggccggcccctcggaagggttcaacggccgcctcaggctactcggactccgcgcccactactgatcagggcgcaccttctggcccacctaacactagcaccgcgcgggctgctcgatataataccgcgcgcgtgcctgctcttaatccgacactgattgctgggaccgccttgacagctcgttcttcctccccacaacgaaatcgcgcgagctctgcggcgccaaatcaggcctggctgaatccgggcgccgggtttgttgctcgaccggaaggtgcgggcggatccatcaccgggatgtcgtctgcgttcggattcgggagggctcaatgggatctggggcttcacgagttcgccgtggattcgtccaggaccgcgacaagagaattcggagccgagggtcaccgcgtccttgcctctcgttgccaaatcaatggccactgttccaatcagggtgcacgcggtcatcggggcatgaagactgtgcgctgggaggaaacagccgccacaggggacacggcaccggttgatcgtactccggtggagggcgccaccgtgggggcctgcgtcgccgtcctttgccaagtgtggaaggcgatgccgcagatcgttggatcgactgctttgggcgcataccgtttcgggttaggagaatctaatctgggtcgtccagatgggatccaacg

SEQ ID NO: 9086 - DNA, 318 bp, Zea mays
  Peptide Sequence Number=SeqID_52461
atgtcgtctgcgttcggattcgggagggctcagtgggatctggggcttcacgagttcgccgtggattcgtccaggaccgcgacgggagaatccagagccgagggtcaccgcatccttgcctcccgttgccaaatcaatggccactgttccaatcagggtgcacgcggtcatcggggcatgacgactgtgcgctgggaggaaacagccgccataggggacatattcgggatcagggcaccggttgatcgtactccggtggacggcgccaccgtgggggcctgcgtcgccgtcctttgccaagtgtggaaggcgatgtga

SEQ ID NO: 9087 - DNA, 1092 bp, Zea mays
  Peptide Sequence Number=SeqID_52462
atgaacgtatatgagctcactcttgctgtctcacaccccccacaggtcaagaacaggaacgatcttgtaacggaatcccatcagagggaggcatcgagccctcggaccccgtcgacaggggaccgggtccggcagatcacccgctggtacttttgggcgcgcctccgggcctctagccgacccctaacaaatggggcacaggtgtccactcggattacccgccagcagctcaccggatacaccatgttcggcgccctccgagggcaacatggcgctttcccccctcctccttgcggaaaggcgacgcaggggcaggagtcaaaaccactcctccgaggcctcaggggctacacccggcggagccgaagtgaccgcagtcacttcgccgctccactgaccggcctgacagaaggacagcgccgcctgcgtcgctccgactgctgtgccactcgacagattgaggctgacaggcagtcaggcccggcctcaggcaccataggaaactccgctccgcccgacccagggctcggactcgggctcagccccggaagacggcgaactccgctccgcccgacccagggctctgactcgggctcagccccggaagacggcgaactccgctccaccctacccagggctcagacttgggctcagccccggaagacggcgaactccgctccgcccgacccagggctcggacttgggctcagccccggaagacggcgaactccgatccgcccgaccccagggctcggactggggctcagccccggaagatggcgaactccgatccgcccgaccccagggctcggactcgggctcagccctggaagacgacgaactctgcttcgcccgaccctagggctcggactcagccctggcctcagccgacggtctccgcctcgcccgacccaggggctcggactcgacctcggccacggaagacagactcgacctcgacttcggaggagcctctacatcgcccaacctagggagcggaccgaccaccgctcctgcgacggccacgacaccacaggaactgggtgccaaaacctctccggctgccacgatggcatgtacttagggcgctag

SEQ ID NO: 9088 - DNA, 324 bp, Zea mays
  Peptide Sequence Number=SeqID_52463
atggccagtgttctagacgatgttctgagaccttcgaagatggctactcctgctcctactagggtttccaatgacaaagttgaagaattggaaggagctgtcgctgcaagtgctgctcctgattgcactaaggccggacgtttggaaactaggcgaacagagcaaataaacgagagtctgcaagagaagttatcactgttgatacctgaagcggcgtcgaccgaagagcttgattttattatccatcacgcttcaggaaagcaactgacacagatgcaaattgtcgaggcccaacattatgccaaggaactaaaatatccttaa

SEQ ID NO: 9089 - DNA, 489 bp, Zea mays
  Peptide Sequence Number=SeqID_52464
atgggagccacacctcaacgctctcaagcggattctccgctacctccacggctccatcgactacgaccttctcctttgaccctcaccaacttcggagtggtctacaccgacgccaactgggctggctaccccgacacacgtcggtctgcatccgactacgtcgtgctcttggcgccttgtgttaaggacgcatgtgccctcagctacctaggttatccccagaatattcccataaagcagggctacggatttgggccggatcacacgtgggcctctgagctgggcgaggctgcactgtgggataacgccgtcgcaggccttcgtctggtgccgaatcgagcgaagggtgtccctgcccgtttcgtctctgtcagaccagcgactgcagcgaaggcctcgagcgaagggtggcgtctttgccttcgccccaacatttgccctccgagggaccagttcgacaaagtcacctggtgccgaagacgtcgctag

SEQ ID NO: 9090 - DNA, 204 bp, Zea mays
  Peptide Sequence Number=SeqID_52465
atgggcaacgttgctgcgtctagattattggtgagcgacctccttgaaccaatcttgctgattcgattttacccctatgtactgcttgttgggttgggagttggcgctcggatggctgatcattatgttaattggaacatggagcgaccacccgggaaaacagtgctaccacaagggtttaatgggacgcccttggctgattaa

SEQ ID NO: 9091 - DNA, 1167 bp, Zea mays
  Peptide Sequence Number=SeqID_52466
atgcaagccaactcagggcagaagaagccaaaccgccgcgcgcggtgcatacaaccgcctagcggttacaagcgaccctccacttttgcccagaccagcgggcgaaagggtgggcggccatgcgggcggcatgcaaccgcgccaagtgggcgcgcttctctgactcccaacacgcccagcctggaggcccaggcccacgcgtcatgcaactggcgcgccgactgcttcgtgcatgcaactgcaccgccacttgcgccaccaccgcgcctcctcgactgcggaaccaataccgcgactcgaggcgacccagcgcacgactcagcagcgccagcctggcgcggcggtcagtgcggccaaaaatgggccggcagtaatgacggtggcaggcgggcaggagcagcagtcacgtcgtcagccaagcttacgtccccatccgggggcagcgagagcaccctctcccacggcgtgaagacaacgcgcccgtgttccgttcctcgagcgactcgcgcacgcgcaacgaccgccccgtcaaccactcgccccgtcgcatcaactctgcgacgggacaggcggcgcctctggcaggaaaagcgggcgacgcttcgccttcgccataatgaccgcgccagtaaaggctggccccccgaagggttcgacagccacctcagatcacgtgggccctacacccactactggtcagaggctggcccccgaagggttcacagccgcctcagacgccgagcgagggatgaccttgggtacgttcgatacataaccaaggctcgggctgcgctcccgagctcaccggagacaccatgttcggcgcccatcgagggcaacatggcgcttcccccctcctccttgcggaaaggcgacgcaggggccgtcaacataccagtccgagaacttaggacccgaccgtacacccgggctacggccagctcgcatgagggaacaaccagaccagccgaagcattacgcgaggcattaagacctcggaggagtggctccgaggcctcgggggctacacccggcggggctcggactcgggctcagccccggaagacggcgaactccgctccgcccgacccagggctcggactcgggctaagtcccggaagacggcgaactccgctccgcccgacccagggctcggactcgggctaa

SEQ ID NO: 9092 - DNA, 1002 bp, Zea mays
  Peptide Sequence Number=SeqID_52467
atgcaggcggcatgcaactgcgccaagtggacgcgcttctccgactcccgacacgccagcatggaggcccaggcccacgcgtcgcgcaaccggcgcgccggatgctgcatgcaagcaactgcaccgccacttgcgccaccaccgcgcctcctcgattgcggaaccaataccgcgactcgaggcgcgcgggagcagcggtcacgtcgtcagccaggctcacgtcccatccaggggcagcaagagagcctcctctcacggcgtgaagacggcgcgcccgtgatccgttcctcgaacggctcgcgcacgcgcaatggccgccccgccaactactcgccccgtcgcattaactccgcggctggacaggcggcgcttctggcaggagcagcgggcgacgcttcaccttcgccgaaacaaccgcgccaaaaaagggaccgggaaagggggatactccgaaagggatccttccccgtgaaggaaccgggctccaagccccccctactgatcagaggttcaaaggctggccctccgaggggttcaacagtcgcctcagatcgcgtgggccctacacccactactggtcagaggttcgaaggccggccccccgaagggctccatggccgcctcaggctactcgggctccgcgcccattattggtcaggggttcgaaggctggcccccgaagggttcacagtcgcctcagacgccgagcgagggatgaccaggggggaccgggtccggcagatcacccgcaggtacttttgggcgtgcctctgggcccctaaccgacccctaacgaacggggcacggacgaccactcggattacccgcttgcagctcaccggagacaccatgttcggcgcccatcgaggaggctcgggggctgctctcgcaaacccggctccggccaaaccgttgacagcgtcaacataccagcccgagaacttgggccccgaccgtacacccgggctacggccagctcgcatgagggaacaaccagactag

SEQ ID NO: 9093 - DNA, 302 bp, Zea mays
  Peptide Sequence Number=SeqID_52468
ctgaggagcagagtacgccggagcagaacacggggcaaacgggcttcgatggcgtggtcgtcacggtgctggcgctgggttcggacgactggacgatggtggtggtacttgatatcggcacggcaactacgttgagcgggcacggcaatcgacgagctagcagagaactcggcaacgaggtagcagcaagcagagcgaagggacgcatggcgcggtgcacgagggctcgggcggtgtcggtctctggcgtccaggcgggcgtcgaggcggggtcctgggcggtgtcgggctgggcactgtag

SEQ ID NO: 9094 - DNA, 291 bp, Zea mays
  Peptide Sequence Number=SeqID_52469
atggttgagtccgagccctggggtcgagcgaggcgaagtccatcttccgaggccgagacgggggccgaaccctggggtcgggcgaggcggagcttcctatgtcgcccgaggctggacttagccgatgtcgacctcactctggcgagtggcacggcagtcggagcagggcaggcggcgctgtattcctgtcaggcgatccttgcattaaatgctcctgcgatacggtcggttggcgtggcgatctggccaaggttgcttctctgtgaagactgggcctcgggcgagccgaag

SEQ ID NO: 9095 - DNA, 1011 bp, Zea mays
  Peptide Sequence Number=SeqID_52470
atgcgagcgctccccatccaggggctcggaaggtggaaggacgcgatacatggagtcgaagacatggttgccatccaagggggtcaccctccttttaaaggcgactctccccacttgcatcctcagccggcgcggactgagtcttctccaacacgctccaaggtcctccccctacgacacgggggctgggtcccacgcgtcatgcaagctggcccaggacagaaggagccaaaaccgccgcgcgcggtgcgcgcaactgcccagcggttacaagcatttctccactatcgcccggacgagcgggtgaaagggcggaccgccacgcaggcggcatgcaaccgcaccaagggggcgcaccctttcgacttcgacgtgtccagcatggaggcccaggcccacacgtcatgtaaccggcgcgccggttactacgtgcgagaaactgcaccgccactcgcgccagtaccgcgcctcctcgactgtggaaccggtgccgcgactcgaggcgaccctgcgcatgacccgacagtgccaaccgagcacatcggtcacgggtcgatcagccgcgggagaaggcgtgacggtcgatacggccagaaatgtgccggcagtaatggcggtggcaggcgggcggaagcagcagtcaagtcggaccgggaaaggggatactccgaaagggatccttctccgcgaaggaagcgggccccgagccccactactggtcagaggctggcccccgaagggttcgacagccgcctcaaagcacgcagagcgagggatgaccctggatacgctcgatacataaccaaggctcgggctacgctcccgagcgtcacctgccctgctctgactgtcgtgccactcgccagagtgaggtcgacagcggctaagtccagccttgggcgacataggaagctccgccttgcccgaccccagggttcggcccccgtctcggcctcggaaggtggactttgcctcgcccgaccccagggctcggactcaaccacgacttag

SEQ ID NO: 9096 - DNA, 209 bp, Zea mays
  Peptide Sequence Number=SeqID_52471
atggcccgcgcccgcgcctataaagccgctcgggcgtcgaccacactcttccgcgcgcactcaaacctcaccggagctcaactcaccgccgtttgcccagagtacgtcctcgtgcctgagcaaggagctgctcaggaggtagccccagatccagcaccagagcctgcaccagaggacctgcctgtcactgctttggaaggcaagccccg

SEQ ID NO: 9097 - DNA, 537 bp, Zea mays
  Peptide Sequence Number=SeqID_52472
atggcggacctcctcggcgacccggtgtggccgcagctccacccgcggccctacaccgacacgccgtggccgggactgcagtgcgagctcgcgcccgacgacgcgcgcgtgctccgcgccacccgcctccacctgggccccgacgtcgccacctcgccctgcaggcccagggccaggctcgaccctgccttgctgggtggcctgccgcacctccagacgctctccatcttcggtgccacccgcgctgttcacgttgtcgtcctcgctcgagcagatcgtgctcaagtccaaccccggcctcaccggccccataccggcgatgttggttcttattttggaagcttgattacgttgatggagtttgtcccaccaatgtcactgtaccgcataatctatgagctctctccaccttcatcatcgagacttttctcaaacttctccggtgtacacttgggagacttgagtgatcctaaaactttcaactacctcatcccaccgatgcggatggacaagtgcatcgcgaatggacaagtgtag

SEQ ID NO: 9098 - DNA, 312 bp, Zea mays
  Peptide Sequence Number=SeqID_52473
atggggcctctgaggactagggttttggggcgagcaggggtttcacctcgagtcgttacaaccgttggtggaaccacagcgggtatcgagaagtatggttcttcaaccatcggaatcgggacatacatcctctttcctgaagccttgaactatttaaacttgtctacatcttatgatctgtcccttaaaaaaagcaccctcaataggatcctggatgagactcttattatgatcaagtacattacacttggatctttttcaattgaccttatagatgctttaaggcgccatcttaaggtcatcctaaggtga

SEQ ID NO: 9099 - DNA, 192 bp, Zea mays
  Peptide Sequence Number=SeqID_52474
atggacaacattgatgaggtgatcgacaagaggatggtggctctaagggagatcgagaaggacaagatcatagtcgccaatgcctataacaagaagcttttccaaaaggtaggtggcatgtgtttagcaccatatgtgccacctggtaaggccagatggtctggctctgtggctagacagtccgggccgtga

SEQ ID NO: 9100 - DNA, 399 bp, Zea mays
  Peptide Sequence Number=SeqID_52475
atggcgcgccccggcagccgccgccgcgccagccgcccgccgcctccggccagccccgagccgcggccggcagccactcccccgcggcccgggtccgcctcccgccgccgcgcccgccgggtccgcgtccagagcccctctctcgcggccgtccgcggggggtccgcgtccgccccgccgatgcagctgccacagccccctccggagacgccgccggttcggtggcccctggaagcgggcgctcgctctacctcccgtccgggagcgggcgctgccctgtcggtgagggagatcgccgcggcgctgtggcgaatgcagccaccgccgcggccgccggggcctgggacggcgccacggagggctcagcaggtgagcttgccgcgggatctctgccagtga

SEQ ID NO: 9101 - DNA, 2715 bp, Zea mays
  Peptide Sequence Number=SeqID_52476
atggaccgaaggtccatgacacctggtatcagctccaggttatcctcaccaccaccagccgcccatccctcaccaccaccagccgccgcgccatttgccgccgcaacgccctcccacccgccctctccaactctagatgcattcactcggctcgaagagaagtgggatcaattcgttgtgatgttccaccgctacaaggagaagacagagaaggaactccaagcagcggtgcggcttcaggcggcagcgcgagggttcctggcacgccgccaggtacagtcccttcgtggggagaagcaccttgctgtggcctccagggccaccccatggccgtcatcacatgagcaggccgtggtgcgcctgcaagccgcagtgcgcggcttccttgttaggcgggcggtgcggaagctgcacttgctgatcagctcatcgctgcaccaactcgcagcctgcgcgcccaaccaccaggtctcgtctatactttttgaatcccctgcagaagtcaagatctgggtatgcaatccccctgcacggccaaagagggtcgtctccttcattcgggcaactgccttggtgctggacagacccaacataagaacgggccggttcctccttcacctttcatccaacgtgaagtccgcagttcagctctttccttgggatccaggaggacaggaggacatagctacagttcaaatttatattttagttccacaattattttgtattttcgtcttaaataataaagcgcctagggctgctaccctagaaccaagcctgcggcagaggggtataacctcgccggagaagacagctatccccatggaccgaagcaaggaagatactctggactccatcatccacaactacaagcatggcttctcgggcttcgcagcactgcttactgaagagcaagctaagcagcttgcaggtatctggccagagtcaaggagcttcagcgacgaagggtacgggcctgtaccgtcacggtggaaaggcgtgtgccaagtcggagagggctggggcagcaacaactgcagccgcaagatcatcggcgcgcgcttctacagcgcgggcgtggccgaggaagatcttgagatcgactacctgtcgcctcggggcgccagcggccacggcacacacacggcgtccaccgcggcagggtccgtcgtggaggcggtcagcttctacggccttgccgcgggcacggcacgcggcggcgcgcccagggcccgcatcgcggtgtacaaggccttatggggccgtggggctggcacgggcaataccgccactttgctcgcggccatcgacgacgccatccacgacggggtagacgtcctgtcactctccctcgtcggcgttgagaacacattcggcgccctgcacgccgtccagaaggggatcgccgtcgtgtacgccgcggggaactctgggccggcgtcgcagacagtccggaacactgctccctgggtcctcaccgtggcggcgagccagattgatcgttcgttcccgaccactgtaacgctgggaaacaagcaacagatcgtgggtcaatccctgtactactatgggaagaactcgacgggaagcagtttcaaacctcttgtacatggaggcttatgcaccgccgactctttgaacggcacggaagtgagaggccgagttgtgctctgtgcatccgacattgaatcaccgcttgcgcctttcctagacgcgttaacaaacgtcctggacgccggggcctctggtcttatctttggtgaatacaccaagcatataatcgatgccacagctgattgtagaggcattgcatgtgttcttgtggactcgaccaccgcccttcaaatcgacagatacatgtcggatgcaagtttaagcagctctcctgtggccatgatcgaaccagcgcgcaccattactggtaaggaggcactggccccaaccatcgcagaactttcctcaagaggtccatccatcgagtaccctgaagtaatcaagcctgacatcgcagcacctggagccagcatcttagcagcggtgaaagatgcatatggatttaaatcagggacatcgatggcaacaccacacgtgtcaggcatcgtagcactgctgaaagcattgcacccaaattggtccccggctgcactgaaatcagccatcatgacaacagcatctgtaactgatgaacgtggaatgccaatactggcacagggattgcccagaaagatcgctgacccgttcgactacggagcagggcacataaacccgaacagggcagctgatcctggtctcatttacgacattgaacctaatgactacaacaagttcttcaggtgcagcttcaggaaacccatacagcgatgcaacgcgacaacgttgcctgggtatcacttgaacctgccatccatctccattccagatctgaggcggccgatcattgtatcgagaacagtcacaaatgtaggcgaggctgatgcagtctaccacgctgcaatagagagcccagctggagtcaagatcgatgttgagccgtctgttcttgtgttcaacgcgacaaacaaagttgccacgtttcaggtgaacttatcgcctctctggaggttacaaggggactacacgtttggtagccttacttggtacaacggcccaaagacggtgcggattccaatagcagtccgaatgacagtttatgatttctatgcagatgttgcataa

SEQ ID NO: 9102 - DNA, 546 bp, Zea mays
  Peptide Sequence Number=SeqID_52477
atgggggaagggggtgcggagggatctccgctggctggacaaaaccgttcttcaccgccgcacctgtgcaagagcccagggctgctgtcttcgcatgctgcgcgttgctacttgcctggccgtgtctaccgtagacgcacttatcctcccctgccagtaccgggacagtgcccgccatcaccggccacactaaacgagacacctacagaggccttgacgctggagacaaatcagactgcctccggcactgaagctgactctatggacgacgcgcctaatgggccggggctggaagaggcgccaggccttgtggacgctgctgctaggcttgagccggaagggctgcccccttctcttttggcgtccttcatcaacaacttcacccgcccagcagcccgacccctgctccaccacaccagcaagccccgtcaagcccgaagaagaggggaaggcatggggtcaggccggtccgcagaagcaagcggctcacggcggttgtctggccacgcggcaacatacaagagtgcactcgccaagtcctcatga

SEQ ID NO: 9103 - DNA, 729 bp, Zea mays
  Peptide Sequence Number=SeqID_52478
atggcgcctcctgttgacgtggctggtctgcgccctaggttgggcgatgtggaagctcctccgaagccgaggtcgagtctgtcttccgtggccgaggtcgggtccgagccccagcccgtgtccgagccctgggtcgggcggagcggagttcgccgtcttccgggacttagcccgtgtccgagccctaggtcgggcggagcggagttcgccgtcttccgggcggcgctatccttctgtcaggccggtcagtggagcggcgaagtgactgcggtcacttcggctctgccggctgggggggcgcgcgtcaggataaagggcctcgggcgagccgggaatatgttcgccgctgaaggggggcctcgggcgagacggaaatcctccgggctttgtgctgatgggggttaccagctgagaattaggagccttgagggtcctttttttggtgacaaggaccagcaaaaatcaacgtaccgtcgtggtgtccctgaccccaagatcaggatctatgatgttgggacgaagaagggagtggatgacttccccttctgcgttcacatggaaagcaatgctaatcacgctgaagaagccctccgtcatgccaagtttaagttccctggccgacaaaagatcatccgcagcaggaagtggggtttcaccaagttcgtgcgtgctgagtatcttaagtacaagagcgagggtaggattgcacctgatggtgtcaatgctacg

SEQ ID NO: 9104 - DNA, 806 bp, Zea mays
  Peptide Sequence Number=SeqID_52479
atgcaggcagcatgcaactgcaccataggggcgcaccctttcgacttcgacgcgtccagcatggaggcccaggcccacacgtcatgcgggcggaagcagcagtcaaatcgtctggaggctcacgtcccctcctggggcagcgagagagccctctcccacggcgtgaagatgacgcacccgtgttccgttcctcgaatggctcgcgcaacggctgccccgcgaaccactcgtcccgtcgcattaactccgcggcagggcaggcgacacctttggcaggcgaaggaccgagaaaggggatactctgaaagggatccttctctgcgaaggaagcgggcaccgcgcccactactgatcaggggttcgaaggctggccccctcggaagggttcgacagccaccccagagcactcgggctctgcgcccaccactgatcagaggttcgaaggctggcccctcggaagggttcgacagccgcctcagagcactcgggctccgcgcccactacgggtcagaggttcgaaggctggcccctcggaagggttcgacagccgcctcaggccactcgggctccacgcccactactgatcaggggttcgaaggctggccccctgaagggttcgacagccgcctcagaacacgcagagcgatggatgactctgggtatgtccgatacatggccgaggctcgggctacgctcccgagaggctcgggggctgctctcgcaaacccggctccggccaaaccgttgacagcgtcaacataccagcccgagaactcggaacctgaccatgcacccgggctatgcaa

SEQ ID NO: 9105 - DNA, 930 bp, Zea mays
  Peptide Sequence Number=SeqID_52480
atgcattgcgcccttcctccttccgagcccccagatggggagcgcccatgttgctttcgtcccgttgtgggaggagcgcaacctcgtggaggttggcacctttcggccatcgctcggcttcaaggattttcatcaggcagcccggctgcatccccttatcaatggtcatccaagacggtgaccaccagttcgatggtggggagaagcaagctgggctgcggcctctgccccgccctcagcttcaaggatcttcatcatccttgctggggcggggggcgagctgagccggagctctacctcccgtacgggccggcgggccacctcctccttcagcattcaggggagagggcgctcaccggcctagcggagggggcggacttcgacaacgcggggccgatcggccacaagcgtcgtcagctccagcatgcccggttcgctggctcagctggctctggcgcagcttccggtgccacctcccaccgctgggcggagtgtggctatttgcccgccgtacgggcggctgttgcgccgccacgacgcctctgcgcggaggtcggtgctcacccgtccgggaggactcaagtggggatctaccgtgggcaggtggacaccgccgttggtgctgaggtggtggccgccggagaaggcctcgccgccgacgagatcgtcggcgccatctgcgctccgggcctccggctctttggctttgatagcttgtcctcgcccctcgagtggggacgtgggcgaggaccttgccacagcagcgtctgccctgaggtcatcgctgctgctgtttggccgcccggagcggaggtcgttgtcgctgctgcagtggtcggtgacgagccacccggagcttgtcgtcccgcaggccctccgatgtgggggttgtttgtacctgcggggttggaaccggagttccgtttgtaa

SEQ ID NO: 9106 - DNA, 447 bp, Zea mays
  Peptide Sequence Number=SeqID_52481
atggcgcctcgcgtgctccatgacgacggcgactctcagcccccttacggaagcaaggagatgtcccgggttcgaagcagcctctccgcattcgcgggagaaggtttgccttggtttatcccttccccagatccgcctccggcgctggaggcaaatgctgaggactccagtgctggtgctggatcaaaggactatgtgcacgtgcgtattcagcagcgcaacggaaggaagagtctgacaactgttcagggcttgaagaaagagtacagctacaacaagatcctcaaggatctcaaaaaagagttctgctgcaatggtactgtagtccaggatccagagctaggccaggtcattcaactgcaaggtgatcagcgtaaaaatgtcgctacttttctagtccaggccggaatcgtgaaaaaagatagcatcaagattcacggattttag

SEQ ID NO: 9107 - DNA, 1242 bp, Zea mays
  Peptide Sequence Number=SeqID_52482
atggctcgtcttagacacactgcacgtaagtcggtgattcctttcctgccgtctcgacttgcggagcgtcctctgcaccgcaccgtgtccggacagtcgagtcacctggagaggctgcaccaccgcctgcgtgaggagcaggaacgccggcgccagcacggagagcagcagggctcttcctcctcaccccagcaggaggtggagaccgtgaggccccgttcctctgtggcccagctggaggcgccccttgttccaccgcgggacgtcccggctgttggaggagctactggaggagaccccgacgacgacgactcagcccacagcacggagtcttctgagccgcaggaggcggaaggatgggtcgcccgacccatcacccgtgacgccgctcgtggttgtcacttccacgacgcactcgacaccttgctgcgccaggctttcgaccggcacacctggtcgatcgagtatcgttgtgtggtctaccagcacagtcgcgggaggtacccggaccgctgggaggctacctgcctagttcgccgtccggaggatgacctccggggtgcggaggctgtttcggagcactattccatctccgagagggacactgcagaggcggctatgcaggatgcagcacgacgtgcactctctcagtactgttctttgttcggtggcgtggccgacggtcttaaccttcggtactacccccgccgccctactggcagcacagagagtgtggttgtttcacctgttggtgaggctaaccctaggttgagcagcacagtcaacctagtcgcagtgcttaacacggagctggatcactctctggacgagctaagcagggctcgaacggagattgcggagttgcgtgctgagttggcagagcgccatcaccaggagggtggttctcccgcacctgttgggactcagcacccataccgctcaccgccacgtggtcaccacacttatggttcccctattgtaagatcaatgctgatgtatgaatgtcttccacagatgtctgacaacaggcgccgatgcaacaggcgtgctcagctggagcagcatgaccagcaggaggaaaatcagaggcagcctcccccgccacccccgatgtcagtggagcagatgttcttgatgcagacccaggcagtgcaggccattggacagactctggcagccatgcagcaggctcaacagcagccccaaccccagttgcaagtgcagatgccccagatgccatga

SEQ ID NO: 9108 - DNA, 947 bp, Zea mays
  Peptide Sequence Number=SeqID_52483
acaatgtcttcatcttgaggatctttggcgaagaaggaaaccccaacattgcttataaacaaaatctttgccttgaggaccttcgacggagaagaagataccccaaaaaaggtttctcccgattcaatacctatctctcggaattgctcaccgaaggtcggagcggttccaactccgacgacaactccgacaagcaattactcccaatccatgcatcgtctgcgaaaaccgagggtaccgctacgttcgtctcgtcgagggcttcatctgggcatgttcggttcatggatcggacctccgaaactccatcaatcgacggtgtcctcgtcgacttcggcgagggtcttcttccccgggcttcactctccctcccctcacctcccccagcggcggcggccctcccccttgttttcccctatcacgcagccccttctcacagcgccggcgtggagcccgtggcggcccaagccagcctcccttgccgcgcaccctgcccgtgcgtgttgggggccttcctcctccgaaggccggacttcaccggagacccgcaatcgacctcaccggacttcggtctttcgccgccgcgcgtggacagagctaaacggccggactcctcgccgccgacgagcatccccgcctgcgcacgtggactggccaactccgaccatccccgacggcgacccgcacaccgttgtgatccccgagacctcccctacgtcctcgaccacttcaccggagcaatctcgccgccggagaaggacctcgggataggatttgaagaacccgaggggttttctgtaacgtcagtgacccatgtgaataagtacgtgctcatccccgagcaaggacctgtccaagaggaggagcaggagcaggcttccgaggctgctattgaggatctccccgcagccccagcaattgaaggcaagccccggttttatgcataa

SEQ ID NO: 9109 - DNA, 291 bp, Zea mays
  Peptide Sequence Number=SeqID_52484
atggcatcattatggaggatagtctttaagctgaagatctcctgggagaagaaggtgtttttgcttagaggaccttcggcggagaagaaggccctcaacagagctaaagcaaagattgtaatctacaagggagaaaatgcaatcaagggcagggtaggtaaacaccattctgaaatcgagatggcaaagatgataattcaaaaggtacatgataagcatcaaggtaaagatcgagggatgataagggtcaaggtgataacgaacaaacacacaacaaaggatgtattttag

SEQ ID NO: 9110 - DNA, 453 bp, Zea mays
  Peptide Sequence Number=SeqID_52485
atggctctgcacgtactgacaaccttctgcggctttcaccccttggagctatcaacccaccccattggcttgttccccgctaaaaaggatgatgacccgatatggaaggatcgggttgagcacaccaaggacgtgtgggctctctaccttggacataccgctcacgtgacgcagatggccactcaaatccaagagttcgaagatcaggtggaggctagggagaacactatcgaggttctggaagatcagctccaaccacccagcaacaacttgaggaagccaaccagcatttgtctgcatcatcaagagattgaggacatggaggtagaaggggacgatgaggatgtagacatcgagggaggagatgagccggagcctgcctctagcttagacactgttggctcaagaagactaccttcccccgagtctagcgttaccttgtttgctcattag

SEQ ID NO: 9111 - DNA, 90 bp, Zea mays
  Peptide Sequence Number=SeqID_52486
atgacccaaatagagtcgtggtgccaggaggtattgggcaatcccacaatgaaatccatgcaaatatcctcccatttgcaagatggtatg

SEQ ID NO: 9112 - DNA, 261 bp, Zea mays
  Peptide Sequence Number=SeqID_52487
atggctcttaacgagtccgtcaagaactgcaaggctcttgccgaggcggctgagcagaaggaggccgaccgcgtggacatgtccgaggctatctcggctttctgccaggcctttagcctcaacggcgtccccccggactctgcggggcgctgcaccacggcgtcaggcgggccttcgctgtgctcgcttcccactacgacgtggatctggagcgggtcagcgaggggtattgcttacccgacgaagaggaggctgccttag

SEQ ID NO: 9113 - DNA, 501 bp, Zea mays
  Peptide Sequence Number=SeqID_52488
atggcctcagggcgaacgctaccgctgaaaggccctcgttcacgtcccctcgcgggggacgagaaccagccattaaagccaaagagccataggtccggagcgcaggtggcactgatggtctcgtcggcagaggcaaccgctgcggtgggaagcctcaccagcggcggccaccacttcagcaccggcgacagcagccacctacacacggcacgaccgtcgcccgggtggaggacggacatctacaccctgaccaggcagcagcggttcaccttcccctgcatagctggaggatgtctcctccgcagggctagaggatgcccttctcccccgaatgctggaggaagaagcgggtcaccggcccacgcgggaggcaggacccaactcggcgtgccctcctcctcagcccggatgatgaacatccttgaagctgagggtggggaagatgctgcagcccggcttgcttctccccaccacaaggctggtgatcatccctacggatga

SEQ ID NO: 9114 - DNA, 924 bp, Zea mays
  Peptide Sequence Number=SeqID_52489
atgggggaagcagttaacaaagaagatgaacagggcgccgtgggcccagctaggcagttcggccgggcgagtgaccccagccagcggcggcggcggcgctggggttgggcgagcgcgcctacacggggctgcagtgtacgcgcgaggtgggccggggcgtgcgatgggcctcaggcgcgcggcgcgctgggcaagcgcggtggtgggccgctggggaggaaaggcgcggtgttacaccgccctggcctcggacggcggcgcaggcggaaggatctccacctcgaaggtggacaccagcaccgcgcttgggcccgcggcggccgcgtcaagcctctgaacttcggccagggcggcttcgtcttcgtcgagaaggcaatacccctcgttgacccactccagatccacatcatagtgggaagcgagcacgacgaaggcccgccaaacgccgtgatgcagcgcctcgcggagtctaccgcgcgcgtggtcgcccaaggcctgcaggtgactctgaggggagcttcccgaagggacgtcgtcaaggccaaagatctagcaaaaggccgagatagcctcgaacatggccgcacggtcggcctccttctgctcagccgcctgggcaagtgccttggcggacttgctgagggcaaactcgagctctgcaaacagccaaagcagaagtctttaaacgcaagttgtagaatgaagctgaatcaaaatctcaaaatagccaagacataccttccgcccggatacgctactccgaggctgcggcttgggctaactgagcagacccgatggccacggccaggtccaccgcaagggctccagcccgagcggacgcctcgactagctggcctccaagggcctcagcccggctttcagcctcggcggcccggccccgaaattgatcccgctcaccgatga

SEQ ID NO: 9115 - DNA, 174 bp, Zea mays
  Peptide Sequence Number=SeqID_52490
atgtcggccgatgagcccgaagatggatggactaagcagatgtcagaacaaaagttgatcgtcaactggccttcatttaacaacactaacgtagtgttatcccaggaacgttttacccgtcttgcagacattacagaacatcggagatatagaaatgcggaagcgattacataa

SEQ ID NO: 9116 - DNA, 369 bp, Zea mays
  Peptide Sequence Number=SeqID_52491
atgaacaagaacacaagagacacaagatttatcccgaggttcggtcacaccaccaaggtgccctacttcctcgttgaggcgcccacaaagagccgggtctctttcaaccctaatcctccctttgccgaccacaaagaagagcaagagggatttagagatgaagcaccaaaatcgcagctcttcaatctcactcaaagatttctctccaaagatttgaaatgggagaggcaagaggtgtgtgagagagagtgggaggtgtttctcaggttagaaatggagtccaagtcgtgctcttctgtggggaagagtgtgggaggtgtatataaaggtgctcccaaaagctggtggccgttggggaaatctgactga

SEQ ID NO: 9117 - DNA, 195 bp, Zea mays
  Peptide Sequence Number=SeqID_52492
atgtccggtgcacaccggacagtccggtgccccctcccgaccgttggctcggccacgtgtcgcgcgccgatcgcgcagccgaccgttggcccggccgaccgttggctcaccggacagtccggtgcacaccggacggtccggttgtttcaaatggatgtgaagagcactttcctcaacgggccaatcaaggagaag

SEQ ID NO: 9118 - DNA, 678 bp, Zea mays
  Peptide Sequence Number=SeqID_52493
atggcgctttccccccttcctccttgtggaaaggtgacgaaggggcatatgataaaagtcgagtcagtccttgatcgtcctctcgctccgtgcagaggctcgggggctgctctcgcaaacccggctacggccaaaccgttgacagcgtcaacaaaccagcctgaaaactcggaacccgaccaagcacccgggctacgatcaggtcgcatgagggaaaaccagatcgaccgtggcatcacgaaaggcattaagacctcagaggagtcaaaccacgcctctgaggcctcgggggctacaacaggcgagtgcgctcgcgcgcacccaccggaacaaagtgtaaccgagaagggccggtccccttgcaaaaaagtgcggtcaaggcttcgtctactcaagggacgcgatctcgcctcgcccgagcccagcctcgagcgggaacagtatcccaggcgaattcacgcctcgcccgagggcctcctcaagcaacgggcgcaccctcaacttgcccgaagcccagctcgggcaggcttcgttgtgaagcaaccttggccaaatcgcctcaccaaccgaccgtatcgcaggcgcattcaatgcgaggatcgcctgacaccttatcccgacacacacgcctcagtcggcaaggtcgaagtgaccgcagtcacttcacccttccactga

SEQ ID NO: 9119 - DNA, 516 bp, Zea mays
  Peptide Sequence Number=SeqID_52494
atgaaggggaggtcgcggggatcacaacggtgtgcggaacgccgtcggagatggccggagtcggtcggtccacgcgcgcaggcggggatgctcgtcggcggcgaggagaccggcctgggaggtccacgggatgccagagaagatatgagcgaaaggaatcgggcggagactcactggatagctcggtccacgcgcggcggcggaagaccgaagtccggtgaggtcgatctcgggcctccggtgaagtccggtcgggtccgagggcttggcaagcttcacgggctactggcggagctagctgaagcactggctgggcttgagggtggctggagcgggctggccacggcggccgaagctctggcggcaatggcgggcggaattaagctcgccggagctaaggggaggtggctggccggagagggtgagtgcggggcaaagagagagatatggagccaggaaatctggtctgtctccctgcccaaacccgaggcaaatcccaggttttgtcgtgtctag

SEQ ID NO: 9120 - DNA, 344 bp, Zea mays
  Peptide Sequence Number=SeqID_52495
gcttgcgcagaggagggaggaagggcgagaagcagccggggagggagcttgtccgcgcctgggagaggaaggggcgccatggggagctgctgcgtcgccaggacatggacctcgccgaggtcgatccaagaagctccagcgcgcagggtagaaaggctccctgttgcagccgctttccaggaggaggagcagggaggacgctcgacctgcaacagaggggcgccgcgtcgggtaccggcagcttgagctcagccatgggaaaggggcgtccgcaccatggctggaaatggagctgccgtggggaagaagagggtggcgtgggggagatggctgatggcggctag

SEQ ID NO: 9121 - DNA, 831 bp, Zea mays
  Peptide Sequence Number=SeqID_52496
atgactctgggtacgtccgatacatggccgaggctcgggctacgctcccgaggtaccctaggacatttccgagaccaacaggagcgattttgtaacggaatcccatcagagggaggcatcgagccctcggaccctatcgaatgggaccgggtccggcaaaacacctgcaggtcaaggctttgtctactcaagggacgcgatctcgcctcgcccgagcccagcctcgggcgggaacagtatcctaagcgaattcacgcctcgcccgagggcctcctcaagcaacgggcgcaccctcgacttgcccgaagcccagctcgggcaggcttcgttgtgaagcaaccttggccaaatcgcctcaccaaccgaccgtatcgcaggcgcattcaatgcgaggatcgcctgacaccttatcctgacacacgcgcctcagtcggcaagcctcaggcgcaacaggaagctccgcctcgcccgaccttaggcctcggcctcaccctcggcctcagaaggtggtctccgcctcgcccgaccccagggctcggcccccgcctcggcctcggaaggtggtctccgcctcgcccgaccccagggctcggcctcaacctcgacctcagaaggtggtctccgcctcgcccgaccccagggctcggcctcgacctcgacctcgggaggaatcgcgtcctcacccgaccttggcctcaagaggagtctccgcctcgcccaaccttgggctcagaccgaccgtgccacaggggatacgtcattaccctaccccttgctagctcaggctacgggggaacaagaccgccgtctcatccaggctcgccccggtaa

SEQ ID NO: 9122 - DNA, 279 bp, Zea mays
  Peptide Sequence Number=SeqID_52497
atggggctgatcagtgggccacagatgtcggagctggcggtgtgcgcgagagcgaggtcccggggactggtcagagggtcccgcacgacagtcgcaggatttctctccactgggccacacggggtgggaaaaggagaatgggccaaaatgagtagtggccggcccagctatggtgggtacaagtgcggtcactgcacggcggcagccggggtcagtggagcattgtatgccaaggcggtgagccctggccgtgaacggggaatcgaaggggacagttga

SEQ ID NO: 9123 - DNA, 471 bp, Zea mays
  Peptide Sequence Number=SeqID_52498
atggctcacctaatagctcggtctatgcgtggtggcgggtggccgaagttcggcgacggtgatctcgctgttccggtgaggcagggcttcaatccttgcttggagaagcttcacggcttcacggggaagctgcccagaggctcgggtgaggctagggttctctggaaatggttggccgtggtggccggcgctcgggtggctcgggcgggcggcgcagagctcgccggagctaaggacggggtctggtcagcggggctgagcgtggagggcaatgaaaaggatacccactcctgcccctgcaatctcaacgagctgtcaaatgcgaggtcggaattctatgtcaagagcttcgagttcacatgcccatttggttgttcttccaataacttccttgttgtggagtatatctcctattgggaatcccggcttcttgagcttctgtggtccactggaatttatccaccttcttga

SEQ ID NO: 9124 - DNA, 465 bp, Zea mays
  Peptide Sequence Number=SeqID_52499
atgattaagcttcggctatggctaaatttttggcagcaaaatagtgcaatagcaatgaatgttgtgcatttgagaacaagttcccaacagaggcagaaaagcgcaacgaacaatcacccaacacctctgccctcaaaggaggacgagaagaagcacgccactccacctgctcctttcttccctgacgtcctcttcattcaggggagactggagtcatcgcccatccttgacgatgaacccaccgtgttggggaagaacctccccagcgcgatgctcggcgacggagaaacagacgtcgaaacatgcggcgacatcatgaagccaaagaacgggatccggcacaacccatctctaaggacgaagcctcggagatgggggaaacccatgatgaaagagcacattgagaacgacgcatctctcgccgccgcgactgccgtcaagctcaggaacgcgagcgggggctaa

SEQ ID NO: 9125 - DNA, 840 bp, Zea mays
  Peptide Sequence Number=SeqID_52500
atgcgagggaaggcgaactgctgctgcctggccagggtgcagcattccgtcctacgtccgggcgtctgtggccggctgtaccttggggtcgcacaacacgtcgtacgccgcgagggcggtactcgtgttctgggacagtctcgttctcgttcttgtggcaagaacgggagtgaggacctaccggtgcgctttggggcggccgccgcttgctggtgcggtgctagtgggcaggtggccgctgtcatcggtgctgaggtggtggtggcagtcggagaaggtttctccgccgacgacaccatcagtgccacctgcgctccgggcctccggctctttggctttaatggctggttctcgtcccccgcgaggggacgcgaacgagggccatccagcggtagcgttcgccctggggccattgctgctgttgtcttgccgtccgagacggaggtcgttgcaacgttgttggtgcagcggtcgccggcgagccacccggagtttgtcgtcccgcaggccctccgatgtggaggttcttcatacccgcgagagtggaaccggagttccgtttgtaatggcaccttgagtgctggtgtgacgagtgaggtatccgtatctcagaggcgtaggagtccctcggcttggttggccttgccgctcaaggcttcccttgctcagttcgagaaccttcggctgctctgcgatgagttggagccggaggctgcggtgtcagcgtggacagaggcggagtcagctcgaaaaggggcttcgtcagcccaggagcaggtggcttcccaggccgaggaggtgcagcagcggcggctggagcttggccaggtcgtccgctag

SEQ ID NO: 9126 - DNA, 201 bp, Zea mays
  Peptide Sequence Number=SeqID_52501
atgcggagttcgggtgggagggatgaatatgacagcgaggtcccacatgtcaacgagctgaagacgcatgccaaggggagagtgaggctgggctcatgggacccgcctgtcggcgcgggatgcccaagcctgcagtatggggccgcgcaagacagaaaggtgagatatcaaattcaaattcaaattcaaatccctgtttaa

SEQ ID NO: 9127 - DNA, 441 bp, Zea mays
  Peptide Sequence Number=SeqID_52502
atggcggtagcaggcgggcgggcgcagcagtcacgtcgtcagccaggctcacgtctcatcctggggcagcaagagagcctcctcccacggcgtgaagacgccaccccgccaaccactcgccccgtcgcattaactccgcggcgggacacgcgacgcctctggcgggagaagcgcgcgacgcttcaccttcgccgtaataaccgcgtcaaaaaaaagggaccgggaaagggggataccccgaaaaggatccttttccgcgaaggaatcgggctccgagcccccctactgatcaggggttcgaagactggccctccgaagggttcaacagtcgcctcagatcgcgtgggcccgacacccactactggtcaggggttcgaaggccagccccccgaagggctccatggccgcctcaggctactcgggctccgcgcccactactga

SEQ ID NO: 9128 - DNA, 480 bp, Zea mays
  Peptide Sequence Number=SeqID_52503
atggcacgtgtaaatgcacgtcggatcacacaagagtttagacagatctggggcactagaatgcgtaacaccctacttcctattgaggccgagtatttgagtatctctgacaaacaacccttgacatgtataattctgctaattgggctcccgagtgctaaaggttcaacacaaaccaataaaaagattcaagttagggttcaaaagaaaggagcaaaagaaaccgaagagaaccctggtctggcgcaccggactgtccggtgcccagggccgtacgacttcaaacttaccaccttcgggtttctggagagccgctccgctataattcaccggactgtccgtgcgcggacagttcgcgcggagtcagagcagcgccagaatgcgtaccggacagtgaacaagacttgtccggtgtggcaccagactgtccggtgccccaagatgtcagagctccaacagtcgaaaccgtcagaactctaa

SEQ ID NO: 9129 - DNA, 414 bp, Zea mays
  Peptide Sequence Number=SeqID_52504
atgggagacttgtggaccaacataagggctgatctcgcaaagatgcaagccacgttccaaaaggttgagcaagggctgctgcaaatcaaggtagcagtgcaacatgagcaacaccagctggcattgtccgcacggctccagacgtcggcggctatgggcatacaagctgctgcccgtggcttccttgcacgacggagagtgcgggagatgcgccgacagatgctcgaggcagccttggtgacagttgacctcggcacacgggggcgcgacctcgccctgtcggacggccatcaacagcgactccgggccgctatctccaagtgtgagcaaggtgcccgtccatgtgctcctctttcgtctagatggcgttcatgggatccaggtggctacacacgtgcaagtccaatgcgctaa

SEQ ID NO: 9130 - DNA, 1701 bp, Zea mays
  Peptide Sequence Number=SeqID_52505
atgtccctcgcgggtgcgggtgcggccgcgttgcggaagcccgccacgtggcggcgcccgggcggccgcggggtggcgcggaggcgcgtcgcggtcgccgccctgctcctcgcgctcgcctacgccggggggctgctcatgttcctgctcgacgagaggctatccggcggctccgtgggcggggctgcggcgggaggcctgggtccgatggtgacggtggcttcctccgtccgccgccgccgccccctccctagccccgcggacgcgccccctcatgctcagcccgggtcggtgtaccgcagccacctcgtgttcgagcgtctcttgccggccatgcgcgacgacgccacgctcgcctcctccctctccgcctcggcctcgtggcgccgcaccatgctaatgacatcacattaccaaaattctggggacccatggatgccttgtgtcaacggtaggctgactcgatcagagttgccaccctcaaatggctatctcatgatagaagcaaatggcggtctaaatcaacaacggctttctgtctgtgatgctgttgctgtggccagcttgcttaatgcaactcttgtgatcccaacatttcatctgaacagtgtctggcgtgatcctagcaaatttggtgatatatttgacgaagatcatttcattgagacactcaaagaacatgtaagagttgtgaagaaacttcctgaagatgttttgctgcgcttcaatcataatatcagtagcataccaaatatgagaactaaagcctactcatctccaaaccactatgtgcaaaatgttcttccaaaactgcttgagttaggggctgtacgcatagccccattctcaaacagattagcccagtcagttccattgaacatccaggccttgaggtgtttggtaaactaccatgcattaagatttgctgaaccaataagaattctatctgatgaattggttggtcgaatgacaaaaaagagtttgttgactggtgggaagtatgtctcggtgcatcttcgcttcgaagaggtttcaagtctcttatgcattcacaattatgtcatttttccatcctacttataccgtctagcaagtcaggttggcatgatgctaaggggcatgggattcgataatacaacctccctatatgttgcttcgggtaaaatatacaactctgaaaaatatatggctcctcttcgccagatgttccctcttttaacgacaaaggattctcttgctttgcctgaagaacttgctcaattcaaggggcattcgtctcagctagcagcgttagattacactgtctgcgtgcacagtgaagtgtttgtgacaactcaaggggggaacttccctcactttctgatggggcacaggcgctatatgtttgggggtaatgcaaagacaataaaaccagacaaacggaagctggtcttatcttttgatgatccaaatatcagatgggatcagttcaagcagaacatgcaggaaatactgcagcatagtgacatgaggagcattgcattgagaaaaccaaacgattcagtatatacattcccaatgcctgattgcatgtggcccatggctgctgctaccgcaacccctccatgggcctccttaggccctgacactacacctctcctggacaagcagctcgccctcgagctgcagcatgacggatgctcaaagaccgagtctacttga

SEQ ID NO: 9131 - DNA, 558 bp, Zea mays
  Peptide Sequence Number=SeqID_52506
atgcagtataatggatcaagcagtctcattagctgcgagaagcagacgattcgaatcgagtttttatccttgcaagtaaccgcacttgtacccaccataactggaatgggagaccacgtctcaagtcacgtgaggggtaaagtccactgccaggttcaatcagtaaccgcggaaaggaataaggcggcgcggcttaccggcggtgagagaggtccggcgaggggcggggttggcttcgggaggtcctggcggtcacagcgagtgaatcggaaaatggcgcagagactcacccggtccacgtgcgccggcggggttccgaactccggcgagcgtgattacgcctttccggtggcggggatccttggttcaagctctggcaagcttcacggcctcctagggaagctacctaggggcttggatcgagcggaggagggcgggaaatggttcggccactgtggttgtcctcgggcgctctggcgggtcgcggagaggtcgccggagctatgggcgagcttcggggagtttggcgcgggacagaggatgcaacggggaagatag

SEQ ID NO: 9132 - DNA, 618 bp, Zea mays
  Peptide Sequence Number=SeqID_52507
atgacttctcacggatcctcggatgaagggaatgcacagtcccacactgacgggcttgcacgagagggtttcccccgtatcttgtgggaggtccttcaggaagctggttacacgacgcctccccagtacgcggtgcagctgttcgagaagcaccgagtgccccgctgtcagactgctcacttgacggtgcggtgcatgaatgccctgtatcgtctgcaagtgatgcgtggagaggcaatgtcccatctgatggcattgttggaggcgaccaagatcactttggataacagagaggaacttgtggttgacttgtccactgagatggtggaaaaagacctacaagtggaacaattgtcaaatgagatccaagagcttgaggagctagtgggaacgagggagaacaccatcgaggttctcgaggatcagcttatcaacacccagcagcaactcgcggaggctaaccagcatctggatttgcaccaccagaagatccaggacatggaggccaatgaggatgtcgacatcgagggaggagaggagcctgcctccagcttggacactgctggctcagggagaccactttcccccgagtcaagcgttgcctcgtttgctcactag

SEQ ID NO: 9133 - DNA, 147 bp, Zea mays
  Peptide Sequence Number=SeqID_52508
atggcggtaccttcggactcggatcagaaccacagtgtgagaagcacaaagaatacgaaggttgacgcagagccgaagctatgcgcaagggagcttcggcatgatagcagaaaagggaaccgacttaaaagagaaaaggctatttag

SEQ ID NO: 9134 - DNA, 516 bp, Zea mays
  Peptide Sequence Number=SeqID_52509
atggcgtacgacgcgcaagcatgggcgagctccggtgaacagcggatggacgcggactgtccggtgacgagctgggcacggcgtgggcaggggtttgaaagcaggtggggctccgtcgaggtgctgcgcggacggtccggcgacgaacttcacgacggcgagggagagagaatcgagagaagggagcgagagagggagttcgggggcgctcgggcttgcgtctggccaagcggcgtgcagtgcaggggcgcgggtctcggctgcacggcactcggccgggtgcgcaggcgaaggggcgcatggtcgcgcgtcttctggcgtcggtcggagctcctgggcgcgcacggcgcggtcggatgcctaggcgcgggtcttggcgtcgcggtagtcgggcggggcgcggttggggtggcgttgggcgcagggcagccaagccggcctcctggcggcgcctgctgggaagaaagggaggagcggaatgagaggagagcgagggtggggcccacacgcgagtga

SEQ ID NO: 9135 - DNA, 255 bp, Zea mays
  Peptide Sequence Number=SeqID_52510
atggcgaagctaaccgagtggctggcgcggcttggaagtgactggagtgggctggccacggtggccgaggctctagtggcaatggcgggcggaaaagagctcgccgaagctaaggaggggcgtctggctggcgaagatgggcacgggagatttggagccctgaaatctggtctgtctctctgcttaaacccgaggcaaatccagggttttgtcgtgtctagggctcgcatcccaatgccatattctggcatgtga

SEQ ID NO: 9136 - DNA, 618 bp, Zea mays
  Peptide Sequence Number=SeqID_52511
atggcctcccccggactccagacaccgagggctatcggcggctgctcactcggacagctaatcatcttctacctctcgctcatcctccgagcgatctacgacacgccatcaatagttggtgggacgtgtgaagctccatcaattcttcacacgaacggcaacatgagaacgagatccggtgccgagaagagtatgatcgggatcgtggcatccctgcacgaagtcaggccactagggttgagtcagcaacaacttcaattggcggcacaacccagggacggtcgaggtagcacagcggcaactcccctccctaggaccgacaccacaatcgtcgacaggaggacacatgtggagtatctgcgctcactccgtgccttaaggccattcagtggcccccaaacttcaaagtctccaacgtcgacaaacaagatgcactgcaatggctacgacacctgccccgacactgcatcgatgattgaagcagcagtgatcgaggacttctaccgaggatctaatgactcggccttcgtccgagccatactacaaaaggcgccgatcacttccgaacaactgttgagggaggcggacctctacatcaccgccgatgagcgtgcctag

SEQ ID NO: 9137 - DNA, 900 bp, Zea mays
  Peptide Sequence Number=SeqID_52512
atgaggaccgacgcttgcctcactcacctcacgctcctgcttctcgtctccgtgcccgtgctgcacagccacgcgtcacagcaggctcaactcgagaaattcatcttgtcacggcaaggcagagctgctagcgggagtagcaagtccagcgcacacgagcctggcgtcggagtgacgagtagcagcctcctccagcgcctccaggcacggtcgtacctgggctccgagtccgaccagagcgccctgaaggcggccgacaagatcgcggcgctgccggggcagccggacgacggcgtcggcttcgaccagtacgccgggtacgtgaccgtcgacgaggagaagggccgcgcgctcttctactacctggtggaggcgccgccggaggatgcgccgtcgaagccgctcctgctctggctcaacggagggcctgggtgctcgtcgtttgggtacggagccatgctagagctgggcccgttccgcgtgaacaacgacaacacaacactcagagtaaacgagtacgcctggaacaaaggtacacacgctgttggcaatccatacctggaccggtacaagaaccagaaggggcggttcgagtacctgtggaaccacggggtgctctccgacgaggacatggccaacataacccaccactgcagtttcagcccttcagatgataaactctgctcggatttatacgggtggtacgatttcggccccattgatccctacgacatctacgctcccatttgcgtcgacgaacctgacggctcatacaactccagcagctacctaccggggtacaatgcgtgtgactactatcctaccgtgacctatctcaatgaccctgtggtgcaagaggcctttcacgccagaaagacagagtggagtggctgctcgtga

SEQ ID NO: 9138 - DNA, 1326 bp, Zea mays
  Peptide Sequence Number=SeqID_52513
atgccatcctcttcttcttccgccgacgccacgccgccggccgccgcctcgtctgaggagacgttgagtaacgtgatggtggaggagttgcgcgccggcgactctgttgaatttggtgtgtcacggatgacgtcagcccgtattgaagatatgcagcggttgggctactttggcggcggagtcgctcgtgctccggggacggaggaagtccccgagccggagggcgagttggttgttttcgaggcgttcttcgtcgccggactccgcttgcctgcgcaccgggtcttcgaattaaatcaactgccgtacgacggctatcctggtcaagacgaagcggaccgccgtgggaagaaaccggcggtggagactggaggcgaccctgcgctggtggccgccgcctcctcgaagaagagaaaattagtgatggacaaggatcgccaaggggcggcgcgaaaacgccaggcgactgtgagggttcacgaagcccggccgaaaaagcagcggggaacggcgaaggctgaggcctccggcggaggcaagccgccgctgccggcgaaggtgggcgcctctgcgcctggcaaggcgccggaggtgacggtgggcgccggaggccccaagctgacgaaggtggcgccgtctgtcagcggagtggcggaggctgcgaaggtggcccgaacgttaccgccgcccggcaaacgcgttgccgacttcggcaccgagattaatgtggaggattatcttggggggtcggacgagggcccgcctgctctggttgtgcctggcgcggcgatcgcgacggctgcgccagcgccgaaggcggggggagagacccttggcgccggaggggaggtgtctgccctcgcgctggtcagggacgaggcgggcgtggcgacccgccggctgaagggagcgacggaggcgttgagtcgagcgacggaggcgctgagtcaggtggctgacttcaccagccgcaccgcgtcgggggcccttacggcagctttgtctgccgaggtcgagagacttcggacgcaacatgccgacgctgtccgtgagaagtcggcctccgacagcaagtgccgcaaactggcggagaaggtggccgccctggagaaggagaaggctgacctccggcgccagctggcgggggagaggagggaggccaacgaagccatcgccaaagagcaggctgctcaggcggaggccaggctggcacgggcggaaggctgctcagtgacttcgaggtgccggagcgagaggccggacttcgctgtctggaatgggtgcaggaggaactgcaggagctccccactgtcttggcggggttga

SEQ ID NO: 9139 - DNA, 1302 bp, Zea mays
  Peptide Sequence Number=SeqID_52514
atgcaggcggcggcggcggcggcgaatggcgcgggcgacgtgcagaagcctcagcagcagccgctggtggcgggggcgccgcccccaccgccgccggcggccgtggtgccgccccattgggtcgccatgccgttcgcgccgcctcccggggccgcggccatggtgatgcagccgcaccatatggcgcctccgccgccgcagttcgcgccgactcacttcgtgccgttccacgccgtcgcgccgccgcgggcagcagcggtcgcactgggttccccggcgccgcatcagccggggcaggaggagaacaagagcgtctgggtcggcgacctccattactggatggacgagaactacctacacagctgcttcggctacaccggcgaggttgtggcgatcaaagttatccgcaacaagcagactgggcagtccgaaggatacgggttcgtcgagttctacagccacgctgcggctgaaaaagttctcgaagggttttctggccatatcatgccgaacaccgaccagcctttcaggctaaactgggcatcgtttagcatgggagacaggcgctcggattctgcctcggaccattccatattcgtaggcgaccttgcctctgacgtcaatgacgccacgctgctggaggccttctccagcaggtactcctctgtcaaaggtgccaaggttgttatcgatgctaacactggtagatccaagggctatggcttcgtgaggtttggagatgacagcgagaagacacaggccatgactgagatgaacggcgtgtattgctcgtctaggcccatgagaattggcccggcaactccgaggaaatcatcaggtacttctggatccaatggttcagctgctcgatcagacggaggagatttgacaaacacaacggtatttgtgggtgggctcgacccaaatgttagcgaagaggaccttaggcaaaccttctcccagtacggagagatttcttctgtaaagattccaattgggaaacagtgcggcttcgtgcagtttgctcagaggaagaacgcagaggacgcattgcaaggattaaatggcagcactattggcaaacaaaacgtgcgtctttcatggggccgcaacccagcaaacaagcagttcagaggcgacaacggcaaccagtggaacaacgggggcatgtactacgcggcgcccccgttctacaacggctacggttaccctgcggcggccccgttccctgatccaggcatgtacgctgctccagcctacggtgcctacccgttctatggcaatcagcagcaagtgagctga

SEQ ID NO: 9140 - DNA, 498 bp, Zea mays
  Peptide Sequence Number=SeqID_52515
atgagtacatgcagaatacatgagtccctggtcacggacagttcggcttctgaggccgaatggtccggtatttcacaaaacagttcggtctttgagaccgaacatctaccacagcgtaaggatagtatcacggatgatccgccccccgaggccggagggtccgccatcacacaaagattatctggttcctctgtggggaacatgatagaggaattcagagatcttgataaattaggacaggggtttacatcggtcgatcctttggaggagatcgacatagtgaaagggaaatgtgcctttgggccatttctaagtattttggtgattgagtgcaaacacaagtgcttaaatgtgaaaatgtgcccatggttgaacaaagtgcaaatcacaagtaaagggacccctaggcgcatggaggagcacaccaagcattccttgagcactcttgatcactcacacatcaatctcgcgcacttgttcgacattctagtgatttga

SEQ ID NO: 9141 - DNA, 822 bp, Zea mays
  Peptide Sequence Number=SeqID_52516
atggtgacctccagcttgatggtgagggaaagcgagccgggctgcggcctctgcccctccctcagcctcaaggattttcatcaccagggctggggaggggactgcaccgtgcctggctctcggacgcgagtggcttcggagccgctcgcggcgccggcgtctgccacggcagccggaagaggttcttccgccgacgagatagccagggccgcccacggaccgacctccaactctacggccttctgcccgtccttgcctcacaagtttgggcatgggcgggggcgtcctggcagcagcacccgccctgaggtcagtgctgccgctgttcggccccccggagcagaagtcgtcgtcgtcgctgctgctggagcaggtgacggcgcgttgttcgtcggtcttctgttgctccgcaggccctcccccatgaagtggggttactcgcctgttgattgtctgaatcgcttcaccgagcgtgagtcgccccgtgtcaaggtgacgagtgagccgggttgtccgttggcgggaccgatgctggagttgaccagccgaggcctcgggtcgggctggcgcccttggaagatggttggccgaggccccagaggtcaccggccgagccgcctgctcgggccggattcccggaggagaccctggcggcgatggcccgggcgtggtgatgacgtcgtccttcggagtggagatcttcggaccgtgtcgccgtccgaggctaggtcgaacctcgccgaaggtgtcgtcgatgccgagggtgctactgcccccttccagcgtcaagacccgagcctgcaggatcagattgtcttgtag

SEQ ID NO: 9142 - DNA, 597 bp, Zea mays
  Peptide Sequence Number=SeqID_52517
atgagaagctttttggaaaacacctatgtgcagaccgtctgggccccatccgtgacaccaagggctcggactcgggctaagccccagaagacggcgaactccgctccgcccgactcagggctcgaactcgggctaagccccggaagacggcgaactccgctccgcccgactcagggctcggactcgggctcagccccagaagacgacaaactccgcttcgcccgaccccagggctcggactccgccctggcctctgccgacgacctccacctcgcccgacccaggggctcggactcggcctcggccatggaagacagactcgacctcggctttggaggagcctccacatcgcccaacctagggcgcaggccagccacgtcaacaagaagcgccatcatcaccctaccccgagctgactcgggccgcagagaacaagaccgctctcttacggaagcaagaggacgtcagcaaggactcaaccgctccgacagctgtccctccgccgggctccatcgctcctccgacagccacgacatcacaccagctgggtgccaaaaactctccggctgccacatcgacatgtacttaggacactag

SEQ ID NO: 9143 - DNA, 135 bp, Zea mays
  Peptide Sequence Number=SeqID_52518
atggatgcaagccaggatgcaagaagtaaagagaacccagagaacaatcctgattgtactactgtatatgttggcaaccttggacatgagctctccgtggagcacgttgtttccattgtggctagaatgaaataa

SEQ ID NO: 9144 - DNA, 624 bp, Zea mays
  Peptide Sequence Number=SeqID_52519
atggccaaaccgttgacagcgtcaataaaccatcctgaaaactcggaacctgaccatgcacccggactaccatcagatcacatgagggaacaaccacactggccgaggcatcacgaaaggcattcagacctcagaggagtcaaaccactcctccgaggcctcgggggctacacccggcgggaaaacagcgctgcctgccccgctccgactactgtgccacccgccagggtgaggctgacaacagctaagtccagcctcaggcgcaacaggaaactccgcctcgcccgacctcagggctcggcccccgcctcggcctcggaaggtggtctccgcctcacccgaccccagggctcggccttagcctcggcctcggaaggtggtctccgccttgcccgaccccagggctcggcctcaacctctgtctcggaaggtggtctccgcctcgcccgaccccagggctcggcctcaacctcggcctcggaaggaatcgcgtcctcgcccgaccccggcctcggcctcaggaggagtctctacctcgctcgaccttgggctcagaccgaccacgccacaggggggctcaagcgctcctccgacggccacgacaccgcgtgcacagggctctag

SEQ ID NO: 9145 - DNA, 903 bp, Zea mays
  Peptide Sequence Number=SeqID_52520
atggcgagggtgtgttttggcctcggcggccgcaggaaacacacgctacaagacaacccgatcctgcaggctcggatcttgacggctgaagggagcagcagcaccctcggcgtcagcaacatcttcggcgaggcccgacctaacctcggacggcgacgtggtccgaagatctccactctgaaggacgacgtcatcgccacgcccaggccatcgctgccagggtcttctccgggaatccggcccgagcaggcggctccgccggtcaccccggggcctcggccagctgtcctccaaggacgtcagcccgacccgaggcctcggctggtcaatcccggcgtcggtcccgctaacggacggcccggccaggctccggccgaccaggccccgacagccacaatgaacaaaaacactggcattcaaagtgccattacaaacggaactccggttccatccccgcgggtatggacaacctccacgccggggaagcccgtggagcgacaagctctaggcgaatcaccagcaaacgcgggtcgccccaaagcgcaccgacaggtcctcattcctgtcctcgccacgcaagcgaggaagaggacggaatgttgcatcctagctggacagcaacagcccgcctcccccagcatggctggaggacgtctcctccgcagaactggaggatggtctccaccaccagaagctggaagaggaggcggtcggccgacccgcgcggggggcagagcaccggctcagcccggcccccgccccagcgaggatgatgaagaccagctaggggcggggccaacatcacagcccagcttgctcctccccatccaggggctggtggtcaccgtcttgggtgacccccggcgagggggagcagtcgggctggctgatgaaaatccttga

SEQ ID NO: 9146 - DNA, 516 bp, Zea mays
  Peptide Sequence Number=SeqID_52521
atggctcagcagaatgagattctgcgacagttggctcagcgtcagccaccacctcagcactatggtggtggtgatcaccatcagtggccacctatcaggagttcctcagcactcagccgccattgttcactcgggcagaggatccacttgaggctgatgtatggctcagagtggtggaatccaagttcccactacttaatggagtttgttcagatgtgtctagggtccggttcaccacccagcagcttcgcggacccgcgcggacatggctatcatgctgacacagatgagaagaagagggacaggttcaggaggggcctcagtactaagctccgcgaccgtctcaacacagtcagggccaacagctacaatgagttagtcaacatggccatttctcaggaagactgcatcacaacccgccaggcagaaaacaaaaggaagacccctatggcaggaccttcagctcagcctcagcgcttcaggattgtgtccgacactcagagtaggggaccttag

SEQ ID NO: 9147 - DNA, 519 bp, Zea mays
  Peptide Sequence Number=SeqID_52522
atgacggcaatcggggtcagtgaggcattgtacgccaagacgctaggttctctggaggacatggttgctggcatgacttggccgtccatcttgccaccagggtggacaatcgagtgggaccctacctcggtagaggaggagcacgagatgacttctcacgagtcctcggaaggagggaacacattttcccacacggacggacttgcgcgagagggttttccccgtattttgtgggaagtgctgcagggagctggttatacgacgcctccccagtatacggtgcagttgttcgaggagcactgggtaccccgttgtagggtgaggatgaccttacagcctcatcctttgcagccgggctggcgctcgttggactccgagtcttttggattccgggctgaagacactatcgagtccattgctctccacggactgacgaccttttgtggctttcaccactttgagctgtccattcatcccattggcttgttccccgccaaaaaggaggacgacccaatgtag

SEQ ID NO: 9148 - DNA, 1578 bp, Zea mays
  Peptide Sequence Number=SeqID_52523
atgccggctgcgaaaccggctgcgcccggagccagcaaagcgtcgacgggcgagaaggttgcagccactggtggaaccaagcctcccccgggcggacctttgcccgcgaagctgcctccgccggggaagcgtgttgctgacttcagcacgaatatcagtgtcgaggattatttggttgggtcgagcgagggacaattggttgttgtccagccttcggtggcagccacctcgccatcggcggtggtaaaggcgaagggggccaagcaggacccgtgggccgccttttgcgcgagcggcaagattctgacagccgctgccgctaaggacgtggcgggcaccatgtcccagcggctgagggaagtgtctcagcagctgtcgcagcagctgaagcaagtttggcttatgtgttttttccaggcggccgacttcgccgaccatgttgcgtcgggcgtcctgactgcggacgtcgtcgccgaagtcaagaaccttcgggcgcagcatgcggatgctgtccgggataagtcggctgtggagagcaaaaacagcaggctggcggagaaggtggccaccctggaggccgagaagacggacctccggcgccagctggcgaggccgtcgctgaagcgcaggctgcgcaagcggaggctaagtcgcgtggacaaggccgagaccttggtacgctcagaagtcatgcggacgcacgcacagctcgcggaagcataccgcgatctgggtgcgtggactgcagatttcgatgtgcccgaccaagaggccagcctccgcttcctcgaatggttgcaggaggagttgctggtgctcctgactattgtgcagggcttcatgtcctatgcctccctcgtcacatgcgagggggccatgaatgcgttgtcccgcgaggggtgcaaacactatgaggtcttcaaccaatcagatgaaaactttgagtgtgaaatttttaaggtcgaagaccctgtgatggcgcgtgccgaggatgtcgaagaccttggagatctgaacggcgcgcggcccgaggctgaggtcaacccggtgctgccctcggaagccggtgaaggctcctctgctgcacctgtgtctactgtgtccggtgaaggctctttgccagcccctgcgccaacggcggaggaccccccgaaggcggtggcggagtcgacagcagaggatcccatggtggcggccgggccttcgcaggattttgggcctgtgcacgcaaccactactgacactgctaattttgtggcggcttcgaccgtggttgctaaaaatgaatcggatgattccgtgtttaagttttttgagtctgatgattctgggagttcggttgtgtggacggaagagtcttcggatgaggacttggattattttgcggccttggatgtggctgcggcggaggcttctctgcgtgtgatggatgctgaagttcttcctggtccgagtgttgggcataggtggcgaagggaagtggcgaagcgaagagttagtgaggtggaggtggtcgtcttcgtgtggacggggctggtaaacgggaattgttgtcctcgccggctggggcgagtgtag

SEQ ID NO: 9149 - DNA, 252 bp, Zea mays
  Peptide Sequence Number=SeqID_52524
atggggctcggtgtatgcggctcgctctaccaagatgatgatgaggatggttatgatcttgcttatggtaatgcagagctttggaaatctgttaaaaatggtagaaaaatgaaaataattgaacgtgaagaagaaatagaagtcaccgaagacaggacaccaccaccttcggattctcaagcaggcaactgcttctacttcgatatttgtggatccgaacccgactcacctgtgaacgaaggcaagccctga

SEQ ID NO: 9150 - DNA, 1002 bp, Zea mays
  Peptide Sequence Number=SeqID_52525
atgccgccacgcacaaggctaacggcacgcaagtcaactggaccaattggagtgcctcggcatcaactggcccctcgacatgaaagcagtagtagtgggagtaatgaccccataggagatcttgaagcccgagtgagtcgacttcaagcggcgctgcaacaccagaccgatgcttgggtcgcagacggggatagaataaatgaactaagaagggacatccgtcacctgcaggatcagcttgctgatcgggacttagcacttgactgggcagtacagtctcgtttgctagcatgtgctaaggaagcaagggctcaggcccgaattaaagaacttagctcaactgtcgacaacctgcaggtctactgcaatacgttgcatgaggaagtccatgtactatactcacaattacaccctagtgtgcctacacaccctgctgaggcggaagccggaccctctcacgttgcgggacgcgcgctgggtggggagttagacctttttgagccccctccttccttgagatgccgaccaggactcgaggacaggacgcttcaggaacttctgggggaagggatgttaccccaaacccaccttcgggttcctcccacattagccgaggcgattgccgccttggtgaatgcgaccgcagacgattcccgctttcttagggaaatggcgtggcaacaacagttcgagcaacaggcaggacggactgatcggcaaggccaccgtgaagctacctatctggacttctctgacacccgtccactcctattcgtcttagctgaagatcctctacatgctgatgagtggatacgagttattgtacaccagtttgctcttctctgttgttcggagtcgccgatgccgttattcgctgcatacatttacgtgtgcctgccaggtagttggtggcgaatttatgagggtattcaggcagtcaatctcaaatccctgggagagtataccgcatacattcttttgcgcactacatacctctcgtag

SEQ ID NO: 9151 - DNA, 108 bp, Zea mays
  Peptide Sequence Number=SeqID_52526
atggctgccggcaagcttacagacggggggggctcgagagggaggaagccagggaagcctgctggagagccgacgccggagggagctgtggagctcgcggtcacatag

SEQ ID NO: 9152 - DNA, 999 bp, Zea mays
  Peptide Sequence Number=SeqID_52527
atggaatgcacgaggcatgactacaagggctgcaagcacagcatagttttagtacacgatttattagtttggttattttatcgaacacgagaaacgcgggacagtgaggtctcaccatgggtcgacgacgtcgtggatggggctgcgcagcacagtaaacatccagcgggcatcatggcgtgctgtccacgacatagtgcttcacccgagcatttcgtcgggtgcccggtgggtgtcgatggcatgtcgcaggccttcacactgctgcaaagaaacggcagcgcgcggcttgctgcgcacaacatcaaacaggtggcagcgaggcaccatgggaggctccctgctgccttgcgctatggagggcgccgctggggcttccctggccggtgcgctgctggaatgaggcgccaggggagggaaggaagggctgctgctcttgggtgccgagttgaggaaggggaaagtacagggaggctcgaccatggggaagagaagcacctgctcgagctgggggcgctggctgctagtgtagaggtggccatggacgcttgggggaagaagaagagatggtgggggcgccatgggagatgcagggggcgcctgctcttgatgactctttgctgctggcgaggtacgccagggaggcggccatgggaggagctcgactggcgcccacctgacgcgcagggagttggggttggaggggaagacgctgggggcggccttcgaagctccggctggagatttggggcgccatggatgggagtaaagaggtgtgctcgagctctgcattttctggacagaggggtcatggcttccatgtgccagcacttggggaagatggctgccggcaagcttacagacggggggggggggggggggggctcgagagggaggaagccagggaagcctgctggagagccgacgccggagggagctgtggaggtgagcgactgctccctgggagaagaaggctccctgcttgctgcccgcgtgtga

SEQ ID NO: 9153 - DNA, 249 bp, Zea mays
  Peptide Sequence Number=SeqID_52528
atggctgaggtgaaggtcatgcgggctcgtgctgatggaccgggagcggtgaagggcgagtgctgggtcttgactgacggatcagagcagccagcgctacggttggtgggttttgctgagtttggacctcaaaactcggtggtggcggttctggagggaataggtggcggcacgcagcatgatcgcggagggtgcatcaaggcgaagcaactccgtgtgaaggacgtggcagtcggatcgaaaacctag

SEQ ID NO: 9154 - DNA, 390 bp, Zea mays
  Peptide Sequence Number=SeqID_52529
atggatgcattaaacttcgaatactcggattatgagaagcttgacaaaggggccgaagggaaaacaaaaacagctccagagcctaaggcaacaatttccaaaaagcgaaagcttggcatagcgccctcttctgagccgaagatggatgagacaggagaagaagctccttcgacgccctctgccactaaagtagccaaatttttgaagaggaaagaacagccttcggctacaaaggagaaagttaaagagcaaaagaaacggcgaattgtaaatgtaatgcaagcaattgaacaaacactgccctcagcttcggcggttaaaacagcgattcctgcggatgccgatgttggggaccttcgtcttccgaaggtcctcaaaaacatgatttaa

SEQ ID NO: 9155 - DNA, 375 bp, Zea mays
  Peptide Sequence Number=SeqID_52530
atgaggaaaaacttcgaagaaagaggaaattttcatgcttcgttgtgtacgaaaagaagtgaaggtgtttttcgccttcggctcaaaggacaagtttcgtccacagcaaagcagattgtacacggcttcgtcatacttcagctttgtcatcctgcacatattaaagaacagaataagaaaggtgcaaatgtcaagaagaagccagccttcagaaaagcggtagctgtgcctcgagaagctaccagggcgcagaagttggcatgcccaccaataacttcgtcaagagcatcaacctcgccttcaatatgttccaaggtgctgggcaggttttcggctgaaggtgaaaaattttcagaactggctccgatagagtga

SEQ ID NO: 9156 - DNA, 369 bp, Zea mays
  Peptide Sequence Number=SeqID_52531
atgactcaacctctgccattttcccccttgagcgccaaaccttcattgactctgtttatgccgacctcgaagggctctgatgaagaagtggagagcccatgtattgtgagacccagcagtgccgccttcggcggttcatcctcttttggtaagaatggtgatgaaggtggtggctcttcgaggcgggagaaggtggaacaaaaggagaaggaaactatgctcgaagcagaggtgaccgaagctacgcaaaccaccgaggaggatgaggagttaggcttcttcacaagacatattagtggcgaagagctgaatgaagaagtttcgaagctgggagaaaaggcgaagccttggggtacgaccctgatgtga

SEQ ID NO: 9157 - DNA, 714 bp, Zea mays
  Peptide Sequence Number=SeqID_52532
atggctttccttccatcttgtgggaagtgcttaactccgccggttaccctacgccccctttgtacacggtgcagttgtatgaggaccatcggggtacctcgttgtcgggtctggctgactttggaggctcagccccttcagctgggttggcgttctcttgattccgagacaattggactcaggacggacgacaccgttgaagcagcagccatgaagactctgacgactttctgtggctaccatcccctggagatggtgatgcaccccttgggactcttccctgctgagaagaaggatgatcccatgtggtgtaaccgcagcgatgctatggcactccttgctaacagcgctcaaactgccaagctcactctcgacagtcgagaagattttgtggtcggtctatccatcgagttggtagagaaggatctgcaggtggaaaggctgagccagcgcattaccaccttggagcagcaggtggagatccgagacaacactattgatgtcttggagaaccagcttcacgatgtgcagagggaactcgaagaagcgaatgaccacttggacatgcaccacctggagatggaggccaatgaagccggaagcgagggagaagaggctctcgaggagctaggaccagcccctggtgccaatgggattacctccgcgatgcctccttcacccgtatccagcgtcgcttccaccgctcagggttaa

SEQ ID NO: 9158 - DNA, 1269 bp, Zea mays
  Peptide Sequence Number=SeqID_52533
atgtcttcgcactccatgtatcgcgtccttccaccttccgagcccccggatggggagcgctcgcgtcactttcgtcttgctgtcgttggaggaacgcaacttcgcggaagttggtacctttcagccatcgctcggcttcaaggattttcatcaggcagcccgactgcatcccctcgccggtggtcacccaagacggtgaccaccagttcgatggtggggagaagcgagccgggctgcggcctcttcccggccctcagcttcaaggatcttcatcatccttgctggggcagagggcgggctgagccagagctctacctcccacacgggttcgtgggtcaccctctccttcagcattcaggggagagggtgctcactggcctagcggaaggggtgaacttcgacaacgcggggctggtcggccgcgagcgccgtcagcttcagcgcgttgggctcgctggctcagctggctctagctcggctcccggtcggtgcttcgcctgtccgggaggatccgagtggggatctgccggtgggcagatggctgccgtcatcgacgttgaggtggtggcagctgaagaagtcctcgttgccgacgagatcgccgccaccatcagcgctatgggcctccggctctttggctttgatagcttgttctcacccctcgagtggggacgtgggcgaggagctcgttgcagcagcgtccgccctgaggtcatcgctgctgctgtttggccactcagagcggaggtcgttgtcgctgctgccggagcgggcgtcggcgagccaccaggggttttgtcgccccgtaggccctccaatgagtccctcggctctgtcggccttgccgctcgaggcttctcttgcttagttaaaggaaccctcggccgctcttcgatgagccggagccggaggcagcggtgtcagtgtggacagaggcagagttggctcgaaaagaggcttcgtcggccggagcctggccaggccatcactggcgggaccaacgccggagtcgagttgtcaaggccacgagccgggctggtgtccttgggggacagctggctgaggcttcggggtggccggccgagccgtctgctcgggccgggttcctggaggagaccctggcggcgatggcccgggcatggtgctgacgtcgtccttcggagcggagatccttcgcccgtgttgcagtccgaggctcggtcggacttcgccgaaggtggagttgacgccgagggtgctgctgctcctaggggtggtaatgggctataa

SEQ ID NO: 9159 - DNA, 606 bp, Zea mays
  Peptide Sequence Number=SeqID_52534
atggctcaccggagagcttggtccacgcgcgcaggcgggcgaccgaagtccggtgaagtcgatctcgggcttccggtgaagtcctgccgggtccgagggcttggaaagcttcacgggccactggcggagctagccgaagcactggctcgacttggggatggctggagtgggctggccacggtggccgaagctctggcggcagtggcgggcggaaaagagctcgccggagctaaggaggggtggctggccggtgatggtgagcgcggggtgaaagatatggagcccggaaatccagtctgtctccctgctcaaacccgaggcaaatccagggttttgtcatgtctagggcttgcgtcccaatgccatcttctggcacacgacagagagagaaaaaccctaggtgacactggggtgtcacagccttccccccttaaaggaatctcgtcccgagattcgggccagagtcctcccagggtgaagcgaaggattcgaagggcaggaggaggggttgggtgtgattacatacctgcttccttaggtaggcaatcggggaagttggatctcaagaattcctcggtttcccaagtagcttcttcctctgagtga

SEQ ID NO: 9160 - DNA, 381 bp, Zea mays
  Peptide Sequence Number=SeqID_52535
atggctggggaagatggtgtccaggggggagctcgcagccatggaaatcgcaaggctagagaggagctcgctcgtgcctcgggagaggcgccatgggagaaacccgagctcgcagggaggggcgccgtgatctgctgccgtgtgcgtgctggagcttgggagaggaagatgccatggcggcaacagaggaggggcgagctagagtgggggctcggcggctggaggatggagacagtcagcgcgcgaggaggcaagctgagggtaggagaatggcgtggaggagaagggagagggaggtggctgccatttatggaggagaagctccagagcacggctgccacttttctccattgcagcaattcatcgaacacgtggttctaa

SEQ ID NO: 9161 - DNA, 705 bp, Zea mays
  Peptide Sequence Number=SeqID_52536
atggcgctccctattgacgtggtcggtccgtgccctaggttgggtgaggtggaggctcctccgaggtcgaggtcgagtctgtcttcagaggtcgaggttgagtccgagtccccgggtcgggcgaggcggagaccgtcggctgaggccagggttgagtccgggccctggggtcgggcgaagcggagttcatcgtccttcggggctgagcctgagtccgagccctggggtcgggcggagcggagttcgccgtcttccggggctgagcccgagtccgagccctggggtcgggcggagcggagttcaccgtcttccggggctgagcccaagtccgagccctggggtcgggcggagcggagttcgtcgtcttccggggctgagcccgagtctgagccctgggtcagttgttccctcatgcgagctggtcgtagctcgggtgcacggtcgggtcccaagttctcgggctggtatgttgacgctgtcaacggtgtggcccgagtcgggtttgcgagagcagcccccaagcctctgcacagggcgagaggatggtcaaggatagactcgactttttcacatacgcccctgcgtcgcctttccgcaaggaggaggggggaaagcgccatgttgccctcggagggcgctgaacatggtgtctccagtgagctgctggcgggtaatccgagtggacgcccgtgccccatttgttag

SEQ ID NO: 9162 - DNA, 255 bp, Zea mays
  Peptide Sequence Number=SeqID_52537
atgacggaagagaaccaacccccacggggttgtgctcctctaacaacagcaagaagaaaacaagaccaccggcaccaccacgagcgcaagctctccggcggtgagatcgctggaggggacggccctgacgcgggtctctccagaagacaccagcgcaccccatctggaggcccgggtggcggaagggcgcaaggaatgcgagaggaaaggcaaaagtacaagcgtgatgtgaaggcaaatgacaggttcacgtga

SEQ ID NO: 9163 - DNA, 1428 bp, Zea mays
  Peptide Sequence Number=SeqID_52538
atggcgccccgcatgctctgtgacgacggcggccctcagcccttttacggaagcaagaagacgtcagcaagggcccaaccgctccgacagctgtccctccgccaggctccatcgctcctctcacggccacgacatcacaccagctgggtgccaaaatctctcctgctgccacgacggcatggccctcttagagagggttggccgcgcggggacgaggacgagaacaggcgctcgcttggggccgctcgctccctctcccgcgtggacgcttgtaaccccctactgcaagctcacccgacctgggcgcgggacgaacacgaaggccgtgggattcccacctctctcacgccggtctccggccgcctcgctcttccccccttcgcgctcgccctcgcgctcgacccatctgggctggggcacgtggcgacactcactcgtcggccaagggaccccccgatggctcgtcttaaacacactgcatggaagtcagtcattcctttcttaccctctcgtctcgcgaacggtccgctttgccatccagtgactggtcaatctagccatttggagaggctgcaccaccgcctgcacgaggagcaagggcgtcgacgacaggagctggagcagcagggctcttctttctcgcttcaacaggagatagagtctgtgaggagctgctcccttgtgctcccactagaggcgccccctgcaccaccactgagtgccctagccgctgcagttgcagctggaggagatccatacgacggaggtggcgacaacaactcgagccacagcaccgacctttcagaggagcaggagttggaaggatgggttgctcgacccatcactcgcgacgctgctcgcgggtgtcacttccacgatacgctcgacaccttgctacgccaggcactcgaccggtgcacttggtctatcgagtatcgatgtgtggtcttccagcacagtcgcggggtttacccggaccgttgggaggcgacctgcttggtgcgccgtccggagaacagtctccagggtgcggagatctgctcagagcactattctatctctgagcgggactcagctgaggcggccatgcaagatgccgcatggcgtgcgctttcgcactactgctcagtgcttggcagggtagcggatggtctcaacctgaagtattacccccgccgtccatctggcagcacaggaggcatgattgtctcacctgttggtaaggacaatcctaggttgagcagcacagtcaacctagccgccgtgctaaacacggagatggaccatgcattagacgagatgagtagggctcgtgctgagatcgcccagctacgggctgagcgtgcggagcatcgtcacctggaggatggctcccccgctgccgtcgggactcagcacccgtaccgctcacctcagcatggacactag

SEQ ID NO: 9164 - DNA, 486 bp, Zea mays
  Peptide Sequence Number=SeqID_52539
atgccgacgccgaccttcaatcacttggcgctgcctctaaaacgtcgactacgtgttcgatcgctcggcattacttctaaaatgccgacgccgaccttcaatcactcagcgctgcctctaaagcgccgaccacgtgttcgattgctcggcattacttctaaaatgccgacgccgaccttcaatcactcggcgcagcctctaaaacgccgaccacatgttcgattgctcggcattacttctaaaatgccgacgccgaccttcaatcacttggcgctgcctctaaaacgtcgactacatgttcgatcgctcggcattacttctaaaatgccgacgccgaccttcaatcactcggcgctgcctctagagcgccgaccacgtgttcgatcgctcggcattacttctaaaaatgccgacgccgaccttcaatcactcggcgctgcctctaaagcgccgaccacatgttcaatcgctcggcattacttctaa

SEQ ID NO: 9165 - DNA, 447 bp, Zea mays
  Peptide Sequence Number=SeqID_52540
atggcgcctgaggccggacttggctgctgtcagcctcactctgtcgagtggcacagcagtcggagcagcgcgggcggcgctgttttcttgtcaggctggtcagtgaagcggcgaagtgacgacggtcacttcagctcagtcgacttaaaggcgcgcgtcaggataaggtgtcaggccacctttgcattaaatgcttctgcgatacggtcggtcggcgtggcgacttggccaaggttgcttcttggcgaagactgggcctcgggcgaaccgaagctaaagcttgcaataggtttatctttctgcatcaagactgctcctaatccaatatcactagcattaatctcaacagtaaaggattcctcaaaattaggaagtgccaacacaggggtactactcatggcttgcttcaaagtgtcaaaagcagttgtagcatctaaattccactga

SEQ ID NO: 9166 - DNA, 255 bp, Zea mays
  Peptide Sequence Number=SeqID_52541
atggttcgtgccgatcgcacgagggacaatggacaaggcccacgaaagaatgaccttacgaattatcgggcccttgggcctttcgtgaggccttttacttctttagtggacccaggggatatctatcctccacaggacgggagcgaggacctcttcgtgcgcactgtgatggccgccgttgccggcaagccaccagggcgaaggtggccgccatcgctggcgagccgttggtgcagaggcggccgctcggagtag

SEQ ID NO: 9167 - DNA, 225 bp, Zea mays
  Peptide Sequence Number=SeqID_52542
atgggacgaccacgtcacgggccttcgtccggcgacgcgtgggacgaaggcgaggctggcgaaggcatcgagcgaagggtggcgtcttcgccttcgcaccaacatttgccctccgagggaccagttcgactaagtcatctggtgccgaagacgtcgctagatggtggagacgctgccctcgttcgaagtggttctacgggggtttttgacatgaccgttgattga

SEQ ID NO: 9168 - DNA, 4275 bp, Zea mays
  Peptide Sequence Number=SeqID_52543
atggccgggccgacgccgacttgctccgcgatcgtgtcccacacggctgccttcctggccgagctcgtcgccgacccgctcctgcgtcgtcacctcctctcggcggccgcggctgcgggcggcggacagcagcacccggccgccacgctccaggcgctgtccctcgtgtcggacgcgctcgacaccgccgcctcgtgttccccgtccccgtcgtcgctccgcgccgcggagcgcctgctgcggtcgctgccggccgccaccccgctctcgtgcctcctcctcgcgctcgcgcgcgccgcacggcgcggcgccggggccgcggccgccgtgctcgacctcttcgcgctggaccccgcgctggcgcgccacgagctcgcgcccgccgccttcgaggcgctcttcgcgccgcggctgctccccgtcatgcgccacttcgccgcgcgccgcgccgcggccgccgccaggaccaagggcgaggagggcgggtcggacgaggccacgccgatgcgggtcctgtcgctcatgagcggggcgcaagcgcaggagatgagggcgctggagcgggagtatgacaaggtgctcgacgccaactgcagggcgtacgcgctctacctcaagaggatcctcgaggccggcgagccatcatcgccggcggtgtcgtcgccgctgccgcagcctcttcctcctccggagctcgtgttcggcgtcgaggacgacgacgacagtcgcggcgacgaggacaccgcgccggagaacgacgagtccgctgccagctcgcagagcgaactacgtgacaatccgatgtgggcggagacggaggagcagccgggcgatctttacccgcggcggcagggcagcgtgaaaggcaggagggacctcttgaggccgccgagcctgtacccgcagcgcgtgccgccgcacctcatagttcagcagcagcaagcgctgccggtgggcagagggagcccagcgtcaaggctccgagcggagcactcacggtcgcggtcgccggccacgccatcagacgacagcatggaggagtcttcctccgagctctgtgcggccaaagaggaaaagatcgcggcgtcgccactgtcctccaagcagccacgtccacgcgccgacgccggccagctgtcaccggagccagcgagcttcccagtacgctgcgacgccgccgccgtcgacccgctgcagccgctgccgacgcccaaggacttcgtgtgcccgatcacgagccaggtgttcgacgacccggtgacgctcgagaccgggcagacgtacgagcggcgcgccatccaggagtggctggaccggggcaacgccacctgccccatcacccggcagcgcctccacggcgcgcagctgcccaagaccaactacgtcctcaagcgcctcatcggcgcctggcgagaccagcggcggacgccgtccccttcctcctccccttccccttcgccgccgccggccacgcctccccccgctcccgcgaccgccatggcgggcgacagccccgcgccgccgttccccctccccgtcaaggctgccgccgcctcgtcgccgtccccggacgccaacaccagcgccagcgcgccgtcgcccaccagcgtcatcgcgcaggcctcgctcgagagcgccgtggccgagctccgcgccgccgtgtcctgcctctgcacgtccgaggacctggcgcagtcggagcggtcggtgctcaagatcgagcgcctctggcgtgacgcaaccgccggcggagccgacgccgagccggccatcctcgccgcgctcgccaggcccgccgtcctgaacggcttcgtggagatcctcttcaactccgtcagcgcgcaggtgctgcgggtcgccgtcttcctgctcgccgagctcgcgtcccgggatgacgccgtcgtgcagacgctgaccagggtcgactccgatgtcgactgtctcgccgcgctctttaagaagggactggcggaggccgccgtgctcatctgcctcctgtcgcccgcgcccgagcagctcgtcgagatggacctggcggaggcgctcgtcgccacaatccgccgcggcggcggcgacgaggacccgctcaagatgtgcgtcagccccaaggccgcgtcggtcatcctcctcagccagatcctcgtcgaggacgccgctgccgccgccgacgatgacagctcctccacgccgccggtgccgaggtctgcgctgatgtccgagaggttcattcggagcctcgccgccagcctggaggccgagccggtggaggagaggctagccgccatgcgcatcctcctcaggtgcatctgggaggacggccactgtcggagaagcatcgccgagaaggcgtccctcggggccgtcctcgacgccttccacgccgtcggcgacgccgacaagatcgacatcgtgcgcttcctctacgagctgctcaagctgaaaaagcgatcggcggcggagcgtcttcttcgcacaatcaaggagggtggctcgttcagcatgatgcacacgctgctggtgtaccttcagtcggcgccgccggagcacagccctgtcgtggcggggctgctcctccagcttgatctcctggtggagccgaggaagatcagcatgtaccgcgaggaagccctggactgcctcatccagtgcctgaagaacgccgacttccctcggtgccagctcctcgccgccgagaccatcatgtgcctcccggggaggttctcgtcgtcggggaggccgctcgcccgttccacgctgctgaagctggccagggtgaaggaaaggtaccggcagtcgcaggacctgagcgccgctcgcgccgacggcgaggacgagatggaggaagggaaggccgcgtcggagtgggagaggaaggcggcgtacgcggtggtgagccacgagttcgggctggtgttcgaggccctgtccgagtgcctgaggaccaagaacgcggagctgttcacgacgagcctcgtgtgcgccgcctggctcgtgcacatgctctccctgctccccgacaccggcgtcctcggggcggccagggtctgcctgctccgccagttcgtcgtggtgctccgctccgccaagcacggcagcgaccgggtcctcgccatggtggcgctcaggagcttcatgaacgaccgcggtcggttcttcttccttctgctgctgctcctcctcctccatgtctctgaactgaacctcggaatgtgcaaatttgtagaggggatgcacgacatcacgacgtacatcaaggacgtgctcaggacgctgagggagctgaagaaatcgtccggcctcgcgttcgagatgctcaagctgctatcagacggccaggaatccagcgtcgacatgtggagccacaaggagatcaatcaggtagactgcagcgcgaacggcgaggtcacgtcggtcgtttacctcaacaactacatcttctccggccactccgacggcacccttaaggtgtggcaagggagcgaaaacatccttgcccttgtccacgaggcccaggagcacagcaaggccatcaccagcttgtcggtcctgcactcggagtcggaggagaagctctacagcggctcactggacagaagcataagggcgtggcagctccgggacggcgtgctccggtgcgtggaggtccacgacacccgagaccccgtgcagagcctggccgtggccagcgccgtggcctgcttcgttccgcagggcgcgggcgtgaaggtgctgagctggggcagcggcagctccagggtcgtgaacgccaacaagtacgtgaggtccatggcgctggtgcacggcaagctcttctgcggctgcagcgacggcagcgtccaggagatcgacctggcgagcggcacgctgggcgtgatccagcccggcagcaagcggatcctgggcaaggccagccccgtctacgcgctgcaggcccacggcgggctgctctacaccggcggcacgccgtcgtcgtcgtcggcggcgtccgcggacggcggcggcggtgcggccgtcaaggtgtggagctgcgccaactacggcctcgtcgggtcgatggccacggcggcggaggcgcgctcactggtcgtcagcgccgacctcgtctacgtcgcctccagggccgccgccgtcgagatctggtccagggagaagctcgccaggatcggcacgctgcaggcgggcggccgcgtccagtgcatggccgtcgacgccgacggcgacgtcctcgtcgtcgggacgtccgacggcaagatccaggcgtggggattgacttga

SEQ ID NO: 9169 - DNA, 1620 bp, Zea mays
  Peptide Sequence Number=SeqID_52544
atggcggccgcccactacgatcgcgaggacggcctgcctccatcggcgccgccgcacgcggcggcggacgcgtacgaccccaactacgtgccggactccgtcaagaccttcgtggtgcacctgtaccgccacatccgggacaagaacgtgtacgagatccaccagatgtacgagggcggcttccagcgcctctccgaccgcctcttccgcgacgtgttctggccctccgcggaggccgtgtctccctactgcgacggcgaccacgtattcctcctcctctaccgcgagctctggtaccgccacgcccacgcccgcctctccccgctcaccgccgcgcaccgcgccgagtcgtggaccaactactgcgacctctttagcgtcgtcctccacggcgtcgtcaacatgcagctgcctaaccagtggctctgggacatggtcgacgagttcgtctaccaatttcagagcttctgccagtaccgagccaagctcaagaccaagacggaagacgagctcaaccagctcaagcagttcgacaaggcgtggaacgtgtacggggtcctcaactacctgcaagcgttggttgagaagtccatgatcacgcagatcctcgagaaggagaaggagggcctggagcagttcactgccaccgatggctacgactacgagggtggcagcaacgtgctcaaggtgctgggctactacagcatgattggcctcctaaggatacactgtctcctcggggattaccacaccggcctcaagtgcctcacgcccatcgacctcaaccagcaaggggtctacaccattgtcattgggagccacatctcagccatctaccactacggcttcgcaaaccttatgatgcgcaggtatgttgaggccactcgtgaattcaacaagattcttctgtatatcctcaagtacaagcagtaccaccagaattcccctcagtatgatcagatactgaagaaaaatgagcagatgtatgcattgttggcaatttgcctatctttgtgcccacagaacaagctcattgatgaaaatgttagcacccagctgaaagaaaagtataatgacaagatgacaaagatgcagaggtatgatgatgaagcatacgctgcttatgatgagctattctcgtatgcttgccccaagttcattacaccgtcgcctccaattctggaccagccgctaacaaactataaccaggaagctttgcctatccttgctttacctggcaagcctaacctgctacagcaggatgcataccgtcttcagttgaagttgtttctctatgaagtaaagcagcaacagttgctttctgggattcggagttatctgaagctatattcaacaataaccattagcaaacttgcccaatatatggaagtggatgaagcaacactaaggtcgatcctgatgacatacaagcacaaaatgcatgcagttgacagtgaaggaaagatagtatcaagtgcagactttgacttctacatcgtcgaggatgtgattcatgttgtggagtccaaacctaccaagcgtcatggtgattactttttgagacaaattttgaagtttgaggaaatgattggtgaactggagaaggtacagcttgactga

SEQ ID NO: 9170 - DNA, 1134 bp, Zea mays
  Peptide Sequence Number=SeqID_52545
atgaactacggcggcggcagcaggagcagcagccggctccgggaccggctggcccggatgttccgcccgagcgcgctgctccgctccacctgcaacacggccgccgccgcgtcctcctgctcctcctcgtctcccgcgtccacggccaagcctccgcctccgcctgtggctgcggcggcctccgcgtgctcctccagccgcgcgctgctcggcgccgtcgtcgacggggactcgtcgttcctcgcctcctcgcggcgcgacctggccgtcgccggccgcgccgagtccttctccgccgccgtcgaccgccgccgccgcagccgcagcagcctggacgcggcgccgccgccctcccgcttctctgtcgacgcgccggcggctctggcggagacgggccgggacaaggaggagaagaagaagaagaagaagagcccgcgcgacgacgacgacgacgagcaccggctcggtgtcggtggcagcagcaagaacgacagcaggatgaagctgctgctgtccaacccctacggcttcagcagctccgacgacaccgacgtcttcagcagcgacggcgaggacgacgaccgcgccgccggccgcggcagcaagaggccgggcgagtcggcggcggagaccttcttctcctcgtcgcgaagcttctcgtcggactcctccgagttctacaccaataataagaagcagcacaagaagaagacggcgacgaaggcgaaggcgaaggcgaagggaatggcaaaggcaaaaccccctgcagcagcaccctccgaccgcagtagcaaggctccggcatcgtcgtcccgccgccgtccccagtaccaccggcgcgcggcgagcagctgcgacacgtgcggcgtgcgcgacgggttccggcccgtggtggtggtgtcggcggcggcggaggagcaggtgcgcagggggttcgcggtggtgaagcggtcgcgggacccgtacggcgacttccggtcctccatggtggagatgatcgtggggcggcagctgctgggcgcgccggacatggagcgcctgctgcggtcgtacctgtccctgaacgcgccgcgccaccaccccgtcatcctgcaggccttctccgacatctgggtagtcgtccacggcggctag

SEQ ID NO: 9171 - DNA, 291 bp, Zea mays
  Peptide Sequence Number=SeqID_52546
atgtaccgggaggcgttgtggcagaagagaggtcgtcctcgggagttatatccggacagaattttgcctcacctgaagacggctttagccttgggagaagactccgcctcgcccgagctcagcctcgaccaactgccctggcagcagccaccaactctccgcaaatctcgtaggagacaatccggcgactgttctaaccacttcctacacgacagcatgccctggcgtaggttcgaccatggtctcgggaggaacctctgcctcgcccgagcatggcctcggcctgaataa

SEQ ID NO: 9172 - DNA, 1461 bp, Zea mays
  Peptide Sequence Number=SeqID_52547
atggccgccgccgccgccgccgcggtcgcccacctctccatccacggccgcctccgccgctcaccggagcatcggccgtccatcaccaccaccaccacctcctcctcttcctcgtccgctcaccgcccgtccctgctgcggtgccgcgcgttcaagcaggaggccggcgacggcgacccggctgaggccgacgcgcggaagcgcaggaagggcccgctgtacaagctcaaggcggcgatccagggcctcgcgggatcccgctccgccgccgccgaggtgtacgggggagagtaccagtaccagcgcgccgtcgagaaggcggaggagatattcttctcggttactactcagctaggcagatatgttatcactatgatgagcagcggtgttgtacttggggttggattccagctgtcaggtggagacagccaaatgaacgaactaatttggtatagctggcttggtggggtgattatcggcacaatgataggtgcaaacagtgtcctagaggaacactgcaaagctggacctcgcaatgtcgtcataactggaagtcctgaatcagtccttcagactataaaagaacttgaagagaacatacaggaagggttatctgttgccaaaaagaagcagaggaatattctatcgcatgccaaggttgttggtacagattgtgatgtctgtaaacctgaagatgtgaaggagttagtgaattttgctattaatgagcttggttcagttgatatttggataaataacgctggcacaaataaaggttttaggccattggtaaccttttcagatgatgacatcactcagatcgtctcaacaaacctagttggttctctactgtgcaccagagaagccatgaatgtcatgcaataccaagagaagggaggccatatattcaacatggatggagcaggttctggaggatcaagcacaccactaacagctgtctatggttcaactaaatgtggactaaagcagttccaaggatcacttctgaacgaaagcagaagatcaaaagttggagtgcatactgcttcacctggtatggtcctcacagaccttctgttaagtggttcatcgctcagaaataaacagatgttcaatttaatatgtgaacttccagaaacagtagccagaactttggttccaaggatgagagttgtaaaaggaagtggaaaggcaatcaactacttaacaccaccaaggatcttgcttgctctggttactgcatgggttcgacggggtcgatggtttgacgacgagggaagagcggtgtatgcagctgaagctgatagaattcgcaactgggctgaaagtcgagcacgcttctcgttcaccgacgccatggagatgtacacggaaaacacatgggtttccgtattctcgctctcggtggtctgtgcgttcataatcctctctagctccggtggacctcttccaggcacatga

SEQ ID NO: 9173 - DNA, 1278 bp, Zea mays
  Peptide Sequence Number=SeqID_52548
atggccgccacctccacagcgtacgacgtcttgtacgaccccctggacagtgtcggaacagtgcggccgacgacgcgggggacgtcatggatgtggcggacctgcgcacggcgcgaccgtcgcccgtgcggtggacggacagccatgccccgatcagcggcgggagacagcgtcggaggcgacaccaaagccatcaaatccaaagagatggagacgcaacacggctcgcttcccaccccaagatactggggggcgcgtgggatggagccgtggctcagcccgctgcccacctccacgaggctggaagaagcaggaaagaacgtcgcctccacggacatccccgcggaagtaggcgacgatggccgcctgaaggatgaaaacagggcaccatgggtagagctcgggggccaggcccctccaacagctgcacgaagaaagatgggatcgacgggaccgacccgctgggagtttggaaacaaagaacacaaactcttcggcggaaaggtcgccgaaaggagaggccccagcacaagtcctcccggcaaataccggcgcattccatccaagcaggcggtataccatttcgagcactcactcagtctgggcacgctcgggatgaagtcacaaggccatggtaaactatggtggcacaaagcagaaaccttgaaggcaaaggggcgcagagagctcgaaggcggaagggtgtcgcgagtgggaaagaagcaaggcatggcagctactcgaaggggttcccatcctatgacatggggccagacctcacatgtcatacaagctggcccgaagcgcgaagaaggcgaatcgtcgcacaaggagcgtgcaaccgccgtgcgattatacgcccctccatcttcgccacaaccagcggttaaggaggcgaaccgccgcacaaggaacgtgcaaccgccccacgattgtgcgccccctcggtttctctgcaaccggtggtccaacctatggcatgggggcccaggcccacatgtcatgcacccgacgcgccggtttctgggtgcagaaaagtcgcaccgctgctcgcgacaataccgcgcctcctcgagcccgtcgcagaagactgagaagataaatcttcaaaaccaatgcagcgactcgaggcaccctgcgcatggcccatcaaagacattaagtgcggaggtcacgggccagtcagccgcggggacatgcgtgacagtcgacgtgaccatgggcgggccggcagtaattgcatcaaccggcgccgaggagcagcgatccaatcgctaa

SEQ ID NO: 9174 - DNA, 480 bp, Zea mays
  Peptide Sequence Number=SeqID_52549
atgggcaagaacaacaagcgcaagcgtgagccgactcctccatcggaggagtttggtgactcggaatactcggaggaggagttctcctccgagtccgaggggtctccggctcccgtctctcccccggcgtcgtccgatgactcggacgactcccaggggatagccgcggaggtctggacgtacatccgggccgtcgagcgcgccgggctcgaaggctcggatgagtcggagtactcctcggatgaggaggactcggacggcggcgacgagggtgaagacgacgacgacgacgacgacgacgacggcgacgacggtgacggcagcggcagtggcaggggcggcggcgacggcagcagggacagcaccaagggcgacagcagcaggggcagcaccaagggcagcagcaggggcagcaccaagggcagcagcaggggcagcaccaagggcgacggcggcggcaggggcagggccagtggctag

SEQ ID NO: 9175 - DNA, 945 bp, Zea mays
  Peptide Sequence Number=SeqID_52550
atggagagtcatgacctccgggcggaaagggaatcacggcttgtgggtggcaatgagattgatggttttggttatgactatggtgctggtaagtggtattctttccgtttggaaaggatggctcgacttagacacactgcacgaaagtccgtcatccccttcttaccctcccgccttgctgagcgtccgcttcgccgtcccgtggccggtcagtccagccacttggagagactgcaccaccgcctgcatgaagagcaggaacgtcgacgacaagagcaggagcagcagggctcttctttctcgctccaacaggagatagagtctgtgaggagctgctcccctgtgcttcccctggaggcgccccctgcaccaccactgggcgccccagcttctggagtagctgctggaggagacccagacgacggaggtggcgacgacagctcgagccgcgacaccgacttctctgctgaccaggagccgaaggatgggttgctcgacccatcactcgcgacgctgctcgcgggtgtcacttccatgatgcgctcgacaccctgctacatcaggcacttaaccggcgtacttggtccatcgagtatcgctgtgtggtctaccagcatagtcgcggggtctatccggaccgttgggaggcgacctgcttgcacaggaggcgtgattgtctcacccgttggtgaggacaatcctaggttgagcagcacagtcaacctagccgccgtgctaaacacggagctggaccatgcattagacgagccgagtagggctcgtgctgagatcgccctgctgcgggctgagcgcgcggaacgtcgtcacctggatgatggttcccccgctcccgtcgggactcagcacccgtaccgctcacctcggcgtggacgccagccttatggcaaccccgactgcaagaccaagataaatctagaaccatag

SEQ ID NO: 9176 - DNA, 311 bp, Zea mays
  Peptide Sequence Number=SeqID_52551
agtaccatcaaccagtcttgagggaacaattggagtaccagaggcaacaatctgagtaccagagacaacaagccgagtaccagaagaagagggacgagtattatgcaaacctccaggcccaaaatcaagctcttctcttgcaactagcccaacaagcgggcgtcccgatgcccacctatgggatgccgcctccggactttgcactgccgatgccaatgcttgcgcctccacctccgcctccgtcacaattccctacggagaaggaagcccaggcagtgcttgggaggtgggcccacacaaaattcttgtaa

SEQ ID NO: 9177 - DNA, 963 bp, Zea mays
  Peptide Sequence Number=SeqID_52552
atgaggttgcggaaaccaaagcagaaggcaagcgcaaatagcagggtaaagaaccaccgtcggcccctcttccggggcaagcgacacctccagcaggagaagcgggcgctgtttcacctccgtcatgatggccgcgtcaaaaaaagggaccgagaaaggggatattccgaaaaggatccttctcagcgaaggaaacgggccccgagccctcctactgatcaggggttcgaaggttgtgccctccggggttcgacaaccgccccagagcactcaggctccgagccctttactgatcaggggttcaaaggctggccctcggaagggttcgatagccgccccagagcacgcagagtcagggatgaccctgggtacgtccgttacatggccgaggctcgggctacgctcccgaggtaccctaggacatttccgagaccagcgggaacaatttgtaacggaatcccaccggagggaggcatcgagccctcggaccctatcgaatgggtccggggaaacggcactgttcgccccgctctggctactgtgccaaccaccagggtgagactagcaacagtaagtcgtgacctctcccaagttcagcctcaggcgcaacagggagctccgcctcgctcgatctcaggcctcggcctcagcctcggcctcgggagaaggtctccgcctcgcccgaccccaggcctcggcctcagcctcggcctcaggaggagtcacaacctcgctcgacctcagcctcggcctcaggagaagtctccgcctctcccgacctgggcctcggaccgactacgctacaggggatacatcattaccctacccctagctagctgcctcaggctgcgaaggaacaggaccggtgtcccatctaaggttactccgggctcaaggcacttctccgacagcaacgttagctcgtgtacagggctcaaggcgcttctccgccagccacgttag

SEQ ID NO: 9178 - DNA, 58 bp, Zea mays
  Peptide Sequence Number=SeqID_52553
ggcgttacaataagttgcttctggggatggacgagtacatccgggctgacaacgagat

SEQ ID NO: 9179 - DNA, 330 bp, Zea mays
  Peptide Sequence Number=SeqID_52554
atgaagaaagtagcagtggtagcaacgatcctatcggggatctggaagcacaagtcgaacaacttcaatcagaactccatcacaggaatgatctatgggtcgtggatgatgccttccaagactcgttctcaggatgttgcaggcacctctagtggaagggaagcaacaacaaacccacctccagtacctcccacgttagccgaggctatcgctgccttggttaacgctacaacagacaatacccgcttcttgcgggagatggcaagtcaacaactacaacaacaagaggaccctctcgaagcagatgaatggatccgtgtcattgaatag

SEQ ID NO: 9180 - DNA, 174 bp, Zea mays
  Peptide Sequence Number=SeqID_52555
atggggagtagctctctccgggcagaaagggaatcacggcttgtgggtggcaatgagattgatggttttggttatgactatggtgctggttgtcagcattgcaaccactgctcaggagaagatgaagctgtggaaggagacttccaggagttccaagactacgacgagttctag

SEQ ID NO: 9181 - DNA, 783 bp, Zea mays
  Peptide Sequence Number=SeqID_52556
atggccgcaccgtcctccgccgccacagcctgcttcgtctccccgctcccgccgcctcgccgcccgcgtcatttcctcaggcacctcgcgcgcgccgccgccgccgagcccacgcccgcctccgcctcctcgttcgccctcccgtcgccatggccgtgggcgcggcggctccgcgacctggtccccgccgaggccgcgggccggctgctgtcgtcggccgcgggctccctcatcgtcgcgctcgcctccgcgtcgctcgtcctcggcgacgccggcgcggcctccgcgttcgtcgtatccacgccgcggaagctgcaggcggacgagctcgccaccgtgcgcctcttccaggagaacacaccctccgtcgtctacatcaccaacctcgccgtcaggcaggacgcgttcacgctcgacgtgctcgaggtgccgcaggggtccgggtccggctttgtctgggataagagcggccacatcgtcaccaatttccatgtcatccgtggcgcgtcagaccttagggtcacacttgctgatcagtcagtgtatgaagcacaagttgttggatttgaccaggacaaggatgttgctgttttgcgtatcgaagcaccaaaggataaactaagacctatacctgttggtgtgtcagcagacctactggttggtcagaaagtatatgccattggaaacccatatgtcatgtacggccgcacttacaggcgccgtcgtgacgccaggagggctgcagatcgcgcagccaaggcaggcgccacaatcagtggctaa

SEQ ID NO: 9182 - DNA, 285 bp, Zea mays
  Peptide Sequence Number=SeqID_52557
atggccggttcggccgcccgccccaccccgccggctcggccgctcggccgccccgcgcactgccccgcgcccctgcgcgcccagcggctcggccgccccgcccccctgctcggccggctcggccgccccctgcaccgcccgccctcgccagtccggtcgcccgccgccggctcagccgccccgggtggttatgagattgatggttctggttatgattatggtgctggaaaagatgaagctgtggaaggagacttccaggagttccaagattacgacgagttctag

SEQ ID NO: 9183 - DNA, 2010 bp, Zea mays
  Peptide Sequence Number=SeqID_52558
atgccatcctcttcttcttccgccgacgccacgccgccggccgccgcctcgtctgaggagacgttgagtaacgtgatggtggaggagttgcgcgccggcgactctgttgaatttggtgtgtcacggatgacgttagcccgtattgaagatatgcagcggttgggctactttggcggtggagtcgctcgtgctccggggacggaggaagtccccgagccggaaggcgagttggttgttttcgaggcgttcttcgtcgccggactccgcttgcctgcgcaccgggtcttcgaattaaatcaactgccgtacgacggctaccctggtcaagacgaagcggaccgccgtggaaagaaaccggcggtggagaccggaggcgaccctgcgctggtggccggcgcctcctcgaaaaagagaaaattagtgatggacaaggatcgccaaggggcggcgcgaaaacgccaggcgactgtgagggttcacgaagctcggccgaagaggcagcggggaacggcgaaggctgaggcctccggcggaggcaagccgccgctgccggcgaaggctggcgcccctgcgcccggcaaggcgccggaggtgacggtgggcgccggaggtcccaagctgacgaaggtggtgccgtctgccagcggagcggcggaggctgcgaaggcggccggaacgttaccgccgcccgacaagcgcgttgccgacttcggcaccgagattaatgtggaggattatcttggggggtcggacgagggcccgcttgctctagttgtgcctggcgcggcgatcgcgacggctgcgccagcgccgaaggcggggggagaggcccttggcgccggaggcgaggtgtctgccctcgcgctggtcagggacgaggcgggcgtggcgacccgccggctgaagggagcgacggaggcgccgagtcgagcgacggaggcgctgagtcaggtggctgacttcaccagccgcactgcgtcgggggcccttacggcagctttgtctgccgaggtcgagagacttcggatgcaacatgcggacgctgtccgtgagaagtcggcctccgacagcaagtgccgcaaactggcggagaaggtggccgcccttgagaaggagaaggctgacctccggcgccagctggcgggggagaggagggaggccaacgaagccatcgccaaagagcaggctgcgcaggcggaggccaggctggcgcgggcggaaggcaatatcgctaaggagctcgccggagagctgcagcggcggcttactgccttggagagccgcgcggagggggccgaggccgcgatgcgagcggaggccgaacggacgcgcacgcagctcatgacttcatatcgcgagctgggtgtgcggacgggtgacttcgaggtgccggagcgagaggccggacttcgctgtctggaatgggtgcaggaggaactgcaggagctccccactgtcttggcggggttgatgtcgttcacctccctggtcacctgcgaggcagcgatgaacgcgctctctcgcgaaggctgccggcactttgaggccctcgaccaggtggatgaggattttgggcgagatatctttgaggtcgaagactccgtggtgaaagagtccgccggggccctctatgaccggatgtggggttcttacggtcgtgaggtggtccgggcgcgggccgaggctgcgagggctcaggcggagcgcggcgagcgggtggacgacttcggggcgctgaacagcgcgctgcctgagccggagacgacccctgcggaggccgcgactggagtcgccccggtaccgaccccggagactgcggaagatgcaccaggcgcccctgcacctgctgcggccggcgaagaccttcccccaaaggtggccgaaggcgcgcccgatgcccccgcagctgctgtgccgagcgctgaagatccagcggaggtgggggcggaggcagcggcggaggcctcggcggaggctcccgcagcggcagggccttcgcaggtggcatag

SEQ ID NO: 9184 - DNA, 438 bp, Zea mays
  Peptide Sequence Number=SeqID_52559
atgtcacaacagtcggctccatcccctatgcctttgcctctgcctccaccaccacagtcgttgggcatccaaggagatgatcgtcgtaccattgattttgtacgtaccaagtccactgatgagaaatgggccaccgtcgtgttcatggcctttgtatcaagtgttgttcaagagttgtttaaggtattccagtgggaagacgatcttcagtctacatcactgcaagaggacaagtccccacatgagcaggtctttctgttggtttctgcaacagctgttcctggttcccgtactctttgtctcgagggggtgattcagcaatgtcctatgcacattctagtggattcgtgccccagcttctggaattggatcaatggcagattaaaatgttcaaatattcctttgctcagcaagaaattagctatttgggacatgtga

SEQ ID NO: 9185 - DNA, 102 bp, Zea mays
  Peptide Sequence Number=SeqID_52560
atgcctcctcttacggggtccttagcccctctgtccaagcccccaacaaagctaagtccagtccctacccttgaggagcctaggccattattgaagagttaa

SEQ ID NO: 9186 - DNA, 156 bp, Zea mays
  Peptide Sequence Number=SeqID_52561
atgcccattggtccccatgggtgtcttgctgggcttggcatccttcattccaaacttggtgagacggtgtcgacaactgtagcaaaatggttcgtgccagatgcacgagggacagtggacaatgtttacaggttcgggccgcttagagatgcgtaa

SEQ ID NO: 9187 - DNA, 174 bp, Zea mays
  Peptide Sequence Number=SeqID_52562
atggatggacaaagtgcaaatcaaagagtaaagccaagactcagctcagtctggcacaccggactgtccggtggtgcaccggacagtgtccggtgcgccaggctgactcggcgtgaagtggccgctctcgggaattcgccgacggcgtacgactataattcaccggactgtccg

SEQ ID NO: 9188 - DNA, 2340 bp, Zea mays
  Peptide Sequence Number=SeqID_52563
atgcgcctaagggtcccttttatagccccaaggcagctaggagccgttgattgcattccaggaaggcaattcttgccttctgtcgcctggcgcaccggacagtccggtgcaccaccggacactgtccgggctcgacccccgcctcagcctcggaaggtgatctccgcctcgcccgaccccagggctcggcctcgacctcgacctcggaaggtggtctccgcctcgcccgaccccagggctcagcctcaacctcgacctcggaaggaatcgcgtcctcgcccgaccccggcctcggtctcaggaggagtctccgcctcgcccgaccttgggctcggaccgaccacgccgcaggaggtacatcattaccctacccctagccagctcaggctacgggggaacaagaccggcgtcccatccaggctcgcctcagtaacaagtaatgatggctccccgcgtgcgtccatgacgacggtggctctcagccccttacggaagcaaggagacgtcagcaaagtcccgacagctccgacagctgtgcttctacagggctcaaacgctcctccgacggccacgacaccatatacacagggccctagcacctctctgacaaccacgttggcatggacccccggggtcaaaacgccgacagctagcaagagagacattcaattcttcaattttagcaagttggcaaaaagggcacttgtggccgacgttggggaagaggagtcctttggtgacggcgatgttggcggcgtccttgtcggaggaggagttggaggagctttcgtcggagttccactcgcggcacacatgggcatcgccgcccttcttcttgtagtatctcttcttttcacccagttatcttcagaggcaatggagatcaaccgtcggacaactgtctcaaatgcgcacgccttcctccttccccgcggcggccaacgcgacccgcgtctcctttccgcgctcctcctcgcttccctctgcctcgtgcctcactcgcagcaaaccagtgaccacgccgccgcgctcctccgtcgtgtatacccctctgtatacctcagggacgtcgcgcgcctcccgccgcatctcctccgcaggagcctcctcggccagctccactccctgctcctccgcaccggccacgtggcctccgacgctcacgtctcctccagcctcgtccaactgtactgcacctgcggacatgtcgccgacgcgcgcagcgtgttcgacgagatggccgtcagggacgttgtggcctggaacgttatgatcgccggctatgtgaaggctggggaccaggcccacgcgcgggagctgtttgatgctatgccggagcggaatgtggtgtcgtggacgacggtgatcggggggtacgcgcagatgaagcgtccggagaaggcagtagaggtgtttcgaaggatgcaggtggagggcatcgaggctgacggtgtggcgttgctgtcggttctggcggcatgtggggatctgggtgcggttgatttaggggagtgggtgcacaggtttgtggtcaggcggggcttgtgccaggagataccactgatgaattcgatcatagacatgtacatgaaatgtgggtgtattgagaaagcagtggaggtgtttgagggtatggaggagaagagtgtcgtgacttggacgacactaattgctggatttgcattgcatggcctcggtttgcaagctgtcgagatgttttgccggatggagagggagaatatggcgccgaatgctgttacttttcttgcaatcttgtcagcgtgtagtcatgttggactaactgatctgggtcgttggtatttcaatatcatggtctcccagtacaggattaagccacgagttgaacattatggatgcatggttgatctacttggtcgtgctggttgtttaaaggaggcccaggatttagttaagaacatgcctttgaaggcaaatgcagcaatatggggagctcttcttgctgcagctaggacccatggtgatgctggccttggagaacaagccttgctgcacctaattgagcttgagcctaacaacagtgggaactacatactcctgtcgaatatttttgcagaacaggaaaggtggggtgatgtgagcaaacttcgaaaggctatgagagaaaggggactgagaaatgtgccaggggcgagttccattgaagttgatggcatggttcatgagttcacttccagggattggtctcatcctttcatacatacaatatgtgaagtgttatgtgagatcgacactaacatgaaatctgttggttttgcttctgttttccctgaagtactacatgttattgaagaaggctaa

SEQ ID NO: 9189 - DNA, 210 bp, Zea mays
  Peptide Sequence Number=SeqID_52564
atggctggggcgagcgcgagggagagggagggtgggtcgtgccgggccaaggaagaagaagggaggggcagaggaagaggagggagaggggctcaccgcgggtcgtacctcacattcctctacggtaacccagttggttgggtggacataggcccctctttggtcgaccaagctgaccaaagggctaatataggatcaaaaagttggtaa

SEQ ID NO: 9190 - DNA, 450 bp, Zea mays
  Peptide Sequence Number=SeqID_52565
atggcatctataaagcgcccatatcaaacagcaagcacatcgctgtcccagcagcagcgcctgcgcctgtgctctctcctcttcttcctcaaccctcgccgcaacaggagagctctcgatcagcgccgcccggcccacctcgcccgcggcctaacattaggctcggggactacggtgcagccaaggatgacttgccgatctatcgtcgatcaacgagcgacgcctctgatgtctgatctcgacatctatcgtcgtcagaccatcatcatctatcggcaagttgttcttggctacaccgtggctcctgctcctgatgtaaggctttgtcgtctgcggcgacacgtacttttttttcccctatcgtcgtctgatgatgatgatcgagctgagggtaatttaaggaaggtcaatcacatcaaatcaagtttttgccacatgacgcttgaataa

SEQ ID NO: 9191 - DNA, 435 bp, Zea mays
  Peptide Sequence Number=SeqID_52566
atggcgcctcctgttgacgtggctggtctgcgccctaggttgggcgatgtggaagctcctccgaagccgaggtcgagtctgtcttccgtggccgagctttatgctgatgggggttaccagctgagaattaggagccttgagggtacccctaattatggtccccgacaagtgggtaaggtaagggataagcctgacgatgagggcccacaggagggtgaggctatagtcgagtgcaaagaaagattgagaagctccagcagggtcgtgcacttgacactcatattgaagagcaatttggtagtgggagattgttggcttgcgtttcttccagccctagactgtggtcgagctgatggctacatctttgagggtaaagtggtcgagttctacatgaataagctccggaggaagaagggcaagggtgctgcatcttag

SEQ ID NO: 9192 - DNA, 480 bp, Zea mays
  Peptide Sequence Number=SeqID_52567
atggcgattcagctactctcattttgtgcttttctagagcttcattatcgcaatttgttccattgtaatggccacattttctactggaatcgacaccaaatccttccaggattcgtcatcgactcgagccaggtgagggttcagcgtggaggttcgtcgaggtctgctactagtagctctcgtcgcttcactcaagatccagcagaagtggagcaactgcgagaagaacttatgcaacatcaggattacttgaagcaacaagctgcgcaacatgaatattatgctacacagattcgacaacagcaaacactcatacaagggctacggtcagctgtaggaaggaagccagctaacttcctaggggctacaggcaatggaggtgacgctagcggcggcgaccacgctccaccactaccttaccaggacgtgtcaacacaacaacaaagaaggcatgttactctattcttctcagtagaatag

SEQ ID NO: 9193 - DNA, 537 bp, Zea mays
  Peptide Sequence Number=SeqID_52568
atggagccttctccctcatcgtacaggtccgctctctggttttatcttctctgttggaccgcgcctcccctttgctcgtcttccagcccgcccccatggcgcccctggccttccactagctcggcaacgctagccccttctctgcactggcgctcctctctcttcctcactactcacgcgcgcccgtgcttcctattcctggcgtcggatccccttccccacgcgtcctcttctccgccaggcatccatggagccgtcggccatctcccctgcgtcgagcgccctctcctactcgagcatcgccgccatggtctcaaccctagcgctcggctgctgccccagggcgagttcctttccatggccgccctcaaccccatggtcgagctcgcccaaccaatcgcctccatcacaggtgctgttttgtcctcccctttcatcaagtttggtcctcggtgcccaagcttttgtgtccctgcagcacgccgtgcctgcgcagccctgacaacgacgtcgtccaacccgtttagcgcgctctag

SEQ ID NO: 9194 - DNA, 960 bp, Zea mays
  Peptide Sequence Number=SeqID_52569
atgtccgagccctgggtcgggcggagcggagttcgccgtcttccgggtcttagcccgtgtccgagccctaggtcgggcggagcggagttcgccgtcttccaggtcttagcccgtgtccgagccctggggtcgggcggagcggagttcgccgtcttccgggacttagcccgtgtccgagccttaggtcgggcggagcgaagtttcctatggagccttcggccgggcctgactgcctgtcagtctcactctgtcaagtggcaccgcagccagagtggcgcaggcggcgctgtccttctgtcaggccgatcagtggagcggcgaagtgacggcggtcacttcggctctgccggctggggggcgcgcgtcaggataaaggtgtcaggccacctttgcattaaatgctcctgcggtttggtcggtcggtgcggcgatttggtcagggttgcttcttggcgaagacagggccttgggcaagccataaatatgtccgtcgctgttggggggcctcgggcgagacggaaatcctccgggctttatgctgatgggggttaccagctgagaattaggagccttgaggcccgggtgtacggtcgggtcccaagttctcgggctggtatgttgacgctgtcaatgggtcggccggagccgggtttgcgagagcagcccccgagcctctgcacaggggcgagaagggcgatcagggacagactcggcttttttacatacgcccctgcgtcgcctttccgcaaggaggaggggggaaagcgccatgttgccctcgatgggcgccaaaacatggtgtctccggtgagctacaagcgggtgatccgagtggacgtccgtgccccgttcgttaggggtcggctaggggcccagaggcacgcccaaaagtacctgcgggtgatctgccggacctggtcccctggcgatggggtccgagggctcgatgcctccctctga

SEQ ID NO: 9195 - DNA, 801 bp, Zea mays
  Peptide Sequence Number=SeqID_52570
atgcataagggagcgcgaagacatggtcgcctcccaaggggggtcaccctccttttaaaggcggctctccctacttgcgtccccagccgtcacgggctgagtcttctccaacacactccaaggtcctcccctgcggcgcgggggctgggtcccacacgtcatgcaagccggctcagagcagaagaagccaaaccgccgtgcacggtgcgtacaaccgcccagcggttacaagcgactctccacttttgcccagaccaacgggcgaaagggcgggcagccgtgcaggcggcatgcaaccgcgccaagtgggcgcacttctccgactcccaacacgcccagcatggaagcccaggcccacgcgtcatgcaaccggcgtgccgaatgcttcgtgcatgcaactgcatcgccacttgcgccactaccgcgcctcctcgactgcggaaccaataccgcgactcgaggagaagcgagcgacgcttcgccttcgccgtaatgaccgcgtcaaaagagggaccgggaaagggggataccccgaaaaggatccttccccgtgaaggaaccaggccccgagcctccctactgatcagaggttcgaaggctggcccctcggaagggttcgacagccgcctcagatcacgtgggccctacacccactactggtcagaggttcgaaggccggcccctcggaagggttcaacgaccgcctcaggccactcgggctccacgcccactactgatcaggggttcgaaggctggcccccgaagggttcacagccgcctcagacgccgagcgagggatga

SEQ ID NO: 9196 - DNA, 807 bp, Zea mays
  Peptide Sequence Number=SeqID_52571
atgggggatatccgccgtctttccgcctcgtcgttggaggaacgcaactctgcaggagttggtacctttcagccatcgttcggcttcaaggattttcatcagccagcccggctgtaccaccccccccagccggcggtcacccaagacggtgaccaccagcccctgggtggggagaagcacccgggctgcgatcttggtcccaccctcagcttcaaggatgttcactatccttgctggggtggaggccgggctgagccggagctctacctcccgcgcgggttcgtgggtcaccctctcctgcggcgttcgagggagagggcgctcgctggtcctgcgggcgggtcggacttcgacagtgcggggccggtcgacggcaggcgtcgtctgccccagcgtgtcgggctcgtcggcttggcccccagtgccccctcctgccggaaggcggctgccgcgccgtgtgcacgggaggaccgcccaagatgtcgcgcgctgctagggcggcgttcgtgttctggagcggtcctgcctttgcaccgatacggtgcctccgcggggaggtcggtgccctgctcgtccgggaggatccgagtggggatctgccggcgggctgacggcccctgtcgtcggtgccgaggcggaggcggctcgagaagtccccgtcgccgacgggatcaccgccatcatccgcgcttcgggcctccggctctttgtacttgtcctcgcccctcgagcgtcggcgtgggcgagggcaaggttgcagcagcgttcgccctgaggccgtcgccgctgcagtctggccacccgtag

SEQ ID NO: 9197 - DNA, 363 bp, Zea mays
  Peptide Sequence Number=SeqID_52572
atggcgggcatagctgggattgcgcaccgaagaagaacgccgccgcggatcaggggcagggctaaccgtcgcaagtcttctggtgagtgccttctcgattggttcgcatgtgtccccgcatcgcatgggattcctaggataagcgtttggggtgccgtggggcgttcaccgatcatggcgccgccgcgtgatactgctggcactggcatgccggtctgtcgagctggtgaagaaggggtccggactgttggcatgttgatctacggtttagattgggtatggttccttggctgcgcgctcggatatgggggtgaaaccgtgtccgtagatcgggttgtcaatggtgggagattagaactgtga

SEQ ID NO: 9198 - DNA, 597 bp, Zea mays
  Peptide Sequence Number=SeqID_52573
atggcgacggtggcactcggctctcacgcatgcacggtcatggaggcggtagcagtggatgacatggggagcggaatacggggaaggaaggggggtccgcgcccacaccttatggactggcgagtccgcgccgcgagagaggaaagcggaatggtggttgaaaccacctgcgcgacgaccgcgcatccgccatccgccatgctcgcagatttggttgaagacggagctatcttcgggagcccaccgatgcaaggagagggtccagcccgaggtcgggcgaggcggagacttctcctgagaccgaggccggggtcgggtgaggacgcgattcctcccgaggccgaggttgaggccgagccctggggtcgggcgaggcggagaccaccttccgaggccgaggtggaggtcgagccctggggtcgggcgaggcggagacctcctcccgaggccgaggccttaaggtcgggcgaggcggagcttcctgttgcgcctgaggctgaacttggctgttgtcaacttcaccctggtgggtggcacaacagtcggagcggagcgagcagcactgttttcctgtcaagtcggtcaacgaaagggtga

SEQ ID NO: 9199 - DNA, 270 bp, Zea mays
  Peptide Sequence Number=SeqID_52574
atgttggcattcaggctcaagcatcacttgagcgggatgatgagtggttcgctctttacaaattccaattggtttgcatttgacgaggacaaggcactgaatgatggtttggttagctcagaagcatccccatctccaaattcggaaatatctgcactaaaagaggacgatgaacacgatgaagtcattcttggcaaaattatagatgaaataaaaggttctgaaccaactctaccagtcatcaagatatcgacgacccttagctcatga

SEQ ID NO: 9200 - DNA, 723 bp, Zea mays
  Peptide Sequence Number=SeqID_52575
atggcggacctgacgaagccgcggtgccccaccacaaagaccttggcgtccttgtcagcgaggaaggacgggtgcagatcttccgaggggtcggaggtgagctcaacatgggagggcgagcttgcggagggccgtatctgccccggcgtctcacagttgagtgacagccctaggtgccaggaagaggtctgcgccggacttttgcaaagattcgcacgtttgcgacctctggcgacatttgaacactggaagaaacaaaccgccacgtgttcgacgccgtctgccgcgccagagcacgcccgcgccgcgcccaagccaagccagtgccctgccattcccaaccccgtccagccctcggagaagactgtgcacgtctccgtgaagctccccgagcgaggaatcgggctctgcttcaccggagaggccggcccaaggtcaccggacttcaaccgaccgccggcaaccgtggaccgaggtacaccgtgcacctctcttcgattccttgcacggttagactccttagacctccacgaagctccccatgcccttggattgaactatgccgccgtggataggccggagcacacgccgccgacgagctcgcccgcctgctcacgtggaccgggcgattccggccatccccgacgacgagccgtacctcgacgtgatcgccagaccctccccgagccaaccctacccttcgccggacctccctcgccgccg

SEQ ID NO: 9201 - DNA, 705 bp, Zea mays
  Peptide Sequence Number=SeqID_52576
atggagaagggtcgccaggatgcacagcggaagaaacgtcgggcccacgtcaggttggcggacctgaggcgggaggtgaaggtggcgtggcccagcgcgaagcctaccgctttagacgccgaggcagagtctggacagctggctgttgtgccggcggcgtcgtctactggcccggtggtcacggcgaccgggacgaagggtgacacggggacctcggcggaaccgtgggctagattttgcgccagcgacgaaatcgcctctactgccgctgcgacaggtgtggccgcctcagtcgcacaacagctgaaatatgcgaccgccttcacggaacgtattgctttgggggtgctaaccttggagttttccaccgagaggcagcgacttgagggaaggattgagcgcctccggacgcaacacacagaggcagttagggacaagtcggcgacggagaacaaaagccgcaatttgcttgataagctttcggcggcagaaaaagaaaaggaagacctcagccgtcgtcttgcggaagaaaaggagggcacggaaaaagctcgcacggaggcccaagctgcccgcgtagaagctgacatcgcgcgtgttgaggctggtcttgccctcaagcgcgccgccgacgcggagtcggagatgaaaagcttgtgcagctatactgagaagacggaggcctcgcccccacgccggtgttga

SEQ ID NO: 9202 - DNA, 234 bp, Zea mays
  Peptide Sequence Number=SeqID_52577
atgggggagctcggggaatttctccctgtcgttcttcggtaccgcgagcccgcagtcaggcccggcctcaggcaccataggaagctccgcttcgcccgacccagggctcggactcgggctcagcccctgaagacggcgaactccgctccgcccgacccagggctcggactcgggctaggccccggaagacggcggactccgctccgcccgacccagggctcggactcgggctaa

SEQ ID NO: 9203 - DNA, 66 bp, Zea mays
  Peptide Sequence Number=SeqID_52578
atgggcgtgtctcggccgatagaaccgtcacttgccagttatttttatctcttcatatttgagtga

SEQ ID NO: 9204 - DNA, 156 bp, Zea mays
  Peptide Sequence Number=SeqID_52579
atggagaagaacagcttgcttcagaagcagaagccaagggacgacgtaagtggaggccaagtgtttgggtttgtggagctgagtgggtggtgtaatgggccgaaatatgaatatgatggaacgattcttgaagagaaaattacctccatcaactag

SEQ ID NO: 9205 - DNA, 127 bp, Zea mays
  Peptide Sequence Number=SeqID_52580
cggggcaacggctatttcggcgccaacggctacctgcaacgcattaaatgcgggcccagaagacagaagctccaacggtcggaatccaacggcattggtgacgtggctggcgcaccggacatgtccg

SEQ ID NO: 9206 - DNA, 930 bp, Zea mays
  Peptide Sequence Number=SeqID_52581
atggcgcctcctattgacgtggctggtctgcgccctaggttgggcgatgtggaagctcctccgaagccgaggtcgagtctgtcttccgtggccaaggttgagtccgagcccctgggtcgggcgaggcggaggccgtcggctgaggccagggcggagtccgagccctggagtcgggcggagcggagttcgtcgtcttctggggctgagcccaagtccgagccctgggtcgggcagagcggagttcgtcgtcttccgggacttagcccgagtccgagccctgtgtcgggtggagcggagttcgccgtcttccgggactttgcccgagtccgagccctgggtcgggcgaagcggagcttcctatggtgccttcgaccgggcctcactatctgtcagtctcactctgtcaagtggcaccgcagtcggagtggcgcaggcggcgctgtccttctgtcgggtcggcctttgcagctttatgctgatgggggttaccagctgagaattaggagccttgagggtacccctaattatggtccccgacaagtacccgcggcggaagaaagggtggagaggcttaccggcggcgagattgctccggcgggggagctcgtcggcggcgaggagtccggcctatccagggcacaattgaccaatcaaacgggtcagagagcttcaccagggatcaaggaaggcgggcggccgaagtccggtgaggtcgatcttcgccttccggtgaagttctgccaggtccgagggcttggaaagcttcacgggccaatggcggagctaaccgaagcgttggcacaacttgggggtgactggagtgggctggccacggtggccgaagctctggcggcaatggcgggcagaaaggagctcgccggagctaaggaggggtgtctggccggcgatggtgagcacggggtgaagtga

SEQ ID NO: 9207 - DNA, 789 bp, Zea mays
  Peptide Sequence Number=SeqID_52582
atgaccgaaaggtaccaactcccgcggagttgcgttcccccgacgacaaggcagaaagacggcgggtatcccccattcgggggcttggaaggtggaaagacacgatgcataagggagcacgaagacatggtcgccttccaagggggtcaccctccttttaaaggcggctctccctacttgcgtccccagccgtcgtgggctgagtcttctccaacacactccaaggtcctcctcctacggcgcgggggctgggtcccacacgtcatgcaagccggctcagagcagaagaagccaaaccgccgtgcgcgatgcgtacaaccgcccagcggttacaagcgaccctccacttttgcccagaccagcaggcccacgcgtcatgcaaccggcgcgccgaatgcttcgtgcatgcaactgcaccgccacttgcgccaccaccgcgcctccttgactgcggaaccaatgcagcgactcgaggcaacccagcgcatgacccagcagcgccagcctggcgcgacggtcaatgcggccaaaaatgggccggcagtaatgacgatggcaggcgggcaggagcagcggtcacgtcgtcagccaagctcacgtcccatccgggggcagcgagagaaccctctctcacggcgtgaagacaacgcgcccgtgttccgttcctcgaacggctcgcgcacgcgcaacggccgccccaccaaccactcgccccgtcgcattaactccgcggcgggacaggcggcgcctctggcaggagaagcgggcgacgcttcgccttcgccataa

SEQ ID NO: 9208 - DNA, 657 bp, Zea mays
  Peptide Sequence Number=SeqID_52583
atggcgctctcccccctcctccttgcggaaaggcgacgcaggggcaggctcgggggctactctcgcaaacccggctccagccgaaccgttgacaacgtcaacataccagcccgagaacttgggacccgaccgtacacccgggctacggccagctcgcatgagggaacgatcagaccagccgaagcattacgcgaggcattaagacctcgaaggagtgaaaccactcctccgaggcctcgggggctgcacccggcgggtgcgctcgcgcgcacccaccggaacaaaacgcaaccgagaaaggctggtccccttgcaaaaaagtgcgacgaaagcctccaagcgagtgctaacactcccttcgaggctcgggggctactgtcggggaccataattaggggtaccctcaaggctcctaattctcagctggctaagtcccggaagacgacgaactccgctctgcccgacctagggctcggacttgggctcagcccccagaagacgatgaactccgctccgcccgaccccagggctcgggctccgccctggcctcagccgacggcctccgcctcgcccgacccaggggctcagactcgacctcagccacggaagatagactcgacctcggcttcggaggagcttccacatcgcccaacctag

SEQ ID NO: 9209 - DNA, 594 bp, Zea mays
  Peptide Sequence Number=SeqID_52584
atgggcgggggcctcctggcagcagcatccgccctgaggtcattgctgccgctgttcggccccccggagcagaagtcgtcgtcgtcgccgctgctggagcgggcgacggcgtgccgttcgtcggtcttctgttgctccgcaggccccccccccatcgagtggggttgttcgtacctgcggaggtggaaccggagttccatttgtaatggcactttgaatgccagtgtttttgttcattgtggctgtcgaggcctgaacataaatgtttgtgcgagcgagagttgcttctcgcggaaggtgatgagtgaggtatccgtatcccggaggcgtaggagtccctcggctcggtcggccttgccgcttacgcgcactcttacccgttcatggggctctgtcaccgacgcagtcgaggaggctcgaaggatcgcttcggcagaaaagcttccgaacgtgaagacttgttcggtccgcggaatcacttatccgaacgtgagttacttatcgcagaaggtgatgagtgaggagtccctcggctcggtcagccttggctgcttacgtgtactccgtcgttttcaggatccactttcgaagtag

SEQ ID NO: 9210 - DNA, 69 bp, Zea mays
  Peptide Sequence Number=SeqID_52585
atggccattgatggccaaacgcgagttggggggaaggcgaaaggtcacaacggaggttatttattataa

SEQ ID NO: 9211 - DNA, 678 bp, Zea mays
  Peptide Sequence Number=SeqID_52586
atggcgtcggctggcctttggcgcgacgcggggcacgcgaggtcgggcgcgggcgtgctctggtgcgcgcagaacgcgtcgaacacgtggaggtgttcatctgcccgtgttcaaacgcttgctgagatcgcaaacgtgcgaatcttggcaaaaatccggcgcagacctcttcctggcacctatggctatctcttatatgctggaactgtaaccggggcaaagatcacggcggtgaggctcataggcggtagtagagctccggtggggtggttggtgacatcggggaggtcacggcggtcacatcggtgtgcgggtcggcgtcggaggtggctggagctgctctggccacgagcgcaggtggcgaaggtcgtcggtggcacctactctggccaaaccacggcggtagggttcaatcaaggtgcacgaggagctcctctaggtgatgtagaggctatgcgcgcaaggaatcgagaaatggttcagtgggttacccggtccacgtgctccggcggggttacgaactccggcgagcgtgatcgcactgttcctgtggggctggtcctcggctcaagcttgggaaagcttcacggcctctcgaggaagctatccgagggcttggatcgagaggaggtgggcgggattggtttagccacagtgggcgccctcgggcggctctga

SEQ ID NO: 9212 - DNA, 411 bp, Zea mays
  Peptide Sequence Number=SeqID_52587
atggggaagcctgtccaatcactcctcatgctcctcctcagccgagtgaccgcacttgtacccaccataaccgaaatgggagaccacgtctcaggtcgcgtgagtggtaaagtctgcgggcaggttcactcaggcaaacgtagtggattaagacttggattgccccttaaaggttttagtaggtactcaaggggttttgctaggttggttaggcagcatggatcaagcaatctcattagctgcgagaagcagacgattcgaatcgagtttttatccttgcaagtgaccgcacttgtacccaccataactggaatgggagaccacgtctcaggtcgcgtgaggggatatgtctgcgagcaggttcactcaggatttaataacattatgctaaaggaagaaaaactaagttaa

SEQ ID NO: 9213 - DNA, 192 bp, Zea mays
  Peptide Sequence Number=SeqID_52588
atggccaaaccactcccgcccacctccgctcgatccgagcccacggattgcaaccttgctgacggagagtacatgctcatccctaagcaaggagttgatcgggaaggagtccaggagccggcaccagagcctgccaccgaggatgtccccgcagccccagctttggaaggcaagccccggttttatgcataa

SEQ ID NO: 9214 - DNA, 717 bp, Zea mays
  Peptide Sequence Number=SeqID_52589
atggaggacttcgaggagttccaggattacgacgagttcttgtttattcttagtggcaaacccccaatggttcgtacaatccaaaccacccggaccaacaccaactacatccctccgccacgacaagttctcgtctacccagtggtagtcaaggaaatccctgtggatctccctcgcattcgtgtggtgaacggagttattctagaggacaactcggaggagtttctgcctacacccaccccattggcagaatcactagccttcgtagctggatcgtcatcttcagcaccgccagcaccagcagtccaagaccctgctcccggaggcgatgacccagatgactttggtgacgatgatgaagacgatgaagatggagaagaggaagaggaggaggagaacatcaacgaggaagccaacagtgaacagcaggaccacttcgtggggatatggcatgccatcgaacattatacatcaatgttcgagacggggcacttccctaacctgctgcaggatgttctgcatgcgttgggaacctacgttcgacccctgtatgagaccaggcgagtgtgtgagccccctcgggcttgctactacatcactcgcattcatgtcagggtgatggatgcaggtgatagagggttcaggactctatcagctcatgagtctctgacgccgctatccacctacactgcttcggtcagcgatgctgctaggtga

SEQ ID NO: 9215 - DNA, 630 bp, Zea mays
  Peptide Sequence Number=SeqID_52590
atgcaggcggcatgcgaccgcaccaagggggcgcaccctttcgacttcgacgcgtccagcatggaggcccaggcccacacgtcatgcaaccagtttgccggttgctacgtgcaagaaactgcaccgccactcgcgccactaccgtgcctcctcgactgcggaaccagtaccacggctcgaggcaaccctgtgcatgacccaatagtgccaaccaggcacatcggtcacgggtcaatcagccgcgggagaaggcgcgacgatcgatacggccagaaatgggccggcagtaatggcggtggcaggcgggcggaagcagcgggaccgggaaaggggataccccgaaagggatccttctccgcgaagaaagcgggcctgagccccctactgatcagaggttcgaaggctggcccctcggaggggttcaatagccgcctcagagcgctcgggctccgcgcccactactggtcagaggttcgaaggccggcccctcagaagggttcagcggccgcctcaggccactcgggctccgcgcccactactgatcaggggttcgtaggctggccctcgaagggttcgacagccacctcagacgcagagcgagggatgaccctgggtacgttcgatacataa

SEQ ID NO: 9216 - DNA, 2301 bp, Zea mays
  Peptide Sequence Number=SeqID_52591
atgccgacctcttcttcttctgctgccgctacgccgccggccgacgcgtcgtctgaggagacgctgagcactttggcgatggaggagttgcgcgccggcgacacggtggatttcggtgtgtcgcgaatgtcctcggtccgcgtgcaagatatgcagcagcttggttactttggcggcggagtcgctcgtgtcccggggacggaggaggtccctgagccagaaggcgagttggttgtcttcgagacattctttgccgctgagggcacggtcgaggaccatccggggctccccgtggccgagatgtgctcgcattattactcagcatacccgcagtttgaagtggcggaggaggatgcagacgaaggggcccttcggtgcgcgaccggcctgagcagcgggcgcgatttggttgaggagtttgtggcgtatggggtgtggcctttggcgcatggctgggcgctgggtgaagtatgccctcgccagatgccttcccgtggtgggatgctggtgcgaagtcccgccttcgcactggatctgcatagccgcgatccggccgcctttgtgtgtgaggcggaggatggggcggtgcggattgttggtcggtacatgccgaagacagagggccagcgtagctgggatatacgcgggtccaacgaccgcttgtacagggtcttcgagttgaaccgtctgccgtatggcggttatcccggggaagacgatgtggatcgtcgcgggaagaagccggcggcagagactggagacgaccccgcgccggcggccgcctcatcctctaagaagaggaagctaggtattgctacgggaggactgggggtttccgatggttttgctagggaattgatgaggacatgcgcggcccccggggggaggatgtcttcgcccgagctccgggagtcttcggcgcggatgctgaaggttaccgggggttggtggcctaagaatgttcctatcccccgcgcggtcggcgaagacttttttacatctcgcatggttcgtgactggagagtgtttccttatggacgaaatattgctgctgttgtgtcggcagtgatggacaaggatcgtcagggagctgcgcagaagcgccaggcggtcgtcaggctgcctgaggctaggccgaagaggtcgtgggggactgcgaaggctgctgcccccggcggcagccagccgacgctggcggcgaagtctgccgcccctgggtccagcagggtgccggaggccgtgaaggcgaccagagctggcggaaccaagcctgccctagccagagctgcgaaggcccgagaattgcctccaccgggcaagcgcgttgccgacttcgccaccgagattagcgtggaagattatctcgttggtaagtccgccggtggtgagattccggcactcactgccgtcaaggatgaggcgggcgctgtgtcccgccggctgaaggaggcattaagtcaggcggctgactttgctgaccgcgtggcgtcgggggcccttacggcggttgtgtctgccgaagtcgagagacttcgggcgcaacatgctgacgccgtccgggaaaagtcggccgccgacagcaagtgccgcaagctagcggagaagggtagccttgccagacagcgcgccgaggaatgggaggagcggttcaacgctctgcagacccatgtggagagggccgaggcttcgacgcgcacgaaggctgagcggatgcgcaaacagcttatggactcgtaccatgagctgggcgcgcggaccgttgacttcgaagtgccagaacaagagcctggacttctctgcctcgagtggctgcaggaggagttgctagcgctcctcgccattgtggagggctttatgtcctatgcctccctggtcacctgcgaaggggcgatgaacgcgctgtcccgcgaagggtgccgacactatgaggtcttcgaccaatctgatgaggatttcgagcgcgagatttacaaggttgaggaccctatggtgaaggaatctgcgggagccctctttgaccggatgtggggtccccacggtcgggaggtggtcagggagcggtccgacacggcgagggcgcgcagcctgattcggagtcgaacccggtggcggctgtgtccgaagatcggcccggcgccgcccccagaaaccgtcgaaggcgctcctgatgcccccgcagccactgcagccggcagtggctcgtcgccaactgctgcgccgagggctgaggatcctgtgaagatggcggcggagtctgcagcggaggatcccgcgatggctgggtcttcgcaggtggcttag

SEQ ID NO: 9217 - DNA, 429 bp, Zea mays
  Peptide Sequence Number=SeqID_52592
aaacggtacaagttgctggaagatggatcatattatatgaacactcgttacttgtttgagtataacgcgaacgatgtcgttgcagatgcgatgtactatgcacgaattcaggctataaaggcatggtacagagtaagtgctgatgatcggccgatgccgaataccaaggcgaagtggtcatcaatttaccttacagaggagcaataccttgagagggttatcgggccttgtgaaggtggtgggcttcccttgagtttagtgccatttctgaaaggaacagaggaaaccgtggtactgagtcgttccacaactacagtggcgatggacatgtgcgcttggctaagcaaatggttgggtatttttgattctacgattgattcttgggagctaagacgccgtggacaacactccacatcctcgtcttcgtaa

SEQ ID NO: 9218 - DNA, 276 bp, Zea mays
  Peptide Sequence Number=SeqID_52593
atgaccgcagtcacttcgccccctttactgatcgtcctgacagggaaacaacactattcaccccgttccgactactgtgccaacccccagggtaaaactgacgacaggagctccgcctcgcccgacctcaagcctcggcctcagcctcagcctcgagcgcaacagggagctccgcctcgcccgaccccaggcctcggcctcagcctcggcctcggaggaatcaccgcctcgcctgaccccaggcctcggcctcggaggagtcgccgcctcgcctga

SEQ ID NO: 9219 - DNA, 411 bp, Zea mays
  Peptide Sequence Number=SeqID_52594
atgagggtcactaaccgaggaatcgggactcacagaccattgtccgcgacgcagcgcgagttggcggcacctgagcatcgcacggtggttcttcgccggcgaactcactgccccgcacccccgtgctcccgtgtagaggacttgcgtggcctgcggaccaagatccacacggacgtagaggagaccgtggatacggatccgccgacgaggaagagccgagcgccgtcagtggcggccgacgcggaggatgagacgaggacgggccgggcttttatacaccggaggggtgagctgaagaccgagatcctcgggagaccccaggcaccgaacggaccaagcgagctccatctgaattccgcgtgcgccgttcggccgagtccgcgcgagttctgcgtgcttctgagtccgtag

SEQ ID NO: 9220 - DNA, 675 bp, Zea mays
  Peptide Sequence Number=SeqID_52595
atggctgaaaggtaccaactcccacggagttgcgctcctccggcgttgaggcggaaagacggcgggtatcccccatccgggggcttggaaggtggaaagacacgatgcataagggagcgcgaagacatggtcgccttccaagggggtcaccctccttttaaaggcgactgtccctacttgcgtccccagccgtcacgggctgagtcttctccaacacgctccaaggccctcccctgcggcgcgggggctgggtcccacatgtcatgcaagccagctcagagcagaagaagccaaaccgtcgtgcgcggtgcgcacaaccgcccagcggttacaagtgaccctccacttttgcccagaccaacgggcgaaaggggcgggcggccatgcaggcggcatgcaaccgcgccaagtgggcgcacttctccgactcccaacacgcccagcatggaggcccaggcccacgtgtcatgcaaccggagaagcaggcgacgcttcgccttcgccgtaataaccgcgccaaaaaagggaccgggaaagggggataccccgaaaaggatccttccctgtgaaggaaccaggctccgagccaccctactgatcagaggttcgaaggctggccccccggaagggttcgacagccgcctcagatcgtgtgggccctacacccactactga

SEQ ID NO: 9221 - DNA, 417 bp, Zea mays
  Peptide Sequence Number=SeqID_52596
atgcggtccaaggatctccgctctgaaggacgacgtcatcaccacgcccgggcaatcgctgccagggtcttctccgggaatccggcccgagcaagcggctcggccggtcgccccggggcctcggccagccgtcctccgagggcgacagcccgacccgaggcgccccgaggcttcagctggtcaactccggcgtcggtcccgctaacgaacgacccggttaggctccggccaaccaggtctccttttcgagccaactctgcccctgttcatgctgatatcgctacccctggcctcggctcatccaagagcggccaaggggtccctttaactaagctagaggagcctcggacaacaaggccgaccgagccgagggactcctacgcctccgggatacggatacctcactcgtcaccttga

SEQ ID NO: 9222 - DNA, 777 bp, Zea mays
  Peptide Sequence Number=SeqID_52597
atgggttcaacaaaaggagcaagggataaccgaaggcagccctggtctggcgcatcggactgtctgaggcgcttcgctataattcaccggacagtgtccgatgctccagaggagagcgactctgaactcgccagcttcggatttcagctccgctataattcaccggacatgtccggtgcacaccggactgtccgctacctcctgggggacattgccaactatttcttaggtatgatggtctgcagcctcgacaaatcgagcctacatcccagggggccaggaatggactactctacaccagcagggtcgcgttggaagctagctccgggcagccacacctgcggcagcgaccacctctactccaagcggctcgccagtggaggcggccacctctgcaccaacggctcgccagcggcggcggccacctttgcatcggtggcttgccggcgacggcggccacctcagcacgtgcgaagaggtcctcgcccccgtcctcctacgggggtgaggctaagaccatccaagaacgctaccaccacctccacgacgtacgacgtcttgtacgaccccccgggcagcgtcggagcagtgcggccggcggcgcaggggacgccacagatgtggtggacctgcgcatggcgcgaccgtcgcccgtgcggtggacggacagccacgccccgcttggtggcgggaggcagcgttggaggcggcaccaaaaccatcaaagccaaagagatggaggcgcagcatggcttgcttcccaccccaaagagttga

SEQ ID NO: 9223 - DNA, 954 bp, Zea mays
  Peptide Sequence Number=SeqID_52598
atgactcgtgggcctaggcccctgtgccagagattgggttgtcggtttcggcaagggcaaagaggcgcactatcgcaggcggtggcgtgcttcttcacgcgtcggttcgcctgctccacaaacagaaaccgacgcaccaagtgcatgacatgtgggcatgggcccccatgccagagatcggacgactggttgcggcgaagccgagggggcgtgctaccacggggtggtagcatgctccctgtgcggtggttcgccttcttgaccgttagtcgtggcaaagatgaagggggcgcactaccgcggggcggtagcacgctccttgtgtggcggttcgccttcttcgcactcgaggaccagcgcgccagttgtatgacttgtgggaccgggcccccgtgtcatgggatggataccccggtgtgcatcgggggaggcttctcgcggcgcttcgaggcaggagcaggggagtttgcctttaaagaggggttcatccctcgagtagcagccatgtcttgcttctctcccactcgcgacgtcctttcgcctccgagctctccgcgcccctttgcttcaaggtctctgcttcgcgttgccgtagtcaccatggccttgctagacccttgcaatcgcttccagcccgaggtggcactcaacttggcgcgcaacccgctcggatggggtgtgctggcatttgctgggaggacttgtgctgctgtctctcctctcggcgaccttgctgccaaagtgtttgtgttctttgtttcgaaactccccagcgggttggctctgccgatcccatctttcttcgtgcagctgctggaggggcttggcccccatcttctacccgtggtgtcctgcttcatccttcaggcggccatcgtcgcctacctccgcgaggtgtccgtggaggcgacgctccttcccgcttcttcctccagcattcgaggggaaggatga

SEQ ID NO: 9224 - DNA, 255 bp, Zea mays
  Peptide Sequence Number=SeqID_52599
atggaaattgttttgaaggatgctgaaattgaggaaccagtggtagaggatcatgcaagagatgatgttgaagatgatggtggagataatgtgggagatgatgctggagacgacgctggtggggattctggggctagggattctggggctggtggagattccgcagctgggtctggaacttctcgagttaagagaactttttgttggaccacctccagagcttccacccgaatctcgggttttgataaagcctag

SEQ ID NO: 9225 - DNA, 468 bp, Zea mays
  Peptide Sequence Number=SeqID_52600
atgtgggcccaggggcaaaatggaaggaaagaccatgcggcccagaggccttacgtcaggctccgcccgttggcttacgtcacgggcagtaggccacgtggcaccatcggggctctgcctaagcggggagcagaggcgcacgtggtatggtccggacatgtgtcagctccggacccccgcctggccttgattaaggcctgggtattctttgtcttggaatcccgagaccctgctgtgagtggcccggaccccacatcgaggggtccgggacccgtcccaggggtccagtttgtacccgtggaggtcctggaccttgcccggaggggtgacacggctgacagagccaacttgacaccccaagatcttttgaccctgaccatatttgtgcttggaacttgcacagaagagatagattttggcacagtgaagagaccatacatgggatctttgccaagatatgcacgctag

SEQ ID NO: 9226 - DNA, 294 bp, Zea mays
  Peptide Sequence Number=SeqID_52601
atggagttaccactagacgcgcagagcagcggaagacgtctcgatgtagacgaacgcgtcgagcagtgccgtgtagtcgtcggcgtccttcacgacctcgcacggttcgtcctagtgctccagatgcagcacctccgaggtatccacacgtacagggaggaagcgccgcgtaccgaactgctaggttcgcgacggcggcttggcaagggcgagaggcgttatggtgggcttctgacaccgaggcccatcattaaccctaaagcccagtctaattttggatctaatccgaattag

SEQ ID NO: 9227 - DNA, 1053 bp, Zea mays
  Peptide Sequence Number=SeqID_52602
atggagaatgggctggagcttctcctggttttcgcgtgtggccccccaacgccagttgtcgccggcggcggtcaccactcgttaagaaaatggcgggagcatcccgtcgtcgttctggagataaaccactggttctgccaccccttgttcgaagacacaagggaggcagggatgtactgcgatgcccaccccgaccttagctggagggtgcagccgccagcccgcaccgccatacgtcttcttcacatccgtcgacgcgacgaagaactttgcggagaagagatgggtccacaggtcccagtgggggtcaatccccagaaacccctcacaaaccaccacaaaaatagccgcttgcgcgatggagttggggttgaagttatgcaactccaccccgtagtaatgcgggagcgcccgcatgaagcggcacgtcggcatcccaaacccccgctcatggaagggggtgaaactgaccacgtaccccagcggcggagtcgggtcggcctcattcccaggagccacccactcaggctgcggctcgccggagagaggacggagcaaaccatcggcaacaagggcctccagatcctccacagtaacggtggagaaaggccatgggtcgcgcggcggaatgacggtcgccttgtcagccatcgccaagcagaagcggtggaggcggaggggatgagggatcgggaaaggggatatttcgaaaggatccttctcagcgaaggaaacgggccccaagccctcctactgattaggggttcgaaggttgcgccctgcggggttcggcaactgccccagagcactcgggctccgagccctttactgatcaggggatcgaaggctggcccctcggaagggttcgacagctgtcccagagcatgcagagtgagggatgaccctgggtacgtccgttacatggccgaggctcaggctacgctcccgaggtaccctaagacatttccgagaccagcaggaacgatttgtaatggaatcccactggagggaggcaccgagccctcggaccctatcaaatgggtccgggtctag

SEQ ID NO: 9228 - DNA, 873 bp, Zea mays
  Peptide Sequence Number=SeqID_52603
atggcaggaagcgacaacaggagatttggccgggatatggtgtctagcagcacacatttctcccaatcgcagatggtctgggttggagaccacgttcctggcggcagagtcgatctgcaatgtggagtgaacaagggaaccaggcatcaaaatgaagggaagcaggaatcgaaacggccccgagaatcccaaagcacgagaaggggaacaagggaactaggcatcgtgaagagagcccgaggtgatgaattgttacggttcatggacggagcaagcaaggagcctctccgcaagagtacttgctctgttccacaatttgattcagaaaaaaaacaaatattcacctttattgcaatcaaacaagatatcagggacttgaaagtggcgaaagaggagcaagacattgggttttatgctggttttgttggggctacctatttccttggaagggccatcagcgccgtgccatggggcatgttcgctgacaagtatggaaggaagccatgcattgtgatcagcatcctctcagtgattgtgttcaacacactgtttggacttagcacaacttactggatggcaattgtgactaggggattacttgggttgctatgtggtatacttggacccatcaaggttacatcttcacgagccatagctcttgttattgggcctgctattggaggcttccttgcacagatagaattggcaatatacctattttcctacacatccaatggggccttggggacgccctccatggccaacacagccacttccatcaccagcgtccttgcagatgcacgcagggttaagaacgtgggtacccacgttcttaaggttaagaacgtgggtaccgtcgaacttattgtgtag

SEQ ID NO: 9229 - DNA, 159 bp, Zea mays
  Peptide Sequence Number=SeqID_52604
atggccatgatgggttcaacatcggaaaagatgtacctctgccagaataagataacacgcagtgggagtggagagatggcgagaatagcatgtaccctccatggaaagaggctggacggtggtgtatctgtgctctcggttggcgtgaacctgatctag

SEQ ID NO: 9230 - DNA, 210 bp, Zea mays
  Peptide Sequence Number=SeqID_52605
atggttaaaaattttggcagcaaaacagtgcaaatagcaatgaatgctgtggtaacttcacacctactcgtctgtttatatagtactgcagcatttgagaacaagtccccaacagtgaagaagcagcaaacttttgttgcttctgttccaaggtggtaccaaaagaagagaatcaagactaaagctgcgggaggaaaggtcctccgttaa

SEQ ID NO: 9231 - DNA, 573 bp, Zea mays
  Peptide Sequence Number=SeqID_52606
atggattccccgttcgcgtccaggcctcaccgccttggcatacaatgctccactgaccacggctgccaccgtgcagtgaccgcactttcgggggagctcgtcggtggtgaggagttcggcctatctagggcacaattgatcattcgaatgggtcagagagcttcaccagggatcaaggaaggctggaggccgaagtccggcgaggacgatcttggttctccggtgaagttctgccgggtccgagagcttgggaagcttcacaagctattggcgaagctaaccgagcggctggcgtggcttggaagtgactggagtgggctggccacggtggccgaggatcgggtggcaatggcgggcggaacagagcttgccggagctaaggaggggcgtatggccggcgaatgtgagcacgtggcgagcgcgggcgagcacggccgagggtggggctctgacaagtgctcaaagcatgcgcgggagaacgccagtgcgcgctctggcgcctggcacgacgtcgagcacgaggcagcgcagagagaggtcgagttcaagcatggattggctccaaatctttga

SEQ ID NO: 9232 - DNA, 231 bp, Zea mays
  Peptide Sequence Number=SeqID_52607
atggtgacctccagcttgatggtgggggaaagcgagccgggctgcggcctctgcccctccctcagcctcaaggattttcatcaccagggctggggaggggagtgtgccgagtcgagtttgggcatgggcgggggcctcctagcagcagcgcccgccgtgaggtcagtgctgccgctgttcggccccccggagcagaagtcgtcgccgtcgccgctgctggagcaggcctga

SEQ ID NO: 9233 - DNA, 507 bp, Zea mays
  Peptide Sequence Number=SeqID_52608
atggcagaggggcttaccggaggcgaggttgctccgggcacgatagatcaattaaatgggtccgggagcttcaccagagatcaaggaagatgtgagcgcgaggaatttgagaatgactcaccgaattgctcggtctacgcgcggccacaacgaccgaagtccggcgaaggcgatcttgggtctccagtgaggttctgtcgggtccgagagcttggaaagcttcacgggccactggcgaagctgaccgagggtcaggcgcagcttggacgcggctggagcgagctggccacggtggccgaggcttgggtagtgatggcgggcggaggagagctcactggagctaagggaggggtgtctggccagcgagggcttgcaggtttcgctgacaggatcaagagatatggaggggtgaagttgggtttgtctcactaccgagcacagagagaagatcccgggtttgatgtgtccagagcacgcgtcctaatgccatcttctggtatgaggtag

SEQ ID NO: 9234 - DNA, 918 bp, Zea mays
  Peptide Sequence Number=SeqID_52609
atggaggcccaggcccacgcgtcatacaaccggcgcgccgagtgcttcgtgcatgcaactgcaccgccacttgcgccaccaccgcgcctcctcgactgcggaaccaataccacgactcgaggcaacccagagcacgacccagcggcgccagcctggcgcgacggcggcgcctctggcaggagaagcgggcgacgcttcgccttcgccataatgaccgcgtcaggaaagggaccgggaaagggggatatcccgaaaaggatccttccccgtgaaggaactaggctccgagcctccctactgatcagaggttcgaaggctggcccctctgaagggttcgacagccgcctcagatcacgtgggccctacacccactactggtcagaggaacgatcttgtaaaggaatcccatcagagggaggcatcgagcccttggaccccgtcgccaggggaccgggtctggcagatcacccgcagctcaccggaaaacaccatgttcggcgcccatcgagggcaacatggcgcttccccccctcctcctccttgcggaaaggcgacgcaggggcggctcggactcgggctaagccccggaagacggcgaactccactccgcccgacccagggctcagactcgggctaagccccggaagacgacgaactccgctctgcccaacccagggctcggactcgggctcaaccccagaagacgacgaactccgcttcgcccgaccccagggctcggactccgccctggcctcagccgacggtctccgcttcgcccgaaccaggggctcggactcgacctcggccacggaagatagattcgacctcggcttcggaggagcttccacatcgcccaacctagggcgcagaccagtcacgtcacacaggaggcgccatcatcaccctaccccgagctga

SEQ ID NO: 9235 - DNA, 657 bp, Zea mays
  Peptide Sequence Number=SeqID_52610
atgttcggcgcccttcgagggcaacatggcgctttccccccttcctccttgcggaaaggcgacaaaggggccggccgaggcatcacgaaaagcattaagacctcagaggagtcaaaccactcctccgaggcctcgggggctacacccggcggtcggcaaggtcgaagtgaccgcagtcacttcgccctttcactgaccgacctgataggaaaacagcgtcgctcgccccgctccgactgctatgccacccaatggggtgagactgacaacaaccgagttcagcctcgggcgcaacaggaagctccgcctcgcccgaccttaggcctcggcctcggaaggaggtctccgcctcgcccgatcctagggctcggcctcagcctcggcctcgagaggaatcacgtcctcgcccgaccccggcctcggcctcaggagaagcacttctccgacggccccgttatcgcgtacacagggctcaagcacttctccgacagccacattggcatgtacacagggctcaggcactcctctgccagacacgagaaaaagaaaaagagaaactatgaacagtactgggctgaatctggtccaagtcggcccagaaatagacgaaagcgcgcctacgctgtccattttacgcaggggaccctgacggtttga

SEQ ID NO: 9236 - DNA, 639 bp, Zea mays
  Peptide Sequence Number=SeqID_52611
atggaggacttgagcaacatgaccctgaccattgtgattgggaaaatcgcggcctttgagatgtcgcgaaaaatgagtcggggagaggagccaacttcctcaagaccatatgcctttgcatgtgatgaaaggaagggcaaaaagaaggctcccactccaagttcctcaagcgaagaaaaagaagaagaagaaagtgatgatgatgaagataatcaaccatgcacatcatcctccgaggacgaagaaacaatccgacgcgtcggaaagcccgccgctacctgcccgccgccagcgcttcgccatgcgtgccccaccgccccaccgcgcgcctgggcagggtggtaccacgcggtgctcgccatcaagcgccgctgctgcgagcacctcgacccgcagccgataaacccttttctcggcgtgcccaagtccttccccggcgtcaagccggagttccgcgacgcacgcgcgcccgcctcctcatcgttcgagcctctcctccaccgccgcgggtctctggagccagaccgccgcgcggtcgtccttcttaacaaggcagacctggtggacccatccgaaaccgaggggatgtcaaaaggatctgtgagactaatcttggattggtctcccaatgttgtctga

SEQ ID NO: 9237 - DNA, 783 bp, Zea mays
  Peptide Sequence Number=SeqID_52612
atggctcgtcttagacacactgctcataagtcggtgattcctttcctaccgtctcgccttgcggagcgtcgtctgcgccgcaccctggaggcgccccctgcaccaccgcgggacgccccggctgttggaggagctactggaggaggtcctggaggagaccccgacgacgacgactcagaccacagcacggagtcctctgagccgcaggaggcggaaggatgggtcgcccgacccatcacccgtgacgccgctcgcggttgtcacttccacgacgcactcgacaccttgttgcgccaggccttcgaccggcacacctggtcgatcgagtatcgttgtgtaatctaccagcacagtcgcgggaggtacccggaccgctgggaggctacctgcctagttcgtcgttcgaaggatgatctccggggtgcagaggccttttcggagcattattccatctccgagagggacactgcggaggcggctatgcaggacgcagcacgcacagagagtgtggttgtctcacctgttggtgaggataaccctaggttgagcagcacaatcaacctagtcgctgtacttaacactgagctggatcactctctcgacgagctgagcagggctcgaacggagattgctgagttgcgtgctgagctggcagagcgccgccaccaggagggtggttcccccgctcctgttgggactcagcacccttaccgctcgccgccacgtggtcaccacacttatggttctcctgcctgtaagaccaggatagatctggatccttag

SEQ ID NO: 9238 - DNA, 390 bp, Zea mays
  Peptide Sequence Number=SeqID_52613
atggaactcgggttccgattccacagctccgtcgcaagccgttggggtcaacgcgggtttgtaggattccattctggtgttctgcagagcgctcggactccgctacggagtataaagccggggtacctcgtgcgcccctcttccattggcaccctggtgtttgaccgcgctacacgagctaaacgccgccaccgtcaggagcgaggtagatcgtcgattggtccttggggaggggatgctcggagtcgtgggcatctcttgatgctagttgatgtgtcactggacctggcgtaccgctgggaagcttccaattgctcgtcagaatctcctccgccccgccaatcgcctcccaccgtggccgtgtgcctccgcgccataatcgccggttag

SEQ ID NO: 9239 - DNA, 510 bp, Zea mays
  Peptide Sequence Number=SeqID_52614
atggacgcgattcctcccgaggtcgaggttgagtctgagccctggggtcgggcgaggcggagaccgccttccgaggtcgaggttgaggctgagccttggggtcgggcgaggcggagatcgccttccgaggtcgaggttgaggccgagccttggggtcgggcgaagcggagaccatcttccgaggccgaggcgggggccgagccttggggtcgggcgaggtggagcttcctatggcgcctgaggctggactcggctgctgtcagcctcaccctagcgggtggcatagcagtcggagcagggcaggcggcgctgttttcctgtcaggcgatcctcgcattgaatgcttctgcgatatggtcggttggcgaggtgatctggccaaggttgcttcactgcgaagcctgtccgagctgggcctcgagcgagtcgaggagtcatccctcgctctgcgtgttctggggcggctgtcgaacccttcgaggggccagccttcgaacccctgatcagtag

SEQ ID NO: 9240 - DNA, 846 bp, Zea mays
  Peptide Sequence Number=SeqID_52615
atgcaagtggcatgcaactgcaccacgggggcgcaccctttcgacttcgacgcatccagcatggaggcccaggcccacacatcatgtaaccggcgcgccggttactacgtgcgaaaaactgcaccgccacttgcgccaataccgtgccttctcgactgcggaaccggtgccgcgactcaaagcaaccctgcgcatggccctacggtgccaaccaagcgcatcggtcatggggaccggaaaggggatatttcgaaagggatccttctccgcgaaggaagcgggccccgagcccccctactgatcaggggttcgaaggctggcccctcgaaagggttcgacaaccgcccagagcactcgggcttcaggctcattactgatcagaggttcgaaggctggcccctcggaagggttcgacagccacctcaaagcactcgggctccgcgcccactactgatcaggggttcgaaggctggcccctcgaagggttcgacagccgccccagaacacgcagagcgagggatgactctgggtacgtccgatacatggccgaggctcgggctacgctcccgaggtaccctaggacatttccgagaccaccaggagcgattctgtaacggaatcccatcagagggaggcatcgagccctcggaccctatcaaacgggaccgggtccggcaaatcacctgcagaggctcgggggctgctctcgcaaacccggctccggccaacccgttgacagcgtcaacaaaccagcccgagaacttggaacctgaccacgcacccgggctacgatcagattgcatgagggaacaaccagaccgaccgaagcatcacaaaaggcattaa

SEQ ID NO: 9241 - DNA, 414 bp, Zea mays
  Peptide Sequence Number=SeqID_52616
atggaggcccaggcccacgcgtcatgcaaccggcgcgccgaatgcttcgtgcatgcaactgcaccgccacttgcgccaccaccgtgcctcctcgactgtggaaccaataccgcgactcgaggtggcgcctttggcaggaaaagcgggcgacgcttcgccttcgccatactgaccgcgtcagtaaagggaccaggaaagggggatacctcgaaaaggatccttccccgtgaaggaaccaggctccgagcctccctactgatcagaggttcgaaggttggccccccggaagggttcgacaaccgcctcagatcgcgtgggccctacaccccactactggtcagaggttcgaaggccggcccctcggaagggttccacagccgcctcaggctactcgggctccgcgcccactactga

SEQ ID NO: 9242 - DNA, 2187 bp, Zea mays
  Peptide Sequence Number=SeqID_52617
atgtcttcgcccgagctccgggagtcttcggcgcggatgctgagggttaccgggggttggtggcctaggaatgttcctatcccccgcgcggccggcgaagacttttttacatctcgcatggttcatgaatggaaagtgtttccttacgggcggaatattgctgctattgtgtcggcagtgatggacaaggatcgccagggagctgcacaaaagcgccaggcggttgtcaggcttcatgaagcccggccgaagaggcagcggggggctgcgaaggctgcggcccctggcggaggcaagccgccgctggcggcgaagtcaggcggccctgtatttagcaaggcgccggaggcagcgacaggcgccggtggttccaaatcgatgaaggctgtgccgccgtccagcagggtgtcggaggtcacgaaggcggcccgagagttgccgtcgtcgggcaagcgcgtcgccgacttcgccaccgatattagtgtggacgactatcttggtgggtcggacgagggccagcttgctattgttgcgcctgccgcggcggccatggcggctgccgtagtgccgaaggcaaagggcggtgctcttagtgccggaggcgagatgtcggcactggcggctgtcagggatgaggcgggcgctgcgtcccgccggctgaaggaggtgacggaggcactaagtcaggtggctgacttcgccaaccgcacggcgtcgggggccctcacggcagttgtgtctgccgaagtcgagagacttcggacgcaacatgcggacgccgtccgtgaaaaatcggccgccgacagtaagtgtcgcaagctggcggacaaggtggccgcgctggagggggagaaggctgacctccggcgccaactggtgggggagaggagggagaccaacgaggccctcgccaaggcgcaggctgcgcagatggaggccaatctggcgcgggcggagggcaatcttgccagggagcgcgccgagcagctgcaggagcggctcatcgccctggagagccgcgtggagagggccgaggccgcgacgcgcgtggaggccgagcggacgcgcaaacagcttatggattcgtaccatgagctgggcgcgcggaccggtgacttcgaagtgccggaccgagagtccggacttcgctgcctggagtgggtacaggaggagttgcaggcgctccccactatcgtggaggggttcatgtcgtatgcttccctggtcacctgcgagggggcgatgaacgcgctctcccgcgaggggtgccggcactttgaggtcttcgaccaggctgatgaagactttgagcgagatatctacaaggttgaggatcccatagtgaaggaatccgccggagccatctacgaccggatgtggggtccgcacggtcgcgaggtggtcagggagcgggccgagacggcgagggctcaggcggcgcgcggcgagagggtggatgatttcggggtgttgaacagcgcgctgcctgacccggagtcgaacccggcggaggccgtgtccggggccgccctggagccgcccccggagactgccgaaggcacttctgatgcccccgcagccgctgcggccggcggaggcccacccctggaggccgccgaaagcgtccctgatgcccccgtagccgctgcagccggcgaaggcctgccgcctgctgctgtgccgagggttgaagatcctgcgacggtggcggtggaggttcaagattttgggcctgcgcacgcaaccgccactactaattttttggcggcttcgaccgtggatggtattaataaatcggatgggtccacatctaagttttctgattttggtgactccgggagctcggttgagtggactgaggagtcgtcggatgaggacttggactattttgcggccttggatgtggcagtggcggaggcttcaccgtgcgctgcggacacagaagatgtgcctggtccgagtactgggcgcaggcggcgaagggctgttgcgaagcgtagagtgagcggggcggagggcggtcggcttcgtgtgaatagggctagccggcaggaactgttgtccttgccggctgccgcgagtacaggtgaaggggaattgcgaagtctttttgcgggtgaggagcttaggattatgttatttaactatagggagatggaaattattccgaaggttgagccgatgtag

SEQ ID NO: 9243 - DNA, 591 bp, Zea mays
  Peptide Sequence Number=SeqID_52618
atggatcagtacatccgggctgataatgatttccgccagagaagggaggaagcttacaggttctctgaggggcttcggaggaagaatccacccgaggcatgtcagctccaagaggcagaggcgccaggggcttcggaggaagatatggggatcagccaaggaagatctactgcctattttgtggtgaagacaagggccatactacaggaatgtgccaaatcaccattcaaaagcagaagaagatcgcagaagccgaagcccggcaaaatcaaccgaagcaggtcctgcacactgcttcgtgtcactcacccgacataccagaatatgcgggtaatcatcctgcagcttctgttgctttggctagtcagccacagacttcttggccatagtttccacctccgccaccactacaacctgcctattcacgaggacagcaaccagaagggagccaacagacccatcagcagcgagatttcagggaggaatccgaagctcgcacagtcaacagtactgtgccagaatcaaaacacatctattgagagatatcctacctctgaagcatttttacattcattgtcattttctttttaa

SEQ ID NO: 9244 - DNA, 738 bp, Zea mays
  Peptide Sequence Number=SeqID_52619
atggacggtggtgaagtcgcgtcgggggtggattgcaccatcatctcaggtacgaggctaacgcccagcaagtgcgaggacaacacccgacatgtcccgcgctggggtgccggcgtcgtcgactcgctctggaccgacagccgacgaggtgccgcctcctgcctggccatggttgcctcgtctcctcctcctgcggtgaggagggtggcgagactaacccggatgttgctcttccgccacggggggaagacgtcgtcgagttcgccgccaccgggcgagctaatgaccgtcgttgttgctgtcgcgccacggggggaggagtaccatgttgtagctgccatcgagggacatgaactcgagacccccgaagcagagcaccgtcccgggctgaagaggttgctgaagactacccatctggaactcaacgggaaggtgttcgttaacacgcagcaggcccctacctggcgcgccaactgtcggtgtttcggacccggggggtccctggaccgaccagtaaatttgtcgttgcgtgcccctgtccagatgggttggcgcaagatggaacacaaggggaaacgcggcttgtattatctcgcaccagggggtaatgatgtatcccctgtggtgcggtcggtccgagcccaagatcgggcgaggcggagacttctcctgaggccgaggctggggttggacgaggacgcgattcctcctgagaccgaggctgaggccgagccctag

SEQ ID NO: 9245 - DNA, 498 bp, Zea mays
  Peptide Sequence Number=SeqID_52620
atgaatgctgtggtaacttcacaactacttgtcagtttatatagtgctgcaggtaagaaggcgaagcggcggaattgttacaccaggcgcgcagtaactcgtacccgctgcgcagtggaccgcaaggatcaaacagtaactccgcaaggtgggaccgacacgcgctcggaagtcggatcgtttctccgcaacgagctcagggaaggtgttttttggaccttcggcttcccgaagctgaagaggcttttttcacgggtcaagctcgttacgaagaacgatctagcaccgcgaaaggggctactgttggggtcgtgcttcggtgcgccgaaggtctcacacgaagaagcagcttcggctgaagtcgtctccaagagatggccgaaggaaaacatcgccgctcgccctgctccgactgctatgccgcccatcggggtgagactgacaacagccgagttcagcttcgggcacaacaggaagctccgcctcgctcgaccttag

SEQ ID NO: 9246 - DNA, 321 bp, Zea mays
  Peptide Sequence Number=SeqID_52621
atgcagtcggcacgcaaccgcgacaagtgggcgcaccccttcgacttccaacgcacccagcatggaggcccaggcccacgcgtcatgcaaccggcgcgccggttgctacgtgcgagcaactgcaccgccactcgcaccactaccacgcctcctcgactgcggaaccagtaccacgacttgaggcaaccctgcgtacgacccagcagtgccagccaggcgcggcggtcaatacggccaaaaatgggccgggaccgggaaagggggataccccaaaaaggatccttctccgtgaaggaaacaggccccgagcctccctactga

SEQ ID NO: 9247 - DNA, 114 bp, Zea mays
  Peptide Sequence Number=SeqID_52622
atgccgcccctgtgcctccacccttccctcttcgcattgccgccccgctcacttctaaaatgtcttttgccttgcaagttgcttggagatggaagcaagattttgaagttttaa

SEQ ID NO: 9248 - DNA, 1137 bp, Zea mays
  Peptide Sequence Number=SeqID_52623
atggcggccaacacggccaaaggagggccagcagtaatgacggtggcagacgcgcgggagcagcgggcacgtcgacagccaagctcacgtcccatccgggggcagcgagagagccccctctcacggtgtgaagacaacgcgctcgtgatccgttcctcgaacggctcgcgcacgcgcaacggctgccccgccaactactcgccccgttgcattaactccacggctggacaggtggcgcttctggcaggagcaacgggcgacgcttcgccttcgccgaaacaaccgcaccaaaaaggggttcgaaggctggcccccgaagggttcatagtcgcctcagacgccgagcgagggatgaccagggctcaccggagacaccatgttcggtgcccatcgaggaggctcgggggctgctctcgcaaacccagctccggccgaaccgttgacagcgtcaacatgccagcccgagaacttgggccccgaccgtacacccgggctacggccagctcgcatgagggaacaaccagaccagccgaagcattacgcaaggcattaagacctcgaaggagtgaaaccactcctccgaggcctcggggcctacacccggcgggggcgctcgcgcgccacaaccggaaccaaatgcaaccgagaaaggctggtccccttgcaaaaaagtgcgacgaaagcctccaagcgagtgctaacactcccttcgaggctcgggggctactgtcggggaccataattagggggatcagtccatacgagcgactcgatcacgcctcgcccgagcctagcctcgggcaagggcagccgaccccgaaggggtttccgtctcgcccgaggccccccttcaacggcggacacatctccggcttgccggaggccttgccttcgttagaagcaactctgactgaatcggcacaccgaccggccaagtcgcaggagcatttaacgcaaaggaagccaggccctgccaaaggcaccataggaagctccgcccgacccagggctcaaactcgggctaagccccggaagacggcgaactccgctccgcccgacccagggctcggactcgggctaagccctggaagacggcaaactccgctccgcccggcccagggctcggactcgggctaa

SEQ ID NO: 9249 - DNA, 885 bp, Zea mays
  Peptide Sequence Number=SeqID_52624
atggtgacctccggcttgatggtggggaggagcaagtcgggctgcgatcttggtcccaccctcagcctcaaggatgttcatcatcctcgctggggtgggggccgggctgagccggcgctctgcctcccgcgcgggtccgtgggccatcctctcccgcagcattcgagggagagggcgctcactggccctgcgggcggcccgtacttcgacaacgcggggctggtcgacggcaggcgtcgtcacctccagcgtgtcgggttcgttggcttggctcccggcggccccttctgtcggagggcggctgccgcgccgtgtacacgggaggaccaccctagatgccgcgcgctgctagagcggcgttcgtgttctggggccggtgccccactcgcccgggaggacttgagtggggatctgccggagggctggtgggccctgccgtcggcgccgaggcagaggcggctcgagaagtccccgtcgccgatgggatcaccgccaccattcgcgcttcgggcctccggttctttgtacttgtcctcgccccttgagcgtcggcgtgggcgagggcaagattgcagcagtgcctaccctgaggcctgcactgccgcagttcggccacccagagtgggggccgttgtcgtcgtagtcagagcgggcggcggcgagccgctcgtcagtcttctgttgctccgcaggcctacccccatggagtggggttgttcgtacttgcggaggagggaaccggagttccgttttgtaatggcacttcgaatgccagagtccctcggctcggtcggccttgccgtccgaggctcctctagctcagttaaagggacccctcggccgctcttcgatgagccgaggccaggggtagcgatatcagtatga

SEQ ID NO: 9250 - DNA, 303 bp, Zea mays
  Peptide Sequence Number=SeqID_52625
atggccagggaaatccatggtcgccagatctgcgcctacttattcctctccagtccccagcgagagattcaggtgaaacatgaagagctgcttgagtatgcccaaagtggtattaatggagaaagatcagaaatagctgaaattgaagcagcatcaacaggtgaagctgctcggcttagagctgctctctggcgtgctccacccggcgctgttcggcaacctcaccagccttttgaacggcttacacagacctgttttgataagagccaagcagcgattcttccatttcggaccacgacctag

SEQ ID NO: 9251 - DNA, 660 bp, Zea mays
  Peptide Sequence Number=SeqID_52626
atggcgcttcctgtcgacgtggctggcctgtgccctaggttgggcgacgtggaggctcctccgaagccggggtcgagtctgtcttccatggccgaggccgagttcgagcccctgggccgggcgaggcggaggtcgtcagcagaggccgagtccgagcccctgggtcgggcgaggcggaggtcgttcgcagaggccgggtccgagcccctggggtcgggcgaagcggaggtcgtcagcagaggccgagtccgagcccctgggtcgggcgaggcggaggtcgttcgcagaggccgagtccgagcccctggggtcgggcgaagcggacccgagtccgagccctgggtcgggcgaagcggagttcgtcgtcttccggggcttagcccgagtccgagccctgggtcgggcggagcggagttcgccgtcttccggggcttagcccgagttcgtcgtcttccggggcttagcctgagtccgagccctgggtcgggcggagcggagttcgccgtcttccggggctcagcccgagttcgtcgtcttccggggcttagcccgagtccgagccctgggtcgggcggagcggagttcgccatcttccggggcttagcccgagtccgagccctgggccgggcggagcggagttcgccgtcttccggggcttag

SEQ ID NO: 9252 - DNA, 804 bp, Zea mays
  Peptide Sequence Number=SeqID_52627
atggcccccctcttacgtggtcggtccaagctcgaggtcgggcgaggtggtgacccctccgaggtcgaggctgagtccgagccctggggtcgggcgaggcggagaccgtcttccggagtcgaggctgagtccgagccctggggtcgagcgaggcggagactgtcttccggagtcgaggctgagtctgagccctggggtcgggcgaggcgaagaccgtcgtccgaggtcgaggttgagtctgagccctggggtcgggcgaggcggagaccgtcatccgaggtcgaggctgagtccgagccctggggtcgggcgaggcggagaccgtcttccggcgtcaaggttgagtccgagccctggggtcgggcgaggcggagtccgtcgtccgaggtcgagacgggggccgagccctggggtcgggcgaggcggagcttcctatggcacccgaggctggacttagctgttgtcggcctcactctgacgagtggcacagcagtcggagcagggcaggcgacactgttttcctgtcaggcgatccttgcattgaatgctcctgcgatacggtcggttggcgtggcgatctggccaaggttgcttctccgtgaagcctgcccgagctgggcctcgggcgagtcgaagctttgtgctgatgggggttaccagctgagattaggagtcttggggctcgtcgcaattggcggcgaagcagttgaggctcatgagcttggccttccttatctgctccccggccaggaccccacgcagtcgttgttggaaaacgctgacagcaccatggccagcatctag

SEQ ID NO: 9253 - DNA, 486 bp, Zea mays
  Peptide Sequence Number=SeqID_52628
atggcgctttccccccctcctccttgcggaaaggcaacgaaggggcgtatgaaaaagtcgagtcagtccttgaccgtcctctcgctctgtgcggaggctcgggaaaacagtgccgcctgccctgctccgactgctgtgccactcgccagagtgaggccgacagcagctaagtccagcctcgggcgccataggaagctccgcctcgcccgacctcagggctcggcccccgtctcgacctcggacgacggactccgcctcgccagaccccaggtctcggactcaacctcgacgccggaagacggtctccgcctcgcccgaccccagggctcggactcagcctcgacctcggacgacggtctccgcctcgcccgaccccagggctcggactcaacctcgacctcggacgacggtctctgcctcgcccgaccccagggctcggactcaacctcgactccggaagacagtctccgcctcgcccgaccctag

SEQ ID NO: 9254 - DNA, 1299 bp, Zea mays
  Peptide Sequence Number=SeqID_52629
atgcatcgcgtccttccaccttctgagcccccagatggggagcgcccgcgttgctttcgtcttgctgtcgttggaggaacacaacttcgcggaagttggtacctttcagccatcgctcagcttcaaggattttcatcaggcagcccggctgcatccccttgccgatggtcacccaagacggtgaccaccagtttgatggtggggagaagcaagccgggctgcgacctctgccccgccctcagcttcaaggatcttcatcatccttgctggggcggaggccgggctgagccggagctctacctcccatacgggtttgtgggccaccttctccttcagcattcaggggagaaggcgctcaccggcctagcggaaggggcggacttcgacaacgcagggctggtcggccgcgagcgtcgtcagcttcagcgcattgggctcgctggctcagctggctctggctcggctctcggtgccccctcccgctgtcgggcagagtgtggctatccggccgctgtacggggtcacgccgcacgcaccgggggaccgcccaagacgtcgcgcgctgctagggcggcgttcgtgtttttgggctgtcctgctcttgctccggtacgacgcctccgagcggaggtcggtgctgaggtggtggcggctggagaagtcctcgtcaccgacgagatcgccgccaccatccgcgctctgggcctccggctctttggctttgatagcttgtcctcgcccctcgagtggggacgtgggcgagggcctagtaacagcagcgtctaccctgaggtcatcgctgctgatgtttggtcgcccggagcggaggtcgttgtcgttgctgccggagcgggcgtcggcgagccacctggggttttgtcgccccgcagaccctccaatgtggggggttgttcatacctgcgggggcggaacaggagttccgtttgtaatggcaccttgagtgtcggtgtctattcatcgtggctgtcgaggcctgaacatccggagccggaggcagcggtgtcagcacggacagaggcggagttggctcgaaaagaagacttcctcggcccaaaagcaggtgacttctcaagccgaggaggcgtacaccggcggctggaacctggccaggtcgtccactggcgggaccaacggtggagtcgggctgccgaggccatgggccgggctgatgtcctcgggggacagctggctgaggcttcgggacggccggtccagccgtctgcttgggccgggttcctggaggagaccctagcggcgacggatcaggcgcgatgctga

SEQ ID NO: 9255 - DNA, 696 bp, Zea mays
  Peptide Sequence Number=SeqID_52630
atgcctgcgcacgccccccttcgtcccctcgacgttgtgccctcccatccccagttcccacctcctccgcgcttccacccctcgctcgtcgcttccacgtcacgagtcgttgtctccccttcgctgaccgaggcgcggaaacggtcgacgcaagcaaaccctagccgtcgagctcatggggagtcagggagggatgaagagcctgttcaagacgttttccaacaacgactgcgtggggtcctggccggggagcagataaggaaggccaagctcatgagcctcaactgcttcgccgccaattgcgacgagctgcggagtccctctccctcgatattgggtaagtcttgcaatcgaggcaacctgtcagctgcgaggccaccccaatccccctttagtttttcatcgcactggaatcttgcggaacactggccaccagttacaatcatcactgtccacggcaggcctgacgtgtcccctgttctgatccaagccatatttgttctcgagtggattctttgtctgttactgttgggggccttcgtcttccgaaggaaccttcggactcggaataaagctgtacacaatatgaaaagcatggtcgagatgaaggttgaaccagcttcgaagctacgcgcaagggagcttcggctcaacggcagaaaaaggaaccgacttaaaggggaaaaggctatctag

SEQ ID NO: 9256 - DNA, 1230 bp, Zea mays
  Peptide Sequence Number=SeqID_52631
atgccttcgcactttcctcatgcatcgtgcccttccgccttccgagcccccggatggggagcgcccgccccggctgcatcccctcaccaatggtcacccaagacggtgaccactagttcgatggtggggagaagcaagccaggctgcggcctccgccccgccctcagcttcaaggatcttcatcatccttgctggggcggagggcgagctgagccggagctctccctcccgtacgggccggcgggccacctccttcttcagcaatcagggaagagggtgctcactggcctagcggaggggacagacttcgacaacgcggggccggtcggtcgcaagcgtcgtcagctccagcatgcctggttcgctggctcagctggctctggcacagcttccagtgccacctcccaccgctgggcggagcgtggcgatctgcccgccgtacgggcggctgttgtgccgcgcgtactgggggaccgcccaagacgtcgcgcactgctagggcggcgttcgtgttcttgggttgtcctgccctcgctccggcacgacgcctccgcgcggaggtcggtgctcgcccgtccgggaggattcgagcggggatctgccggtgggcgggtggacaccgccgtcggagctaaggtggtggcagctggagaaggcctcgtcgccgacgagattgtcggcgccatctgcgctccggccctccggctctttggctttgatagcttgtcctcgcccctcgagtggggacgtgggcgagaaccttgtcgcagcagcgtcttccctgaggtcatcgctgctgctgtttggccgcccggagcggaggtcgttgtcgctgctgccggagtgggtggcggcgagccacctggaattttgtcgtcccgcaggctctccgatgtggaggagtccctcggctcggtcggccttgccacccgaggcttctcttgctcagttaaagaaaccctcagccgctctgcgatgagccagagccggaggcagcagtgtgagcgtggacagaggcggagttggctcgaaaagaagcttcgtcggccggagcctggccgggtcgtccactggcggaaccaaccctggagtcggactgtcgaggccatgagccgggctggtgtcctcgggggacagctgactgagtctacggagcggccggtccagccgtctactcgggccaggttcctagaggagatcctggcggcgatggctcaggcgcagtgttga

SEQ ID NO: 9257 - DNA, 432 bp, Zea mays
  Peptide Sequence Number=SeqID_52632
atgaaggagaaccatgacctgacaatgtatcataagacctatgatgaggccaagatcctcttcgtcggtctcgacaacgccggcaagaccacgctgctccacatgctcaaggacgagcattctggcgcctttctttctttgctcttgccgccacaggcaattgatgatttcttctcgtgccggccgggagacggcgcatgcgaccacgtaggactgcttccagaggtcgaactggaagtcgtcaagcttcttctcgtcgtggatgagcgacgccaatgcgagcgcctgctgctagtggtgtttgttcgaggtttccaagacgagtgccctagtggccagggtgtcacgctccacaagatcgtgacagccatagaaggtggtgtatcggttgctaaggcgcagcgtctttggaaggctgtagtcgggccgtga

SEQ ID NO: 9258 - DNA, 1599 bp, Zea mays
  Peptide Sequence Number=SeqID_52633
atgaaaatccttgaagccgaacgatggctgaaaggtactaactcctgcggagttgcgttccccccaacgacaaggcggaaagattgcgggtatcccccatccgggggcttggaaggtggaaaggcacgatgcataagggagcgcgaagacgtggtcgcctttcaagggggtcaccctccttttaaaggtgactctccctacttgcgtccccaaccgtcgggggctgagtcttctccgacacgctccaaggtcctccccctacggcgtgggggctgggtcccacacgtcatgcaagccggcccagagcagaagaagccaaaccgccgcgcgcggtgcgtgcaaccgcccagcggattacaagcagctctccacttttgcccagaccagcgggcgaaagggcgggcagccgtgcaggcggcatgcaaccgcgccaagtgggcgcacttctccgacttccagcacgcccagcatggaggcccacgcgtcatgcaaccggcgcgccggatgcttcgtgcaagcaactgcaccgccacttgcgaccactaccgcgcctccttgactgcggaaccgataccgcgactcgaggcgacccagcgcacgacccagcagcgccagcctggcgcgacggtcaatgcggccaaaaatgggccggcagtaatggcggtggcaggcgggcaggagcagcggtcacgccgcggcgcctctggcaggagaagcgagcgacgcttcgcctttgccataatgaccgcgtcaaaaaagggaccgggaaagggggataccccgaaaaggatccttccccgtgaaggaaccaggctccgagcctccctactgatcagaggttcgaaggctggcccctcggaagggttcaacagccgcctcagagcacgtgggctccacacccactactggtcagaggttcgaaggccagcccctcggaagggttcaacggccgcctcaggctactcgggctccacgcccactactgatcaggggttcgaaggctggcccccgaaggaggctcgggaggctgctctcgcaaacccgggctccggtcaaaccgttgacaacgtcaacataccagcccgagaacttgggacccgaccgtacacccgggctacggccagctcgcatgagggaacgaccagaccagccaaagcattacgcgaggcattaagacctcggaggagtcaaaccactcctccgaggcctcgggggctacacccggcgggtgcgctcgcgcgcacccaccggaacaaaacgcaaccgagaaaggctggtccccttgcaaaaaagtgcgacgaaagcctccaagcgagtgctaacactccctttgaggcttgggggctactgtcggggaccataattaggggtaccctcaaggctcctaattctcagctggtaacccccatcagcataaagctgcaaaggcctgatgggcgccataggaagctccgctccgcccgacccagggctcggactcgggctaagccccagaagacggcgaactccgctccgccctacccagggctcggactcgggctaagccccggaagacggcgaactccgctccgcccgacccagggctcggactcgggctaa

SEQ ID NO: 9259 - DNA, 219 bp, Zea mays
  Peptide Sequence Number=SeqID_52634
atggaggtttgggatggacttgagcagctgaatgagctggacaatgatgtgctctatgataatttctctgagaaggaaatcaaagaggcactatttcagatggaaaaaataaagctgatggtcctgacagcattcctgttgagttctatcaagtctgttgggacattgttaaagaagatattgtcaatctctttcatgattttcatgttgggcatttag

SEQ ID NO: 9260 - DNA, 501 bp, Zea mays
  Peptide Sequence Number=SeqID_52635
atggatgtctctaatctttttggctcatcgccactcctttctagagttcctgagccgtccattctaccgttctacaatttcagccgtccaatcccgcacaccagttttccgcccccgcgtcctgatcccgccgccccagccccgaaggcccgaaggcatcgcgattcgcaacccacccacaaacgccgcccctgcctcctcttccccgattccgccgccgccatccccgtcctcaccctcgccccacgctgtcggatgccgcacgctctcctctaccatctctctcaacgccgccagacggggttcgagaggtcgggtctaggcggtgtggggcagatctacttcatgctctcctccatcgcggcctgcggcaagaggactcattgctcttgtagccaaggtctccgccactctctcctcccaatactcctaattgatgcttgctccattccctccggggacgcaccagcggggcggcagaggaggcggatgcgccagtga

SEQ ID NO: 9261 - DNA, 486 bp, Zea mays
  Peptide Sequence Number=SeqID_52636
atgctggcgatatctactgcgtttgatgttgttgagcggacctcaaaggacaataacaagacactacagcgtacctcgaataccaccagatgcctcaacctaggctcctacaactaccttggctttgctgcagcagatgagtactgcacaccacgtgttattgagtctctcaagaaatactcagcaagtacctgcagtgttcgtgtcgatggcggtacgaccaagcttcacaatgagctggaggagttgcctgcgcgttttgttggaaagcctgctgctatcctatttggcatgtgttatgttacaaactctgccatcattccatgcctaattggaaaggagataattcagcaccttaaacatagttgtccgccccatctgtatgctacttccatgtcgccaccaggagtccaacatgttatttctgctattaaagttatccttggggaggatggctccaacagagctgtgttaatgttcgattaa

SEQ ID NO: 9262 - DNA, 810 bp, Zea mays
  Peptide Sequence Number=SeqID_52637
atggcgcttcctgttgacgtggcgggcctgtgccctaggtcgggcgacgtgggggctcctccgaagccgcggtcgagtctgtcttccgtggccgaggccgaggccgagcccccgggttgggcgaggcggagatcgttcggccgaggccagggcggagtccgagccctggggtcgggcgaggcggagtttcgtcgtcttctggggctgagcccgagtccgagccctgggtcgggcggagcggagttcgccgtcttccgagtcttagcccgagtccgagccctggggtcgggcggagcggagttcgccgtcttccgggtcttagcccgagtccgagccctggggtcgggcggagcggagttcgccgtcttccgggtcttagcccgagtccgagccctggggtcgggcggagcggagttcgccgtcttccgggtcttagcccgagtccgagccctggggtcgggcggagcggagtttcctatggcgcctttggcaaggcctgactgcctgtcagactcgctctgtcgagtggcactgcagtcggagtggcgcaggcggcgctgtccttctgtcagactgctttatgctgatgggggttaccagctgagaattaggcgtcttgagggtaagaaggtgaatcgtcaggatttttacaccaggcaaacagttgctcgcacccgctgcacggtgggccgcaaaaaccaaaatagtgaacctgcatggtgggaccgctacgcgctcgcaaactgtatcgtttctcgacaacgagctcagggaaggtgtttttcggaccttcggcttcctgaagcctaa

SEQ ID NO: 9263 - DNA, 915 bp, Zea mays
  Peptide Sequence Number=SeqID_52638
atgtcgcgcgctgctagggcggcgttcgtgttctggggtggccctgcttttgcaccgggatggcgcccttcggcagaggccggcgccccactcgtctgggaggatttgagtggggatccgccggggggccggcggcccccgctatcagcgccgaggcggaggcggctcgagaagtccccgtcgccgacgggatcactgccaccatccgcgccccgggcctccggttcttcgtacttgtcctcgcccctcgagcgtcggcgtgggcgagggcaagattgcagcagcgcccatcctgaggcctgcactgctgtggctcggccatctggctcctctagcttagttaaagggacccctttgccgctcttcgatgagccgaggccaggggtagcgatatcagtacgaacagaggcggagttggctcgaaaatgggaacctggttggccggagcctagccggaagatgcttggccgaggccccaggggtaaccggccgagccgcctgctcgggccggattcccggagaagtccctggaccgcgtcgccgtccgaggctgggtcggacctcgctgaaggcgtcgtcgatgccgagggtgctacagcccccttcagcgtgaagacccgagcctgcaggatcagatcgtcttgtagcgtgtgccttctgcggccgccgaggccagaaaacacaccctcgctgcgttgcaaagccgcgtctcctttcctcttatttcgagcatctggactttccgtcggtaatagggatgtttgtgtgggcgagagttgcttctcgcggaaggtgatgagtgagaaggtgatgagtgaggtatccgtatcccggaggcgtaggagtccctcggctcggtcagccttggctgcttacgtgtactccgtcgtttccaggatccgcttttcgaagtag

SEQ ID NO: 9264 - DNA, 651 bp, Zea mays
  Peptide Sequence Number=SeqID_52639
atggcgaggcctcgcaagaacagcgccgccgccgccaacaacaacaacagcaacaccaccaacgccggcaacgccgccgtcgacctcgcggcgcgcgtcaagccgaagcgcacgcggaagagcgtgccccgggagtccccctcgcagcgcagctccgtctaccgcggcgtcacacggcaccggtggacggggaggttcgaggctcacctgtgggacaagaacagctggaacgagtcccagaacaagaagggcaagcaagtttacctcggcgcgtacgacgacgaggacgcagcggcgcgcgcgtatgacttggcggcattgaagtactggggccccgacaccatcctcaacttcccggcgtctgcatatgaagcagagttgaaagaaatggaggggcagtccagggaagagtatattgggtccttaaggaggaaaagcagtgggttctccagaggtgtttccaaataccgaggtgtcgcaaggcatcaccacaacgggagatgggaggcgaggattggtcgcgtcttcggaaacaagtatctctacctcgggacttacggagtatttattccattagattatgctgctgccgtacgaggggtacgagtgataaaaagtgcaagtcgcttgggaatggtctactctagatga

SEQ ID NO: 9265 - DNA, 294 bp, Zea mays
  Peptide Sequence Number=SeqID_52640
atgtcgcgtgcgttcgacgactactatatcgaggattgtagcgtcatcttggcgccgaaggtgacacagaggaggatcgacaacagtgaccagttcgtcatcctcgccaccgtcagggtagcttttgtgctgggtcatagtcctaagcagcagagaaaacccgaagcccagcgcaacagcgcctgtgggcgccggcacgagcgggggcggcgggacccggccagcccgctcggcgctcgcttcgcacgcagctcgctaggggacaacaggaggccgttcttcgccggccaatga

SEQ ID NO: 9266 - DNA, 660 bp, Zea mays
  Peptide Sequence Number=SeqID_52641
atggaaaatccctgggtgattaggacttcctattgctcagaggaggaaggctttcctcaccttcttcgaagctgcgcgctgcgcttggggatccgcaagaagcccgaatatgtctggaaggagtaccgtgaaaatggaatggaaaacaacaaaaacacccccacctggaagaaaagactacaggctctgtcaggaggagatcccatagaagatgatcccactatcgtctacatggtcggatacctccacaccctcgacaaccactacgatgagctctcctcccactgtacccacctaaactcccgagtggaaagcctagagcagcaagtcaaagagcttaagcaagagaaggcatctctccaggagagtctcagcatagtggaaggcgaggaagccaacacccgtgaggcctatcggaccttgaagatagactttgacaagaagctaaaggcactcgcccccaaaaagaagatccagaagaagaccactaaccagggatgccagacagagaagaagaagaagaaggcccctctagacctacctccccccagaatagatgactggtccgacgaagaagatgtttcccctgaagagctgaaggggaagtcgttagagaagaaagtgaaacccacctccccgcacctccacccctacccttag

SEQ ID NO: 9267 - DNA, 453 bp, Zea mays
  Peptide Sequence Number=SeqID_52642
atggacgaggaaggtattattcaacaacaaccacaagaagaggattcaagattggaacgagatgaagatcctataattgacatgactgaacaaagtgtacatataaaaacgagaaggtctgctacatcaacaatcagtcaagataaggaagtaaagaggatgaataaggattctttggaaggacttgttggacgatatctagatctaaaagcaaaacaagttgaggatgaggttacacaaatggcgaaagaaaaagaatcttctcaaggtgatgacttctccatcaagagatgcatttctgtcgttagatccatgaacgtgatagaagatcagaagataaaagcagctggggtatttgacataccaaacaatagagagacctttatcagttttagtgttgatgagccagaaactgtcctcctatggttaagacgaatgatggataagctctaa

SEQ ID NO: 9268 - DNA, 120 bp, Zea mays
  Peptide Sequence Number=SeqID_52643
atggttggtttacaggtggtgatgtggatgatggttttttattatgattatggtaatggtaaagaaggtgtcgaggcggatctccaggagttccaggacttcgacgagtttgaggattag

SEQ ID NO: 9269 - DNA, 993 bp, Zea mays
  Peptide Sequence Number=SeqID_52644
atgcaggcatcatgcaatcgcgccacggggatgcgccctttcgacttcgacgcgtccagcatggagtcccaggcccacatgttatgtaaccaacgcgccggttactacgtgcgaaaaactgcaccgccacttacgccaatactgcgcctcctcgactgcggaaccggtgccgcgactcaaggcaaccctgcgcatagcccaatagtgcccaaccaggcgcatcggtcacggatcagtcagccgcaggaaaaggcgcgacgatcgatatggccaaaagtggccgacagtaatggcggcagcaggcgagcggaagcggcggtcaaatcgtctgcaggctcacgtcccctcctggagcagcaggagagccctctcccacggcgtgaagacgacgcgcccgtgttccgttcctcaaacggctcgcgcatgcacaacggctgtcccgcgaatcactcgtctcgtcgcattaactccgcggcagggcaggaaacctttggcaggcgaagcgggcgacgcttcaccttcgccataatgaccgcatcaaaaaaagggaccgggaaaggggatactccgaaagggatccttctctgcgaaggaagcgggcctcaagccctcctactgatcagaggttcgaaggctgacccctcggaagggttcgacagccacctcagagcactcgggctccgcgcccactactggtcagagccgaccgttgaagatccagagccgttggcgcaccggacagtccggtgcccccttcagaccgttgggccggccacgcgtcacgcgcggattgcgtggccgaccgttggcccggccgaccgttggctcaccggacagtccggtgcaccaccggacagtccggtgatttatagccgtacgccgccgacgaaacccgagagcagccagttcgccagagccaacctggcgcaccggacagtccggtgcacccagaccgagcagccttttggctgtacacagccaacttctccataa

SEQ ID NO: 9270 - DNA, 219 bp, Zea mays
  Peptide Sequence Number=SeqID_52645
atgggctacccctacagtgttagaagagaacactatagatgtgatccttggtgccaaaggttcatctacaactattctaaatcgactgtccggaataccgtagattattccggacaggagaagctttttggaaaatcaggccacgcgcggaccgtccgggcccttgcggcggaccgtccgcgacaccgccttgacttcgaccaggaccaggaactataa

SEQ ID NO: 9271 - DNA, 945 bp, Zea mays
  Peptide Sequence Number=SeqID_52646
atggagaagcttgtcccatcactcctcatgctcctcctcagccgaggcggggtcccactcgacagtccaacctggtggcaagatggacggccaagtcactccagcaaccatttcctccagagaacctgtaaaaaaaattatgccacaagcaaggctgagtatactaatactcagctagacttacccggttacaatggatcaagcagtctcattagctgcgagaagcagacgattcaaatcgagtttttatccttgcaagtgaccgcacttgtacccaccataaccggaatgggtgacctcgtctcaggtcgcgtgaggggatatgtctgcgggcaggttcactcaggattaaataacattatgctaaaaagaaaactaagtccttcccccaaagtaaacagtacccgcgggaaagaaaaggttggcgcggcttaccggcggcgagataggtccggcgaagggcagggttggctcggggaggctctggcggtcacagcgaggtgcggctcgacggcggggatggccggaatcgctcggtccacgtgcgcaggcaggtgttctcgtcggcggcgagtgtaccggccaaaccacggcgatctggttcaatccaagggcacgctggactggccggtctacggcgacagtggctcggatggccgcggacacgccgcgcacgggcaaacggcggtgaactgggctccggtgaggcttgagcgtgcgcggaagagtgtaaccgacgcttgggagggctttataggcgcgggcacgggacaggacgccggctggccgttggcgcgacgcgaggcgcgcgcgggcgtgctctggcaagctcagggcgcgtcgaacacgtggagcttacaatctgcccgtgttccacagctcacccaagtcgcaaacgtgcgaatcttggcaaaaatccggcgcgagtcttttcctggcacctag

SEQ ID NO: 9272 - DNA, 1302 bp, Zea mays
  Peptide Sequence Number=SeqID_52647
atgtcatgtaacaggcgcaccggttactacgtgcaaagaaaccgcaccgccacttgcgccaatgccgcgtcttctcgggactacagaaccgatgcaacgactcgaggcagccccgcgcatgacccaatagtgccaattaagtgcgacgatcatgagtcagtcagccgcggggatagacacgacagttggcatgaccataggcggaccggcagtaattgcagcaacggacggacggaagcagcggtccaaccaccaaccaggccctgggatcgggaaaggggatatttcaaaaggatccttctcagcgaaggaaacgggcctcgagccctcctactgatcaggggttcaaaggttgtgccctacggggttcggcaaccaccccagagcactcgggctccgagccctttaataatcagggggtcgaaggctggctcctcggaagggttcgacagccgcccagagcatgccgagtcagggatgaccgtgggtacgtccgttacatggccgaggctcgggctacgctcccgaggtaccctaggacatttccgagaccagcgggaacagtttgtaatggaatcccaccgaagggaggcaccgagccctcggaccctatcaaatgggtccgggtacagcaaatcacccgcagaggctcggaggctgctctcgcaccaggctacagccaaattgttgaccacgtcgacaaaccagcttaaaaactcggagcctgaccatgcaaccgggctgcgaccaggccgcatgagggaacaacaaggccaaccgaggaatcacaaaaagaattcagaccttagaggagtcaaaccactcctccgaggcctcgggggctacacccgacgggtgcgctcgcgcgcacccatcagaacaaaatataaccgagaaaggctggtccccttgcaaaaaatctggcagaacctccaagcgagtgcctacactccctttgaggctcaggggctactgtcgggtaccgtaattaggggtacccccaatactcctaagcatgtctggaaaacatcttcaaaacagactgtaaagactggtaagtacagctcaaagctaaagcctcatctgccaagggacgcgatctcgtctcgcccgggcccggcctcgggcaagaacagtagtcccggacggattcacgccttgcccgagggcctcctcagggagtgggcgcacccccggcttgcccgaggccaagctcgggcaaactttgtcgtacagcaaccttggccaaatcgccttaccaccgaccgcatcgcatgcgcatttattgcggggatcacctga

SEQ ID NO: 9273 - DNA, 129 bp, Zea mays
  Peptide Sequence Number=SeqID_52648
atggcgctccacgagctctatgacgacggcggcccccagctctcttacggcagcaggacaacgatgacgaagctgaggagcaagttgacgaagctgaagagcgcgaagctgaagcttaatagacaatga

SEQ ID NO: 9274 - DNA, 255 bp, Zea mays
  Peptide Sequence Number=SeqID_52649
atgacggtggtgacggcgcaaaaatggcaacgggacggctcgagcaggcgggggggtgaggggacggctcgggcacagtgcgcggggacgcatggtgccaaccgagctggtgagcgcgttaatggcgaggagatggggcagacggtggtcggcggtgaacgcgccggtggcctggtcacgagcgaggggagggagaagctgacaggcggggctgggctgccagtgggagcggtgcacgggaggggacgcaactga

SEQ ID NO: 9275 - DNA, 816 bp, Zea mays
  Peptide Sequence Number=SeqID_52650
atgcctctgtacagcttatatggtggtggtagtcacagtcacagccacctcgctgcagctggtgaccatgagatgccgccggcgccagcagcagcagcagcaggggccaataagtctcagctgagccagatgctcctcgcctcgtcgcctaggtcctgcgtcaccaccagcctcggcagcaacatgctcgacttctccaacaacggcgtgcccccggcgcccgatcagctgaagagccaccaccaccatcaatccgataactcatccgagtgcaacagcaccgtaacaggttcggccatcaagaagcctagggttcaggcctcctcttcagcacaatctactctaaaggtgaggaaggagagactgggtgacagaataactgccctacaccagatcgtttctccgtttggcaagactgacacggcgtccgtcctgcaagagaccattggctatatcagattcctactgggacaaattgaggctctcagctacccctacatgggccacggcaatgggacctccattcaaaatggaccaacaactggagaaaggaaccatgcagggctcctaccagatcaataccccggccagttgctgaaccataataacaacactggagcacggcagcctgcagcagtcggccagcctgatgagcagcagcagcagcagggtggtgctaataataatgacgagacgaagaaggacctgaggagccgggggctgtgcctcgtcccggtgtcatgcacgtcgcacttcggaggggacaacgccgctgactactgggctccggcgccgctcggtgggatcctccgctag

SEQ ID NO: 9276 - DNA, 1218 bp, Zea mays
  Peptide Sequence Number=SeqID_52651
atgaacaaaaacactggcattcaaagtgccaacagcggcgacgacgacttctgccccggggggccgagcagcagcagcgatgacctcagggcagatgctgctgccgggaggcccccgcccatgcccaaactcgtgaggcaaggacgggcagaaggccgtagagttggaggtcggtccgtaggcagccccggctatctcgtcggtggaagaacctcttctagctgccgtggcgggagccggcgccgagagcggctccgaagccactcgggtccgagagccaggcacgcggcagctgccagcgccacggacggcaaccgcccttccccccgatcacagagggaaggagcgggccaccgcccacgcaggggccgaccccaactcggcacactcccctccctagccctggtgatgaaaatcctcgaggctgagggaggggcagaggccgcatcccggcttgctttccccgccatcgaactggaggtcaccatcttgggtgaccgccggcggagggccgtcgtgggctgggtcttctccaacacgctccaaggtcctccccctacggcgtgggggctgggtcccacgcatcatgcaagccggcccagagtagaagaagccaaaccgccgcgtgcggtgcatgcaaccgcccagcggttacaagcaattctccactttcgcccagaccagcgggcgaaagggcgagtagccatgcaggcggcatgcaaccgcgccaagtgggcgcacctctccgacttcaaacgcgcccagcatggaggcccaggcccacgcatcatgcaaccggcgcgccggatgctgcgtgcgagcaactgcaccgccacccgcgccactgccacgcctcctcgactgcggaaccagcgggcaggagcagcggtcacgtcgtcagccaagcttacgtcccatcctggggcaggaccgggaaagggggataccccgaaaaggatccttctccgtgaaggaaccaggctccgagcctccctactgatcagaggttcgaaggctggcccctcggaggggttcaacagccgcctcagagcgcgtgggctccacacccactactggtcagaggttcgaaggccggcccctcggaagggttcaacgaccgcctcaggctactcgggctccgcgcccactactgatcaggggttcgaaggctggccctcgaagggttcacagccgcctcagacgcagagcgaggaatga

SEQ ID NO: 9277 - DNA, 690 bp, Zea mays
  Peptide Sequence Number=SeqID_52652
atgagcgcggcggcggcgagctcggtcaccaagttcatcaagtgcgtcacggtcggcgatggggccgtcgggaagacctgcatgctcatctgctacacctgcaacaagttccccacggttgagtgctcccatctattcactactacctccttgttctttctgagctcggattatatccccaccgtatttgacaacttcagcgccaatgtctccgtgggtgggagcatcgttaacttgggcctctgggacacggcaggccaggaggattacagcaggttgaggcctctcagctacaggggtgccgatgtgttcatcctctccttctccctggtcagcagggcgagctatgagaacgtcctcaagaagtggatgccagagcttcgccgattttcacctactgttcctgtagttcttgttggaaccaaactaggcatatctgccactgcagatctccgtgaagacagatcttaccttgctgaccattctgctgcttccatcatctctactgaacagggagaagagctcaggaagcagataggcgctgtggcgtacatagaatgcagctcaaagacacagaggaacgtaaaggctgtgttcgacactgcaattaaagtagtgctgcaaccaccgaggagaagagaagttaccaggaagaaaatgaaggcaaggtcgaatcagtctctgaggtaa

SEQ ID NO: 9278 - DNA, 666 bp, Zea mays
  Peptide Sequence Number=SeqID_52653
atggcatcctcgaaagaagaaaacatgaaggctttggtgaaagtccttgtagactgtgccgaggatgccacaaaatgcctgggtggtttagtagatcatgcattagaccacatgcatgatgaagagatcgtagctagaacattgttagccatgaaagaaaaactagaattgcttcagcaggatgccttagaggcaaaagtccaagcatttccagaaatagctaaatacgagtgggatgacatcagtgtgcaacctccatctccgtcaccccctccaacagttattgatccatctgttgatgaagaggagttctactgccccgacgtcagtgatgactggtacttcagcgattcggataggtctacacgtactccatctgttgatggcaatgaacctgatagtgcatctactggtttgacaggaaaacggccgcgtggtcgtcattacagtaaattagagagaaacaaagctgcatcttcttcatctccagaatacctaagtcgtttgcaagaaataactgaaaaacaaattcagaggtcaatagaaaagggtgaaaagaaagaaaagtgctcagaagaagacagggaaatagagaaaaagaggttggaattggaagcacaaaagatatatgtttgtgagaccattatattgttgttggaaccataa

SEQ ID NO: 9279 - DNA, 1140 bp, Zea mays
  Peptide Sequence Number=SeqID_52654
atggccgttcctggcctcggcggcgcgaccgtcctggccccggtggcgcgtctccccgccctcctcgggcgcggccatcccggcctcgataacggtcagttggtggagtctgaaggagttgcaggtggtgatgaggatgatggttttggttatgactatggtaatgataaggggtattgtttccgtttggaaaggatggctcgtcttagacacaccgcacggaagtcaatcattcctttcttgccttctcgtctcgtggagcgtccgtttcgccgtccggtgactggtcagtctagccatttggagaggctgcaccaccgcctgcacgaggagcaggagcgtcggcgacaggagttggagcagcagggctcttcttcctcacttcagcaggaggtagagtctgtgaggagctgctctcctgtgcccccgctggaggcgccccttgcaccaccactgggcgtcctagccgctggagtagctgctggaggagaccccgatgacggaggtgacgacagcagctcgagccacaccaccgacctttcagaagagcaggagccggagggatgggttgctctacccatcactcgtgacgccgctcgcgggtgtcacttgcatgatgcgctcgacaccttgctacgccaggcacttgaccgatgtacctggtctatcgagtatcgctgtgttgtcttccagcacagtcgcagggtttacccggaccgatgggaggcgacttgcttggtgcgccgtccggagaacagtcttcggggtgcggaggtctgctcagagcattactctatttctgagcgggactcagctgaggcggccattcaagatgtcgcacggcgtgcgctttcgcactactgctcagtgctcggtggggtggccgatggtcttaacctgaggttgagcagagtcaacctagccgccgtgctaaacacggagctggaccatgccttagatgagttgagtagggctcctactgagatcgcccagttgcgggctgagcgcgtggagcgccgtcacctggaggatggttctcccgcccccgtcgggactcagcactcgtaccgctcacctcggcatggacaccatgcctatggtaaccccgactgcaggactaggataaatttagaaccatag

SEQ ID NO: 9280 - DNA, 498 bp, Zea mays
  Peptide Sequence Number=SeqID_52655
atggcccaagggcacatttccctttcagatactccaaaagggatccttctccgcaaaggaagcgggccccgagcccccctactgattagaggttcgaaggctggcccctcggaagggttcaacagccgcatcagagcactcgggctccgcgcccactactggtcagaggttcgaaggctggcccctcggaagggttcaacagccgcctcaggccactcgggctccgcacccactactgctcaggggttcgtaggctggccctcgaagggttctgacagccgcctcagagcacacagagcgagggatgaccctgggtatgttcgatacataaccaaggctcgggctacgctcccgaggctcggaggctgctctcgcaaacccggctccgcccaaaccgttgacagcgtcaacataccagcccgagaacttgggactcgattatgcacccgggctacggccactggtaacccccatcagcacaaagctgcgaaggcctga

SEQ ID NO: 9281 - DNA, 984 bp, Zea mays
  Peptide Sequence Number=SeqID_52656
atgcgagctgacccgaaacgcgaagaaggaaaaccgctgcacgcgaagcacgtaaccgccctcggttataagcattccctcatcctcgctgaaaccagcggtcgaaagggcggaccgccgcaaccagcgcagcgactcaaggcagccctgcgcgtgacccaacagtgcccattaagtgcgacgatcacgggtcactcagccgcagagataggcacgacggtcgatatgatcagaggcgggccgacagtaattgcagcaacaggcgtgcggaagcagcggtccaatcacctacagggcaagcgacacctctggcaggcgaagcgggcgccgtttcacctccgtcatgatgaccgcatcaaaaaaaggggttcgaaggctggcccctcggaagggttcgatagccgccccagagcacgcagagtcagggatgaccctgggtacgtctgttacatggccgaggctcgggctacactcccgaggtaccctaggacattttcgagaccagcgggaacgatttgtaatggaatcccaccggagggaggcaccgagccctcggaccctatcgaatgggtccgggtccagcaaatcacccacaggccgcatgagggaacaacaaggctgaccgaggcatcacaaaaaggattaagacctcagaggagtcaaaccactcctccgaggcctcgggggatacacccggcggagaacaacgctattcaccccgttccaactactgtgccaaccactagggtaagactagcaacagtaagtcgtgacctcccccgagttcagcctcgggcgcaacaaggagctccgcctcgcccgacctcaggcctcagcctcggcctcgggagaaggtctccgcctcgcccgaccctgggcctcggcctcgaccccggcctcagaagaagatctccgcctcgcccgaccctgggccttggccccaggctcggcctcgggaggagtcacaaccgcgcccaaccttag

SEQ ID NO: 9282 - DNA, 555 bp, Zea mays
  Peptide Sequence Number=SeqID_52657
atggctgaaaggtaccaactcccacggagttgcgttcctccaatgatgaggcggaaagacggcgggtatcccccatccgggggcttggaaggtggaaagacacgatgcatgaggaagcgcgaagacatggtctacttccaagggggtcaccctccttttaaaggcgactatccctacttgcgtccccagccgtcacaggctgagtcttctccaacacgctccaaggccctcccccgcggcgcgggggctgggtcccgcatgacaggcggcgcttctggcaggaaaagcgggcgacgcttcgccttcgccgaaataaccgcgccaaaaaagggaccgggaaagggggataccccgaaaaggatccttccccgtgaaggaaccaggctccgagcctccctactgatcagaggttcgaaggctggccccccgaagggttcgacagccgcctcagatcgcgtgggccctacacccactactggtcagaggttcgaaggccggccccccgaagggttccatggccgcctcaggctactcgggcttcgcgcccattactga

SEQ ID NO: 9283 - DNA, 360 bp, Zea mays
  Peptide Sequence Number=SeqID_52658
atgggtcggcgtgaggccgagcgcgaaggggggagaaaggtggccggagacaggcgtgagagaggtggaaatcccgcggccttcgtgttcgtcccgcgcccaggtcggcctgagtcagcttggggtagggtaatgatggcgcttcctgtcgacgtggtcggtccgcgccctaggttgggcgatgtggaggctccttcgaggtcgaggtcgagtctgtcttccgtggccgtggtcgagtccgagcccctgggtcgggcgaggcgaagaccgtcggctgaggccagggctgagtccgagccctggggtcgggcgaagcggagttcgtcgtcttctggggctgagcccaagtccgagccctag

SEQ ID NO: 9284 - DNA, 579 bp, Zea mays
  Peptide Sequence Number=SeqID_52659
atgaacgtaaatggaaatttgcagaatggaattgggattcagatgggtcaaattaaggcgatagaaatcaaggagaccgcggaaaaagggagaaacaggaagagcgagaccgcggagaagaaagggaacataaatcacggattcgtgggtatcctctgttggaacagtgaccccgtggcaaatccgccaagaacagagctccttcggaggaaggaccccgatggacacgagatggagaaggtcaggctcaaaaacaacagacatatggttacctgcgaaaggcaactggctgttgggtcgatagggggaatcaccgcagcggatgaactcgaggcctttcgcttgggcgccatctcaactccaccagcgaacagagcgggagccgaattgcaaaaggacagagaggatctggaggcaggaaagcaagaactagggcacggaaagcagaggcggctgaaagcgcagtacatatgggatcttcccgggtcggataccgtttccaaaaagcgcccagtcatcacccggcagttacttctaaaacattggcgtgccatgtcatcacccggcggttacttctaa

SEQ ID NO: 9285 - DNA, 819 bp, Zea mays
  Peptide Sequence Number=SeqID_52660
atggcgctttcccccctcctccttgtggaaaggcgacgcaggggcgtatgtaaaaaagtcgagtctgtccctgatcgtcctctcgccctgtgcggaggctcgggggctgctctcgcaaacccggctccggccaaaccgttgacagcgtcaacataccagcccgagaacttggaacccgaccgtgcacccgggctacagccagctcgcatgagggaacaaaccagaccagccaaagcattgcgcgaggcattaagacctcggaggagtcaaaccactcctccgaggcctcgggggctacacccggcaggtgcgctcgcgcgcaccccccggaacaaaacgcaaccgagaaaggctggtccccttgcaaaaaagtgcggcaaaagcctccaagcgagtgttaacactcccttcgaggctcgggggctactgtcggggaccataattaggggtaccctcaaggctcctaattctcagctgggatcggtccattcgagggactcgatcacgcctcgcccgagcctagcctcgggcaagggcaaccgaccccggaggatctccgtctcgcccgaggccccctccagcaacgaatacatttccggctcgcccgaggccctgtcttcgccaagaagcaaccctgaccgaatcgccgcgccgaccgaccaaatcgcaggagcatttaatgcaaagaaggacagcgccgcctgcgccgcaccgactgcggtgccacttgacagagtgaggctgacaggcagtcaggcccggcctcaggccccattgcaaactccgctccgcccgacccagggctcggactcgggctaa

SEQ ID NO: 9286 - DNA, 207 bp, Zea mays
  Peptide Sequence Number=SeqID_52661
atgcgcaccggcaggtcctcactcccgtcctcgccgaggctgtcccagaacacgagtaccgccctcgcggcgtacgatgtgttgtgtgaccccccggtgcagccgacggcgcagggaggacctggacgtggccggcctgtgcacggcgcaaccgacacccatgcggcggacgggcagccacgctctgccccagcgggttcaaagtag

SEQ ID NO: 9287 - DNA, 774 bp, Zea mays
  Peptide Sequence Number=SeqID_52662
atgaggtgggtggtttccttttctctggccgctcttttaggttgcggaaaccaaagcgagatccacccaaggcttcgcccgaacccgccgcagaattcaaactcgaagggcaagcgacacctccggcaagagaagcgggcgccgtttcgcctccgtcatgatgaccgcgtcaaaaaagggaccgggaaagggggtattttgaaaaaggatccttcccagcgaaggaaacgggccccgagccctcgtactgatcaggggttcgaaggttgcgccctccggggttcggcaaccgcccagagcactcgggctctgagccctttactgatcaggggttcgaaggttggcccctcgaaagggttcgacaaccgccccagagcatgcagagtcagggatgaccctgggtacgtctgttacatggccaaggctcgggctacactcccgaggtaccctaggacatttccgagaccagcgggaacgatttgtaacggaatcccacctgaggaaggcatcgagccctcggaccctatcgaatgggtccgggtctggcaaatcacctgcagggagctccgcctcgcccgacctcaggcctcggcctcagccttggaagaagatctccgcctcgcccgaccccaggcctcggactcagcctcggcctcgggaggagtcacaacctcgcccgagcccagcctcggcctcaggagaagtctccgcctcgcccgacctaggcctcagacttactacgctacaggggatgcatcattaccctactactag

SEQ ID NO: 9288 - DNA, 462 bp, Zea mays
  Peptide Sequence Number=SeqID_52663
tttgtccttcaagcttctcctggacaagcgccgcactcactgcagagtgcgaggctgccacatacagtagtagaggagcccctggcactggtagagttagcgtcgttaaatctatcagatactgcttcagttcttcgaaggctttctgctgagctgatccccattgaaagacttcggccgacttcagcacttaaaagaatggccagcttgcctaaagttagcaaatgtttcctgcagatcagcaatgtgactttcttgcttcgtgctttttactatgatatcatcaacatatgtcagcacatttctgcctatctgagaatgaaatactttcgctgtcattctgctgaagcttcctccagcattcttgagcccctcaggcatccgaagataacaatatgtatcactgggggttatgaagctggtttttggctcatcttccttcttcatctagatttgatgtag

SEQ ID NO: 9289 - DNA, 975 bp, Zea mays
  Peptide Sequence Number=SeqID_52664
atgacgatgatggcgccgcatccgcagccactgccgctgccacagccgccggcgccgttcggggacaccacgctcaccaaggtgttcgtgggcgggctggcgtgggagacccacaaggacgccctccgcgagcacttcgagcgctacggcgacatcctcgaggccgtcatcatctccgacaagctcaccggccgctccaagggctacggcttcgtgacgttcaaggaggcggacgcggccaagaaggcgtgcgaggacgccacccccgtcatcaacggccgccgcgccaactgcaacctcgccgccctcggcgccaagccgcgccccccgccacacatcctccgcccttcgccgccggccaccccggcgccgcacgcgcccgcgctcccctcgcaacaccagcccacgccagccatcgccgtggggtccaggggcgtgtcgccggtgccgtggtactaccacccctccacgacgccgccgccaccggccgcgcaccactacgcccacggcgcgcaccagcagtaccacggcgtgctcccgttctaccccgccgccgccgccacctacgggtacgccccgaattacgtcgcggacctgagctacaatgcgaaggtaggccaggcggcagctggcggcacgggcgggtcctacctgcaggggcacttcgcgtacccggcggcggcggcagcgcagggcggcatggtggcggcggcgcccaacggcatggtgccggtgtacccgttctaccactaccaccagtaccacgcctcgcaggggggagtcgccgccgcgcacttcttccccccggtctccgccgccgccgtccccgccgtcgtctccaagcacaccgtcatggccgctcccaaaggtcccggaacctggatcaaagtgtggtataggtggtcttcacaacaaaacaaaatggaaactgcagcagcagaagatgaatacaagaggcaatttcccaagagctaa

SEQ ID NO: 9290 - DNA, 1047 bp, Zea mays
  Peptide Sequence Number=SeqID_52665
atggcgcccacggcctgcctccggacccccttcttccccgcccgtgcccgatccaccaacgccaccccgttctcgccacaccgccgcttttctctcaaatgcagcgcctccaacggtgacaactccaaccccaactccatctccatctctcccacctcgccgcctcggctaacggtgtcggacggcgtcgagtctgtggacgttaacgggttgcgtcgcccgccagcgcccgcctccgtccccgccgcccgcgatccccactggctgcctcgtccgctcacaagtgcggacgtcatggaggtggacgggaaggggctcaaggttgcttaccagggttgtgctggagcgtacagcgaagcagcagcaaagaaggcgtacccgaattgtgagactgtgccctgtgagcacttcgacactgcatttcaggctgttcaaaactgggtagctgatagggccgtactgccacttgagaattcattgggaggtagcatacataggaattatgatcttttgcttcggcatagtttgcacattgtaggagaagttcgccttgcggttcgccattgcttattagccaatcctggcgtgaagattgaaaacctgaaaagtgctatgagtcatccccaggctcttgcgcaatgtgagcacacattaacatcactaggaattgagcatagagaagctgttgacgacactgctgaacatatgctccaggacactggtgctattgctagttcgttggcggctaaactgtatggattggatgttcttgctgagaatattcaggatgacaaagataatgtcacccgttttatgatgctagctcgagaacccatcatacctcgcactgataaaccatttaagacaagcatagtcttttcactagaagaaggacctggacagctctttaaggcacttgctgtatttgcactgagggacatcaacctcacaaagattgaaagtcgtccacacaaggaaaggcctcttcgggtatctgatgactgttcctcactcttaaagttagatgctaaacctgtggccttctaa

SEQ ID NO: 9291 - DNA, 342 bp, Zea mays
  Peptide Sequence Number=SeqID_52666
atgggtcagaggacacttgcctgcaccaaactgctgatcagggacttcttctgcaacttcctcgggaaacacagactgcccgttgtctacgtaaacgggggcagtaaaaaaagaagggagagggcggaagaggttccttacctcaaggcaaactccggggactcctcggtggcggcgaagacgcggcggcagcccgagtcgacggtggcggacctcggcgactgcgcagagaacggcggcggggctccaacggcgacggagaaacgggctcggggcgatggcactttggcgtgtgagaagcgtggggggaggtggaagggaggtctgcaggtgcgcaaatga

SEQ ID NO: 9292 - DNA, 261 bp, Zea mays
  Peptide Sequence Number=SeqID_52667
atggacagctcgagggtcgccacgtggccagataagatgatatattccaggatatcaacagagggtccggacccccatgggaaagtgccggacccctgtggtgtgcctgtcctttccgttggcaggcggtacgcccgtgctgcggcatacactatgctcatcctcactcgtacgttgcgagggaagcttccattgcacgccaatgctacacagaccgctgatatcagggtgcatggagattacactggtaactggcattag

SEQ ID NO: 9293 - DNA, 678 bp, Zea mays
  Peptide Sequence Number=SeqID_52668
atggcgatgtcaactatgctgctgctgtggagagctggatcgagtggtcggaatatttcagagaaagagtggaagtgcctgtctccacggctgaacgcgctgttgctcctctgcctgtgcgcgttctccgccccggcgcagtcgcagaacacgaccatggccatggccgtgccggcgtccgtcgaggggttcaactgcaccgccaaccgcacgtacccataccaggcgtacgcactctaccgcgccggcttcgcggggtccgggccactcacagcaaggtcccgagattccgggacaaataatacccaggccttgaccaaggccaggcgggggtccggagctaacacgcggtacgcccgtgctgcggcatacactgtgctcatcctcactcgtacgttgcgagggaagcttccgctgcacgccaatgctacgcagatcgcggatatcagggcgcatggagattacactgggcgggtgcgttccgccactcggccggagaatttcctctccgacatttggcgcgccagcatgatggtgcaaatcattgagcaccgcgccgagacttcggaggatttcctggtggaggaggaagctgcttcttccatgccacgggttcccaaccgcccagtgctgggcactgctgctgtgcacgctgcgcagcagcatacaactgcgtag

SEQ ID NO: 9294 - DNA, 2466 bp, Zea mays
  Peptide Sequence Number=SeqID_52669
atgcagcagcagcagcacgggggaggcggcggagcaagcggtggaggcccagcgcagcagttctgcgcacagcaggtggagatgccgctgccattctcgccggtcggcggcgctgggcagcggatctcgctggcggaggcaccgtcgcccatcagcagccggccgccggcgccggcgccggctcagcagtatgacgagctcggcccgtccggcgccggcgcagtgggctttgacgccgagggcctggccgccgccgcagctggtgaggatggcgccagcggcggctcggcgggcaaccggtggccgcggcaggagacgctggagctgctcaagatccggtcggacatggacaccgccttccgggacgccaccctcaaggcccccctctgggagcaggtctccagtgtgagggctactacagttgttgcttgtacggttgaaatttgtggtggttggtggtggcgatacgccattgataaggcaattaaggttctcgtttttgttgctaaattgttgatcgatgcggtggttggcaggaagctggctgagaaagggtacaaccggagcgccaagaagtgcaaggagaagttcgagaacgtgcacaagtactacaagcgcacaaaggagagccgcgccggccggaacgacggcaagacgtaccgattcttcacgcagctggaggccctgcacggcaccggagcggctcccgcgtcggtggcgtcgcaggtgggcccggcaatctccggcggggtgtccggggcagcccggccgtcgtcggccgtgcgcgtgcctgccgagccgctgcctgcggtgtcggccggcgtgggaatgccgatgacgacgacggtgggctacccgagcatctcgacgtccaacacggaggacgactacacggacgaggacgactccgacgacgagggcacggaggagctggtgggcggcggcgcggacgatcagcgcaggaagaggaagagggtgtcggacggcagcgggaagatgatgaggttcttcgagggcctgatgaagcatgtgatggaccgtcaggaggcgatgcagcagaggttcttggaggccatcgagaagcgtgagcaggaccgcatgatccgcgaggaggcgtggcggcggcaggagatgactcgcctagcgcgcgagcaggagatcctggcgcaggagcgctctatggcagcctcacgcgacgctgccgtcctctccttcatacagaagatcaccgggcagaccatcccgatgccatccattgccgcgcccaccatcaacgccatgccaccgccgtcgcatccgaagccgccgccgccccctcagccgcaccccacacccattgcctccgtgtcgccagccccgccgccaccgcaaccaccagcttcgcagactccgcccccgcagcagcagaagtcgccaatgccggcgacgccacaaacgccagcaccgcaacggcaaagcacagacattgttatgacaccggccgagacgacgccgcacgccgacacccaggggcacgaggggtccggtggcggcgcgacgtcgtcccggtggccgaaggctgaggttcacgcgctgatacagctgcggagcacccttgacacgcggtaccaggagaccgggcccaaagggcccctctgggaggagatctccgccggcatgcggggcatgggttacaaccggaacgcgaagcggtgcaaggagaagtgggagaacatcaacaagtacttcaagaaggtgaaggagagcaacaagaagcgtcccgaggactccaagacgtgcccctacttccaccagctcgacgcactctaccgcaacaaggcggcgatcacctcatcctccggcgccggagccatggtgcacgctaacgcatcgtcggcaccgcaggagatggtcacggtcacggccgcgacgcccatctcacagacgccgccgcctccaacacagccttcccagtcccatcacgcggcgaagaacggcggcagcagcaactccgctggcacaggcactgggaacggcagctacgcatcagagcacggctccaggggcatgcaaacgcaggcgagcaacggcagcgctgcagccagcatgttcgtcggcctcggcggcggcgcggcctcggcagcgaagaagccagaggaaatcatgaaggagatgatagagcagaggcagccgcagcagccgcaggcggtggtaggcggctacaacagaatggacggcgcgggcagcaacaatatggacgacgacgacgacgacgatgaagacgactacgatgagaacgataacgacgaagatgacgccggcaacaaaatgcagtacgagatccagttccagcaccaccatcagcatccgaacgttgtcaggtcgaacgccggcgccggtggtggcaacccgcccggcaccaccgcgcccagcacggctgcggccccgacaacaacagccggatctttcttgggcatggtccagtga

SEQ ID NO: 9295 - DNA, 555 bp, Zea mays
  Peptide Sequence Number=SeqID_52670
atggggaggctagaaccccgggcagaatgggaatcacgacttgtgggtaaagtgtgcgacctctgcagagtgttaaaaactggtatatcagccgtgctcacgatgtctcgtatcaggtgcactgcacgtaagtctgtgatcccctttttgccttctcgcctagcggagcgtccactgcgtcgcacggtgtcagaggccttcttagagcactattctatcactgagagggatactgccgagacagccatgcaagaagcagcacgacgggcactttctcagtattgctcgttgttcagcggggtagctgatggccttgacctgaagtactaccctcgccatacgaccggcagtgctggacgtgtgattgtctcgccagttggtgaaggcaatcccaggctgagcagcgtggtcaacctggccgccgtgctcaacatagagttggaccacacccttgacgagttgggcaaggttccggcggaggttgcggaattgcgcgctgaatgcgtggcacgccactatcttgatggtggttctcccgcccctgtcgggatttag

SEQ ID NO: 9296 - DNA, 393 bp, Zea mays
  Peptide Sequence Number=SeqID_52671
atgggcgcggtggcgctgctcggtccagcggcgaaaactcaccggagacgaggaggctggccacggtggggctcccggggcttggggtttggcctagccgcgatcagggcggtctggcgggttcagccatggccttcacgctggcgcaggggcaccatagggcacagaccacggcagggcgggctaacggcggcacgagatagctccgacgagcaatcgcgcgagcaacagaacgggtatgaccacattaaggggacaggcgggttgctcaccttgagaggaagcgctggagtcgcgaagcaacggcggaggcgcaaggactcgacggggcgacggcggcgggactccggctgcgcgaagattgctctggtgagcgcggaacggatgaaatag

SEQ ID NO: 9297 - DNA, 723 bp, Zea mays
  Peptide Sequence Number=SeqID_52672
atggagaggagcgagaggagcaggagggcgaggcaggacaacaagtggcgctctcgacggggacgaagtcggtcatgtacacgcaggagctgctggacacggatgacgctgacagcgccccagactcagcggctcaactggatagacttcctagagcggttgcacggcaagcggatgctgctcatggacaactcgatgaactggaaccagttcgagtccatgctctatgcgaggctttatggaacaaggccagatgttcgagacgcactagcattgtcaggttccattttttttacatataaagctgtaatagaagtcatgtccttgaccagcagaactattgaatcaatgattatggattcatgtgattttggcataatgacgccacatgatcttcatgaagctgtggcctgtgagtgtcccacactgaaggaacttatattggatgagtgcccgaacgtcctgggcaactttgtggtgtgcctcagagagtcttggcccaacctaaccaagttgaccttgaatcgtattggaatcagtgatgtccaaatcaggatccttatgcttgtaggatttgaccaacttgaggagtttaatttaacgtggtgctggtgccccttgatcactgacaggttactggctatcttacatgcatcaacattgcctaatgtcacccaggagtctgttgactactaccagcatcgctgtgaagtcgagtactaa

SEQ ID NO: 9298 - DNA, 354 bp, Zea mays
  Peptide Sequence Number=SeqID_52673
atggtctctagaaaagatactaaggatagctcacttgaaactgaagatgccagcaaagtactatctccagaaagaagagatgtggctcaaggatctccagttattgggaaaagtggggctaatgttaggcgggtagagcagcagactggtgctcgcattaaagttcaagagattgacaaagatgcttctggagaaaggctgatcattgtttcatctaacgagataccaactgaaccaatatccccaacaattgaggcactcattttgctccatgataaacattctagaaaggatactggacaagattatcacatgagaatttcgagcacatttcggaaggtggtcgacctctaa

SEQ ID NO: 9299 - DNA, 1656 bp, Zea mays
  Peptide Sequence Number=SeqID_52674
atggcgcgagcagcggagcggaggatgcgagcgggcgggcaggaagcgtggggcgaggatggcagggcacgaccatggaggatccctgggatgcgccttccgtcgaagggcgaccttgcactcatcgattttattaaggaaatcccttgtgaaccaagggtggaagtcgtgcttattgatgatgcctttgttgaaagaaagtcgatggaatgtttatttcagcggaatgcatatctaggtgacgaggttatagactgttatataaatttgataaaagctcaaaagcatctaaagtgccgatctggaggtcgcgttcacatagaaaatgctttccagtttaatttcttgaagcgagatggtgatgttgacattaaaacaaaggagctatatccaattgaagacatgacacaaatatgtagcgctgaacgaagggtgttactttacctagaccatgacatgattaaaggactccaaagacaaattgatatgatatctcaacgtaaggagttaaaagaccacaggtggccaaacctccaagttgcttcttggccgctcagagaaatagacatgggatatgcaaagcagacagatagctcttcatgtggcctctttcttttgaactatatcgaatactggacaggggatgaactgtctgacagttttacccatgatgacatgtcacactttagaaagaaaatggctgctatattactatcttcagaactgaataagagaagggggtgtctgttatacaaaaatgataaagaagttgactctggaagcccatggcatgttgagatattagaaaacccaacagattctaagaagaggaagctactccacgtgcttgatgataacgaagtagtgtatgaagatgaggaaggccctattactcaagcagacttgcaaaagtggtttgttgatgattgggataaaagaactcctgtaaaagtatctaacgatgggtgcaccaatgactttttaatggttggtctttccacaaaggacatgccagtgaccaaagccgattcaatagatgttttatgtgattatatcatggcaatagaagacgatacgacactagaagaatggttgggttttggtaaacttccaaagtaccatcaggatcctacagcagaagagttagccaaaacactcgattgttggccatcaatgaattattatatcacgggttgtagatatgttcttatgccatggaaattcaatggatgtcacgcccttttcgtaatagatcatgttaaaaagcatgtgacttttatcgactttacaccgactcaagattggtgtaaacacatgccatacaagaggtttgcggaagcgattatcatggcctcaaagaaatataagattgcttacagcaaaaaacgttctggatgggcggaggatatctttaagtgggaacatacaattcagactggtgttccaattgacttaagagggtttaataccagctacctcgttctacaagctatggccatgtgggggaatgacagacgaatgaaatttgttggagatgcaaagattgttcgatggagctttgtgattgatctgttaagttatgaggataattcgtgccgatatgtcatccctgcaaacatacaacagagacttatcgatatcgctaaaaaggattag

SEQ ID NO: 9300 - DNA, 243 bp, Zea mays
  Peptide Sequence Number=SeqID_52675
atgaggggagccgctgggatagctgaagcatcaactattcacccccctctaggtgctctcaaattccaaaaattgggttttttcggggcgatgattggtcgtgttcctggatcggagacgtcacctaaccccaaggaggaaatcgtggtcttcgtagcatctttcgacgttggacctcgaccgccctgccatcggtttctcatggaggtcttagagcgttcggtgttcaactgcatcggctga

SEQ ID NO: 9301 - DNA, 261 bp, Zea mays
  Peptide Sequence Number=SeqID_52676
atggcggtgtcacatatgcccacccggcgcgcgagcgagctaggcatgtaccgacaggtgggtcccacaaggtcaacgacccaaggaaaggaaaaggagaggtttgaatgctgggccagcatgggggaaaagaagagtgtggactggcagcgcgagcatgaaaatgggccgaagctgactgaaaagctgagcgtttggcagtccgcagtagcttttggtggccagaagctccaaaaagctgaaacaaacaggggcaaatga

SEQ ID NO: 9302 - DNA, 771 bp, Zea mays
  Peptide Sequence Number=SeqID_52677
atggagacactcaccggcgaccgaaaccgcgacgacattgaccccagcccaaagcggtttgccaacgagttccagactccagagggaacctgccatggctttgaggaaggggagagccctgacaggctgacccacatgccagccacagttggagctttccgtccgcacgtcagctcgtccgatgaggtcgctccgttggcgtccaacgagggagctttctattcccttgcagggcagcagcccgggaaccgcgcccggtcgactgggggtggaaaatatccccgtctgaaccaccgcgaacgcgaagggcgttcgcgaagggcacgcgacggctgtggatacaacattcttctctccggcgccgatctactacggcggccgcttctcaccggcagtagccgctcgagctacacgcggctcccacggagccacggccacgcccaacatggaaatatgtttctcaccgatcgaacttggaagatggatctggatcgaacctggcggaggtgcgggctccgcgcccgcggcaagcgcgccaggatggcggtgctgtgggagacgacccagaatgagaggtcaacggcaattcagcaggtcccagaagctgcccccatgcccatctctttctctccgtctctgccctctcccgccggcgtcggtcgggctcggcccgtcgccgtggcggggattgggtgggggagttcagacttgcgtcgaccgctggcaatctgcggggctcggggcgacttctggggctgggctgcctcgtag

SEQ ID NO: 9303 - DNA, 804 bp, Zea mays
  Peptide Sequence Number=SeqID_52678
atgccgagcacgcctcactgcggctggccgcgcaccgaggccggggccgcgtccccgtgccgccagagggccacgcccacgccgggccgtggggccagcgccgctgtgcccgcacgccgtggctgggcagccgctcccgcgctggcagccgccgctcctggccagaccgccgggggacgtgcccgcaccggacagcacgcgcaaccgggggcgccgcgcgtccgagcagccggggaggccccgctgcgagccgtgacccgcgctgctgtggctgggccaccgcgccccgggccgcagggagccgcccccgcaccgccgaggctgaggccgccggggcaaggcagcacgccgaggggctgccggggccgcactcccgtggagccgcgccctagaggccgcgctgccaccggatccgcacccgagccgccggggccgcacgccgtgggtcaccggggagccaggcaggggccacgcccaccgcgccgtgtgcgccgccggatgctgcccgcacccgctggagcacgcgccggggttgcgcactcgcaccgagggctgctccagtcgccaaggtcgtgcccacgctggaggccgagcctccaggggcctaagccgaaggccgtgccccgcgccggcagtggctggtgccgcccgagccgggtcggtcctgctcgccctttgaccgccgcacccgcgcacgggccgggacggctgctaccgcgtcgccggggcaggccgtgcccaccaggagaggccgctgctagggcctcgccgccggggaggaacccgcgcccgcccatgccggag

SEQ ID NO: 9304 - DNA, 1038 bp, Zea mays
  Peptide Sequence Number=SeqID_52679
atgcagacgacatgcaaccataccaagggggcgcaccctttcgactccgacgcatccagcgtggaggcccaggcccacacgtcatgtaaccggcgcgccggttaccacgtgtgggaagctgcactgccacttgcgccagtaccgcgccttctcgactgcggaaccagtgccgcgactcgaggcaaccctgcgcatggcccaacagtgccaaccgagcacatcgatcacgggtcagtcagccgcgggagaaggcgcgatggtcaatatggccaaaagtgggccgacagtaatggcggcggcaggcgggcggaagcagcggtcacatcgtctgcaggctcacgtcccctcctggggcagcaagagagccctctcccacggagtgaagacgacgcgcccgtgttctgttcctcgaacggctcgcgcgtgcacaacgactgcctcacgaaccactcgtcccgtcgcattaactctgcggcaggacaggcggcacctttggcaggcaagggaccgggaaaggggatactccgaaaagggatccttctccgcgaaggaagcgggccccgagcccccctactgatcagaggttcgaaggctggcccctcggaagggttcgaccgccgcctcagagcacttgggccccgagccctcctactgatcagaggttcgaaggctggcccctcgaaagggttcgacagccgcctcagagcactcggacttcgcgcccaccactggtcggaggttcaaaggctggcccctcggatgggttcgacagccgcctcaggccactcgggctccgtgcccactactgatcaggggttcgtaggctggccctcgaagggttcgacagccgcctcagagcacgcagagcgagggatgactctgggctcgggggctgctctcgcaaacccggcttcggccaaaccgttgacagcgtcaacataccagcccgagaacttggaacctgactatgcacccgggctatggccagttcgcatgagggaacaaccagatcggccgaagcatcacgaaacgcgctaa

SEQ ID NO: 9305 - DNA, 213 bp, Zea mays
  Peptide Sequence Number=SeqID_52680
atggaggaggacgacctactgggagaagacctagtcgactacgaagcttctccagagcgcccagatggaggggcagctgtaaatctaatgccttattcattgtacagaaaattaggtaaacaagatgacgaacttgtcaagaccaacatgaccctcaacggtgttggaactgatagttcgatcaaagccagggagtcacgtttgttgaattaa

SEQ ID NO: 9306 - DNA, 600 bp, Zea mays
  Peptide Sequence Number=SeqID_52681
atggccacggttgccggagtgctggagctcgtgggggcaggggcgactccggtagcgctcgtgcaggggcggccgcagctccggtcggcggtcgcgctcggccgctcgcgcaggccgcaggggcgcagggacgcagggcgcagaggcggctccgttcgtacctcgctgttcgcggatctgcctcggtggaccgaatcgaagacgaagacgacggcggcgaggaggttctcttccttttgccggctgccttcgacgaagtcggcggacaacgaagccttttgccgatggcgactctccggcgacgaacagggggaagctggcttggatcttcggttacggggggtcgcgcggcctcggttccaaggggtgcgagctctacgccgacagacccgcctccgcacggccgcttctcgccctcttgcctcgatgccggcggcgaagcgcgccggatcgagggctcggccccggaagaagcagtcgccagcgcggggtacgaatgcggggaagtttcctggcggcggctggtggacgaagagcgcggatagcgcactcccggagccctccacatttagagtgtctgccacatcctctaaaatttag

SEQ ID NO: 9307 - DNA, 2043 bp, Zea mays
  Peptide Sequence Number=SeqID_52682
atggcgggatctgtcggcaaggccagggcggcgctgcggtcgtccccgaagcggtacagcggcacggacccaccgttgtctctggcggggccgacgttggcggatctgcagaggacggccgagctggagaagttcttggttgaagcgggcctctatgagggtaaagaggagtccgcgaagcgggaagatgtgctatccgagattggtctgatagtcaaggaatgggtgaagcagttgactcgtaagaaaggatatgctgagcaattggttgaacaagcaaatgcaatcctttttacttttgggtcttacagattgggggttcatggacctggagctgatattgataccctttgtgttggaccttcatatgtgaaccgagaggaggatttctttgtcacactgcatggcatattagctgagaaggaagaagttgctgagttgcaacctgtacctgatgctcatgtacctgtattgaaatttaagttccgtgggatatcaattgaccttctctatgctagcatctctctttcagtgataccagcggatttcgatatttctcaaggatctgtactttgtgatgttgacgaagcaactgtgcgaagtcttaatggttgcagagtggcggatcagattcttcggcttgttccaaatgttgagaatttccggacaacactcagatgcttgaagtactgggcaaagagaaggggtgtttattctaacattactggtttccttgggggtgtgaactgggctctgctggttgctcgtgtatgccaactctatcctaatgctgtgccaagtatgctggtttctaggttcttcagagtttttactcagtggcaatggccaaatccagtgatgctatgtgcgattgagaataatgatcttggtttttctatatgggatccacgcaaaaatccacgtgacagaaaccatctcatgcccatcatcactccagcctacccatgcatgaactctagttacaatgtttcaaccagcacactgagggttataatggagcaatttcaatttggcaacaaagtttgtcaggaaattgaacttaataaggccaattggaatgccttatttgagcctttccatttttttgaggcatacagaaagtttctagtggttgacatagttgcagaggatgacgatgatcttcgtctttggaagggatggatcgagtctcgtttgagacaacttactttaaagattgagcgggatactaaaggaattttgcagtgccatccgtacccatgcgagtattcagatcccacaatagagtgtgcacattgtgccttctacatgggcttatcaaggaaagaggggttgaaaaaacgtggtcaacagtttgatatccgtgggacagtagatgaatttatgcgtgaaattggcatgtattcattgtggaagcctgggatggatctggctgtcacccatgttcatagggagcaggtcccatcttatgtatttgagcaaggatacaagaaaccctgccctacaatgcatgcaaaccaacaagagcagtctgatggagatggaacatttagcccatatctggagagtcagcttaagagaaagtacatttccgatggagatggtcatgtggatctttgcaaatctgtaaaaagggcttcagtaagcccacctggtgtgggaaccccacctcatcttggaaatagtgtcagtaacgttgtttgtgacagtccagtcaaattcgtttcaagtgtcgtttgcagcggagcgcatgcttcctcatcacatgatgatataaatatagaacaagcacaattaactacttcaccatatggatctgaggatacctcagcatcaggtacaagctgtgcagcagtgggagcagttattttggctgatgaatccagcaagctcggtaacttgacatcagatcttgaagttgatacaattcagacaatgccactgcacacatctttagaatgcgtcgctcaaaagggtgaaacaaagcttgaggaaatcagaaggttggcgagcaacaattgtgctgagtttctagagagctaa

SEQ ID NO: 9308 - DNA, 282 bp, Zea mays
  Peptide Sequence Number=SeqID_52683
atgagcagatcgcgactgaggcgactctacaaaagctgcggcgggagctcgatgacagggctagcaacctctctcaccgaggagaacctcaaggcgaaggatgcttccctagaggagcgggcgacgaatctcgtctggcaggagaaggaccttgcctggagggaggagatgtgggaaaggcgggaaaagttgttggccgaacatgagctcgaggcagaggataaggagaagaaactggaggagaaggagcggacactggaggagcgggtccgccggttctag

SEQ ID NO: 9309 - DNA, 444 bp, Zea mays
  Peptide Sequence Number=SeqID_52684
atggagaagaaggctagtaccaagcagagccggaagaggtctggagacgaggaacaactgactgaggttgcagccacaatgccgcttgcaaaaaagaagaagcccgatgatgagccgctggcaccggatgctgttagggcttggaggaaatcaactttgaaagaatccaccaacaatgactggagaaatcagtggttctacatatgcaatcatgcacccaacttgcccaagcgttctggtaggcgccccgaatacaaggattgctgggtgtcagatttggagcccggaactttcaatgaaataccttccttgttaaaggacatccaagagttgaagaaggatgggctgatgggccatagtgtagtactcgactggttgaaacgtagatttcaacaacttcaacgtagaatcaccatgggctatgagtaccttggagaaagatga

SEQ ID NO: 9310 - DNA, 2118 bp, Zea mays
  Peptide Sequence Number=SeqID_52685
atgggcgttgggcgaaccgtggtcgtacatgaagcggaggacggggcggtgcgtattgtggggcgttatgtgccgaggacggaggccctgcggagttgggatattcgtggatccaacgatcgcctgaatagggtcttcgagctgaatcgcttaccgtacggtggctatcccggggatgacgctgtcgaccgccgcgggaaagggccaatggccgtgactgaagaaggccctatgcaggaggccgccccagccactaagaagagaaaactaggtactgtagtgggggaaatgggggtctccgatagttttgatatggagttgatggggacgtgcgcagccctcaggggaaggatgtcttcgcccgagctccgggagtcttcggcgcggatgctggaggttaccgggggtcgatggcctaagaatgttctgatcccccgcgtgcctggcgaagacttctttacgtctcgcatggctcgtgacttgaaggtgtttccttacggacggaatattgctgctggtgtgtctgcagtgatgaacaaggaccatcaagatgctgcgcagaagcgccgagcggtcgtcaggctcgcagatcctatgcgcgaggcgaagagggcgcgggggagcgcgaaggctgctgcctccggcagtagaaagccggccccgtgggccgctttctgcgcgagcggcgagattctgtcagccgctgccgctaaggacgtagcgggctccatgtcccagcggctgagggaaagcgtcgcagcagctttggtagcagctgacgcagcagctgaagcaagaggccgactttgccgaccgcgttgcgtcggtgtcctgactgcggacgtggctgccgaagtcgagagtctccgggcgcagcatgcggatgctattcgagagaagtatgctgcggaaagcaaaaactgcaggctggcggagaaggaggccgccatggaggccgagaagacggacctccggcgccagctggcggaggagaggagggaggcgaaccaggccatcgctgaagcgcaggctgcacgagcggaggccaaagtggcgcgggcggagatcagtctcggcagccaacgcgccgaggagctggaggcaaggttaaactccctgcgcagccgcgtggacaaggccgaggcctcgacgtgctcggaagtcgagcggacacacgcgcagttcatggacgcgtaccgcgagctaggcgcgcagactgctgacttcgaagaggagctgctggtgctcccgaccatcgtggagggtttcatgtccttcgcctccctcgttacctgcgaggggaccatgaatgcattgtcccgcgaggggtgcaggcactatgaggtcttcgaccaatcaaacgagaactttgaacatgaaatcttcaaggccgaagaccctgtggtgaagcagtcagcgggggcacttttcgataggatgtggggtctgcatggttgggaggcggtcagggagcggtccgaccgggcgatagagcagatggtgcatgccgaggacgtcgaggaccttggaggtctggccggcgcgttgcccgaggctgcggaggtccacccggtgccgccctcggatgccggtgaaggctccttggctgttctagaatttgggcctgcgcacgcaaccgctactgacaatgctgattttgtggcggcttcgaccgtggttgctgaagatgattctgatgattttgtgtctaagttttttgagtctgatgactctgggatttcgattgtgtggacagaggagtcttcggatgaggacttggattattttgtggcattggatgtggctgcggcagagacatctccgtgtgtgatgggtgctgaggatcttccgggtgcgagtgctgggcgtaggcggcgaagggcagtggcgaaacggagagtgagtgagttgtcgcgaagtcataggtgtcatcgtggtgagatggagggtggtcgtcttcgtgtggacgggactggcaaacaggaattgttgtcctcgccggctggggcgagtgtaggtgagggggagctgcgaaatctttttgagggtgaggaattgaggataatgttcttcaactacagagagatgggtatcatcctgaaggttgagccaatgtaa

SEQ ID NO: 9311 - DNA, 438 bp, Zea mays
  Peptide Sequence Number=SeqID_52686
atggcacccaagagagctagctcgaaggcagccccatccgttgatgaagcagcgaaggcagctctactggccgagaaaaagggcaaggcccttgcagacaccacccaccaagaagcctgcgaagaagacgcactcagcaagagacagtgcaatgatcaacctacacccgaaggcaccctctgcacctgcagctccggaggacaaccgcaagcacccccaggcttcgctccactagagggcgaggacgccactgaggatggcgaagtcatcggcgtttcagcagaggaacagctacagctgcgggccttgtgcatcaagaaccgtaacctccagaagcagaaagagatcctcgaggccaagcgccaacgtgtctccgtgcaggccaaggtgccccagatgatacgagatgaggagcagagggctcaggagctcgagtaa

SEQ ID NO: 9312 - DNA, 210 bp, Zea mays
  Peptide Sequence Number=SeqID_52687
atgacaaactcaacttccctatatggtggcatccgtggtaactcttgtgggaagacatttggaaaatctctaaccacacggatgttgacaccaacaaacttcccatctactaagaatgccgctagtatggtggcagtagttactgcaattccaacttcaaatatttctcctttggaacttgtctcgtcctacagtcaacaactcctctga

SEQ ID NO: 9313 - DNA, 475 bp, Zea mays
  Peptide Sequence Number=SeqID_52688
atggagctcgagttagaggttgatattggtgtggaatctaaggaagtgtctgcaatacaaggacagtgttcgacagcgaaggtgaagatcatgcggtttggtgtcgatgggtcaggagcggtgaaggacgagcgctgcgtcttgatcgagggactagagaagtcggattggagggtttgggaggtgaaggtctcgacgatcatcgagttgccaaactatgagactccaactgtggatgagcgtttcggcaagctcaagtcctctaagattcaccaccagacttgggccaatattgagaacccttatgttgtggccggatccaatgatggattctttaactgtggagaccttgaccacttcatcgccaactgctccaagttgaagggcaagatagataccgacaagcgtggccaccactccgaccagcgtaagggcaagcacgagtacacctccgacaagcacacgtacaagggag

SEQ ID NO: 9314 - DNA, 898 bp, Zea mays
  Peptide Sequence Number=SeqID_52689
gtcgccccggggacccgcagggcccccgcgcccctcgtctccggcgagttctccgccgcgggacgggcgccgccgcctcagctggctggggaaggagacaggagccagccgccccatctccgccgtccatcttagatcggacggccctgtttcaaatagcccgaacccagcctcagccgttcgcctgagatccaacggcccagagccgtttcccccgcgccccgcctccctgccaactgggccccgcctgccagtcgcccgcgctcgcgctgccaactgggccccgcctgtcagccccgcgcccgcgctgcccgcccggccccgcctgtcagccgctcacgccgccgcgcgcccgcgcgcccgcccgcaggatctaatcctggtcgtccgtttgagatccaacggctacaacgagcagtctgtgtttcccgaggcagttgcagaggaagtccctgatcagcagtttggtgaaggcaaatggttcgagatgcaaggattatgttatggttttggttcgacgatgatgatgatgttcctcgatgaggaaatggactcggctgaggcggccatgcaagatgccgcatgtcgtgcgctttcgcactacaactcagtgctcggtggggtagccgatggtctcaacctgaagtattacccccgccgcccatctggcagtacaggaggcatggttgtctcacctatcggtgaggacaatcctaggttgagcagcatagtcaacctagccgccgtcctaaacacggagctggaccatgcattagatgagttgagtagggcttgtgctaagatcgcccagctacgggctgagcgcgcggagcatcgtcacctggaggatggctcccccgcttttgtcgggactcagcacccgtaccgctcaccttag

SEQ ID NO: 9315 - DNA, 234 bp, Zea mays
  Peptide Sequence Number=SeqID_52690
atggcgtggctccctcgcctcaccccagcgcggcccccggcggcgtggctccctggccccctcgtgcgtcgcccctcggcccctgcgcgcggccgtcccaaccccggtggtgatgaggataatggttttggttatgactatggtaatgtttgtccgcgttgcaaccacttctcaggtgaagatgaagtcgtggaggaggacttccaggagttccaagagtatgatgagttctag

SEQ ID NO: 9316 - DNA, 306 bp, Zea mays
  Peptide Sequence Number=SeqID_52691
atggcgagcaaggctcggggctcaagtggccgagggcgagaaatgagagagaggagattggggaaggatgagaaaagggaagtaacacctaaatttgtgaatatgagcaaagaaattttatacccccaaattcagggtgttacagtggtggtgcagggggcgcctccagtgggagcatgggggagcagctcctcacagactctatctcctgctgaagcgagaaagaagagtcgtgctgctccagctcctgtcttcgacgctcctgctcctcatgtaggcggtggtgcagcctctccaagtggctag

SEQ ID NO: 9317 - DNA, 144 bp, Zea mays
  Peptide Sequence Number=SeqID_52692
atgtatggtttacagggtggtgatgaggatgatggttttggttatgactatggtaatggttgtccgcgttgcaaccactgctcaagtgaagatgaagtcatggaggaggacttccaggagttccaagagtatgatgagttctag

SEQ ID NO: 9318 - DNA, 942 bp, Zea mays
  Peptide Sequence Number=SeqID_52693
atggggatgatccgcaagattaatctaatgggtgtacctctgcaggtagaggatcttctctttaacattgacaggaaaaagcaaagaaagagaggatgtttcgcatgcggggagaagggccacttcagggacagctgtccaaatatggccgaacccaaaaaggggaggagcaaaggcaagtcgctaacaagtgtcaaaacttgggatgattcttcaagcaaagatgaacctccaagaacgcgcagccaccgatcctcatcacgctcatcacggtcatcacacaaatgtcttatggaaatgagtattccatcctctagtgatgaaagtagtagtaatgatgaaggtgagggaaagccctccatagatgagcttgcggaagccgttgaatttttccaggatgtttgtactaaacaaaaagctcaacttaaaactctaaaaaataagttgattagctctcaaaatgattataaaggtttgctagaaaaatttgaaacttttgcaaacttaaatagtcagctatcaactaaaattgagttattagagtctagtgctccatccattgctaccgatgatggccttattaaaaagaatgaaaaacttaaggctaagttagctagctcccaagaagctattgaaaatttgctagagaaaatggaaattcttagcatacacaataacgagctaactactaagctagaaaacattggtagcacccaagtagcatctttagttgaaatacctgagataattaagaaagatgcttctacttcctgctttgatttaattgatgattctaacccctgcaaccaagtctttgttaagaatattgttgtagagacatgttcggatgaggttgcaaagaaaaatgagcaattaaagcaagaagtggctcgctttggcaaggctttgtatgacaagaaaggcaaagccaaacaaatctga

SEQ ID NO: 9319 - DNA, 474 bp, Zea mays
  Peptide Sequence Number=SeqID_52694
atgggttcaacatcggaaaagatgtacctctgccaggcggaattccgccgcaggacggctatatgggtcgtagatggcaaccgcataaatgagttgagaagacacgtccgccatctgcgagatcagctcgcggaccgggatttggcactcgactgggttgttcaatctcgttcgcttgcatgggacaaggagcaaaaagctcaagctcgagtagccgagcttaacttggccgttgaagacttgcagacatattgcaataccttacatgaagaagttcatgtattatatttgcaactgcatcccagtgagcctacgaatcctgtcgagtcggaagccggaccctcacatgttgcgggacaagcgcttggtggtgagttggacctttttcagccccctccttctatgaggctggtcgatgaatggtctcctacacccgacgacgaggctgccaaaagcaactggaagcaggaatag

SEQ ID NO: 9320 - DNA, 234 bp, Zea mays
  Peptide Sequence Number=SeqID_52695
atggcggtcaaagcagctgttatcagagcggatttcggcggccagtgcgcgattctgtttcgagccgccggattgaggacgaaactgtcttcggggcccatccgtcagcgacagaaagatggtgaacgcggcgcggctgggactgactcatggggcccgcacttcggtgagcacggcacgcgcgcgaccgacgagtggaccccgccagtcggcgcgggtgtgagcttgggctga

SEQ ID NO: 9321 - DNA, 486 bp, Zea mays
  Peptide Sequence Number=SeqID_52696
atggcgatgattgccgatcagtcccgctccatccgtccgttgatatggtaccagtacctagcgacggttgccaggccggcggtggcggcggttcctaggccgacggtggcggccctcgatccagagggcgagcggcggcggcagcgcccttatgtggtggcggcggtttccaggccggcggtggcggcccccgatccagagggcgagcggcggcagcgtccttgtgcggtggcggcgattcccaggtcggtggccgcaactccattacctcgacgcgcggtggcggaggttcctcgatccgcacccaggacccttgtgcaggcaagcggcggcgtccccgaagccccgaggaggcggcacttccaaggccggcgagcaagcgatcccgtcgacgtgcgagtagcgacggcgatgcactgggcgcgatctagcgacgaccgacgtcacggaatggggcgagatgcgcgcagcgatgatcgcgcgtga

SEQ ID NO: 9322 - DNA, 153 bp, Zea mays
  Peptide Sequence Number=SeqID_52697
atgagcgaaaactaccactgcttttgcatgctctgttctgcaccatcagaatttgatagccgattcattgatactattccatattgtaaactgctagataccatgattgggcttggggtttcccccgccaccctattcatgtgcaacatctaa

SEQ ID NO: 9323 - DNA, 792 bp, Zea mays
  Peptide Sequence Number=SeqID_52698
atgcaccgcgcccttccgccttttgagcccccggatggggtgctccagtgccgccttgctcttgctgtcgttggaggagcgcggcctcgtggagatcgacaccttttagccatcgctcggctccaaggattttcgtcgtgcagcccggctggattccctcaccaatgggcagtttggtggggagaagcaagccaggctgtggcctccgccccgccctcagcttcaaggatcttcatcatccttgctgaggcggagggcaagctgagccggggttctacctcccgcatgggccggcaggccgtctcctccttcagcattcaggggagaaggcgctcaccgaccttgcggaggggcgaacttcgacaacgcaggaccggtcggccgcaagcgacgtcagctccagcgtgcctggctcgctggctcagctggctctgtcgtggcctccgacgctgcctcctgccgcttgatccgggctcgggcatctattgcgccgtgcgcaccggtggaccgtccaagacgtcgtacgccgcatgggcggcgttcgtgttcttggattgtcttgccctcactccggcacgacgcctccgtgcggaggtcggggcctgcccgtccgggaggacccgagtggggatctaccggtgcaggctggggcatccgccattcgtcggcgtggcgctggcgcgcaggtggccgctgtcgtcggtgctgtggtggtggcagccggagaaggtttctccactgacgagaccatcggcgccagctggggccagaccctcggctctttggctttga

SEQ ID NO: 9324 - DNA, 906 bp, Zea mays
  Peptide Sequence Number=SeqID_52699
atgacgaaagagcaccgacccccacggggttgcgctcctctaacatcagcaaagggaagacaagatcggcagcccaactgcgagcgcaagctctccggtgatgggaccaccagaggggatggctctgacgcgttcccctccaggagatgtccccctcttgcgccccggagcaaagtctcccggtgtgcaccaaaggttccgccctatgacacgggggccaggccccacgcgtcgggtcgggaagacgaaccgccgcacaaggagcgtgcaaccgccccgcggttaggcgccccctcatttttcgccaaaaccggcggtcaagaaggcgaaccatcacgtgggaagcgagcagtcgccccacggttcgactcgaggcaccccgcgcatggcccagtggtgacgaaggtcacgggtaggtcagccgtgggaacgggcgtgacagtcggcatagctataggcgagcccgcagtaattgcaccaacaggcccacaagagcagcaggcagatcgacaatcagactctggccccacctgcaggctcgcctcgtcccctgaggcgggcccaggggccactgtcagtaccctcaatcaggggtaccttctactactacataaaggcaccgcacccgtgcaacgcctcaagaccacgtggagaatggtgcccaatgggcagggccccaagaaggtatgccggatcccttggaaggccccggcgttggcaaggtcccaggacgaggaggaccccggcataggcggcgtcagggtcatcaagcaggcggcgcgcctgaccggtctattggcaaacagtgcgcctgtgccgagcggctgtggcgccgagctaacacagctcggcgccacagcctgtggcgccgagcttcgtgacgtggcagtcccgcgtggcacctag

SEQ ID NO: 9325 - DNA, 426 bp, Zea mays
  Peptide Sequence Number=SeqID_52700
atggcctcgccaggggccatgaaacagtggcatgacgacgtcgaccggctactcggcatggcgcattccactttgaccaagtctaggcctcggtcatcccgacgccagcgtgaggcaacagcgtccgtacgctcgccatccataaggggagcacagaccgacgacctctgggcagagctcaaccgtaggcgtacgggagaggacgcccgaatctctttggaaagggcgcaggagcgccgacaaaacatcgagggtcacaacctcgaccgagatttcactacggaagcaccgcagacaccaatgggtgcctggtcccaaacgggtgtccccttagccggcgtgggctgcgccgacctcgcagaccatctacgcgcggcgtcatggccgcccaagtttcggctgcacctgccgaaaaaaaaacgatag

SEQ ID NO: 9326 - DNA, 315 bp, Zea mays
  Peptide Sequence Number=SeqID_52701
atgtcggtcgacttgtggtttggtggtttgggcctcaaaaccacccagcgctacggatggttggttttgctgagtttgggcctcaaaactcggcggtggtggttctggaaggaaccggtggcggcacgcggcatgatcgcggaggtgtttggaaagctaaatccaattggctcccattcacccccatctagtcgccttaccgatcctacatttgaggatagagcccagtcgttgtcaggggtgaaatacaagaaccccgattctctcttaaatgcgtttcaggcgcaacaacttgaaactggcatctatgactag

SEQ ID NO: 9327 - DNA, 105 bp, Zea mays
  Peptide Sequence Number=SeqID_52702
atggccatgatgggttcaacatcagaaaagatgtacctctgtcaggtgaggaaacaacagacttttgctgttaaggtggtgcccaaagaagaacctcagcagtga

SEQ ID NO: 9328 - DNA, 2100 bp, Zea mays
  Peptide Sequence Number=SeqID_52703
atggttaacttcgggaagaaattgatggctgatcaaattccagaatggaaaggatattatatcaattacaagttgatgaagaagaaagttaaacagtatggccagcagctccagcagggcgagaaagatcgtcgccgggttctgaaggatttctcgaagatgcttgatgatcagatagagaagattgtgctgtttctgttggaacagcaaggaatgttggcaagcaggattgaggagttaggaaagcaaagggcaatactacaagaccagccagatatatctggtattgctgagttacgagaagcttatagggaagttggtattgacctcatcaaactccttaaattcgttgatcttaatgcaactggcattcggaaaattttgaagaagtttgacaagcgtttcggctatagatttactgattactatgtgacaagtagatcaaatcacccgtactctcagctgcaacaggtctttaagcatgtgggtgtaggagctgttgtaggagctttgtcacgtaaccttgctgaacttcaagaacgtcaaggaagctacttatctatttatgatcagccatcttctgctcttaaggaccccatcattgatatgataaactcctcagttgataagttgacaaggtcaactaattttcttcgctttttggggcaacatgccttgattgtggatgaggagtctcctagtactgcaggagaggaagaaatagaagatcagaaataccatttcatgtcccttatgctgaacctggtgaacacatttctttacatggtcaacacatacatcattgtgccaactgcagatgactattcagtaagccttggggcagcttctactgtttgtggtgtggtcattggttcaatggctgttgcacaaatattttcctctgtttacttcagtgcatggtccaacaagtcatatttcaaaccgcttgttttcagtagcattgttttgttcttggggaatgtatgctatgcaatggcatatgatatgaagtccctaacagtccttattatcggccgtttactctgtgggatgggttctgcaagagctgtcaaccgtcggtacattagtgattgtgtccctgcaagaatacgcatgcaagcttcggcaggattcgttagcgcaagtgcacttggcatggcctgtgggccagcgctagctggtttacttcaatggaaattcaagatctacatggttactttcaatcaatcgactctacctggttgggtgatggcagttgcgtggctattgtatttgatttggctatgggtctcattcaaagaaccgaaccgtgctactgaggtgaatgaagccccacaaaatcctgcttctggacaaacggttgatattggacaagtagagaatggacttgctcagcctctgctcatggattccgtagataaacaaaatgaagatgaagatgaagaagttgatgaaagtgaagaagctgcagatgattcacgcaagcctgcaacatcaattggctcagcatacagactgcttactccatcagtaaaggtccagttgttgatatacttcatgctgaaatacgcaatggagattttgctttcagagtctagtgttatcactaatcactatttcagttggaacacaagcgcagtggcaatttttctagcaatccttgggttgacggtgcttcctgttaatgctgttgttggaacatacatcagcaatatgtttgaggacaggcaactcctcatggtctctcaaattacgttgctagtaggcattatcttcagcttcaaggttacgagtacatactctgttgtccagtatgttgtctcagcacttgtcacatttgtttctgcagaagttcttgaaggtgtgaacctttccctcctatcaagcgtgatgtcatctcgcctctcccgtggcacatacaacggtggcctcctctcgacggaggccgggaccctggcgagggtggtcgctgactgcaccatcactgcggcggggtacctgggcgtggggaagcttctcaacgtcaccctgctaccatccctggtgatatgtgttgcgtccattgcctgcaccttcctgacgtataactcgcttttctga

SEQ ID NO: 9329 - DNA, 336 bp, Zea mays
  Peptide Sequence Number=SeqID_52704
atgaaagtggtagtcataccacagattaagctcccgggcgacctgaccacggcgtacggcagaaattcgaggattctcgacgacaacgagcaattggtcctcagtgtcactatcaaacgcgcccccgagcacgagaaccgtcagaggcttcacatcgatgacctagggcttcactccgaaggggtacgggtggtgacaacgaaattcaccgtggcggcgcggtactccgatctcacggctcggactccacgcgcgaagtttgccactgaccccaacggaagcgcgggccgttgtaatggcggcacggacgtgatgatagcggggtcccaccagtaa

SEQ ID NO: 9330 - DNA, 1656 bp, Zea mays
  Peptide Sequence Number=SeqID_52705
atgtcctcgcccgagctccgggagtcttcggcgcggatgctggaggttaccgggggtcgatggcctaagaacgttcctatcccccgcgcggccggcgaagacttctttacgtctcgcatggctcgtgacttgagagtgtttccttacggacggaatattgctgctgttgtgtcggcagtgatgaacaaggatcgccaggaagctgcgcagaagcgccgggcggtcatcaggcttcccgaggctatgccgaagagggcacgggggactgcgaaggctaccgccctcgacggtagccagccgacgctggcggcgaagccggccgcccctgggtccagcaaggtgctggagagcgtgaaggcggccggcgccggcggaaccaagtctgtcccagccggagctgcgaaggcccgggaattgcctttgccggggaaatgtgttgccgacttcggcacagatattagtgtggatgattatctcgttggatcgagcgaggggcaacttgttgttgttccgcctgcggtggcgaccacggtgtctggcgcagtgcctggggtgaagggtagcgctctcagcgctagcggcgagatttcggcggtcgctgtcgtcaaggacgaagcgggcactgtgtcccgccggttgagggaggcatcgcagcagctgggtcaagcggccgacttcaccgaccgtgtggcgtcgggggcccttactgcagatgtgtctgtcgaagtcgagagacttcgggcgcagcatgctgacgccgtccgggaaaagtcggctgcggatagcaagtgccgcaagctggcggagaaggtggccgccctggagggcgagaggacgaacctccggcgccagctggtggaggagaggagggaggccaaccaggccatcgccaaggcgcaggcggcgcagtcggaggccaaattggcgcgggcccgcatggagaggcccgaggcctctacacgctcggaagttgagcggacgcgcaaacagctcgtggacttgtaccgcgagctgggcgcgcggattgctgacttcgaagtgcccgaccgagaggcgggcctttgcttcctcgagtggctgcaagaggaattgttggcgctcccgaccatcttggagggatttatgtcatttgcctccctcgtcacctgcgaaggggcgttgaacgcgctgtcccgtgaggggtgcagtcactatgaggtcttggaccgatctgatgaagattttgggcgcgagatttataaagtcgaagaccctgtggtgaaggactccgcgggggccctcttcgaccggatgtggggcccctacggtcgggaggtagtcagggagcggtctcaccgggcgagggatcagatggcgcgtgccgaggacgtggaggactttggactcctgaacagcgtgcagcccgaagcggaggccaacccggttgtggccgaggctgaagtcgtcccggcaccacccccggaaaccggtgaaggctcccacgctgcccctgcggctgctgtgtccggtggaggcccgtcgccagccactacgctgatggtggagaatccaccgaaggcggcgacggagctggcagcggaggatcccccaaaggcggcgacggagccgtcagcggaggatcccatggcggtggctgggtcttcgcaggtggcttag

SEQ ID NO: 9331 - DNA, 441 bp, Zea mays
  Peptide Sequence Number=SeqID_52706
atgtgcctgcggttgggacgtgtgtccagcggcgcccttctcatcacccgcaactcctctgcaggcaccgacgatgttgaagaagtcagcgtgattgaggctggatccgcgcggggtggggttgcgcgaagactacaacgagtagatctcgacgctggagaggttgaagccccgagggctgcatggactcggagtggattggatcttcgatcttcccgaggatttgtggatggagagtttgagtcagccaaattcttgcgcccagcttcatcattgtatcacgatgctgaagactcactagttattatagattcggaggtattatccttaatagattggtgtttggaaatatatgagtctttgtctgaagatggaggcgcgggctcgctagagctgcagaccataagatcaaatcaggcgagttttgagtattatacttga

SEQ ID NO: 9332 - DNA, 441 bp, Zea mays
  Peptide Sequence Number=SeqID_52707
atggaggcgaggatggcagagatgttccagtacatgcagagccttggcgccgcacagggtttcccttcaccacctctattgttccctacagttgatcctgatatgttccatactactcctccccgtaatcctacagggacaatctggggcggcatccaacaaccctcatggatcgcccagcccatcgttgcaccagtccagccgcccacctcgatgagacttatgttcttagcgttgagacttatgagatacttgagacttcagaatttgttggtaatgttgtgttggatacttattgctgtggccctggcactcggcaaagaagcaagctttgccgagtgcctccaagagcactcggcaaagaacctgacgccgggccccgctggtgaaccctttgccgagtgcaagctggagacactcgacaaaggagactttgcctga

SEQ ID NO: 9333 - DNA, 339 bp, Zea mays
  Peptide Sequence Number=SeqID_52708
atggatgaatacatccgggctgacaacgacttccaccaaagaagggaggaagcttacagagtgatgacaaagggagtcagcctcagaggtcgcaatacacctcacaatcttcggggcaatagcaaagctcttttaggccaccagctccaaggggcagaggcgccaggggcttcgggggaagatttggagattatcctagaaagatttactgcttattctgtgatttacgaagctcaaaaattgtcgaagctcaaaagtcgttccaaagggaatacagagctagataaataccgaagctgtaaaaaagacgttcctaagggagcgcagcgtaagttttga

SEQ ID NO: 9334 - DNA, 804 bp, Zea mays
  Peptide Sequence Number=SeqID_52709
atggcgcgattcctcccgaggccgagtcttggggtcgggcgaggcggagacctcctcccgaggccgaggcctaaggtcgggcgagtccgtctcccccctctctccatccaaagcctacgcgccgccgccccgccaccgggcgcgccctcgttctcctacctggccgtgttctccaactgcccgctcgtcgccgcggtgctcaccttcgccatcgcgcaatccatcaaggtcctcaccacctggtataaggagaaccggtgggacgcgaagcagctggtgggctccggtgggatgccgtcctcgcactcggccaccgtcacagcgctcgccgtcgccgtcggcctctggtgtgatgtcgtggccgtcggaggagtgctggagcctggcggagggacagctgtcggagctattgagtccttgctgacgtcctcttgcttccgtaagggggctgagagccgccgtcgtcacagagtatgcggggcgccatcattgcctatctggcggagcgagccagatgggacgccggtcttgttccccgtggcccgagtcagttggggtagggtgatgatggcgcctcctgttgacgtggctggtctgcgccctaggttgggtgatgtggaggctcctccgaagccgaggtcgagtccgagcccctgggtcgggcgaggcggagaccgtcggctgaggctagggcagagtccgagccctgggtcgggcgaagcagagttcgtcatcttcaggggcttagcccgagtccgagccctgggtcgggcggagcggagttcgctgtcttccggggcttag

SEQ ID NO: 9335 - DNA, 225 bp, Zea mays
  Peptide Sequence Number=SeqID_52710
atgaacacgaaggccacgggattcccacctctctctcgcctgtctccggccacctcacttccccccttcgcgctcggcctcgcgtcgacccatctgggctggggcacacggcgacattcactcgtcggcttagggacccccggtctcgaaacgccgacaagctgcatgtctagaggtagaggagtagactcctcacaccgggtactccttaggatgattggttga

SEQ ID NO: 9336 - DNA, 345 bp, Zea mays
  Peptide Sequence Number=SeqID_52711
atgcgctactccactacatacatcatgttcgaggacactcacacaacgtcagcaacgtccatcgtcccagcgtacaagaattcatgtccgaacaacccgagagtcgtcgatgttggcgacaaccatgaggcctccctgcttaacgatggacagtgcggtgcagctgctctggaccgcgtccaagtggtggcttcgcgggagcttgtcgtacacagcggcgcatgcgaccacgtaggactgcttctagaggtcgaactgacagtcgccaagcttcttctcgtcatcgatgagcgacgccaacgtgagtgcctcctgcttatggtgtttgttcggggtttcaagtaa

SEQ ID NO: 9337 - DNA, 321 bp, Zea mays
  Peptide Sequence Number=SeqID_52712
atgatcctagactttctggaaagccaaggggcattgaagagaacagcaagggcgctcagctatgggagggaagcaggggcgccatggaggttgctgccgctgcttggtgttttgaagggtgggctgttgttcttccctgcgcttgaggggtttcctgcgcacgagcagagagggagggaggtgccatggctgccacagagggcgtcggccaagggaactgctccctgcgcgcaggggagaaaaaggctccctgctcttaacgcagtggagaagagggggcgttgggcagaggaagaagaagggcttgggcgccatggctga

SEQ ID NO: 9338 - DNA, 354 bp, Zea mays
  Peptide Sequence Number=SeqID_52713
atggcgacgtctcttcgctatatgtcaatcaaagaggaatggaaaatgtgcatatatgcttctggttgcagtgagattggcctcgtccaagttatgggatctggttatagcaaagaacattgtcttagctggatacaaggagatgcagaagctctgagttttgaggatggatctatggatggttacactatcgcatttgggatcagaaatgtgacgcacattgagaaagctctatcagaagcttatagttatgatgcttactcgttttctatgattccggctattggagagctggttgatggtgatcggcagatagaagacgggcaacatgctaaccaggcctgtgaaccttga

SEQ ID NO: 9339 - DNA, 186 bp, Zea mays
  Peptide Sequence Number=SeqID_52714
atgtcgcgcgcgttcgacgactactatatcgaggattgtggtgtcatcttagcgtcggaggtgacgcagaggaggatcgacaacagtgaccagttcgtcatcctcgccaccgtcaggctcgacgccactgatattggattcgagctcggcgccaggacatgtggcgtcgagctatacaccacatag

SEQ ID NO: 9340 - DNA, 462 bp, Zea mays
  Peptide Sequence Number=SeqID_52715
atgagttccaccacattctggcgccgccttcgtctgatcctggaggccattggagccgctgcaagtcggatcctggtggatgcagcgcaacatagatcgcaaccctccaagatttttttggcagtactgagaagtggaatgctaacatctctgagacagtttgaaagcaaaccgaaggcaagggtgttcatcaactcctgcttcgcgcattgccaaagtgagctgcaggacacatggttcgcaccaaattatccatccgataacaagattgcacccgtcgagattgaagggctacttctgtctcatctagaaattctggatgctattgttatctggttacccgatgctaaagctggtgaagttcctattgcttacgtcgtgctttccttctcatcaagctgcagaatcgaggtggttgcctccagttgcgacgctattcgcttttgtcaattatatgtatga

SEQ ID NO: 9341 - DNA, 381 bp, Zea mays
  Peptide Sequence Number=SeqID_52716
atgtatgagatgcacccggctttgtcccttaaaaccaggtgtgacagggcggttccaggaagaagctctatggcaaactcaacttttcactcaggtggcatgcctgggcgccaaggcctgactgctgctgggctgccttcttcggacattgcatcacccaatggccttgctctccacagtgaaaacatgctttgcttccgccttgaactggtgctgcttgactgttctgttgggttgctagggcaggaagacgaggtgcctgctgattctgcctctgaaactgacctcctcctgactgattattctggcgattctgctgctggtgctgagggtactacctttgaaactactgctgctgagatgggtgctggttctgtctga

SEQ ID NO: 9342 - DNA, 741 bp, Zea mays
  Peptide Sequence Number=SeqID_52717
atggctcgtcttagacacactgcacggaagtcagtcattccctttttgccctctcgtttcgctgagcgtccgcttcgccgtccagtgactggtcagtctagccatttggagaggctgcaccaccgcctgcacgaggagcaggagcatcgacaacaggagctagagcagcagggctcctctttctcgcttcagcaggagatagagtctgtgaggagctgctcccctgtgctcccgctggaggcgccccctgcaccaccactgagcgccccagccactggagtagctgctggaggagacccagacgacgaaggtggcaatagcagcctgagcttcagcaccgacctttcagccgaccaggagctggaaggattggttgctcgacccatcactcgtgacactgctcgtgggtgtcacttccacgacacgttcgacaccctgctacgccaggcactcgaccgacatacttggtccatcgagtatcgttgtgtggtcttccagcacagtcacggggtttacccggaccgctgggaggcgacctgcttggtgcgccgtccggagaacagtctccggggagcggagatctgcttagagcagtattccatctctgagcgagactcgggtaaggcggccatgcaagatgccacacggcgtgcgctttcgcactactgctcagtgctcggcggggtagccaatggtctcaacctgaagtattacccatgtcgtccatctagcagcacatga

SEQ ID NO: 9343 - DNA, 351 bp, Zea mays
  Peptide Sequence Number=SeqID_52718
atggttggaggtgagcggttgccttcttcttctataaataatgcctttgcctctccggctttttcacatctcttgctgttctctgctgcttgctttcttcttctttctttatttccaccatgggcaaggacttacatccgggccgtcgagcgctccgggctcgagggctcggatgagtcggagtactcctcggacgaggagggctcgcccgaggaggacggcgatggtgacgacgacgatgacagaggcgacgacggcgatgacggtggcggcggcggcaggggcggcaacggcgacggcaagggtggcgacggcggcagcagcaagggcagcaacaaggccagtggctag

SEQ ID NO: 9344 - DNA, 318 bp, Zea mays
  Peptide Sequence Number=SeqID_52719
atggcgcaccggacagtccggtgcacaccggacatgtccggtgcccctgccacgtcatcagtgccgttggaatctgaccgttggagttctgacttgtgggccacccttgatgtccggtggcgcaccggacagctcctgttcattgtccggtgcgccagtatgggcaaacctgacgtctgcgcgcgctgcggcgcatttaatgcctctgcaggttctctggaggacatggttgctggagtgacttggtcgtccatcttgccaccgggttggacagtcgagtgggaccctacctcggctgagaaggagcatgaggagtga

SEQ ID NO: 9345 - DNA, 447 bp, Zea mays
  Peptide Sequence Number=SeqID_52720
atggagaagcggcctcaggaactcttcagcttcgggaaaagccaacggctcgtccgctataattcaccggacatgtccggtgtgcaccggactgtccggtgtgactccagcacaacggctatcccgcgccaacggctacctgcagaggcattaaatgcgccgcagcgcgcgcagacgtcaggagctgtccggtgcgccaccgggacatcaagggtggcccacaagtcagaactccaacggtcagattccaacggcactgatgacgtggcaggggcaccggacatgtccggtgtgcaccggactgtccggtgcgccatcgagcagactggctccccaacggccacatttggtggttggggctataaataccccaaccaccccacattcattgccatccaagttttcccacttctcaaccacttacaagagctaggcattcaattctag

SEQ ID NO: 9346 - DNA, 531 bp, Zea mays
  Peptide Sequence Number=SeqID_52721
atggtgcagggggttacccggtccacgtgctccggcgggttcacgaactccggcgagcgcgagcgcactattctggtggggctggtcctcggctcaagctcgggcaagcttcacggcctcctggggaagctatctgagggctcggatcgagcgaaggtgggcgggaaagggtttggccacggtggttgccctcgggcggttctggcgggtcgcggggaggtcgccggaactgtgggcgagctcgggaaagttgggcgcggcgcggaggaggcaacggggaagatgggcatgcatgagggcgagctttatagccactcgcgggcacggcacgggcgtgggcacaggggaggccgagggcgcgtgcgggcgtgctttgtcgcgttcccgagtgtctgcccacgtcaaacacgtggtggtttacttctgccagtgttcaacgacctgtttggtcgccttagcgtgcagatctcagcaaaaatcccgtgtacggtctcttctctgcaccaaatcctatcttttccatggtattaa

SEQ ID NO: 9347 - DNA, 813 bp, Zea mays
  Peptide Sequence Number=SeqID_52722
atgaccacctccatgaagaaagctctagcttttccaggaacttttatgtggagatcagaccaagggcgaagaatgaaaggtttgcctcttcgtgtttacctggatctggaggccagtaggaagccaactggttttgaggacatttttgtcggttaccatgccagtgatgatgtgcaagtaacatatgctggaaaatcatttcacaccagccgaagttaccatatatcaactgaaaagagaaacgatgcacttatctactggtcatcttcaaggtgtcttcctcatagagataagctcgcaaaagacttcctctcgctggttcctcaccattccttcggaagatgtttgaacaatgtcggcggtcctgacatggcgctatccatgtatccagtctgctccaccaacgataacggcacgccacactggtgggatcacctacactgtgcgatgtcacattacaagttcgttcttgcaatcgagaacaccaagaccgaaagctacgtgaccgagaagctgttctacgctttggaggctgggtcggtgccgatatactttggggcgcccaatgtctgggatttcgtccctcctaattctatcatagacgcctccaaattcagttcactcagaaagctggcatcgtatgtgaagacgctggcaaatgaccccgtagcctacgctgaataccacgcgtggaggcgttgtggtgcgttgggtaacttcggcagggcacgcgagatgagccttgacacgctgccttgccgactctgcgaggtggttagcaagagaggtggtaagggtgcagatgcattgtga

SEQ ID NO: 9348 - DNA, 1341 bp, Zea mays
  Peptide Sequence Number=SeqID_52723
atggataaccacatccatagtcagccagctgctaacctctactaccagttcggcatggggactgagcagcaatacccaccaccgttcgcctcaccaccatccaccaacatcccgcacatggactggaacccggccacgatgctagacaacctcaccttcatcgaggagaagatacagcaagtgaaggacgtcatccgcacaatggtggacaacgccgggcaggtgcaggtccagtgccaccaccaagcaggcgagctgctggctcagaagcagaagcagcaggtggtcaacgcggacctgacatgccttatagttcagctcatctccaccgccggcagcctgctcccgtcactgaagaactcgtcgttcctcagccacccccaccctgctggccacgtggacatggctaaccatgttggcccaagctcgagcctagtgcctaatgcgatgaccgtttctgaagactatgaggagctgttcaagggatggaccgatggcggcattgaggtcgacgacgacggcgttcttgtcgaggagcaggaaattaccaaggacggagacagcctctcgtacgagctgctgcagctggaggaggacgagatactggcgccgcacacgcacttttgcaccatctgcgggaaagggttcaagcgggacgcgaacctgcggatgcacatgcgagggcacggcgacgagtacaagagcccggcggcgctggccaagccgccgagggacccgggcgcggagcaggagccggcgaagcggcggtactcgtgcccgttcgcgggggtgcaagcggaacaagctgcacaaaagcttccagcccctcaagaccatcctgtgcgtgaagaaccactacaggcggagccactgcgagaagagccacacctgcggccggtgccacgccaagaagttctccatcgtggccgacctgaggacgcacgagaagcactgcggccgccgggacaggtgggtgtgctcctgcgggacgagtttctcgaggaaggacaagctcttcgcgcacgtcgccttgttccaaggtcacacgcccgcgttgtcgtcgccgctggaggaggagccgccgaaggcttgctcggaccagcaccagaccggccgtgctgggagccgtcgggaaccagcgaaagtcccagctggctcagtgggcggcggcagcggcagcagcttcgtgtggggtgcctcgtcctcaggggagaacagtgctctggatatcaaagcttcgggcctgctgacgggttcacaggagagccttctagtggtggttcgttctcgatgctacctcctgagcactttcagagtgctcagaagaaggggcagaactga

SEQ ID NO: 9349 - DNA, 282 bp, Zea mays
  Peptide Sequence Number=SeqID_52724
atggcgcttcctgttgacgtggcgggcccgcgcccgaggtcgggcgacgtgggggctcctccgaagccggggttgagtctgtcttccgtggccgaggccgagtccgagcccctgggtcgggcgaggcggaggtcgttcggcagaggccagggcggagtccgagccctgggcccgagtccgagccctaggtcgggcgaagcggagttcgccgtcttccggggcttagctcgagtccgagccctgggtcgggcggagcggagttcgccgtcttctggggcttag

SEQ ID NO: 9350 - DNA, 273 bp, Zea mays
  Peptide Sequence Number=SeqID_52725
ttgggctgcactctaaaggcgccgatggtgaaaagaaaaagaaaaaaggaattgcaacgagaactacaggtcaactcaaagcgcgtcctcgactaccaaactgccacggcctcacccctcacggggaccgtccggtgcggatctcggtcgccgatcgctgccagcgcggtcgccgtcggatcgggcatgggcggccggccgcgcgacaggtgggcgcgcgaccgcacgcggggccccgtggccgacaggccgatgcgtagcggcagccggcag

SEQ ID NO: 9351 - DNA, 1761 bp, Zea mays
  Peptide Sequence Number=SeqID_52726
atggagggagatggcgggggcttgatttctcatgatgctgacggtctccaatcaaaaaggcagcggattcacaagagacgacgtagagccaaaccggtttctgatttggttaagaaacctgcgggaccggcgtcgcctgctgaagatgataaaccttgcatcttgaggtggactcagcagatgaccagagccgaggatgatcttcagaaggcagtggtgattactgttatcagcgatcgtgagagagtcccaattgaagagattgttgagttaattgctcctaggctggagttggaagagaggtccttgataattcgacagtactccgagtcaagcttcatcctatttttgcctggctgtgacatggtggagatacttgtgggcaattggccttttctcagggcggccacgttcactatcacctgcaggaaatggtcccgttttctgaactccaggggtgttgtgttacttatcttgttggacatagagcttcagggtatccccatccatgcttgggaaaccataactgtggaacaattgcttagtccctttgctagtgttcatcaggttcatcctgacaccctggagctaaaggatgtggttgtttaccgttgttctgcttggtgtttagacacgtccttggtgcctgcttcaagagagctttggattgtcgagcctccctttgccattgatggtgtgtcttctggcaggagaacgttgatgtacccaatccgcatcacattctcgtctgccccacggagggatggatccgatcctaagcttcaggctattacttcgagcggtgatggttttggtaatgtgcagcagggatctcctttttcaagacccccccattcgcttcggggaaggggagaagatggtcatttgggacgtctttcagttcatgagcgtttgggtccaagagatgagaacatgcaacagcggaacattagctcggagatggcggtttcagatttaaggacaacattggaatctgattgggggaccttgtcccctaggttgatagagatgactgatgacagggttcttacttcaccggtgaaggcgaagcagctgaaagtttactctcgtcaaaggctcaagaacgtcctgactttggagggggctggagctcccaatactgtcactgtgcttcctccctcccccacagacgtggcagatgctgacacggttccatctgagtatcctgtcttagatgttgacgctgtgttggcaactccgtttggaacgctaccttcctccctgtcagatgtggcagcagcacacgcggctccgtcggaggctagtgccttagacattgatgctgagttggctgctccatctgaggaggaccttccaacaacacaagattctgtggagattaatgctcgagagcaattcatcagcagattgtcaaaccagatcacacgcgtcttaccaatcccaaaatctgtcagacgtcagtcctctacacccctggcggttccaaggtgcagccgacgtgtggcgggggttggggttgaatttaaaattcaggattggggaaaaaggtctaagaaacaagctatggtggctcttaatattattgaagacaatgaaggattcagccgtcaagctttagacgactacgccaagctcttcaagaatactctttcttgtagtcatgtgcgggctcttgctgctctttttgggtggtctgtcccagataatttggaatatgataatgggactggggatattaccgcagcaagcatattttag

SEQ ID NO: 9352 - DNA, 1515 bp, Zea mays
  Peptide Sequence Number=SeqID_52727
atgtcgctgggaggccgggggaagaggggcgacctcgactacgtcgcgccgatgggtcctttgtttcggacccaccccttgattcggccgccgggaggtcggggggaagaaagacgacatcgactgcatcgcgccgatgggtcttttgtctcggacccaccccttgattcgggctcctcccagaagcgccagaaaacggttggtggggctaaggaggccgaacctcaggcccaggacgggcagaggggcgtgagccctccaacgctacctccttcggatttgactccaccaccaccgccgcccatgacggaccaatcgtcatcaccgcaggggcagcggcagcaacgacaacgagtgccccgcttccaaggccactgggtggcgccatcggacccccaggatccgcctgtcaccgtcgaggcggcaccttcgggtccccgagttccagctgagggtccagaggcaacgctgttgccaacagccgctgagggcctagcggcggggataccgtcggatgcaccgtcggcggtaggcgtgggaggcgcacccagctctgttccaccaccaaccccggggtctccggaggttatccttgggcgaccgctccggtctggcaccgaatctgaagcaacgctgactcccctccctcgggtgctgtcccgcgctcaccaggatctccgggaaaccgaggtggctatccggcgggagtgggaggcgctcgagaccaagcgccaacgccttggcgactggtgcacccaactggaggagcgcactaaggtggtgtcctgccattttgcctcagaacgggccgagtttgagcaggagcgtgaggacttcaaggaggacatccggaaggtgtctgatcgagaggacgaggtgatccagaaggagaaaggcctggctaggaaggaggtacgcttagaccaaagggaggagactgtcacagcgctccaagctaagctgaaagcttacattacggtgctggagaaacagcgggtcaagcaggctgcggctgaggtgaagctgcagcatgagctcgccaacagggccagcgacattgctcgtgccgagggaagcctcaaggcgggggaagcttcccttgcgaaatgggcagctggtcttacccggcaggaggaggacctcgccttcagggaggagatgtgggcatggcggaacaagctgttggatgagcttgagctcgaggacgaggagaggaggaagcgtttggaggagaaagtgcgggctctggaggagcaggtccgccagtttcgggcagcgcaagttgctcaagcgacacggacagcctcggccccccaggcagtggaggcgatgcggaagatactcgacgacctacgggctgagcaacgcgccggggcccagcgcatcgcttcctgggccggcgaggcaagcacggcgatagtgccgttgggggtgagccccatcccggcactggtgcggccggcgtctatctccgacacgctcccggtactggattctgctgctgaccgcctttga

SEQ ID NO: 9353 - DNA, 1440 bp, Zea mays
  Peptide Sequence Number=SeqID_52728
atgtcctcgccggcaccatcatcggcctccaggtccagccacggctcacgaggctccccgcgcatcgtcctcttcccgagtgctggcatgggccacctggtcccgttcacccgcctcgccgtcgcgctttccgccggccacggttgcgagatctccctcctgacggcgctgcccacagtttcgtccgcggagtcccgccacatcgccgcgctctacgctgcgttccccgccatccggcagctggacctccgctttgcccctttcgacgcgtcgtccgaattccccggcgccgatccattctacctccgctacgaggccctgcgccgctgcgcgccctcgctcctcggcccgctcctcgctggcgcaggcgcgtcggctctcgtcgtggacatggcgctggcctccgtggccatacccgtagccagggagctccacgtcccgtgcttcgtcttcttcaccgcgtcggccacgatgctctcattcaaagcctactttcccacctacctcgacgacgtcggtgccggacatggcgttggcgatgttgacgtgcccggcgtgtaccgcatcccaagttcgtccgtcccacaggcgctgcatgatcccgacaacatcttcacccggcagttcgtcgcgaatggacgggcgctcgcgacagccgacggcctcctggtcaacgccttccacgccatggagccggaggccgtcgaggcactacagggtcgcttcgtgctctccgttctgccgcccgtgttcgccgtggggccgcttatgccggtgaacgacctccgggagacaggggaggcagcgcaaaaacaggggaactatagggcgtggctggacgagcagccgccgcggtctgtggtgtatgtcagctttggcagccgcaaggctctccccaaggaccagatcaaggagctcgccgccggactagaagcgtgtggccaccgcttcttgtgggttgtgaagggcgctgtcgtggacagggatgacgctggggagctcagcgaactgcttggcgaggccttcctgcggcgcgtgcatggccgtggcctggtgaccaagtcgtgggtggagcaagaggaggtgctcaggcacccggccgtggcgctgttcgtcagccactgcggatggaactcggtgacggaggcagtgagcagcggcgtgccggtgctggcgtggccaaggttcgcggaccagcgagtgaacgcccgcgtggtggtccgttgcgggctcggcgtgtgggctgatcagtggagctgggagggggaagaggcgctggtgagagcggaggagatcacagcgctggtgatggaggctatggaagatgacgcgatggcagtgaaagcggcgaatgtccgcgaggctgcgtcgagagccgttgtggacggcggcacgagctaccgaagcctggcggcgttcgtgcgtcgttgcaccgcatga

SEQ ID NO: 9354 - DNA, 720 bp, Zea mays
  Peptide Sequence Number=SeqID_52729
atgcacctattggctattgctcggtttccgcctctccgtgatttctcccaatatcaacgcgatccctacgagtctaggccacctgcaagaaaaacacaaggcaaacgagagcaacagttcagacaagagcttcatcaaaaccatgcaaatcccagccgctctactcatattccccatccttggcagatctgtggtaacagaaccaacaaagaagaaccgaatcacgaaccgtccgaaaagatgcaagaacatagccgctggagaacagcaaaggttgctcacgattttcgctctgctcctttccgagccgcggcgatccggcccccgcgacggcttcttgatacgataggaccctgcttggggtgtgatttctgggtagattccctagggtttgagcctggatggagatggctactgggtactactggctactgggtaccaccatgccgcgcttgggagaggtcagcgccagcgagcggtccacggcgacgacgaaagcgcgagggggagctgaacggagattcgcagcggatgacgggatctatgaggagggcgttgatggaggcggatgacgggatctgggagtggcaattgcggcttgcgggctggatggcggggggcgggctggatggcgggcgggaatgcaggtcgcggcggccgcggtgggcgggggtgcaggtcgcggcgtttgcggcggccgcggcgggcgggcttaggtag

SEQ ID NO: 9355 - DNA, 771 bp, Zea mays
  Peptide Sequence Number=SeqID_52730
atggcgcgccagcagccggagcgagtgccgccgcagcggcatcctgtcggttgcggaggtggttggaagcgcgacggggtttgcgggagcccgcccctgagcggcgggctgttcgcggcggcgacgagcgccagcagccggagcgagtgccgccgcagcggcgtcctgtcggttgtggaagtggttggaagcgcggtgggtgtgtgcccctgggacccgcgcgtgcggggcggcaccctcttccaccagaccatcttcagcctccccgtgcgccgcgccgtgctgttcgtcgccgaggtgcaccggctgcgggacctggagcccagggcgctgtgtggcgtggagctctacgacggcatcctcatgcgctacgtgaaggcgtccacagcctacctaggcaagcccgcgccgcgcggggagccgtcgggagacatggtggacttcgacatcacatactaccacagctgtgaccccgggcaggcgcgcctgttcgaggacgtgttggaggaggtcgagcagatgggcatcttcaagtacggcggcctgccacactggggcaagaaccgcaacctcgccttcgtcggtgccgcgcgcaagtaccccggcctgccgcgcttcctgcgcgtcaaggacgcctacgaccccgagcggcgtcctgtcggttgcggaggtggttggaagcgcggcggggtttgcgggaggggcgtgcgggcggatgcgggagcggtttacattggtaacttaatagttagtagagatatccttatctaa

SEQ ID NO: 9356 - DNA, 336 bp, Zea mays
  Peptide Sequence Number=SeqID_52731
atggcacggcggcttcatggcgcgggcgggttcggtgcaggcgcggctgtcacgttgatggcttttatggtgttacacagcggctcatgccctgtacaccccaacggtcgccatagcgccgcaaaatgtcgtgagatcatcgagctcgccaagcgcgtcggcgagcggcgtgagcagtcttccaaggacggctccccacctcgtcgccgacctggtaaggaaagagtcgacgacggcgaggtggccgcggctgaatgggacctcgggtatcagtcacccgagggggtcctgaaggatgttttcaccggagactccgactccggtggcgacaactag

SEQ ID NO: 9357 - DNA, 858 bp, Zea mays
  Peptide Sequence Number=SeqID_52732
atgcaggctgcccagggcagaagaagccaaaccaccgcgcgcgaccagcgggtgaaaggacggatagccatacaggcggcatgcgaccgcgccaagtgggcgcaccccttcgactccaacgcgcccagcttggaggcccaggcccacacgtcatgcaaccgaacaggcggcacctttggcaggagaagcgggcgatgcttcgccttcgccataatgacctcgtcaaaaaaggctggcccctcggaggggttcaacagccgcctcagagcgctcgggctccgcgcccactactggtcagaggttcaaaggccggcccctcggaagggttcaacgaccgcctcaggccactcgggctccgcgcccactactgatcagggggctcggtccactcaaggaacacgacctcgcctcgctcgagccctgcctcgggcaagggcagccgaccccggaggattcacgtctcgcccgagggccccctcaagcaacggacacaccttcggctcgcccgaggcccagtcttcgctaagaagcaaccttggcccgatcgccacgccgaccgaccgtatcgcaggagcatttaatgcaaagggctcggactcgggctcagccccggaagacgacgaactccgcctcgcccgaccccagggctcggactcgggctcagccccggaagacgacgaagtccgcctcgcccgaccccagggctcggactcgggctcagccccggaagacgatgaactccacctcgcccgaccccagggctcggactcgggctcagccccggaagatgacgaactccgcctcggcctcggaagacagactcgacctcgacctcggaggagcctccgcctcgcctaa

SEQ ID NO: 9358 - DNA, 54 bp, Zea mays
  Peptide Sequence Number=SeqID_52733
atggaggtggtggtgatagccataagtctgaaccagggtaccttaggtatctga

SEQ ID NO: 9359 - DNA, 1620 bp, Zea mays
  Peptide Sequence Number=SeqID_52734
atgcgcctcctctgctgcttggccgctctcgtcgtcctcgctctccaacaccaatgccacggcctactcctcccgctcaccaacacgatgctctcctcgctccgcggaaccaatggcaccaccacgcctgtgcatcacctcctccgcgcgtcgtccctccgctcggccgcgcgccacggccgccaccgcgcgcgcaggagcccgccatcgcctcccagtcccggacgccaccgccagctctcgctcccactctccccaggcagcgactacacgctgtccctgtccgtggggccggcgtccgccgcggcgccggtgtccctcttcctcgacaccggcagcgacctcgtctggttcccctgcgcccctttcacctgcatgctctgcgagggcaagcccacgccgggacgcttggggccgctgcctccgccgccggactcccgccgcatcccctgcgcgtcgccgctctgctccgcggcgcacgcctcggcgccgccgtcggatctctgcgccgtggcgcggtgcccgctggaggacatcgagacgggctcgtgcggcgcgtcccacgcgtgcccgccgctgtactacgcgtacggggacgggagcctcgtggcgcacctgaggcgcggccgcgtcgcgctgggcgctggcgcgcgcgcgtccgtggccgtggccgtcgacaacttcaccttcgcgtgcgcgcatacggccctgggcgagcctgtcggggtggcagggttcggcagggggccgctctcgctgccgggccagctctccccgcagctctccggcaggttctcgtactgcctcgtgtcccactccttccgcgccgaccggctcatccggcctagccccctcatcctgggccgcagcccagacgacgccgccgccgccgccgagacggacggcttcgtgtacacgccgctgctccacaacccgaagcacccgtacttctactcggtggcgctggaggctgtctcggtaggcgcagcaaggatccaggcccggccggagctagcgcgcgtggaccgcgccgggaacggcgggatggtggtggactcgggaacgactttcaccatgctgcccaacgagatgtacgcgcgggtggccgaggcgttcgcccgcgcgatggccgcggcagggttcgcgcgcgccgagcgcgcggaggaacagacggggctcacgccctgctaccgctacgccgcgtcggaccgaggcgtgccgccgctggcgctgcacttccggggcaatgccacggtggcgctgccccggaggaactacttcatggggttcaagagcgaggacgcaggggccgggacgaggaaggacgacgtggggtgcctcatgctgatgaacggcggagacgcgtccggtgaggagggtgatggacccgccggcacgctgggcaactttcagcagcagggtttcgaggtggtgtacgacgtcgacgccggccgcgtcgggttcgcccgccgccgctgcacggacctgtgggactcgctgtctcgccgtttttgtatcttcttctgtctcaatttgtctgtcaagcgctatgggaacctgcgttcttgccaagatcgaaaaggactccacgggttgctagcaacagggagacagcagtaa

SEQ ID NO: 9360 - DNA, 276 bp, Zea mays
  Peptide Sequence Number=SeqID_52735
atggctatatttggaaaaacggtcgacgaccacaagaatgcagttcactgctctcgatttgggcaaacccttgatgaagtccatggacagggaatgccaagcatggggaggcacaggcaggggcgacaagagccctgggtacttgacacgttctggcttggcttgttggcaagtggtgcaagagtgaacaaactggtggactgcttgttgtttttctgtcagatacatggtgaaggtgggggaaaacttgctcaatcaagatgctcccaattctga

SEQ ID NO: 9361 - DNA, 390 bp, Zea mays
  Peptide Sequence Number=SeqID_52736
atggccagagccgctgcgcccatcctcctccaccttctgctcctcctcgctgacctcggccccgccgccgcggtgcgcttcaactacgcctcgctcaccctcggcagcctgaggctgctgggcgacgcgcacctcaagaacggcatcatccgcctatcccgggacctgcccatcccgacctcggaatgtggtggcgctaagcagtgtgcccttgccgatgacgaggggagcgccttccctaccgccgctgtcgtagagttaaagttcgtcgcccgcgggacacgcaccatgcttgcacccgggccactgttgatggccgtccaacaaggcaaggtcacgcccccgtgctcgaggtcaactgtcagcaaggctgcctcgagcatctgctaa

SEQ ID NO: 9362 - DNA, 516 bp, Zea mays
  Peptide Sequence Number=SeqID_52737
atgcaggcggcatgcaaccgcgccaagtgggcgcacctctccgacttccaacgcgcccagcatggaggcccaggcccacgcgtcatgcaaccggcgcaccggatgctgcgtgcgagcaactgcaccgccacccgcgccactgccatggctcctcgactgcggaaccagtaccgcgactcgaggcaaccctatgcacgacctagcagcgccagcctggcgcgacggcggcgcctctggcaggagaagcaagcaacgcttcaccttcgccataatgaccgcgtcaaaaaagggaccgggaaagggggataccccgaaaaggacccttctccgtgcaggaaccaggctccgagccttcctactgatcagaggttcaaaggctggcccctcggaggggttcaacagccgcctcagagcacgtgggctccacacccactactggtcagaggttcgaaggtcggcccctcggaagggttcaacggctgcctcaggccactcgggcttcgcgcccactactga

SEQ ID NO: 9363 - DNA, 201 bp, Zea mays
  Peptide Sequence Number=SeqID_52738
atggaggtgactgaggatccttcagccttagaggtggctgttgtagaaaacccagcccccaagggtggtgctggcggttacccagcccccgagggtgttgctagtaatgatccggctcgggtgggtagcgcaggctgcaacccagcccccgagggtgttgccggtaaattagcttctgtcattcctcctggctttggttga

SEQ ID NO: 9364 - DNA, 1167 bp, Zea mays
  Peptide Sequence Number=SeqID_52739
atgtgcctactccagcgggcggcgctctactttgtgggtggcgccgacgaccgcgaggcgctggcgtacgcggcgcggatgccggagaccgggaccatgtcgctgacggtggtgcggttcaagctccggaactgggttgggatgggcgggcgcgacgaggcgagggacgaggagctactgcaggagttctggagcaggcacagggacaacgagcggggtggtatacgtggagaagacggtggaggacgcggagggcacggcgtccgtggcgaaggtgacccggaggggtccacggcgctcaccagcgggctgtcggagtcgagcgagttcccggagctgggcgtgctgggggacatgctcgcctccgcggaggtcgcgtccaaggtctccatcctcgtcatccagcagcagccgcccaagaaaaccatcgccacaattaagttgttctgctttcttgcgctggccgcaaagcgtgggctgactgattgggaaggtggatatttcccagtcactctccatttcactgaaaattacccaagtaacccaccaacctgcaagttcccacgaaggtttttccatgtcaatgtctatgattctggggatgtatgcctgtcaatacttggtgatgcatgggcgccctctatcacagtgcagcaaattcttataggcattcaggagctgctggagaacccaaacccagcctctcccgcacaggattttgcttacgatgtttttgcagagttgaggttccacgcctatagatattggagaacatggatgggaaatgcttctggtagtaaaaaaggcacacaagaggctggttcaaaatttgaactgctaggttttgcagctgtgcataacttctatcattatcctgagagtattcgcttacgaatcagccagggtgaaggccatggtcttggtcttcttgaagcaatcaattatattgcacagtctaagaacatttacgatgttacaatagaaagcccttctgattacctgcagtatgtgagatcatccgttgactgcctccgtttgctcatgtttgatccgatcaaacctgcacttggtgctattgtctcgtctctgaaggagaccaacctgtcaaaaagggcccaaagtttgagaatggttccaccggctgacctgatggagactgttcgttag

SEQ ID NO: 9365 - DNA, 510 bp, Zea mays
  Peptide Sequence Number=SeqID_52740
atggaggtccgctgccaaaccagcttttgccagaatgaagatggtttccccaagttgttgaaagcatgcacagttcgcctcggaatcaggagccagccagagtatgatggtcgtgaattcgtcgagcatggcctagagaaatgtgtcgtgactgtgtacattggatccaatccgcaccatgtggaatggagtgtcactgttgctgggcacagattcaaagacacctgtcaagtcgtcgctcgcaaggcattgagggccctgtgtcagatctatgaagaagaagtggccgaaacaccgctcatattctttccgccctttcagagagaccgtccagtttggatggccaggatgcgtgcattggaagatgatgctcgagaagaagatgtagagaagctcaaccgtaagctccatgtggacctcaccacagctcaagcccgtgtagctgccttggaaagtcatgaagtcattgctgttgaagccctgaagcaagccaaggatgagcatgcctag

SEQ ID NO: 9366 - DNA, 297 bp, Zea mays
  Peptide Sequence Number=SeqID_52741
gaaccagcgcccaaggaggatgactcgtgggcctgggcccccgcgtcagaggctgagccattggattcggtggaggtgaagagaggctgggccgctgttttcggcggagatgaagaggcgcggcggttcgctcctcgcatggcggttcgccttcttcgcacatggaggccgatgcccaaggagtatgactcgtggacccgggccctcgtgttagaggctgggccgctgctttcggcggagatgaagaggcacgacagttcgctcctcgcgtggcggttcgccttcttcgcacactga

SEQ ID NO: 9367 - DNA, 543 bp, Zea mays
  Peptide Sequence Number=SeqID_52742
atggtgaccaccagtttgatggtggggagaagcaagccgggctgcggcctctgcctcgccctcagcttcaaggatcttcatcatccttgctggggaggagggcgaggcgagccggggttctacctcccgcatgggccggcgggccacctcttccttcagcattcaggggagagggcgctcgccggcctagcagagggggcaaactttgacaacgcggggctggtcggccgcaagcatcgtcagctccagcatacctggctcgctggctcagctggctctggcgctgctttcggtgccacctcccaccgctggggcggagcatggctgtccgcccaccgtacgggcggttgttgcgccgtgcgcaccgggggaccgtccaagacgtcgcacgccgctagggcggtgttcgtgttcttggattgtcttgtcctcactctggcacgacgcctccacacggaggtggccgctgtcgtcggtgctgaggcggtggtcgccagaggaggtttctccaccgacgagaccgtcggcgccacccgcggatag

SEQ ID NO: 9368 - DNA, 575 bp, Zea mays
  Peptide Sequence Number=SeqID_52743
atgcaggtggcatgcaaccgcaccgcgagggcgcaccccctcggcttcgtcgcatccagcatggatgcacaggcccacacgtcatgtaaccggcgcgccggttactacgtgcaagcaaccgcaccgccacttgcgccaatgtcgcgcctcctcgactgcggaaccggtgccgcgactcgaggcaaccctgcgcatggcccaacagtgccaatcgagcgcatcgatcacgggctcacgtcccctcctggagcagcaggggagccctctcccacgggcaagcgataccttttgcaggcgaagcgggcgtcatttcacctccgccatgatgaccgcgtcaaaaaagccgccccagagcactcgggcttcaggctcattactgatcagaggttcaaaggctggcccctcggaagggttcgacagccgactcagagcactcgggctccgcgcccactactgatcaggggttcgaaggctggcccctcggaagggttcaacagtcgccccagagcacgcagagcgagggatgactctgggtacgtccgttacatggccgaggctcgggctacgctcccgag

SEQ ID NO: 9369 - DNA, 411 bp, Zea mays
  Peptide Sequence Number=SeqID_52744
atgacggtggcgggcgggcgggagcagcggtcacgtcgtcagccaagctcacgtcccatccgggggcagcaagagaaccccctctcacggcgtgaagacaacgcgcccgtgatccgttcctcaaacggctcgcgcacgcgcaacggccgccccgccaaccactcgccccgtcgcattaactccgcgggaccgggaaagggggataccccgaaaaggatccttccgcgtgaaggaaccaggctccgagcctccctactgatcagaggttcgaaggctggccccccgaagggttcgacaaccgcctcagatcgcgtgggccctacacccactactggtcagaggttcgaaggccggccccccgaagggttccacggccgcctcaggctactcgggctccgcgcccattactga

SEQ ID NO: 9370 - DNA, 1008 bp, Zea mays
  Peptide Sequence Number=SeqID_52745
atgtcttcgcgctcccttatgcatcgtgtcttttcaccttccaagcccccggatgggggatacccgccgtctttccgcctcatcgttggaggaacgcaactccgtgggagttggtacctttcagccatcgttcggcttcaaggattttcatcagtcagcccggctgtacccccctgccggcagtcacccaagacggtgaccaccagcccctgggtggggagaagcaagccgagctgcgatcttggccccaccctcagcttcaaggatgttcatcatccttgctggggtggaggtcgggctgagccggagctctacctcccgcgcgggttcgtgggtcaccctctcctgcggcgttcgagggagagggcgctcactggccctgcgggcggcccggacttcgacaacgcggggctggtcgacggcgggcgtcgtcacccccagcgtgtcgagctcgtcggcttggctcccggtggcccctcctgccggaaggcggctgccgcgccgtgtgcacgggaggaccgcccaaggtgtcgcgcgctgctagggcggcgttcgtgttctggggtggtcctgcctttgcaccggccctcccccatcgagtggggttgttcgtacctgcggaggcggaaccggagttccgtctgtaatggcactttgaatgccaactcgcttgttggttgtctgaaccgcttcaccaagcgtgagtcgccccgtgtcaaggtgacgagtgagccgaagcctcgagtcgggctggcgccctctaaggacagctggccgaggccccggggcgaccggccgagccgcctgctcgggccggattcccggagaagaccctggcagcgattgcccgggtgtggtgatgacgtcgtcctttacaacggagatcctcggaccgcgtcgccgtccgaggctaggtcggacctcgccgaaggtgtcgtcgatgccgagggtgctgctgcccccttccagcgtcaaggcccgagcctgcaggatcagattgtcttgtag

SEQ ID NO: 9371 - DNA, 318 bp, Zea mays
  Peptide Sequence Number=SeqID_52746
atgtcaacggctgaggtgaaggtcatgtgggctcgtgctgatggactggtcgaggactggtgggacacgcgtctgatggtggaggacgtgcacaaggtgcggtgctcatggcagtgtttggaagcaaaatatgattggctcccattcacccccctggtcgccttaccggtcctacaattgatatcagagacgattaaggatttatctaatcggtttgaaatccatgtaggaggcatggaacgaggtgttggcaaacctccattcttcgatgggaccaattacccgtactggaagattcgcaagtctgcatatctttag

SEQ ID NO: 9372 - DNA, 570 bp, Zea mays
  Peptide Sequence Number=SeqID_52747
atgaagctcccggggccaggaatcgagctctacctcgccggagacaccgggatcaacgtcgccggacttcaccagatcgccggcgtagatccattagcaccccgtaaagctctctgtgcccttggattgaaccctaccgccgtgagcaggccggagcacacgccgccgacgaacccgcccgcctgcgcacatggaccgaccgattccggccatcaccatcgacgagccgtacctcgatgtgaccgcaaggacttcccggagctaacccaccctttgtcagacctccctcgccgccggaaaaatgtttgtaatgtgcacttaagtgtaggagttgtttggaaacttagttgcatgaactcaggatttccttttgagatggatactagtatgctaggtcgagtagctgctttactaattagggatctcggtagaagtcgagtgatttttctagcactcacgcgaggttctttggaggacatggttgctggagtgacttggccgtccatctttccaccaggttggaccgtcgagtgggaccctacctcggcagaggaggagcatgaggagtga

SEQ ID NO: 9373 - DNA, 435 bp, Zea mays
  Peptide Sequence Number=SeqID_52748
atggaccgccgcctcagagcactcgggctccgcgcccactactggtcagaggttcgaaggctggcccctcggaagggttcgacagccgcctcaggccactcgggctccgcgctcactactgatcaggggctacgctcccgaggtaccctaggacatttccgagaccgacgggaacgattttgtaacggaatcccaccagagggaggcatcgagccctcggaccccgtcaaaaggggaccaggtccagcgaatcacccgcaagtacttttggagcgcgcctccgggccactagccgacccctatcgaacggggcacgggcgtccactcggatcacccgttagcaactcactggagacaccatgttcggcgccctccgagggcaacatggcgctttcccctctcctccttgcggaaaggcaatgctggggcgtatga

SEQ ID NO: 9374 - DNA, 315 bp, Zea mays
  Peptide Sequence Number=SeqID_52749
atggaatctgggggtggcgtgctccccgaagccgcccaacaacactcggtgccatcagtcacgagatgggaatactctcacttgcggctgggctgtgactctgaaaatggttctgttcttatgtaccaagtgccaggggttctcctctacttaacctctcgcagagggaagctgaacgagaagggtcgcatgcggcacgccaggagacgggcagctgaaggacaaaggtctcgcatgcagctgacgaagagacatgaaactgaaagggttaacccggagttgaaactcccacggttaatgagtgctaaaaattaa

SEQ ID NO: 9375 - DNA, 258 bp, Zea mays
  Peptide Sequence Number=SeqID_52750
atggaggggacgactccgcccgctcgtggcgtccaccatgccgctaactggagggctcggattgggtacaacgggtcgttcgagcggatctttgttgctacggctcgggccaaggttgacgcatccgtggcagccgtccgtgatagtcggcgcttcgccgtttgtccccatctgccacgctggagacctgaccaacacgcacaggtcctgaaatcgttcagtctgtcccttcttcagcaatttgagtttcttagttga

SEQ ID NO: 9376 - DNA, 531 bp, Zea mays
  Peptide Sequence Number=SeqID_52751
atggcgcctcctgttgacgtggctggtctgcgccctaggttgggcgatgtggaagctcctccgaagccgaggtcgagtctgtcttccgtggccgaggtcgagtccgagcccctgggtcgggcgaggcggaggccgtcggctgaggccagggcggagtccgagccctggggtcgggcggagtggagttcgtcgtcttctggggctgagcccaagtccgagccctgggtcgggcagagcggagttcgtcgtcttccgggacttagcccgagtccgagccctgggtcgggcggagcggagttcgccgtcttccgggacttagcccgagtccgagccctgggtcgggcgaagcggagtggcaccgcagtcggagtggcgcaggcggcgctgtcagtggagcagcgaagtgacggcggtcacttcggctctgccggctggggcgcgcgcgtcaggataaagctttatgctgatgggggttaccagctgagaattaggagccttgagggtacccctaattatggtccccgacagtag

SEQ ID NO: 9377 - DNA, 558 bp, Zea mays
  Peptide Sequence Number=SeqID_52752
atgcaggctcgggtcttgacgctggaagggagcagcagcaccctcggcatcgacaacactttcggcgaggtccgacctagccttggacggcgacgcggtccgaagatctccactccgaaggacgacatcatcgccacgcccgggccatcgctgccagggtcttctccgggaatccggcccgagcaggcggctcggccggtcaccctggggcctcggccagctgtcctccaaggacgtcagcccgacccgaggcctcggctggtcaattccggcgtcggtcccgctaacggacgacccagccaggctccggccaaccaggcctcgacagccacaatgaacaaaaacactggcattcaaagtgccattacaaacggaactccggttccacctccgcaggagagggtgacccacgaacccgcgcgggaggtagagctccggctcagcccggcctccaccccagcgaggatgatgaacatccttgaagctgagggtgggactaagatcgcagcccggcttgcttctccccacccaggggctggtggtcaccgtcttgggtga

SEQ ID NO: 9378 - DNA, 744 bp, Zea mays
  Peptide Sequence Number=SeqID_52753
atggctgaaaggtgccaactcccacggagtcgcattcttccaacaacgaggcggaaagacggcggatatcccccatccgggggcttggaaggtggaaagacacgatgcataagggagcgcgaagacatagtcgccttccaagggggtcaccctccttttaaaggcgactctccctgcttgcgtccccagccgtcgcaggctgagtcttctccaacacgctccaaggtcctcccccgcggcgcgggggctgggtcccacgcgtcatgcaagccggctcagagcagaagaagccaaaccgccgcgcgcggtgcgtacaaccgcccagcggttacaagcgactctccacttttgcccagaccaacgggcaaaaggggcgggcagccatgcaggcggcatgcaaccgcgccaagtgggcgcacttctccgactcccaacacgcccagcatggaggcccaggcccacgcgtcatgcaaccggcgcaccaaatgcttcgtgcatgcaactgcaccgccacttgcgccactaccgtgcctcctcgactgcggaaccaataccgcgactcgaggcgacccagcgcacgacccagcgcacgacctagcagcgccagcctggcgcgacggtcaatgcggccaaaaatgggtcggcagtaatggcgacggcaggcgggcaggagcagcggccccgtcatcagccaagctcacgtcccatccgggggcagcgagagaaccctctctcacagcgtga

SEQ ID NO: 9379 - DNA, 363 bp, Zea mays
  Peptide Sequence Number=SeqID_52754
atggccgattctaaagatctcaacagtgcttctccaaacagcgacacaaggctgactaatttatcggtcgcgaagcatgaaaccttaaaagatgacatgaagaagatggatgaggagatccaacgacaacaagatcagatgctcaaggtggcgaaaaagtggtacctctcgcacttcaaggtagatcgccaccagaaggtcgtaaaggagagggaaatagacgctgattacatgtcatccgtgctgcaacagctccccacgataggtgatgccaggggcgcgtttattgcaaatggcatggctcctttctccataataccaatgattgtgccgtcttccgtcggcaaatacaatcggctataa

SEQ ID NO: 9380 - DNA, 2577 bp, Zea mays
  Peptide Sequence Number=SeqID_52755
atggctcaactggtgagaaggcaaggaaaggtgaagctattgggtgaatgcaacagaggctctaagagctctggttgtttgggtcttaagttttgtcaaacaacaacaaagcctttctggtccgaacaaaggtttggtttcttgtttttgtgtttggtactgaaagaacaccttggtgattatggtctcagattccatgttgagttatattattttgtggttcatgaagatacttttcaagaggtaaagagcaagcgtgataggaaaaaagaggttaaagaaactccagagccaagatctcgaggagcaagtaactccagtcgatccagtagaggtggtgtggaccgtgctggacgaggcaattcagttcagtctggatcgagtggcactgattatatggcttcaaggtcatcaatattgggacctgctgtggcagctaccaatgccatgcagaagccaacagttcctagtttgtccacaaacaaagatgtggttcctaatggatcagttggagcacaacaatcatcatctggttttcagcacaattggtttggggtgccaggtcagatgtcaatggctgatatagtgaaaatgggaagacctcaagtgaggtcttctggcaagcctatggctgcaggagacacatcatatgctggtcaaaccccatctttatctagctctataaaccagaactcaaaacaatcggcaagcacagccctaccaactacttttgaccagggctttcctgctctcccagaccctattccacacacagtgaattctagtcatggttcagctgggaacaaccatacacatgagaatgattggtttcctcaggacgacctgccatctggagttcagcccacatgcattgaggcgtctggtgaccagtcgctatttgtggcatcactggaccaatctatgttggttgccgatgcttcttactcacaagaaatttctcatgcagaagagaacaactccactgcagttgaagcaacactgtcttccgaaagacacttggaaattgtggaggatgacaatcatttcaacgacgggttattgcagaactcaagcgcttaccaggctcaagtgcattcctatgttgataatgaagttgggatttccaatgttgatgcagaatcagcttcgatgaacttccagcatttaagcctgcagaatgaagatatagctgcaaccaagtctgctgaggataaccctgcggttatactccctgatcatctacaagctgcaaatgcagattgtgctcatttgagctttggtagttttgaatctggtgccttctctggcttgctttcatcaaaggtcccaaaaggcagtttggaggacgacgaggtgctcattccagatgaatcccgatcagttaatcgaatagatgttaggaatcaagattactatgatgacgatgctctaaattcttcagaaaatgtggatgttgagacaagaattggtaatatggataacattgatggaccttcagtttcagaatctgatgcactgaggcagggtgccatagatgtgcctggtcttcaatatgacctgccatcagtttcaagtcatgcatattcaaacacaacacagccaagtacaatggaagaaccacaaggaaacacacaagcacaacccctttcccatttttctggcttactgcaagcaaatactctacccaataacttgttggggtcaaatcttacccctcttcgggagtttgacttctcccagttccttcagacacagtcagctacaaaatataacccatctgttgcacctaataatctgccaccaatctccatgcaagagacttcaaaacagggaggcttccccaatactcagtctacgcaacatgttcccagtacaagcatttcgtcgggtcttcctctcccacaacaattgcctgtatactctcagccaactctgccccttgggccttttaccagcctggttggctatccatatttgcctcagaactattacctaccttcagcgccattccagcaagcgtactcaagtaatgggcctttccatcaatctgctgctcctgccgtgcctggagctggtatgaagtatccgatgccacaatacaagagcagccctcctgcttcgaccctaccacaaccatcatcactctctggttacggagggttcggaagtgcaaataatatccctggaaatttcagccaaaatcagggtgctcccgctgcacctacaactttgggatttgatgaagctttaggcacacaattcaaacaccccaatcattatgcagcactacagcagagtgataattcaacgatgtggcttcatggaggcgctggttcaagaacaatttctgcagttccgcctggtaacttctatggtttccagggccagagtcagcatggtggcttccgccaggcacatcagccatctcagtacggtggtcttgggtatccaagcttctaccagtcgcagaccagtctgccacaggagcacccccagaaccccactgagggaagcttgaacaatccccagggggtaccatcccagccttcacaccagctctggcagcacatctactaa

SEQ ID NO: 9381 - DNA, 852 bp, Zea mays
  Peptide Sequence Number=SeqID_52756
atgggtcacctgacaaatgctgggccgagtacgctggccgaatgggaagtcgatgggctgccttatggtagagggatgacggtatccctgatctccaaggttgaggtccagccgaccaagcgctcgagccgtccgtcatcccgcacgtctgccgccgaggcccgagggcacgaccgcacgagcagccaacagtcccagcaccgcggcaccgtccgcgcctctaggctctggcgattgtccgccgtccgctcggcccgaggccccgagccgcgtcggcgtgccgcggctacggttctccggccgccgtccgcggtccgcccgtccagcgagcgcccgagggcccgagcagcggagcaggcgagcagctccgcgcctccggccttcgcccaccgtccgctcgggctcggaccgagcctctccgtcgactccgcgcctccgctgctcactgctccggcgctccgcccgtcgtccgccgtccgctcgggctcggagccacggaccgagccgctccgcgactccgacgcgccgtctgccgttcacccgtccggccgtccgtcgagcgctcgacgacccgagaaggcgagcaggagcagctctgcgcctcagcccgccgagcacgcgccgttgcccctgtgcctccgtccgccgagctgttgtgccttccggcttcgccgtccgccgagcaggtccgtccgcgagcgcgacgcgctgactgccgagcttccgccgtccgccgagcaggactttggcgagttcggttctcgacaaaggctgctttgccgagtgcccgagaaaaagcactcggcaaagaggctggcacttagggtctctttggttgggctgtggctgtga

SEQ ID NO: 9382 - DNA, 2904 bp, Zea mays
  Peptide Sequence Number=SeqID_52757
atgcaagtagtggagttggttccgtgcgcccgcaacaagtggggcaattggaatgaattttggttttacgttgctgaggctactgtcgaaggccatgaaggactcctcgtgtctgagatgtgctctcattattattctacgtatccgccctttgaagtggcagaggaggatgcagacgaaggggcccttcggtgcgccgccggtcagagcagtgggcgtgatttagttgaagagttcgtggcgtacggggtgtggcccctggcgcatggctgggcgttgggcgaagtgtgccctcgccagatgccctttcacggagggagggaggtgcgaagtcctgccttcgcactgaatctgcgaaaacgcgacccggccgcctttgtgcgcgatgcggaggacggggcggtgcggctcgtggggcgttacgtggcgaggacggaaggccagcgcagctttgatatccgcgggtcaaatgaccgtttgaacagggtcttcgaattaaatcaattgccgtacgacggctatcctggtcaagacgaagcggaccgccgtgggaagaaaacggcggtggagactggagacgaccctgcgccggtggccgccccttcctcaaaaaagagaaaattaggtactgcgatgggaggacttggggtgtctgatagttttgctagagagttaatgaggacgtgtgcggccccgggggaaaggatgtcttcgcccgagctccgggagtcttcggcttggatgctgagggttaccgggggttgctggcctaggaatgttcctatcccctgcgcggctggcgaggactgttttacatctcgtatggttcgtcagtggagagtttttccttacgggcggaatatcggtgctgttgtgtgggcagtgatggacaaggatcgccaaggcgcggcgcaaaaacgccaggcgactgtcaggctgcatgaagctaggccgaagaggcagcggggggctgcgaaggctgcggcctccggcggaggcaagccgccgctggcggcgaaggcgggcgcctctgcacctagcaaggtgctggaggcaacggcgggcgctggaggctccaagtcaacgaaggtggtgccgccggccagcggagtggcggaggcttcgaaggcggcccgagcgttgccgttgtcgggcaagcgcgttgccgacttcggcaccgatattactgtagacgactatcttggtgggttggacgagggccagcttgctatggttgcgcctggcgcggagatcgcgacggcggccatagtgccgagggcgaggggcgaggcccttggcgccagaggcgaggtgtcggccctcgcggtggtcagggacgaggtgggcgcagcgacccgccggctgaagggagtgacggaggcgctgagtcaggcgacggaggcgctgagtcaggtggctgacttcgccagccgtactgcatcgagggccctcacggcagctgtgtccgccgaagtcgagagacttcggacacaacatgctgacgctgtccgtgagaaatcggcctccgacagcaagtgccgtaagctgacggacagggtggccgccctggagagggagaaggccgacctccggcgccaactggcggcggagaggagggaggcaaacgaggccatcgctaaagagcaggctgcgcaggcggaggccaaactggcacgggcggagggcaatcttgccaaggagctcgccgaacatctgcaagagcggattaccgccctggagagccgcgcgaagggggccgaggctgcgatgcgtgcggaggctgaacggacgcgcgctcagcttatggatacatatcgcgagctgggcgcgcggaccggcgacttcgaggtgccggaccgagagcccgggcttcgttgtctgcaatgggtgcaggaggagctgcaggaactccccactgttgtgggggggttgatgtcgtacgcctccctggtcacctgtgagggggcgatgaacgcactctcccgcgaagggtgccggcacttcgaggtcttcgaccaggcagatgaagattttgagcgagatatctataaggtcgaagaccccgttgtgaaggaatctgccggggccctctacgaccggatgtggggtctgcatggttgtgaggtggtcagggagcgggccgagactgcgagggctcaggcggagcgcggcgagcgggtggacgacttcggggctctgaacagcgcgctgccagacccggagccgacccttgcggaggctgtgactggggtcgccctggagccaaccccggagaccgcagcgatcgcgacggctgcctccacatccgctgcggccggcgaagacctgcccccgaaggtggctgaaggcgcccctgatgcccccgcagctgctgtgccgagtgctgaagatcccacggcggtggcggcggaaacaacggcggaggcagcggcggaaccaacggcggagccaacggcggaggctcccgcagcgtcagggccttcgcaggttcaagattttgggcctgcgcacgcaaccgctactactgagtttttggcggcttcgaccgcggaaggtgggaatgaatatggtgggtctgtatctgagttttttgattttactgactctgggagctcggttgagtggactgaggagtcgtcggaggaggacttggattattttgcggccttggacgtggctgcggcggaggcttcgccacacgccgcggacgcgccagacgtgccaggtcctaacaccgggcgccgacggcgaagggcggttgcaaagcgtagggttagtgcggaggaaggggctcggcttcgcgtgagtggggctggtcggcaggagatgttgtctttgccagccgccgctggcacaggggaaggggaactgcgaagtcttttgcgggtgaggagcttaggataa

SEQ ID NO: 9383 - DNA, 423 bp, Zea mays
  Peptide Sequence Number=SeqID_52758
atgggcaagggtaccaagcgcaagcgcgagccgactcctccgtcggaggatttcggtgactcggaatactcggaggaggagttctcctccgagtccgagggatctccggctcccgtctctcccccggcgtcgtctgatgattcagacgattcccaggggattgccgcggaggtctggacgtacatccgggccgtcgagcgctccgggctcgagggctcggatgagtctgagttctcctcggacgaggaggactcggacggcggtgaggacgaagatgacgacgacgacgacggcgacgacgacggcggtggcgatggcgacggtgacggcagcggcggcaagggcagcaccagaggcggcagcagtacgggaagcaccagaggcggcggcggcaagggcagcagcaacaaggccagtggctaa

SEQ ID NO: 9384 - DNA, 1200 bp, Zea mays
  Peptide Sequence Number=SeqID_52759
atggcgagggtgtgtttaggcctcggcggccgcagaaaacacacactacaagatgatccgatcccgcaggctcggatcctgacggttgaagggagcaacagcaccctcggcgtcaactacaccttcggcgaggcccgacctggcctcggacggcgacgcggtccaaggatctccactctgaaggacgacgtcatcaccacgcccgggccatcgccgccagggcggctcggctggtcaccccgaggcctcggcaagctgtcccctgaagacatcaacccggcccgaggcctcggaagatcaactccgacgtcggtcccgctaacggacgacccgaccaggcttcgaccgaccaggtcttcttttcgagccaactctgcctctgttcgtgctgacaccgctacccctggcctcggctcatcgaagagcggccgagggtttcctttaactaagcaagagaagcctcggacgaccaggctgaccgagccgagggactcctacgcctctgggatgcggatacctcactcgtcacctttacacggggcaactcacgcttggtacgaacaaccccactcgacggggggggagcctgcggagcaacaaaagaccgacgggcggctcgccgtcgcccgctccggtagcaacaacaacgacccccgctccgggtggccgaactgcagcagcgatggcctcagggcggacgccgctgcgaccatgccctcgcctacgccgacgctcgaggggcgaggacaaatcctcccggacgagtggggcaccgacctccgcgtggaggcgccgtaccggtgcaaaggcaggaccgccccagaacacgaacgccgccctggcagcgcgcgacatcttgggcggtcctcccgtgcgcacggcgcgacaaccgccttcgcggcaggagggggcaccgggagccaagccggcgagtccaacgcgccgaggctgacgacgcccgcagtcggccagccctgtgttgtcgaagtccgcccctctcgcagggccagtgagcgccctctccctcgaacgatgaaggagaggctgacccacgaaaccgcgcgagaggtagagctccggctcagcccggcctccaccccaacgaggatgatgaacatccatgaagctgagggtgggaccaagatcgcagcccggcttgcttctccccacccaggagctggtggtcaccgtctcgggtga

SEQ ID NO: 9385 - DNA, 987 bp, Zea mays
  Peptide Sequence Number=SeqID_52760
atggggcggggcgccggcgcggggtcgtcttcagtctctgccaccggtttttttcccgcggcggtcgacaacgtcttgcccgggataaccgccatacggcaagcggttcaactcgaagaccctattcaggcggtcgttggatccgcgtatatcccaactccgctgggcctccgtctttggcatgtagcgaccaacaatccgcaccgccccatcctccgcctcacgcacgaatgcggcgggatctcggccatgcaaatccagtgcgaaggcgggactccgcaccagcatcccgccacgggaaggcatctggcgagggcatacttcgcccagtgcctagccatgcgccaagggccacaccccatacccgacaaactcctcaaacagatcgcgcccgctactcatgccggccgcgcaccgcaaggccccttcgtcttcatcctcctccgctacttcaaactgcggacaataatacttcgcgaagtcttcgaccgagggctgcccgccgtacgaagtcgttgtccagacatatttcgccagagccaccatggcatttggcgtcagctggtggacctggacgttgaatctacgcagaacttctcccacaaatcgatgcgcgggcagacgaaggccagcggcgaaaaaagcctcgaagacgacccaactcgccttctggctcggggacctccttcgtccccgggacacgtgccactccgccgccaaaataaccaagctgttgcatgtcttgcacgcggaccgaggacatccacgacacgccaaactccactatgtcgccggtgcgcaactccgccgccgccacattgctcagcatctcctcggacgacgcgccagccggcggtgtatcggcagcagaagaggaagaggacggcatcgctacgtaccgtcggcggcggcgggcggtctgcttcacacgggccagatctccgacgagcaagagcaaggagggcaaacaagcagcaagcggtttga

SEQ ID NO: 9386 - DNA, 537 bp, Zea mays
  Peptide Sequence Number=SeqID_52761
atgggagaactgggggtctccgatagttttgctatggagttgatgagggacatgcgcggaccccgggggaatgatgtcttcgcccgaagctcccgggagttttcggcgcggatgctggaggggactgcaaaggctgccgctcccggcggtagccagccgacgctagcggcgaagtcggccgcccctgggtccagcaaggtgccggagggcatgaaggcggtcggcgccgacggaaccaagtctgcctcggccggagccgcgaaggcccgagaattgccttcaccggggaaacgtgttgccgatttcggcaccaatattagtgtggatgattatctcgttggatcgggcgaggggcaacttgttgttgttccgcctgtggtggcgaccacggtgtctgccgcggtgcctggggtgaagggtagcgctcttagcgctggcggtgagatttcggcgctcactgccgtcaaggacgaagcgggcattgtgtcccgccggctgagggaagcgtcgcagcggctgagccaagttgttttctag

SEQ ID NO: 9387 - DNA, 465 bp, Zea mays
  Peptide Sequence Number=SeqID_52762
atgaacgcgttgtcccacgaagggtgcagtcactacgaggtcttcgaccgatctgatgaagattttgagcgcgagatttacaaggtcgaggaccctgtggtgaaggactccgtgggggccctctttgaccggatgtggggcccccacggtcgggaggtggttagggagcggtccgaccgggcgagggatcaggcgacgcgtgccgaaaaactggaggacttaagacctttgaacagcgcaaagcccgaagcggaagcgaacccggtggcggccgagactgggggtcgacccggcccccccccccggaaatcggcgaaagactccctcgctccccctgcggctactgtgtccggtggaggctcgtcgccaaccgttgtgccgagggcggaggatcccctgaagacggcgacggagccggcagcggaggatcccacggcggcggctgggtcttcgcaggtggcttag

SEQ ID NO: 9388 - DNA, 132 bp, Zea mays
  Peptide Sequence Number=SeqID_52763
atgacgacaaacaggccactggagctactccacatggatctattcggcctgatagcttacataagcatcggcgggagaaaaatctcagacccaagagacattaaaaggattcttgagatgagctcaaaatga

SEQ ID NO: 9389 - DNA, 501 bp, Zea mays
  Peptide Sequence Number=SeqID_52764
atgaagtcccgcatggcactggggtcgccaagtccagagaaatcccaacagaagctgggctcgtcgtcttcctcggacccagagggcccgtacaagggtgacacccagcaagccttccgcgagcgtgctggcgtcgtccgcttgctcgggattggcgtgttgcggggagatggcgctcgtcttcgtctcaagcgcgaggtcgatgcccgggggctgagagcagttgtcgtcacagagtatgcggggcgccatcattgcctatctggcggagcgagccagatgggacgccggtcttgttccccatggcccgagtcagcttggggtagggtgatgatggcgcctcctgttgacgtggctggtctgcgccctaggttgggcgatgtggaagctcctccgaagccgaggtcgagtctgtcttccgtggccgaggtcgagtccgagcccctggttcgggcgaggcggagaccgtcgactgaggccagggtggagtccgagccctag

SEQ ID NO: 9390 - DNA, 603 bp, Zea mays
  Peptide Sequence Number=SeqID_52765
atgcagtacaaggggtcaatcagtctcattagctgcgagaagcagacgattcaaatcgagtttttaaccttgcaaggcctcaccgccttggcatacaatgctccactgaccccggctgccgccgtgcataaccacggcggaagaaagggcggaggggcttaccggcggcgagattgctctggtgaagtggtcgaggacgcaggggaggtctcggggatcacaacgagaggttcacgggatgccagagaagatatgggtgcaaggaatcggtcggagactcattggatagctcggtccacgtgcggcggcggaagaccaaagttcggtgaggttgatctcgggcctccggtgaagtctggccaggtccgagggcttggcaagcttcacaggctactggcggagctagccgaagcactggttcgactcgaggatggctggagtgggctggccacggtggccgaagctctggcggcaatggcgggcggaattgagctcgccggagctaaggagagggggctggccggtgaagagatatggagccaggaaatccggtctgtctccctgcccaaacccgaggcaaatccaaggttttgtcgtgtctag

SEQ ID NO: 9391 - DNA, 663 bp, Zea mays
  Peptide Sequence Number=SeqID_52766
atggctaaaaggtaccaactcctacggagttgcgttcctccaacgacgaggcggaaagacggtgggtatcccccatccgggggcttggaaggtggaaagacacgatacataagggagcgcgaaggcatggtcgccttccaagggggtcaccctccttttaaaggcgactctccctacttgcgtccccagcagtcgtgggctgagccttctccaacacactccaaggtcctccccaatggcgcgggggctgggccccacacgtcatgcaagccggctcagagcagaagaagccaaaccgccacgcgcggcggcgcctctggcaggagaagtgggcgacgcttcgccttcgccataatgaccgcgtcaaaaaagggaccgggaaaaggggataccccgaaaaggatccttccccgtgaaggaaccaggctccgggcctccctactgatcagaggttcgaaggctggcccctcggaagggttcgacagccgcctcagatcgcgtgggctctacacccactactggtcagaggttcgaaggccggcccctcggaagggtcccacggccgcctcaggcattttgggctccgcgcccactactgatcaggggttcgaagactggcccccgaagggttcacagccgcctcagacacagagcgagggatga

SEQ ID NO: 9392 - DNA, 174 bp, Zea mays
  Peptide Sequence Number=SeqID_52767
atggcgggcggcattgagctcgccggagctaaggagagggggctggccggtgaagagatatggagccaggaaatccggtctgtctccctgcccaaacccgaggcaaatccaaggtttgtcgtgtctagggctcgcgtcccaatgccatcttctggcacacgacagaggggttag

SEQ ID NO: 9393 - DNA, 399 bp, Zea mays
  Peptide Sequence Number=SeqID_52768
atggcgagaatagtgtgtaccctccatggcaagaggttggatggtggtggtggagtctgggaggtagccttccctgcacctcagccaaagatgccccctacaccaccacagggtatcccgactgctggaggagaccctaacggagacagagatagagacgacgacgatggtggcagttcgagccacaacacggagctctcggaggagcaggagcaggagccggagggatggatcaccagacccatcactcatgacgccgctcgcggttgtcatttccacgacgctcttgacaccttgctatgttgggccttcgaccgacacacttggtccattgagtatcattgtgtagtttaccagcatcgtcgcgggttatatccagaccagtgggaggctacttga

SEQ ID NO: 9394 - DNA, 435 bp, Zea mays
  Peptide Sequence Number=SeqID_52769
atgcaagatgttgcacggcgtgcgctttcgcagtacagctcattgttcagcggggtagctgatggcctcgacctgaagtactaccctcgccgttcgactgacaatgctagaggtgtgattgtctcaccagctggtgagggcaatcctaggctgaacaaaatggtcaatctggccgttgtgctcaacaccgagctggaccacgcccttgacgagttgggcaaggctcgggcggagattgcggaactacgtgttgagcgtacggcacgccactatcaggatgttggttctccatctcctgtcgggattcagcacccttaccactcgcctataacacccatggtgttacttagccacaccctaatctggcaccacatgtggaatagagaaatcattgatgaacacaatttatccacaagagaattagctagtgtctaa

SEQ ID NO: 9395 - DNA, 576 bp, Zea mays
  Peptide Sequence Number=SeqID_52770
atggcacacactaaaactacacgacgcaaatcgactagaccttttgatgtgccacgacatcagctagcttcctggcatgaaggaagtagtagtggcagtaatgacccaattggagatctggaagctagggtggagcaactccgatcagaactacgccacaggaatagggcacgtgagcaggacagtcgccgtatagcggaattgtcagccaaagtcagccgcttacagtacgagattttagaacgggatttgggcattgattgggccgtcaactcgcgttcgtttgcttgggactgcgaagcgaaagctatagctcgtgtggcagagcttagtgcatccctcgaaagcctgcaggtgtactgtaatactttacatgaagaagtgcatttattgtatgtgcgactgcacccggacgtgccttctgacattgctgcaatgggagccggaccatcgggtacaacaaatgaaggacctgatggggagctggacctttttaggccccctccttccgtgaaccttgccgacgaacagtctcctacaacaggaaatggagcaacaaaggatgaagaagactag

SEQ ID NO: 9396 - DNA, 126 bp, Zea mays
  Peptide Sequence Number=SeqID_52771
atggatgttttgatgattaggaaccttggagaggaccagaaaggacttgggaaaggcctagggataagccttcgtggcgaggtcattcgtgtgtcattggtgataaccatcggagccgtggtgtag

SEQ ID NO: 9397 - DNA, 441 bp, Zea mays
  Peptide Sequence Number=SeqID_52772
atgggcaagaacaataaacgcaagcgtgagccgactccaccgtcggaggatttcggtgactcggaatactcggaggaggagttctcctccgagtccgagggatctccggctcccgtatctcccccggcgtcgtctgatgattcagacgactcccaggggattgccgcggaggtctggacgtacatccgggccgtcgagcgatccgggctcgagggctcggatgagtctgagttctcctcggacgaggaggactcggacggcggcgaggacgaagatgacgatgacgatgacgacgacggcgacgacgacgatgatggcgacggcgacggcaacaacggcggcgggggcagcggcggcaagggcggcaccagaggcggcagcagcacgggcagcaccagaggcggcagcagcaagggcagcagcagcaaggccagtggctaa

SEQ ID NO: 9398 - DNA, 465 bp, Zea mays
  Peptide Sequence Number=SeqID_52773
atgcacccatccccgcctcctattgcgctcggcagcctcgccagcgacctcaccgccgcgagcgccgtggaccggccaccccaggcaccctccggccaaattggccctacccccaagatcccctacccccgcccgtgcctcgccaccactcctccgtcacaaaaccgagctcccggcggagaaccgccgcgaacctcaccggcggtcgagcccgaccgaagaaccctaagctgccctcgctccgacgccgccacctcgtcgtccgaccgcatcgattcgatggcccgcatctccgccgtcgttgccgccgtgatcaccgccgccgttgtcgttgacgcgctgttcacagccgcctccgccaccgaggcaccggcccccgccccgatgtccggcgcgggcgccctctcagcgcagctctccgtcggctgcctcgcggcgctcctcgccgctttcctccgccactga

SEQ ID NO: 9399 - DNA, 510 bp, Zea mays
  Peptide Sequence Number=SeqID_52774
atgcaggagctgctggctattcagcagcaaggacctcgtgcaataggtttctttggaacccgcaacatgggatttatgcatcaacagcttattgagatcctcagctatgctatggtcataacaaaaaatcatatatttacatctggtgcttctggaacaaatgcagctgttatcaggggtgctctaagagctgaaaaaccagagctgcttactgtaattttacctcaaagcctaaagaagcagcctcctgaaagccaagaactgttgtctaaagtacaaaacttgatcgagaaaccacagcatgatcatttgccactaattgaggctagcagaataccacctttatatctagtggcaactgttgcaatcttcaggttatgcaatatggacatcatctccaaggtccaacaggtgatctgcttcgcgttccatgacagcaagctgctgatggaaacatgccaggaggccaagaaccttcggaagatcgtgacactcttctacttggattag

SEQ ID NO: 9400 - DNA, 1044 bp, Zea mays
  Peptide Sequence Number=SeqID_52775
atgggaactggatggggacggggcgttgggtggtcggatcgagcctggaagggggagcggggccgatgccggtggtgtcggcagtgcatgctgcggtggtggaagggtggtatgggacgtgtccctagctgtggaaaatcgatggagaggaaggcggtgatggtcgccactgaacgaccaagatcggcaaacgcctgggccacagcttccagggtaaggggcgacgttgttgagggggatgtgaggacaggggctgtggcgtcggacgactcgattagcttgtctagtcgtcctgatcgtccgactagtcgccgattagggcgattagtcgtcagacttgtagttcctgatcgccattcgccaacatctaggggttttgctgatattacttgggccaatgtggatgaagttgttggtgcagcagagggtctaaggggttgtaacttgcctcgtgctgcttctacacgtgttgctgcagtttctagtcatattatttcttattctcggtctagaaagcatcaaagggacacaacccaacagtctgaaggtgatgcaacagatgaaatggatgaggacaatgatgatgaatctggatctgctgaagttgctgatgcaggcttccatttggatgatgatttgtgcaagctttgtgggagagatggaacaattgtgatgattcctggtcaggggacgccacttactattgagcagagccagaaagaagagaagacttgtttgatggtgtttgactgcagaggctatgaacctgttgagttttcttttggagctggctggaaggctgagtctgtgcatgggactccttttgaaattgactgctctgaagatgaattttctgagtatgatgagaagggagaatgcccggttgagctaagcaagctgcagtcaacattcaaagtggtgaagaagcatgagaagggtgctttcagtgacagtgtccacagaggcattgccctggaccgattactattgttctgtggtctgaggtcatcggaaccgatctttttatcttctgctaatgcttga

SEQ ID NO: 9401 - DNA, 972 bp, Zea mays
  Peptide Sequence Number=SeqID_52776
atggggaagaccccaaaccctagacagggtacagtagttcttgtcttccaaccagctgaggaaggtggcggtggggccaagaaaatgatagaagacagagctgtggaaaacatagatgccatttttgggcttcatatagctgactctgtgcctattggtgtgctggcatccaggccagggcctattatggctgggagtggattctttgaggccgtaataagtggaaagggaggacatgctgcacttcctcatcacactatagatccgatattggctgcctcaaatgttattgtgagccttcagcaacttgtttctcgagaagctgatcccttggactcacaggttgtgacagttggaaagtttcaaggaggtggagccttcaatgtgatccctgattcggtaactataggtggcaccttccgagcctttctgaaagagagttttaatcaattgaagcagcggattgaagagacaaaaataaaggactcaaaactgcattcgatatatggctacttgaagttgctagataatctgtcactatgcctaactacagaagtgattgtgtctcaagctagcgtgcagcgctgcagcgctgccgtggacttcctcagcaaggaccgtcctttcttcccgccgaccatcaacagccccgagctccacgacttcttcgtgaacgtggccggcgagatggtcggctcgaggaacgtgagggacaggcagccgctgatgggcgccgaggacttcgcgttctacgccgaggcggtcccttccacctactactacttcgtgggcatgtacaacgagacgcgcgggccgcaggcgccccaccactccccctacttcaccatcaacgaagacgcccttccctacggcgcggccgggcaggcggcgctggcagctcgctacctactcgagcgtcagcagcctgctgccgccaccgctgataaggcagaaacccatgatgagctgtag

SEQ ID NO: 9402 - DNA, 141 bp, Zea mays
  Peptide Sequence Number=SeqID_52777
atggaaggcctctttgttaaatcgtgccggacgactggtggtggtacatcggccgctgcggtatggagggcttgggatcctcaacctccaatttatgggctgggcattacgtactcgctggttatggttgcagaaaactga

SEQ ID NO: 9403 - DNA, 108 bp, Zea mays
  Peptide Sequence Number=SeqID_52778
atggcgaacgaggtggcggcaactgaggtgatgaccatcattatcgtgcggagggcgtgggttcgaaccccacctcctggaccgtttttaacattttttctgatttaa

SEQ ID NO: 9404 - DNA, 1065 bp, Zea mays
  Peptide Sequence Number=SeqID_52779
atgcaggcggcatgcaaccgcacccagggggcacaccctttcgacttcgacgcgtccagcatggaggcccaggcccacacgtcatgtaaccgacgcgccggttactacgtgcaagaaactgcaccgccactcgcgccagtaccgcgccttctcgactgcggaaccagagccgcgactcgaggcaaccctgcgcatgacccgacagtgccaaccgagcacatcggccacgggtcagtcagccgcgtgagagggcgcgacggtcgatacggccagaaatgggccggcagtaacggctatggcaggcgggcggaagcggcagtcaagtcgacaggcggcacctttggcaggcgaagcaggcgacgcttcacctctgccatgatgaccgcgtcaaaaaagggaccgggaaaggggatattccgaaagggatccttctccgtgaaggaagcgggccccgagccccctactgatcagaggctagcccccgaagggttcgacagccgcctcagacgcagagcgagggatgacctagggcacgttcgatacataaccaaggctcgggctacgctcccgagctcactggagacaccatgttcggcgccctccgagggcaacatggcgctttcccctcctcctccttgcggaaaggcgacgcaggggcccaagtccggcctcgggcgccataggaaactccgcctcgctcgaccccagggctcggactcggcctcggctccggaagacgacgaactccgcctcgcccgaccccagggctcgaactcggcctcggctccggaagacgacggactccacctcacccgaccccagggctcggactcgggctcggccccggaagacgacgaactccgcctcgcccgaccccagggctcggactcgggcttggccccggaagacgacgaactccgcctcgcccgaccccagggctcggactcagccttggcctcggacgacagtctacgcctcgcccgacccggggctcggactcgacctcgacctcggaagacagactcgacctcgacctcggaggagcctccacctcgcccaacctag

SEQ ID NO: 9405 - DNA, 228 bp, Zea mays
  Peptide Sequence Number=SeqID_52780
atggattatgtaccaggattgcaaatcaatgaggcactaaagatgcaactggaagttcagaagcggctacacgagcaactggaggggggcaaaagccaaagccaaaagtcaaaccaaacacttagcttcaagatcaaactgaatttaagttgccaactctcttttgctgcccaaaacaactcactattctctctgatcatcaacaccttctttcagggcgcctgttag

SEQ ID NO: 9406 - DNA, 1110 bp, Zea mays
  Peptide Sequence Number=SeqID_52781
atggcgttcacgacgctcggcggctgtggggcgcaggcttcagtgcggttggctccccagaatggaatccttggatctaattcgaagccattcgcgggcatcatactcaagaaacctcagcagattgttcggattctagcgaaccaccctcagtttcatataaaagtgatgactgcagatagaaaagctggcgagcaatttggatcagtatttcctcacttgataacacaggacctgccgagactggtcgcaataaaagacgctgacttttcagatgttgatgctgttttttgctgcttgccacatggtacaacccaggaaattatcaaaagcttaccccgacacttaaagattgttgatctctcagcggacttccgactacgcgacatcaatgagtatgctgagtggtatggacattcccacagggcaccggaacttcagggggaagctgtgtatggtttgaccgaacttaaacgagatgacataagaaatgcacgcctggtagcaaatccagggtgttatcccacatctattcaacttccgctcgttcctttggtaaaggcaaaactgatcaagctaaccaacattattattgatgcaaaatctggagtcagtggtgcaggacgtggggctaaggaagcaaatctttacactgaaatcgctgagggtatccatgcttatgggataacaagccatcggcatgtgcctgagattgagcaaggacttacagatgctgctgaatcaaaagttactatcagctttactccacatttgatgtgtatgaaacgtgggatgcaatctactgtgtatgttgaattggcatctggagtgactcccagggatttgtatgaacacctaaagtctacttacgagaatgaagaatttgtcaagctgttacatggtagcaatgttccttgcacaagccatgttgtgggatcaaattactgcttcatgaatgtctatgaggatagaatacctggaagggccatcatcatctctgtcatagataatcttgtgaagggagcatctggtcaggctttgcaaaatcttaatctgatgatgggactgcctgagaatatggggctgcaataccagcccctgttcccttga

SEQ ID NO: 9407 - DNA, 510 bp, Zea mays
  Peptide Sequence Number=SeqID_52782
atggagctgcagcacggctcgcttcccaccccaaagagttgggaggcgcgagggatcgagccgcagctcagcccgctgtccaccttcacgaggctggtgaacatccttcccccgaatgctggaggaagaagcgggaaggagtgtcgccaccacggacatcctgtggaggaaaatgggaggtcgctccgctataatttaccggactgtccggtgaagcaccggacagtgtccgttgtcacaccggactgtccggtgtgccagcggagcaacgactacttcacgcgcaacggtcgactgcagcgcattaaatgcgtgcctgcgcgcgcagaggacagagcacgcgcagttggcgtaccggacagtctacaggacctgtccggtgcaccaccggacagcccagaggccccacctgtcagagctccaatggtcaaaccccaacggctggctgacgtggatggcgcaccggactgtccgacactccaaagagatcaaatcctctcccaagtctga

SEQ ID NO: 9408 - DNA, 126 bp, Zea mays
  Peptide Sequence Number=SeqID_52783
atgcaggatgctgcatggcatgcgctttcacagtacttttcgttgttcaatggggtatcttcggacttgtatcagaaagggagaagctcaaaagatacgaaggttgacacagtgccgaagctgtga

SEQ ID NO: 9409 - DNA, 228 bp, Zea mays
  Peptide Sequence Number=SeqID_52784
atggccaggattagatctggtgggcgggcgcgcaggcgcgagcgcctgacaggtgggcccgaggtgggtcaaggcactgacacgcgggacccatgggtcagcggatcgggcgccaaggggctttatcttctttggtcggccatgggcggcgctgcaagtggtcgcggcaatgcagtcaccggagacgaggcagaccgggattcttggggcattgggtggtctgggtag

SEQ ID NO: 9410 - DNA, 486 bp, Zea mays
  Peptide Sequence Number=SeqID_52785
atggcgagagtagtgtgtaccctccgtggcaagagactggacggtggtgtatttgtgcgctcggtgaggaagcagcaaacttttgttgcttttgttctaaggtggtgccaaaggaagaagctcaagagtgaagtccctggaggatgttgtcctccttttaaaaactttatactgttgtgttgtaatatctacgagacgggtgaaacgctcttgggaaagttttccccttatggacatatgccgccgcgcacgaggaaaaccgtgcgtaagtccaccggacctattggcatacctcggcatcagctggctccaagacatgaagagagcagcagcggcagtaatgaccccatcagagacctagatgcccaagtggagcagcttcgaatggagctacgtcacagaaacagggtctgggtagaagatggtcagcttataaatgagtcaagagctgacgtccgacatctgcaagatgagcttgctgaatga

SEQ ID NO: 9411 - DNA, 408 bp, Zea mays
  Peptide Sequence Number=SeqID_52786
atgctgctagaagagctatatggtctcttagccacacttgtcgacagcagctgcatgacacgaggtatagacatcttcctctatgtcttcgtggaggaagccagatcagtgttgttccaggtgaagttggagaagatcgcctcaacacccttgttggtgtgctggcaggtcttaacactgatctggatagtgctacccttgatctttcaagggtacatggagaacttgaagaagcacatgccaggattgcagccctcgaagcttaggttgaaggaagaaatccacccgaagcccaagtccctgccattgctgtgtccccgccccgcaagaggatttgctatggagaaccaggatctatcactaggctactctagatttataagtcatattttactaagtttgatttag

SEQ ID NO: 9412 - DNA, 93 bp, Zea mays
  Peptide Sequence Number=SeqID_52787
atgaggtggtggatcatggggattaaaggattagaggttggattagatgtgggggaaaaagctgcatatgtcacggcaggatattcgcgatga

SEQ ID NO: 9413 - DNA, 3845 bp, Zea mays
  Peptide Sequence Number=SeqID_52788
atgggagagtgcggaggcgcgagtgcgaagcggcgatgtaggccgctaagcaggagcagcaacatagtaggaaacacatggcatcgtggtggtgagggaggatggagcgaaataggagcgaagcacctccccctcgttgctggcggccacgagatcgtgacccgcgagcctttgctgaacttcagggttcctgtaccggaagatcttgcccgctacgagaatagcagctcaaatgggagtccaagcagtgaaggtcagggatccttattggatcagtacaatggtgtaaatgatgcttcccatggcctgcaccggaagcggaaaaggcatcttgacggtgccagcgatgatgatgaggcagatgcctatagtaacaaaataactgaggagcaataccgtgctatgctcagtgaacatgtccagaagtaccggaggtcaaagttcaaggagggtgcttttagttctgatcctcctcgtgtggcaacccctcaattaaaacacaaaaatggtggtaaaaaaaatatgaagcgcataagtgatttcagcgatgatgtggcattagatgggatagaagcctcacatgaatataatgggatagagtgtattaaaactcatggcggttttaataagcttgttgcaactcttgattccacttatttagatatgggggatagtacacgttacttagttccagagggttatgataagttagcatcatccctcaatctccctgtttcttctgatatacgtgtcgaggaacacttcttgaagggcatgctagatttacgcaccctagcagcaatgcttggtactgaccaaaggtttgaggcttccaatcgtggtggaatatctgaacccctgccacaatttgaatctctcaaagaaagggtaaaggtgcaggaattttctcttcaagttaccaaggacccctttgcaattccggaaggatcagctgggaggatacgaaggtatattatatcagaagctggcgatttgcaggttcattatgttagagtcatggaaaaaggagatacatatgagattatcgagcgtagcttaccgaagaagcaaatagtaaagaaggaaccttcggtaattatgaaagaagagtctgaaaagacttacaaactatggcagtctcttgctacaaaaagcataccaaagcatcacaagaattttactgctttgataaagaaacgacaagtagatgcgaagcgcttctctgatagttgtcaacgagaggtaaagctcaaagtaagcaggtcactgaaactgatgaggtgtgctgcagtacgcacaagaaagtttgttaaggatatgcagatgttttggaaacgtgtagacaaagagcagtatgagttgaggaaaaaagaggaaaaagaagctgctgaagctttgaaacgggaagaggagctacgtgaagccaaaagacagcaacataggctaaattttctgctgtcccaaacagagctttatagtcatttcatgcagaacaagactggtggttcagcgccgcctgatgaggaagatgtccctgatgaagaagatcctgaggaagctcaattgaaaagagaggccttgagagcagctcagcatgccgtctctcaacaaaagatgaagacaaatgcatttgatagtgaaattgtgaggcttcgtcaaacttctgattctgctcttccaactgatgattcatctagcatggaccctagcaagattgatctattacacccctcaacaatgcctgagacgtcttctgtgcagaccccggagttgtttaagggtgtattaaaagaatatcagttaaaaggcttacagtggctggttaattgttatgagcagggcttgaatggcattcttgctgatgagatgggtcttggcaaaactgttcaggctatggcattcctgtctcatttggctgaggacaaaaacatatggggcccctttcttgtggtggctcctgcatctgttgtgaataattgggctgaggagttgattagattctgccctgacctaaagatacttccttactggggtccagagaggatgattcttcgaaagaatatcaaccccaagcgtctgtatcgcagagatgctagctttcatattcttattacaaactatcagatacttgtgaatgaagagaagcttttgagacgtgttaaatggcaatacatggtattggatgaggcccaggctatcaaaagttcaagcagccagcgatggaagacattactgagcttcaactgtagaaaccgtcttcttcttactgggacaccaatacagaacaatatggctgagttatgggcacttcttcatttcattatgcccactctatttgacagccatgaacagttcaacgagtggttctcaaagggtattgagggtcatgctgagcatggaggagctttgaatgaacatcaacttagtagattgcacgctattttgaagccctttatgctccgccgggttaagattgatgtcattgctgaaatgaccaaaaagaaagaagaaattgttccctgcaaattgagttctcgtcaacaagttttctatcaagccataaaaaataagatctcgcttaacgagttgcttgctggaagtcgtggcagtctaaatgacaagaagttacttagcctgatgaatattgtcatgcagttacggaaggtctgcaatcaccccgagctgtttgagcggaatgagggaagctcttacttcaactttgctgaaatcccaaactcacttctttctcccccatttggggaattgcaagatgtacactatgcaggcaagagaaatcccataatctttgagattccaaagttagtttatgagggaatcatctccaacatggaaaattctggaaacatctgtggatttcagaatggatatttgaacaggctgtttaatatatttttgcccagcaatatctatcgctcagccattccagaagttagttcatcaaaagagtctcttctatcatctggtgcatttggctttacacgtttgtcaaatctgtgcccagttgaagcttccttcctggctactgcttcattgtttgagagactagtcttttcagtaatgcaatggaatatgaactacactgctgaaattctggatgaattccttgattcagaagataccggcatccagtccagtcataatgattccacaaaagttcgtgcagttgcccgtttgttgctttcttctacaaaggtcaagcccagtttgcttaggacaaagattgggactgggccaattgatggcccatatgaagcactggtgctttctcatcgcgacaggctcgcttcaaacattaggcttcttcgttcagcatatgcttttattccgccagctagagcaccacctccctttccccttcaccagataaatgtttggtgtgctgatcgaaattttgcctataagttcaccgatgagatgtatgatccttgggccaagaaactgttcctgggatttgctcgtacttctgagttcaatggtcctagacaaccaattgctcctcatcctttgatacaagaacttaatactgatttgcccatcattgagccgatgctgcagctaccctataggatatttgggtcttctccaccgatgagtaattttgatccagctaaaatgctcactgattctgggaagctccacaccttggatatgctactacgacgccttcgagctgaaggtcatcgtgtgcttctttttgctcagatgactaaaatgttggacattcttgaggattacatgaatttcagaaaattcaagtatttcagacttgatgggtcttcagccatctcagaccgccgtgacatggtccgagattttcagaacag

SEQ ID NO: 9414 - DNA, 300 bp, Zea mays
  Peptide Sequence Number=SeqID_52789
atgggttggcgcgagatggaacacaaggggggaaatgcggctcgtgttatcctgcgccggggggatgcgctcgtagtaggggttacaagcgttcgtgagggagagagagtgagcctgttcgccagcccgttctcccacgtgaccttcccacatgaaggccctggaccttccttttatagatgcaaggagagggtccaggggactgagaaccgccgtcgtcatggacgcacgcggggagccatcattacttgtcaccggggtgagccagatgggacaccggtcttgttccctgtagcatga

SEQ ID NO: 9415 - DNA, 528 bp, Zea mays
  Peptide Sequence Number=SeqID_52790
atgcccaagccaccggccggcttcgtgctaaatgaatggggtaggtgcatcgtcgctgcattcaagtgcatcttcatcattgtgcggaggcaggggcggcccaccgtcggtcgccagtacagtcgcctcggcccacccacggtggtggcctgccgccagccaccaataccattgtctcagtccacccatcagttgcaacgctggctcagtacaaagaatatatcaattatgaagagtggcttaattttgataggatacagagccgagtgcagcatatccatcggagacacaacctttgttttagtacaccgtggatacattgtccatggaatcaaccatgagggccacagtaaatcttcaggctcgaaaggctacctctcgagcttcgatgacacgttagagactgctctaaccatttcaagagtgtatgtgaaacatgagaacatgctaaagaaaagattcctctacgggttctccatgggaggaactgtggtggtgcagcttcatatgaatgatcctttctactga

SEQ ID NO: 9416 - DNA, 462 bp, Zea mays
  Peptide Sequence Number=SeqID_52791
atgggtgtgggcaagggacggcttggcaagaacaacaagcgcaagcgtgagccgactcctccatcggaggagtttggtgactcggaatactcagaggaggagttctcctctgagtccgaggggtctccggctcccatccccctgcgtgagtcgtctgatgactcagacgactcccaggggcttgcagcggaggtctggacgtacatccgggccgtcgagcgctccgggctcgagggctcggatgagtctgagttctcctcggacgaggaggactcggacggcggcgaggacaaggatgacgacgacgacgacggcgacgacgacgacggtggcgacggcgacggtgatggcggcaacggcggcggaggcagcagcggcaagggcggcaccaagggcggcagcagcgtgggcagtaccggaggcggcggcggcaagggcagcggcggcagggccagtggctaa

SEQ ID NO: 9417 - DNA, 1167 bp, Zea mays
  Peptide Sequence Number=SeqID_52792
atgaggcgaaaagacggcgggtaccccccatccgggggcttggaaggtggaaagacacgatgcataagggagcacgaagacatggtcgccttccaagggggtcaccctccttttaaagacgactatccctactcgcgtcctcagccgtcacgggctgagtcttctccaacacgctccaaggccctcccctgcggcgcggggggctgggtcccacatgtcatgcaagccggctcagagcagaagaagccaaaccgccgcgcgcggacaggcggcgcctctggtaggagaagcgggcaacgcttcgccttcgtcgtaataaccacgccaaaaaagaggctctggggctgctctcgcaaacctggctccggccgaaccgttgacagcgtcaacataccagcccgagaacttgggacccgaccgtacacccgggctacggccagctcgcatgagggaacaaccagactagccgaagcattacgcgaggcattaagacctcgaaggagtgaaaccactcctccgaggcctcgggggctacacccggcgggtgcgctcgcgcgcacccaccggaacaaaatgcaaccgagaaaggctggtccccttgcaaaaaagtgcgacgaaagcctccaagcgagtgctaacactcccttcgaggctcgggggctactgtcggggaccataattaggggtaccctcaaggctcctaattctcagctgaaggacagcgccgcccgcgccgcgccgactgcagtgccacttgacagagtgaggctgacaggaagtcaggtcctgcagaaggcaccacaggaaactccgctccgcccgacccagggctcggactcgggctcagccccggaagacggcgaactccgctccgcccgacccagggctcggactcgggctaagtcccggaagacggcgaactccgctccgcccgaccccagggctcggactccgccctggcctcagacgacgacctccacctcgcccaacctagggcgcagaccagccaccccccttacggaagcaagaggacgtcagcaaggacccaaccgctccgacagctgtccctccgccaggctccatcgctcctccgacggccacgacatcacaccaactgggtgccaaaacctctccggctgccacgacggcatgtactcaaggcgctag

SEQ ID NO: 9418 - DNA, 360 bp, Zea mays
  Peptide Sequence Number=SeqID_52793
atggccggaatcgcccggtccacgctggcaggcgggtgtcctcgtcggcggcgagtataccggccaaaccacggcgaactggttcaatccgagggcacggtgagcattccggggtcacgcagcaactgtgtgcacaaggaatcgaagggtggtggagtggtttacctggtccacgtactctggcggggtcgagagctccggcgagcgtggactggcttctccggcgaaggaaactccgattccttgctcggggagcctcacggagaagagccagtagctgaggatctcggtgttcagcagatagaagttgctgagcaggagctcattgaaggttgtgcccttgaccactttgttacctaa

SEQ ID NO: 9419 - DNA, 921 bp, Zea mays
  Peptide Sequence Number=SeqID_52794
atggcgaaaagctgcggcgagtacactgtggaggttgcgtcctccagctcctctcctattcccgcttccgcgtcggctacgaggtcgaaggcgaaacaccatatagagatcaaggggtaccctgtggatggtgtctccatcggcggtcaagagacctgcgtcatcttcccgacgctgagcctcgccttcgacatcggtcgatgcccgcagctgcgtccgcccaccatcttcgtcccggcgtgcctccgggacctcgtggagcggctatttgaggtgcaccacgccatggaccagtccgatctcaaccataacctggtccccctggaggtcagggaggagtacgagctcaggagggacctcaaggggtatgtgatatactcggtgaagcagaagcttaagcaggagttcattggcctaccagggagcgagatcaagcggctcaagctatcaggtgtggaggaggtctctgacaataattgtgtctatccaaacgaggtgcaccacactgctagggagcgaacaaaggcaaatccaatggagtcgtgcccaagtaaagaggtggagaacttgagggagaagctagttgaagaaaatttctacctaatcactgagctaggtgaacaaggacgagtacatgtacttctgcggaagcttgacgaccccgtccctagaagaaaaccagctatcgtgttcttgcacagctcttacaagtgcaaagagtggttgcgcccactgcttaaggtcttcctgtctttgagatttgatgaagatattggaaaagatgagattgaggagaaaaaggttgatgcagatcttagagcagtttccttcactcttgatccgaaggagagaaaagggataaaaaaagaaacaatttctgctctgtttgagacttactttcgcattctgaagcatagatga

SEQ ID NO: 9420 - DNA, 615 bp, Zea mays
  Peptide Sequence Number=SeqID_52795
atggtcttgcgagaaaatcttttgaaaattcctggctacacacccaatgggtgtattgccataggtagaggcaaaaggggtcgtggctggcctcgccatggtgacaacaagcgtaagcgtgccccgagtcccccctcggaggactttggggactcagagtactcagaggaggcatcctccgagtcagaccgcttgcccgctctggcttttcccccagcgtcatccgaggactcggatgattccatggggctttccaccgcggcccgggcgtactggcgctccatcgagcgcgccaggctcggtgggtcggacgagtcgggggtctcctcggatgaggtagactcctccgactcttccaaggagtggagcggcggcgacgacgagggcgcctgcagtggcgacgacaacggtgagggcgacgacggcgacaatggcggcagcgagggcgacagcggcaacgacaatagcgatggtggtgatggcggcgacaagggcgacgacggtgatggcggcgacaagggcaacggtggtgacggcgacagcggtgacggcaaaggcgacggtgatggcggtggcaacgacagcaaggccagtggcatagcgccactggtttaa

SEQ ID NO: 9421 - DNA, 405 bp, Zea mays
  Peptide Sequence Number=SeqID_52796
atggagctggacgagtgcgaggatacgatgccctatgatgtgaacatcaaagaggagatgcggaggcggcagcagcagcaccaggaggcctacgacgaggatgatgatgtgccaggcggtgggcagagggtgcaggggaagagcctccctagcgtgaagcatggcgatgaaggaaccgacgccggaatattcggcgacatcacgaggctggggagcgggacccagcacaacccatatctcgggatgaagttttggaagtgggagaaactcccgatgagcgggtataccgagaaaggcagaattctcgccgacgtgatcgctgacaagctcaggaccgagagcgcgaacaagccgagcagggcgcaaggttacaccgagagaatcccctctttgctcgaaacctga

SEQ ID NO: 9422 - DNA, 438 bp, Zea mays
  Peptide Sequence Number=SeqID_52797
atgtacctcctcatgaggcctcttctcctaatgcctgtcaggttgctggttcgtgtcacgccgtggtgccggtggtgcaggttttgtaccttcgatgaggtcctgggcccgctcgtcagcggtgatgtagaggtctgcctctcgaaacatttgttcagaggtgatcggtgctttctgcagtacgacccgaacgaaggtcgagtcattggatccccggtagaaatcatcgattacctctaccttggtgacttcggggatgcgatttctcatggtctgaaacctcttgaggtatgttcaaagcgtttcatccccctggcgcctgatggatttgaggtcccatggctgcgcctgcttgtcagagagggactgaaagttggcgatgaactgccgactgaagtcgctccaatcgttgatgcagtgtcgtggcagatgtcgtag

SEQ ID NO: 9423 - DNA, 126 bp, Zea mays
  Peptide Sequence Number=SeqID_52798
atgccctgctgggtcaccttggtagtgatcaaagggaaaagtcatgatctccgggcagaaagggaatcacggcttgtggggtacatcgttctaataacttgggttaaggctaaagcccggctctag

SEQ ID NO: 9424 - DNA, 672 bp, Zea mays
  Peptide Sequence Number=SeqID_52799
atggccatcgtcttcaagaacaagatcgccctcaacctaggagctttgttctgctctggaaccatctcatgcatagcagacaaagagggaactctgcaccgcgttgcagatacgctcgagaagagacccacctcggaaatcctgagaaaagttgaagtaagcccgcaagccatgcccctgctcatagctcaggggaaggtggcccctcgcaagccagggctcaagatccctcggagggtggagggccagagtggatgcagatcactcggaaaaaaggaagtgaatgtcccatgccgaggaaggaagacacagcgagcaatcttcctggcacctccgccttcaaaggaggatgggaagaagaacatcgccatacctgctcatttctaccctgacgtcctcttcattcagggtagattggattcatcgcccatatccgacgatgaacccaccatgcaggggaggaacctccccagcgtgattcccgatgacggagaaacagatgccggaatgtgtagaggcatcatgaagtcgaggagcgggacccggcgcaacccgtatcctaggacgaagcttcaaaagtggaagaaactcccgatgaacgagtacactgagaaagacgcaactctcgctgtcgcgatcaccgacaggctcaggagcgagagcgagaactag

SEQ ID NO: 9425 - DNA, 375 bp, Zea mays
  Peptide Sequence Number=SeqID_52800
atggctgaagaacgcgcggacgtgggcacgtccacggtgggggatcatgggcggaaggttggggacgagctgacagatgtccgcctccctaaacaattgttcggaggtggccggtgccttttgaagtatggtccggatgaagggcgggtcgttggatccctgatagaagtcttctatcacagccgcttctacgacttcgggaatacgattcctcattgtttgaaatcttttgaggaacgaccggagagtctcatcattctggcgcgtaatggatttgaggtctcatggctgcgccggtttgtcagagaaagaatggaagtttgcgatgaaccggcgactgaagtcactctagtcgtcgatgcagtgccgaggtag

SEQ ID NO: 9426 - DNA, 570 bp, Zea mays
  Peptide Sequence Number=SeqID_52801
atgaatgatgtggtaacttcgcacctacccatctatttatatagtgccgcaggtgggaaggtgaatcgtcaaggtctcccgtaccgaacaaacagtcacccgcactcgctgaacggtgggccacagggtccgagaaggccccatgttggtgatggccgcgattttctccgggttggcctcgatgccccgctcggagatgatgaaccccaggagcatgcctcaggggactccaaagacacacttctcgggattaagcttcacgcccttcgctctcagacacttgaatgctgtttcaaggttggagaggaggtcagaggctttcctcgtcttgacaacgatgtcatcaacgtaagcctcgactgttcggtcgatgtgctctccgaatacgtggttcatgcacctttggtatgttgcacctgcattcctcaagccaaatggcatagtagtataacagtacatgccaaaagccatcagcttgtggatctcctagcctatggctctacgcttttcttcgtcgaaacggcgcagaggctgcttcacgggtcgggcaccggctcggatatccagtga

SEQ ID NO: 9427 - DNA, 570 bp, Zea mays
  Peptide Sequence Number=SeqID_52802
atgaggtgccgcctcctgcctggccacggttgccccgtctcctcctcctgcggcaaggagggtggcgggacaaacccggatactgctcttccgccacgggaggaagacgtcgtcgagttcgccgcgccgggcaagctaacggccgtcgtggttgctgtcgcgctgcggggggaggagtaccatgtcgtagctgccgttgagggacatgaactcgagactcccgaagcagagcaccgtcccaggctgaagaggttgctggagactacccatttggaactcaacgagaagttgttcgttaacacgcagcaggcccctacctggcgtgccaactgtcggcgtttcgaccccggggggtccctggaccgacgagtaaatttgtcgctgcgtgtcacagcccagatgggttggcgcgagatggaacacaagggagaaacgtggctcgtgttatcccgcgccagggggggggctgagaatcgtcgtcgtcatggacccacacggggagccatcattacttgttaccagggtgagccagatgggacgccggtcttgttcccccgtagcctgagctag

SEQ ID NO: 9428 - DNA, 768 bp, Zea mays
  Peptide Sequence Number=SeqID_52803
atgatgaccaccagttcggtggtggggagaagcaagccgggctgcggcctctgccccgccctcagcttcaaggatcttcatcatccttgctggggaggagggcggggcaagtcggggcctgcctgcgtgtgggtcggtgacccgcttcttcctccggcattcgggggagaaagacatcctccagctctgcggaggaggcatcctccagccatgcgggggaaggcaaactgctgctgcttggacagggtgcagctgtccgtcctccacccgggcgacggtcgccggctgcaccagggggtcgcacaacacgtcgtacgccgcgagggcggtactcgtgttccaggatggtcccgttctcgttcttgtggcgagagcgggagtgaggacctgtcggtgcgctttagggcggccgccgctcgctggtgcggtgttggtgggcaggtggccgttgtcgtcggtgctgaggtggtggtcgccataggtgaggctaccgaagcggttgcttccgccgacgacaccgtcagtgccacctgcgctccgggcctccggctctttggctttaatggctggttctcgtcccccatgaggggatgtgaacgagggccttccagcggtagcgtttgccctggggccatcgctgttgctgtcttgtcgtccgagacggaggtcgttgccgcgctgttggtgcagcggtcgccggcgagccacccggagtttgttgtcccgcaggccctctggtgtagacgttgttcatacccgcgggagtag

SEQ ID NO: 9429 - DNA, 162 bp, Zea mays
  Peptide Sequence Number=SeqID_52804
atggcgatgcccgacatgcgagcacgcaacgcaactgagatggtatcagcaatggcgaacttccctgagggcgggcgagctgcgacgccggcctcccctaggcgcgagcagcgtcagaacccagaggcgtgtgcggcgggcgatggctcccttagggcatga

SEQ ID NO: 9430 - DNA, 510 bp, Zea mays
  Peptide Sequence Number=SeqID_52805
atggaggtccgctgccaaaccaacttttgccagaatgaagatgagaagcgcaaccgtaagatccatgtggatctcaccacagctcaagcccgtgcaactgccttggaaagtcgtgaagtcattgttgttgaagccctaaagcaagccaatgatgagcacgtccagaagcagatggaggcctacttggtcacccataaccaacgagtcatagtcttggaaggaatgctagtctcccctaaggctatggataagcaagagcaccccgagtcctcccaagatcccccgccagagttgtttgagcccctcaccatgaagaagattccagcaccctcccttgaggtcaaggaagaagctggaagcaccccgccagcaccactgccctttgaggagctacaagagccagtctcgcttgaagaagagttcaaccccatcctaccatctcagccatcgctagaagaagtcatcaacatcagctccctcttaacccatctaggagatgcctcagattga

SEQ ID NO: 9431 - DNA, 312 bp, Zea mays
  Peptide Sequence Number=SeqID_52806
atggagcaagtgccatgcgacagcaagtgcgatggagggggtggtgttgctggcggtaatggtggtgggtgcgttgcaaagggggcatgggcggcggtatgcgcatggaggcagggcacgcgtgcgggggcaagggtgagtggtggggtcgatgaccctgatgtttgtggtctctggttccaagaatctttgcctctctgtatggggaagaatagagtttttcaaagcacagactactcagattcaggggctaagcataactgctattgctcggctcctgaactgagaactatgcttaaatgtgacttatga

SEQ ID NO: 9432 - DNA, 582 bp, Zea mays
  Peptide Sequence Number=SeqID_52807
atggaaattcttagcatacataataatgagctaactattcttgttaagaatgttgttatagaaacatgtttggatgagattgcaatggagaatgagcaattaaggcaagaggataacaccactgtgggagtgaacaagcctggagagggagaaaccgtggtttgtaggctatgtcacaaggaaggccacaagtcttaccaatgcaaggcgaagaccggggagaagcaaaagctcaagcaaaagccaacatgcaaaatctctaacacctatatcaacaaggtggacaaaaaggtcgctacaccatatttgatcaagaagaaaaagaatgaaaatatgatagcaatcaaggcaaataagaaagccaacaaaggaaagggggccaaatgcatctgggtgccaaagaagattatctcaaccatgaaaagcaccaagaagatatgtgttgggaccatgcttcatcgccgaaggtcctgcgaaaagaaacaacttcaactgaagctgcttgaacatgatgccgaagacaccattcacgaagcttcggaactacagcatatccgaagacgaagggtcgaaccgacttaa

SEQ ID NO: 9433 - DNA, 135 bp, Zea mays
  Peptide Sequence Number=SeqID_52808
atggcgaagaccatgcttgatgagtacaagactctggaccagttttgggttgaggcgattaacaccgcctgctactccatcaaccgcgggcagggggacaagccagatttggcgtccgcatatattctgacctag

SEQ ID NO: 9434 - DNA, 96 bp, Zea mays
  Peptide Sequence Number=SeqID_52809
atgagctacctttcgcggaagaatattgtccgactatcttcagggttcgagacggctcttaacgagtccgtcaagaactacaagacgcttgcctag

SEQ ID NO: 9435 - DNA, 204 bp, Zea mays
  Peptide Sequence Number=SeqID_52810
atggccggcgaggccacgaccggtcaccacgccggggcggggaacggcgcgggcgcgacgggcaggggccaccatggccagggcgggcgcggccgcgacggggcagggccgaggcggggccgggcgggtgcggtcgggcgggcggcgggcgtggccacgccgcgggagagcgccggcgggcggggaatggggagggagattatg

SEQ ID NO: 9436 - DNA, 165 bp, Zea mays
  Peptide Sequence Number=SeqID_52811
atggagagtcatgatgtccggacagaaagggaatcacgacttgtggagacattttggtttataggtggcaatgagactgatggttttggttatgactatggtgctggagaagatgaagccgtggaaggagacttccaggagttccaagactatgacgagttctag

SEQ ID NO: 9437 - DNA, 1647 bp, Zea mays
  Peptide Sequence Number=SeqID_52812
atgacctacttccccggtgaggtggtggagcacattttcagcttcttgccgtcgcacagcgaccggaacacggtctcccttgtgtgcaagttgtggtacgatgtcgagaggctgagccgacgaggtgtgttcgtggggaactgctacgctgtgctccctgagcgtgtggtgctgcgattccccaatgtaaaggcgctgacggtgaaggggaagcctcactttgcggacttcaaccttgtgccgcctgattggggtggctacgcggggccatggattgaagcaacagccaggagctgcctgagtcttgaggagctgcgcatgaagcggatggttatctctgatgagaaccttgaactgctagctcggacattcccaaaattcaaagtcctcgtccttatcagctgcgaggggtttagcacggatggtctagctgccattgccaatcactgcaagctcctgagggagttagatttgcaggaaaatgacgtggaggaccgtgggcccagatggctttccttccctgattcctgcacctcattggtttccttgaatttcgcttgcatcaaaggggaagtgaattctggtgcattggagagacttgtcgctaagtctccaaacctacgcagtttgaggttgaatcgctctgtttcagttgacacactctcgaagatactagagcgaaccccaaatttggaagacttggggacaggtaatttgacagatgagttccaagctgagtcctttgtcagacttactagtgctctggagaaatgcaaaaggctgaggaatttgtctggattttgggatgcttctcctatctttgttccgtttatctatccactctgtcatcaactaactggcctaaacttgagctatactcccacactggattattctgatctgactaaaatgatcagccgctgtgtgaaactccagcgtctttgggtactggactgcatttcagacaagggtttgcaggtggtggcctctagttgcaaggatctacaagaactcagggtgtttccatcagaatttaatgttgctggtgcttttacgatgaccaatgaagcactaactactgtagccaagaattgcccaagtttcatcagatttagactctgtatccttgagccaaagaagccggatgccatgacaggccagccgttagatgaaggctttggtgcaattgtccgtgactgcaaaggtctaagacgactgtcaatgtcaggccttctcacagacagggttttcatgtatatcagaatgtatgcgaaataccttgagatgctttctatagcttttgctggagatggtgataaggggatgatggatgtgatgaacggatgcaagaatctgaggaagcttgagattagagacagtccatttggtgattttgcactcttgggaaatgttgccaaatatgacacaatgcgatccctttggatgtcatcatgcaatgtcacattaaaggggtgccaagtccttgcatcgaagatgccgatgctcaatgtggagatcatgaacgaactagatggaagtagtgaaatggagaaccatggtaacctctctaaagtggataagttatatgtttaccgtacaactgctggagtgagggatgatgcaccaaattttgttcaaatattatag

SEQ ID NO: 9438 - DNA, 417 bp, Zea mays
  Peptide Sequence Number=SeqID_52813
atggggtcgggcgaggcggaagtcgttcggccgaggccagggcggagtccgagccctggggtcgggcgagcgggagttcggtcgcccgaggccagggcggagtccgagctctgggtcggagtggcgcaggcggcgctgtccttctgtcagactggccagtggagcggtggagtgacagtggtcacttcggctctgccgggggcgcgtgtcaggatgaaggtgtcaggccacctttgcgttaaatgcccctgcaatttggtcagtcggtgtggcgatttagtcaaggttgcttctgagcgaagccaaggcctcgggcgagccggtgatgtgtccgccataaaaagggggcctcgggcgagacggaagtctctcgaggtcggctgcccttggccgaggctaggctcgggtgaagagtga

SEQ ID NO: 9439 - DNA, 132 bp, Zea mays
  Peptide Sequence Number=SeqID_52814
atggcgcggcgcggcgcggaagacctagccgccgtctggttcggggctaacggcgtgatggtagccgacggcgcagcctgggtggttaacgaccgttttggcttcgaacggctcagcggccggcaacggtga

SEQ ID NO: 9440 - DNA, 2118 bp, Zea mays
  Peptide Sequence Number=SeqID_52815
atgccgcgcacgaagaatgcgtcggcgtcagggggtggcgatgatgaggaccctcgtcgcccattcaggcaggtcaagggcaagactgtgtatttggagcagcaagaaggccgcaagaagcggcgtacgggcagagaagcccgtgcagcggcagcagctgcagcagccgctgcgcaggccgcacttggagatcagccgcatgttccatccgatcagattgcatttcgtgctcgtcgtctcacctcccggcctcgctcctccactcacacctccgcttccactccgccacccactctgcctgctcccgtcactcctattgctccatccacctccacagccatacccactacctccactacgccagcttccactgcttcccctgctcccgctcccgcttcagctcctcctgtccctccacctcgtttccgggagcgtgatgagactgaggtccgtcctctggtttcggatcctcgtctgtttgatcttcagtgtgctactgcggcacgggtacgtcggttcaggtacgtgctcgtggagtcttggctaccagctcagagagacccagcagcaggtgttcttttcagcacacggattcacgagtcattcttcagagctcagatgtctgctcagatagcgctgcgagtgcaccgccttttggatcttccagcttttctgcttgcagcgggtgctgagtctgaggcacatctcacctatctgcctggcctcctgacccttctgactatcagcggtagatatgttgaggagtgggtccgcgtcttctacgcctctgtttggattgacccggatcatcactggatgaggttccgctttgagcgagaggatgtcacgatcactgccagtcagatccgacagctctttggattcccagagtcgacgactcgccttcacagtctctgctacggctcttctgaccctcctcgtcgccctcacggcggtgtggctccagggacagctcacgtcgcggctctgttccgcccgcctttcacagatgggtcgcgacgttcaccagcagactttactacagcagcgaagtacttatatgagctcatcagacggacactcctgccgaggatgggatacagggaggctaccactcatattcagctttggctccttggtgccctggtatcccactcacagtttaatgttgtggacttcctgatttgtgagattgaggacaccgttctgggtggggttcgtgctcgtcggcagttaccttatgctcactacttgtgccacatctttgcgcagctgattcagccacctcgatttcagagcatccttgaggcctcacgccttgtatttggatcttaccgtcctgctcctgagattccagtgccagcttctgcttctgtgtttgactctcaggccgaggatgcagctcttcgtcagtttgacactcagggtacaacagctgatgatgatgatgatgatgattttggggttcctccttcgcctccgcctcctatgcctccacgctcacacgatcatgaggctgggagttctcgtgctgcccctgctcctcctccggctatggaccctgctcttgcggcgattctggccaacctggcagctgagcaggcccggttatccgagacgatgctctcgatgtttcagagcatgcaggacaggcaggatgcacttcagcagcagctaattcaggatagggcagagaatagggcattcatggctctcatgcttcagcattctggtatctcagcacctccggttcagtctgctccgcctcctccgcttcacgctccagtggtgccatcgattttgtctggaccccctgttggtacctctccgctccggccggtcactttggcgttcacctctccggttctcagctctgtctgtccgcagccgccagtgccaccagcatctgctgttcccactaccgctgtggcagtatctgtgaccgcttctgttccggtagctcctgcagcgcggcctccgtccgagtcagtaccagctccagcttctaccgcagaccctggatccaagactgactctgaccctccgccggcgttcgctctgctacctcgacctcgaccggatgcgcccccgtcgcctcctcctgcttcagatgtttag

SEQ ID NO: 9441 - DNA, 972 bp, Zea mays
  Peptide Sequence Number=SeqID_52816
atgaagctgtggaaggagacttccaggagttccaagactacgacgagttctaggtgtgggttagcggcaacccccagtcggctgcctgtgaaggccgcgttatctacgtttcttttccgcactttgatttattgtggatatgagattgatggttttgatcatggttatggtgctgctagtccactacagccaaacaggatacttgctgagtatgttgatgtgtactcacccttgctctacacaccaaaccccccccaggttgtcagcattgcaaccactgctcaggcgaagatgaagctgtggaaggagacttccaggagttccaagactacgacgagttctaggtgtgggttagcggcaacccccagtcggctgcctgtgaaggccgcgttatctacgtttcttttccgcactttgatttattgtaagagctatatggacgtctctgacatggctcgacttagacacactgcacgaaagtcagtcatccccttcttaccctcccgccttgctgagcgtccgcttcgccgtcccgtggccggacagtccagccacttggagagactacaccaccgcctgcgtgaggagcaggagcgtcgacgacaggagcagcagagctcttccttctcgctccaccaggagatagagtctgtgaggagctgctcccctgtgcttcctctggagccgccccctgcaccaccactgggcgccccagcttctggagtagctgctggaggagacccagacgacggaaatggcgacgacagctcgagccacgacaccgacttctctgctaaccctgagccggaaggatgggttgctcgacccatcactcgcgacgctgctcgcgggtgccacttccacgatgcgctcgacaccctgctacgtcgggcatttgaccggcatacttggttcgtcgagtatcgctgtgtggtctaccagcatagtcgcggggtctacccggaccgctag

SEQ ID NO: 9442 - DNA, 804 bp, Zea mays
  Peptide Sequence Number=SeqID_52817
atggctgaaaggtaccaactcccgtggagttgcgttcccccaacgacaaggcggaaggactgcgggcatcccccgtccggtggctcggaaggtggaaagacacgatgcataacggagcgcgaagacacggtcgcctttcaagggggtcaccctccttttaaaggcgactctccctacttgcgtccccagccgtcgtgggctgagtcttctccaacacgctccaaggtcctccccctacgacgcgggggctgggtcccacacgtcatgcaagccgacccagagcagaagaagccaaaccgccgcgcgcggtgcatgcaaccacccagcggttataagtggccctccacttttgcccagaccagcgggcgaaagggcgggcagccatgcaggcggcatgcaaccgcgccaagtgggcgcacttctccgacttccaacacgcccagcatggaggcccaggcccacgcgtcatgcaaccggcgcgccggatgctgcgtgcgagcaactgcactgccgcccgcgccactaccgcacctcctcgactgcggaaccaataccgcgactcgaggcgacccagcagcgccagcctggcgcgacggtcaatgcggccaaaaatgggccggcagtaatggcggtggcaggcgggcaggagcagcggtcacgtcgacgggcggcgccactggcaggggaagcgagcgacgcttcgccttcgccataatgaccgcgtcgaaaaagggaccgggaaaggggataccccaaaaaggatccttccccgtgaaggaaccaggctccgagcctccctactga

SEQ ID NO: 9443 - DNA, 777 bp, Zea mays
  Peptide Sequence Number=SeqID_52818
atggcgctccgcaagctctgtgacgacggcggcccccggctctcttacggaagcaggacaacgctccgccgcacctccgacagccacgacatcacgccagcagggtgcccagatctctccggctgccacattggcatggccttctcagaggaggttggccgcgcgggaccgaggacgggacaggcgctctcttggggccgctcgcttccctcacccgcgtggacgcttgtaacccccctactgcaagcgcacctgacctgggcgcgggacgaacacgaaggccgcgggacttacacctctctcacgctcgactccggccacctcgcctctccccccttcgcgctcgcccacgcgctcgacccatctgggctggggcacgcagcacactcactcgtcggcttagggacccccctgtctcgaaacgccgacagcatggagtcgagctccaggttgaagacgattctggtattagagtcccacatcgttagcgactacgatgagcggcatcgcgtgtccgttggttccgcagatggacagaattactggcggactcacccggccaccctgttcagctgctcaggctcatctgtcccaccgaacggaatcggtctggtgcagctcaacctgggaaccagagaagcagccgtcgtcaagcatgagggcatgtacaatgcaccaggcactactagctggctgcaagtctactgtgttcgtttcatagtatttactgtaccgtggttgatcaagtttaactgggatgtcctaatcgaagcataa

SEQ ID NO: 9444 - DNA, 333 bp, Zea mays
  Peptide Sequence Number=SeqID_52819
atgtgggggttgcccgtcttgaggaaaaggaatgtgagctcgctggattttgctccgaggctgactggcttcaaagcaaggaggtgtcgcctgtgcactgagcacaatgacgtgtgggacgacatggattgcctttgtgaggaggggtcccaacttcaatgggtccttcgtgagacgagagctcgggctgaggaggctgagtcgactctcaaaggggccaacgctcgtctaaaggtgacaaagttagagctcctaaaggagcataatgcggttagaggtcaatccttctctagttcttacgttcgtgccgtctggtataccaagtcaccttag

SEQ ID NO: 9445 - DNA, 290 bp, Zea mays
  Peptide Sequence Number=SeqID_52820
atcgcgattcgcttctgagcttcgaggaatcgacgatcaagcatggcgaccaagtgaccgaactcttcgagttctacgagatcgaagaccctgagcatctgtttggtgaaggcaagaactggggtgtagttcgcttcgccgtcgtgccgttaatggggctcggtgtatgcggctcgctctgccaagatgatgatgatgaggatggttatgatcatgcttatggtaatggtaaagaaggcgtcgaggcggatctccaggagttccaggacgtcgacgagttcgaggattag

SEQ ID NO: 9446 - DNA, 266 bp, Zea mays
  Peptide Sequence Number=SeqID_52821
atcgcgattcgcttctgagcttcgaggaatcgacgatcaagcatagcgaccaagtgaccgaactcttcgagttctacgagatcgaagaccctgagcatctgtttggtgaaggcaagaactggggtgtagttcgcttcgccgtcgtgcccattaatggggctcggtatgatgatgaggatggttatgatcatgcttatggtaatggtaaagaaggcgtcgaggcggatctccaggagttccaggacgtcgacgagttcgaggattag

SEQ ID NO: 9447 - DNA, 156 bp, Zea mays
  Peptide Sequence Number=SeqID_52822
atggttggtttacagatgatgatgaggatggttatgattatgcttatggtaatggttgcctttggtgcaatctatgctcaggtaaagaaggcgtcgaggcggatctccaggagttccaggacgtcgacgagttcgaggattaggctagcacactag

SEQ ID NO: 9448 - DNA, 744 bp, Zea mays
  Peptide Sequence Number=SeqID_52823
atggccttcatgctggcgcaggggcaccagagagtgcagaccacggcggggtgggctaatggcggcgcgggattgctccggggaagcgctggagtcgtgaagcaacgacggaggcgcaaggattcgacggggcgacggcggcgggactctggctgcgcgaagattgcttcggtgagcgcggaccggacgaaacagagagggagagggcgcaccgaagggtgtcccgagcagctgacaaagactgttgtagcgcctgcttcagagaagatggaaattgagaatgtcgaagttgccccctcggcttcagagataatacttgttccaaccgccgaagctactgtcggtctggtaaaagaaatagaagcgaacaacacaaagacggacgagcgtctgaagctacagagtcccccaaccacgacggggttgcctaaattaacaactgctgcagcaatgactcctaggaaagggaggagaatggctagtgttttggatgctgttctgaagtgttcaaaagtgccaactcctgtttctactcaagcttcggaggataatattaaaaatttagtggtaactgctgcaagcacttctcctgcatgcgctgaagctggaccttcgggatttaagccagcggaacaagaaaaggaagatcttccggagaagccagcatcgcctacacccgaagcatcgtctcaagacaatttggaatatattgtgcgccatgcttcagggaaacaactatcataa

SEQ ID NO: 9449 - DNA, 708 bp, Zea mays
  Peptide Sequence Number=SeqID_52824
atgccacaacggatcgcgcgaaatccgcgcgcctaccatgctcggacgtacgttgacggagatggagctgacacaggggggtccaccagccagcggcagaaggcgcgagtccgcgtttcacgtgagggagacggagcgagcgcgggtggtgaccggccagtgggcccagtgagccaggtgccggggtccgagcccgaggtcgggcgaggcggaggctcctccgaggtcgaggtcgagtccgagacctggggtcgggcgaggcggagaccgtcttccgaggtcgaggctgagtccgagccctggggtcgggcgaggcggagtccgtcgtccaaggtcgaggctgagtccgagccctggggtcgggcgaggtggagtccgtcgtccgaggtcgaggttgagtccgaaccctggggtcgagcgaggcggagtccgtcatccggcgtcgaggttgagtccaacccctggggtcgggtgaggcggagtccgtcttccgaggtcgaggttgagtccgagccctggggtcgggcgaggcggagcttcctatggcgctcgaggctggacttagctgctatcagcctcactctgtcgagtggcacagcagtcggagcagggcaggcagcgctgttttcctatcagttcgatcagtggagcggcaaagtgactgcggtcactttggctctgtcgactgaggagcgcgcgtcaggataa

SEQ ID NO: 9450 - DNA, 762 bp, Zea mays
  Peptide Sequence Number=SeqID_52825
atgcaggcggcatgcaaccgcaccaagggggcgcaccctttcgactccgacgcgcccagcatgggggcccaggcccacacgtcatgtaaccggcgcgccggttactacgtgcgggaaactgcaccgccacttgcaccagtaccgcgccttctcgactgcggaaccggtgccgcgactcgaggcaaccctgcgcatggcccgacagtgccaaccgagcacatcggtcacggggaccgggaaaggggatactccaaaagggatccttctccacgaaggaagcgggccccgagccccctactgatcagaggttcgaaggctggcccctcgaaagggttcgacagccgcctcagagcactcgggctccgggccctcctactgatcagaggttcgaaggctggcccctcggaagggttcgacagccacctcagaccactcgggctccgcgcccaccactggtcagaggttcgaaggctggcccctcggatgggttcgacagccgcctcaagccactcgggctccgcgcccactactgatcaggggttcgtaggctggcccccgaagggttcgacagccgcctcagagcacgcagagcaagggatgactctgggctcgggggctgctctcgcaaacccggctccggccaaaccattgacaacgtcaacataccagcccgagaacttagaacctgactatgcacccgggctacggccagttcgcatgaggggacaaccagaccggccgaagcatcacgaaatgcgctaa

SEQ ID NO: 9451 - DNA, 771 bp, Zea mays
  Peptide Sequence Number=SeqID_52826
atgtcttcgcactcccttcatgcatcgcgcccttccaccttccgagcccccggatggggagcgcccgtggttcttccgtcttgtcatcgttggaggaacgcaacttcgcggaagttggtacctttcatccatcgctcggcttcaaggattttcatcaggcagcctggctacatcccctcgccggtggtcacccaagacggtgaccaccagttcgatggtggggagaagcgagccgggctacggcctctgcccctccctcagcttaaaggatgttcatcatcagtgctggggaggggagtgcgccgagttggggcccgtctccgcgtgggcagcggcccgctccttccgtcagtgatcggggggaagggcgttcgccgtccatggcgctggcagctaccgcatgtctggctctccggcctgagcggcttcggcgctgcttccggtgccacctcccaccgaggcaactggaagaggtttctctaccgacgagatagtcggtgcctcccgcggactgacctccgactccacggccttggtagcttgtcctcgcccctcgagtggggttgtgggcgagggccttgtcgcaacagcgtctgccctgaggtcatcgctgctgttgtttggccgcccggagcggaggtcgttgtcgctgctgccagagcgggcgacggcaagccacctgggttttgtcgccccgcaaatcctccaatgtggggggttgttcgtacctgcgggggcggaaccagagttccgtttgtaatggcaccttga

SEQ ID NO: 9452 - DNA, 753 bp, Zea mays
  Peptide Sequence Number=SeqID_52827
atgcaggggctacacggctttacgtcaggctcggcccgatggcttatgtcatgggccacaagcagcgggtctccgcctgagcgggaagtgaagggcaaggcctggacacgtgtcagcaccggacccctactcacgccagggtcctcctcattctgggaccttgctgaggttcggaccttactcggaggctccggacttatacgtataggggtccggtgtccttttgtggaggtcaggaccccacgatacatactgggatgtgttgtcttttcttgccacgtggcgccctttggcctgcccatgcggtggggtcaggcaccgtcctccgcgtggcctggggacgtcgcatgggtgcggcgtcttcatgctgtagaagagggtacccgtgatttagggtaccgacacatggttcgtacaatccaaaccacccagaccaacaccaactacatccctccgccacgacaagttcccgtctaccgagtggtagtcgaggaaattcctgtggatctccctcgcattcgtgtggagaacagagttattctggaggacagttcggaggagtttctgcctacgtcgaccccgggggcagaatcactagcctttgcagctggattgtcatcttcagcaccgccagcaccagcaatccaagcccctgctcccagaggcgacgacccggattactctggtgacgatgatgaagacgacgacgaagaagaagaggagaacataaatgaggaagccaacagtgaatag

SEQ ID NO: 9453 - DNA, 924 bp, Zea mays
  Peptide Sequence Number=SeqID_52828
atgcggtggggtcagacgctgtcctccgtgtggcctggggacgtcgcatgggtgcgacgtcttcatgctgtagaagagggtacccctgatttaggaggagcgcaacctcgaggaggttggtgctcttccaccattgctcggcttcaaggattttcatcatgcagcccggctgcagtcccccgccagtggtcatccagaaggatgactaccagccttgtggtggggagaagcaagccgggctacaacctccctcctgccctcagcttcaaggatgttcatcatccttgctggggtgggaggcgatccgagtcggggtcctgccttccgcatgggtcagtgacccgcttcttcctccagcattcgggggagaaggtgttcaccggccttgcagagaaggcgaacttcggctacgcggggccggccggctgcaagcgctgtcagctgccgcgtgcctggctccctggctcagatggccctggggccgcctccgacgctgcctcctgccacttggtcggggcgtggctgtccatccaccgcacgggcgatggtcgcgccgtgcgcgggtctgccacacccacggcttctcccacgccactggccgtactggggggccgtacaagacgccgtacgccgcgggggtggcggcggtgttcttggatggtcttgtcctcactttgtgggaggacgggagcgaggacctcttcacgcgtgccgaggcagccaccgtccaccggtgcagaggtggtcgctatcgtcggtgctgaggtggtcgcagccactggtgaggctgccccttgcagaggtggttgcctccgctgtcgggaccatcagagccacctgctgctgagtccccgactctttggctttaatggcctcgctgtcaccccccgtaggaggacgagggcgaggacctattcgcagtag

SEQ ID NO: 9454 - DNA, 570 bp, Zea mays
  Peptide Sequence Number=SeqID_52829
atgtaccccccctgtaacgtggtcggtccgagcccaaggtcgggcgaggtggtgactcctccgaggtcgaggttgaggccgagccctggggtcgggcgaggcggagaccgtcttctgaggtcgaggttgagtccgagccctggggtcgggcgaggcggagaccgtcttccgaggtcgaggttgagtccgagccctggggtcaggcgaggcgggggccgagccctggggtcaggcgaggtggagcttcctatggcacctgaggctggactcggctgctgtcagcctcaccctggcgggtggcacagctgtcggagcagggcaggcagcgctgttttcctgtcaggcgatccttgcattgaatgctcctgcgatacggtcggttggcgaggcgatctggccaaggttgcttcactgcgaagcctgcccgagctgggcctcgggcgagtcgaagcttgtgctgatggtgattaccagccgagtttaggagtcttggggacgtggggtgggggcgcacccgatgcactcgacagtctggcttggggagtgggtgggcacgtcgggctggaatag

SEQ ID NO: 9455 - DNA, 315 bp, Zea mays
  Peptide Sequence Number=SeqID_52830
atggagcaccgtcccgggccggagaggttgctggagactgcccatctggagcttgacgggaagctgttcgtcagcacgcagcaggcccctacctggcgcgccaactgtcggcgtctcgagaccggggggtccctaagccgacgagtcgggcgacgtggaggttcctctgaagccgaggtcgagtctgtcatccatgggtcgaggccgagcccgagcccctgggtcgggcgaggcggaggtcgttcggcagaggccagggcggagtccgagccctgggggtcgggcgaagcggagttcgtcgtcttctggggctga

SEQ ID NO: 9456 - DNA, 1761 bp, Zea mays
  Peptide Sequence Number=SeqID_52831
atggcgcttccccccctcctccttgcggaaaggcgacgcaggggcgtatgtaaaaaagtcgacgccgcctgcgccgcaccgactgctgtgccactcgacagagtgaagctgacagcagccaggcccggcctcaggcgccataggaaactccgcttcgcccgaccccagggctcggactcgggctcagccccggaagacgacgaactccgcttcgcccgaccccagggctcggactcgggctcagccccggaagacagcgaactccgctccgcccgacccagggctcggactcgggctcagccccggaagacggcgaactccgctccgcccgacccagggctcggactcgggctctgcctcggaagacggcgaactccgctccgcccgacccagggctcggactcgggctcagcccatgaagacgacgaactctgcttcgcccgaccccagggcttgaactcggccctggcctcacccgatggtctccgcctcgcccgacccaggggctcgaactcgaccttggcctcggaagacagactcaacctcgacctcggaggagcctccacatcgcccaacctagggcacggatcgaccacgtcaacaggaggcgccatcattaccctaccccaagctgactcaggctacggggaacaagaccggcgtcccatctggctcgctccgccagacaagctccagcgctcctccgatggccacgacaccacacgaatcgggtgccaaaacctctccggctgccacgatggcatggacccctcggtctcgaaacgccgacaggttcagacatcaacagggagagcagcagcaccctcggcgtcgaccccaccttcggcggaatctgacccggccccggacagcgacatggtcggaggatctccaccacgaaggaagatgtcagcaccgcgcctgggccatcgccgccagcctctccttcaggaacccgacccgagcagacggcttgaccggccgctccgtagccttagccagctatcccccgaggacatcaacccggctcatggcctcggcagcccgactccagggttggtcccgctagtggacgacctggccaggttccagctgccgctgctacgcctcctcggcctgggaagccccgacagccacaatgaacagacaccggcactcaaggtgccattacaaatggaactctggttccactcccgcgggtatgaacaacctccacatcgaggggcctgcgggacgacaaactccagttggctcgccgccgcccgctccatcagcagcgacaacgacctccgctccgggcagctaaacagcagcagcgatgaccgcagagcagatgctgctgcgacaaggccctcgcccgcgtccccactcgaggggcgaggacaagctatcaaagccaaagagccggagccccggagcgcagatggcactgacgatctcgtcggcggagaaaccttctccggctgccaccacctcagcaccgacggcggcgtccacctgcccaccaacaccgcaccagcgagcgccggccaccctaaagcgcaccggcaggtcctcacccccgtcctcaccacgaaaacgagaaaggggatcgtcccagaacacgagtatcgccctcgaggcgtacgacgtgttgtgagaccctccggtgtggccggccgcagtcgcccggacaaaggacggaatgctgcaccctggccgggcagcagcagttcgccttcccccgcatggctggaggacgcctcctccgcagagctgtag

SEQ ID NO: 9457 - DNA, 672 bp, Zea mays
  Peptide Sequence Number=SeqID_52832
atggcctcagggcggacgccgctgcaaccttgccctcgcccacgccaacgctcgaggggcgaggacaagtacaaagagccggaggcccgaagcgcggatggtggcggtgatcccgtcggcgatggggacttctcgagccgcccccacctcggcaccgacgacaggggtcgtcagccctccggcagatccccactcaaatcctcccggatgagtggggtaccgacctccgcgcggaggcgtcgtaccggtgcaaaggcaggacagccccagaacacgaacgccgccctagcagcgcgcgacttcttgggcggtcctcccgtgcgcgcggcgcgacaaccgcccttgcgggcaggagggggcaccgggagccaagccggcgagcccaacgcgctgaaggtgacgacgcccgccgtcgaccagcccggcgttgtcgaagtccgcccctctcgcagggccaggggccgtcctccttttaaaggcgactctccctacttgcatccccagccgtcgtgggctgagtcttctccaacactctccaaggtcctccccctatggcacgggggctgggtcccacgcgtcatacaagctggcccagggcagaagaagccaaaccgccgcgcgcggtgcatgcaaccgcccagcggttacaagcgtccccccactttcgcctag

SEQ ID NO: 9458 - DNA, 600 bp, Zea mays
  Peptide Sequence Number=SeqID_52833
atggccaccaccgctgccgctccagcgtctgtggcgccgtcccctgcgccaaaggccaacaacagcaggaagacggtggtgcctgggatgactgggtacgagctgctcaagcgcgtcaagaagtcggcggcgctcatggacatcctcgtcatcatcatctcgtcgaagaacgtgcccacccgcatcagccgctgcctggaggagttcgaccaacgtctcgccgccgagccctggggtcgggcgaggcggagaccgtcttctgaggccgaggttgagtccgagccctggggtcgggcgaggcggagaccgtcttccaaggtcgaggttgagtccgagccctggggtcgggtgaggcagagcttcctatggcgcctgaggctggactcggctgctgtcagcctcaccctggcgggtggcacaacagtcagagcagggcaggcagcgctgttttcctgtcaggcgatccttgcattgaatgctcctgcgatacggtcggttggcgaggcgatctggccaaggttgcttcactgcgaagcctacccgagctgggcctcaggcgagtcgaagcttgtgctgatggtgattaccatccgagtttag

SEQ ID NO: 9459 - DNA, 150 bp, Zea mays
  Peptide Sequence Number=SeqID_52834
atggcgcaccggacagtgaacagtgactgtccggtgcaccacctgactgtccggtggcccacatgtcagaagctccaacgatcgaaccctaacggttgggtgacgtggctggcgcaccgcactgtccggttaaggctggagacttattaa

SEQ ID NO: 9460 - DNA, 924 bp, Zea mays
  Peptide Sequence Number=SeqID_52835
atggtgtctccagtgagctgcaagcgggtaatccgagtggacgtccgtgccccgttcgttgggggtcggctaggggcccagaggcacgcccaaaagtacctgcggcatctggcgcgccggttgcgtgatgcgtgggcctgggcctccatgctggcatgttgggagtcggagaagcgcgtccacctggcgcgattgcatgccgcctgcatggctgcccgccccttccgcccgttggtccgggcaaaagtggggggtcgcttcccggctgtatccccccgccggtggtcacccaagacggtgaccaccagtttctgggtggagagaagcaagtcgggctgcgatcttggtcccaccctcagcttcaaggatgttcatcatcctcgctggggtgggggtcgggctgagccgacgctctacctcccgcgcgggttcgtgggtcaccctctcccgcggcgttcgggggagagggcgctcactggccctgcgggcggcccggacttcgacaacgcggggccggtcaacggcgcgcgtcgtcacctccagcgtgtcgggctcgtcggcttggctcccggcggcccctcccgccggagggcggctgccgcgccgtactcgcctgttgattatctgaaccgcttcaccaagcatgagtcgccccgtgtcaaggtgacgagtgagccgaggcctcggaccgggctggcgccctcggaggatggttggccgaggcccctgggggatgtttgtgcgagcgagagttgcttctcgcggaaggtgatgagtgagaaggtgatgagtgagaaagcacggaaggcattctggcagaagagatcttttttcgaggaaaattttaacgcagagggggtttcctcccttttagcccccgagggagggtcgggctttgccgaggcgaggccgacccttccttga

SEQ ID NO: 9461 - DNA, 483 bp, Zea mays
  Peptide Sequence Number=SeqID_52836
atgaactcggcagaaggcttcggcgagcggctcctccgcttgacttcggagagcccagatgtacacgctgagcctaacaatggcattatgggtcagctgatgaagccatatcagcttcagacacagtcgactttccaaaatccaaatggctggcttcgatggcataatggtgttaaaatcaatctcttcttcaccaacatcgccctcttcaatatctgcctgctcagcttcagtagcgggtgtatcttcgtcagaagcgccctcaggttcaaccaatcccgaccgcctcataacttcggaaatcggggcagtttcagcagcttcggtttcctctccgtcgcgtattgttccatcctcgagatagagcgtagcatcgccgccactgtcctcgactatttcaagaaggtctacggccacgtcgagcccctcctcaagtggtccaacatggacctcgagcgggagacgcagtcatgccttgcctaa

SEQ ID NO: 9462 - DNA, 972 bp, Zea mays
  Peptide Sequence Number=SeqID_52837
atgcgcctcatcctgtggtacctgttcttgacctgtggggggaggttgcacatctttacccacaagtcattttacccatctgccaagggatcgcgacttcccatacacctctaccgaggaggcgaggcaggggatcccttgcctgaccgccatcgcagcaaaatcaaccaaggacctccctacactgaccactcccctactgcccttgcccctttcgggcggcgcttgacatttaaaggagcccggtcgcccgaagatgccgcaaccgaccggaaatcagggcggaatctgttgaggttgaggccgaggcgagaggaaaacgcggcggaaggtgcggcctccagggatttggctgaacggactgggaatagggatgggacttaccaacgggtcccacacagcagaagcacatctggagtgtggcgcgtccgtggtcagcccaagccgagattgacaccgcggacccacgcttcagaaggaaaggcggctgcgcacagggccccatgtgtcacggtgtacccagagcaggaaaacagcactattcaccccgttccgactactgtgccaaccacaagggtaaaactaatgacagtaagtcacgacctcccccgagttcagcctcgggcgcaacagggagctccgcctcgcccgacctcaggcctcggcctcagcctcagcctcagccttgggagaaggtctccgcctcgcctgacctcaggcctcggcctcgggagaaggtctccgcctcacccgaccttgggcctcggcctcagcctcggcctcagcctcggcctcgggaggagtcacaatctcgcccaacctcagccttggcctcaggagaagtctccgcctcgcccgacctcggcctcggaccgactacgccacgggggatacatcattaccctacccctagctagctgcctcaggctacgaaggaacaagaccggtgtcccatctagattactccggtaa

SEQ ID NO: 9463 - DNA, 1488 bp, Zea mays
  Peptide Sequence Number=SeqID_52838
atggcccgcgcccgcgcctataaaacacccagggaccttgaccgtacccctccgcacgcgctcgacctcgccggagctcaaacccaccggcgtttgcccgtgcacggcgtgtccgcgaccgcccgatcccctgccaccgtagaccgccggcacacccgccgccgacgagagcacccgcctgcgcacgtggaccggacgattccggccacccccgccgtcgagccgtacaccgttgtgaccgccagaacctcccagagccaaccccgcccctcgccggacctctctcgccgccggaaagaactacctccacaccagaggggctgcgagataacaaattccaagcggctcgccggcgaccactgcaccagcagcgacaacgacctccgcctcagccggctagacagcagcagcgattgcctcagggcaaacgctactgtgaaaaggccctcacccacatccccctacgagggacgagaaccagccattaaagccaaagagccggaggtccggccgcaggtggcactgacggtctcgtcggcagaggcaaccgcttctgcagggggaagcctcacctatggcgaccaccacctcagcaccgacgacagcggccacctgcgcgccaatgccacaccggcgaatggcagccgccccagtgcgcaccggcaggtcctcactctcgtcctcgccacaggagcgaggacgagactgtccaagaacacaaacaccacccttacgacgtacgacgtgttgtgcgaccccccggtgcggccaacggcgcgggaagggccgtggatgtggctgacctgcgtactgcgcgaccatcgcccgtacggtggatggatagccacaccccgaccaggcagcaggtggcagtttgcctcctccgtaaggctggtgaacgcccttttccctcgaatgctggaggaagaagcgggtcgccagcccatgcagaaggcagggccccaactcggctcgccctcctccccatcacagatgacgaacatccttgaagctgagggcaagggagaggctgcagcccggttctctcttccccaccacaaggctggcggtcatcatcctagaaccagtacagcgactcgagacagccccgcgcgtgacccaacagtgccaattaagtgcgacgatcacgggctcgcatcctcccctgaagcggcaggagagcctcagagccctctcccacagcataaagacgacgcacccgtgttccgttcctcgaatgactcgcgcacgcgcaacagacaccccgcgaatcacccgtcccgtcgcattaactccctgggatcgagaaaagggatattccgaaaggatccttctcagcgaaggaaacgggccccgagccctcctactgatcaggggttcgaaggttgcgccctgtggggttcggcaaccgccccagagcacccgggcttcgagccctttactgatcaagggatcgaaggctggccccttgtcacacccggagtttag

SEQ ID NO: 9464 - DNA, 885 bp, Zea mays
  Peptide Sequence Number=SeqID_52839
atgacaaagacatatagaatatcctcaggactactgcgggaggctgtaaaaaaaataacgatagctcgggacagcgccttttttgttgataaagaaatcttgtcaaagagttcggaactcaagaatagtttgattaacccgtgtcataatgttataagggagtttgttagagagtcaagagactgcgactctgacgattataaaagagagtacaggctaaatgattataggctggagctgactcagccaccctctaatataagttcggggggtgatgtggtaaagactgttagaaggtgggaacttataaatcaaaagtacaacgccgatctatggataccccctgctaaaaaaggggttgtgattacacctgatattatagacaaactctatctcttctgggataacttcctaggaagttacgaaaaagaaggtattaaccacaaacagaacacagatccggtatctaaggggaaagtctttgacttgctagccagccgtagtagtaataatacgaatcaaacccccgaagagttaagagagattcaaactcaaatcgagcatttgactatccactttgatgagggtagcgtccatgagtctgcaggccagttgaaggggaagttcttcaataatgatagacaatcagctagggattaccttcttgataaattgaaggatgataaagataaagatattgttagaggtatgggcacctatacactggaatgtgtagcaatacatgtgttaagcaagctgtttaatgtgttttctttggaaaagactagtgtgctagcagccgcattgatatcagagctagatataacagctaagacggaatataataatgcactattagctaaaatgcagcgcgaaaaggaataa

SEQ ID NO: 9465 - DNA, 2964 bp, Zea mays
  Peptide Sequence Number=SeqID_52840
atggcgtggtggtccgggaaggtgtcgctcagcggcctgcaggacatcgccggagccgtcaacaagatcagcgagagcgtgaagaacatcgagaagaacttcgacagcgcgctcggcctagaggagaagcgcgacgatgaagaagcatcaggatcgcggacatccaactctgatggaataggattcttcaatcctgtcatggctttcatgggacacaatggtgaagaagatggcactgaagtatcagaaaagccacaatttccaaaggatctgtcagtagaggaagaaaatcatagcaccccaactaagaaacagacatccgaggtagatcattcagaagtatcagtaacaacatttccagaacagccttcaaaatcagaagaagctcatagtatctccaatgagtcacctgtttctaaggcagatgtttctgagcagtccataacaccacaaactccagcacatccttcagtagcagaagaaaagcttgatggctgcactgaggcacttgcatctaaggtgggtgatgatgaagcatcagaaacatcacaatctccaggacatccttcaacagttgaagaaaaccaggaccatcaatatagtaaacattcttgtcctagtgatgaagcagagccaaatcagcttagagagtctgctggagacttacctgatggtagtgcattttcttcgcctatcaaaatagataaatcaggtgacaccgaaacaggtgaatctattgatacaggaaaggaagacacatctgatgggaatgcctctcagtcacaaccagcagaatccatgctagctagttccgataatataactgaagttgaggacaagattgctcaagaatacaatgtcccaaaagaacttagtagcccacaggagaattgcgatacagtagacaaagttactcgtcttgaagtcaaattacatgatggcaatattgataccaaaaaaagtgaggaagaaagcaataagatggaggcaggggaagtatctgttgttgtacaggaggataatgtaatggagcaacctgaagatttaatgtcaaagtccataactgcagctcatgattcacattcgcagaatgagtcagtggtcagtttgaccgatgtacctgctggactagggggagtaggccccgcagataattttacagaagaagaaaagattgctagaatcacagattttcagattgtggactctgttgtttctgttggtgagctagagaaattaagacgtgaaatgaagatgatggaagctgcattgcaaggtgctgcaagacagtcacagtccaaagctgatgaaattgcaaggttgatgaatgagaatgaacaactaaaatcaacgatcgatgatctcaagagtaagtcttctgaagccgaaatggatgcacttaaagatgaatatcaccaaagagtagcaactcttgaaaggaagattcgtgagtttgaagaagagaaacaacgtctgaactcaaagatccaggttgaggaggctaaggtcgaaagcattaagagagacaagatggcaaccgagaagttgcttcaagaaacaatagaaagaaatcagactgaacttgcagctcagaaggagttctacaccaatgctcttaatgcagctaaagaggctgaggcattggctgaagcaagagtcaacagcgaagccaaagttgaactggagaaccttttaagagaagctggcgaaaaagaaaatatgctgattaagacaatcgaggagttgaggctttctctcacccgacaagaacaagaggctgctttcagggaagaaagactaaaaagggactatgacgatcttcaaaagcggtatcaagctagtgaacttcgttataatgaactggtgacacaagttcccgagtctaccagacccctcctaaggcaaattgaagccatgcaggagacatctgctcaaagggaagaagcttgggctggcgtggagagaaccttaaactctcgccttcaggaagcagaagctaaagctgctgcttcagaagaaaaggagcggtctgtaaatgaacgactgtcgcaaagtttatcccgcataactgttcttgagacccagattacaattcttaggacagagcaaacacagctgagccgatctcttgaaaaggagaggcagagagcatctgaaagtagacaggagtacctagcaattaaagaggaggcagcaatgcaagaagggcgggctaagcagctcgaagaagagataaaggatcttagagttaagcacaaggaggagctgcaagaagcagcagaacacagggaacttcttgagaaggaccttgaaagggaaaaggctgccagggcagaaattgagaaaacatcttcccgtgaagcgcctaaagtcccacttcccgatcagacaagaaatgcccctctcagaaagctgcctagttctggcagtataaatagtctagaagaaagccatttccttcaggcttcgttggatttatctgacaatgcttcattagagaggcgaatgtcttcagaaagtaatatgtcatattatctgaggaccatgactccaagtgcttttgagtcagcacttcgtcaaaaggatggagagcttgcttcttacatgtctcgcttggcctcattggaatctattcggaattcactggcagaggagttggtgaaactgacagaacaatgtgaaaagttacggactgaagccgctgctgtgcctggcttaagggctgaattggaagctctgaaacaaaggcacttccaagctctagagttaatgggggaacgtgatgaagagttggaggagctaagaaatgatattgttgacctaaaagagatgtacagggagcaggtggatcttcttgttagccaggatgacattgcattaccgaagacagatctcggcacgaaatctttggcgcaacttgttcaggatggcatcacccagcagctttacctgggcacctggtaa

SEQ ID NO: 9466 - DNA, 1881 bp, Zea mays
  Peptide Sequence Number=SeqID_52841
atggcgccccgcatgctctatgacgacggcggctctcagcccccttacggaagcaagaggacgtcagcaaggacccaaccgctccgacagctgtccctccgccaggctccatcgctcctccgacgaccacgacatcacaccagctgggtgccaaaatctctccggctgccacgacggcatggccctcttagagaaggttggccgcgcggggacgaggacgagacaggcgctctcttggggccactcgcttccctctcctgcgtggacgcttgtaaccccctactgcaagcgcacccgacctgggcgcgggacgaacacgaaggccgcgggattcccatctctctcacgccggtctccggtcgcctcgcttctccccccttcgcgctcgccctcgcgctcgacctatctgggctggggcacgcggcgacactcactcgtcggcccaagggacccccggggcagcggtttccgaaaagagaggcgtggagtgggggagagggccgagccaagccacctccaccgcagcaggcggcggagccgtacgcgaagcgaaagcgaggaaagccttctgaatcaggcttcctcgcgccgccgccgcttcctgctctcagcggcgtggataggtttcccgcccgcccgggcctggttgctcgtcttccttccttggtaaggtacaattcaattgattacctcaccagggagggagggtgctgcatccacggaccacggcttcacatgagtgaaagggatagaaatcgaaggaacagcgggattatcctacgggaagggtcagttagggactggtccgagttcaacgatccctctccgtccccaaaaccgttgtactcgcagtcctatgtcgcagtgagaggattcctgctgtcgagcaagctaaagtcagtgtatgcggctatgacttcacagaggcatagccgatcgcaggagagatcaaaatcaaaggggttgagctgcaggagagttgcagtccgtctactgttctttttcatgttaggcattttcattgggttcatgcctttattctctgtcgacgtctacaagaaaatagtatctgaaaacaagatgcttccgttccacgagggtgtgattgagacggaaatggtgggtaccaaagttaaggagtcggagacgattgtagtagagaaagagatcgaactgatcgacgagcctcatattcaagagagccctccagtccctgcattgttggatgatgatgtggatttttctgaatcatcacctgtgttgcctgctattagagaatctgacattcccgtgaagaagctgctgataatcgtgacaatcacttctgtccggccacaacaggcatattacttgaatcggctagcccataccttgaaagctgtacaggcacctcttctatggttagtggtggaatggcctgaacagtcctatgaaacagcagaaattctgaggcgctttggctcatggcctgtaacaatccatattggaacaaagtatagggcagttctggaaggccctatttgcaaagctaaccgagtcatgagatggcacacagtccagacggttcaaaagaagagttcaactcgtcgattcccaattggtttctctgcatttgctttcaacagtacactgttatgggaccctcaaagatggaaccgcccgcctatggattctgttataatccacacaggtggaagaggtggtttgcaggagtcacggtttatagaaaagcttgttaaaagtgagcgccaaatagagggtcttccggacaattgcaacagggtcatggtctggaattttaacctggaacctcctcagctgaactaccccgcaggctgggcactttataagaacctagaagctgacatgcctgtaatatag

SEQ ID NO: 9467 - DNA, 216 bp, Zea mays
  Peptide Sequence Number=SeqID_52842
atggccatgatgggttcaacatcggaaaaggtgtacctctgccaggtaccaaactttgggtttttaaatgataaagctgagaccaggcgggtgaaacgctcttgggaaaggaatttttacaaagaaaagacttgtgatgatgaatccatcatggctgtgatgggttcaacatctgaaaagatgtacctctgtcaggtaccaaactttgggttgtaa

SEQ ID NO: 9468 - DNA, 399 bp, Zea mays
  Peptide Sequence Number=SeqID_52843
atggtgttgtgggtctttggctacggctccctcatctggaacctcggcttcgacttcgacgacaaaatcctcggcttcatcaagggctacaaccgcacctttaatctcggtggtgacacagtattacatgtgcaatttagatatggatttgaacgactaaaatcatttactgaaattaaactttttttgcttgtcagcatggtacaagcctacaaggagaaagtttatccaaaaaacaaggtatgtttggttcatgctaatcctcacctccttcccttgctgccgtctcagcctgatgataagtatgagttcgcagacttttcagtttgtgtctttccccatatacaggttgaagaggatgaagagccaaaagaaggtgaagaggcaaatggttgctga

SEQ ID NO: 9469 - DNA, 609 bp, Zea mays
  Peptide Sequence Number=SeqID_52844
atgtgttgtgtggctaatgaaaatgatagcgggagcacaaatgaggatgaggaggaagaaagaaactttgtgcatctctacgctcgcctaagccaagaagataaggcggtcatgctcaaacttctagaaagagcgagagaacaaagcgaagctcgtcaaaggctagaagatattctctccataaagatgcaacactttgacgagttgactaaagaacatgaggaactaaagtgctctcatgttgatttggtccacagcaaatcttcctttgagctagaatttgcaggaacaaatgatgattcatatcaaaagctcaaagaagaaaatgagaggctaaagaagagcttgacacaactaaaagggaaatgcattgcccaaccttctcaagataaccatgatcacatggtgaagaagcttgagacgggaacaaccgtggcatgcactacatcccttaaagaaaatgtcaaggatttgaggattgccatgaggaggaaacaaaagatgaaattcaacacctcctccaaaagcctcaaccacgcctccacaaaaggtaacatccaaggtataaagagatatttcatgttcttaaaagaattaggtgtcatataa

SEQ ID NO: 9470 - DNA, 180 bp, Zea mays
  Peptide Sequence Number=SeqID_52845
atgccggagggcggagggtttgagtctgagtcccctggggcaacggacagtcgtaaggagaggatccaggtgtacaatgggggtgtagcagagtgctacgtgtctagcggagggagagctagcgccctaagtacatgccaatgtggcagccggagagatcttggcaccctactggtgtga

SEQ ID NO: 9471 - DNA, 486 bp, Zea mays
  Peptide Sequence Number=SeqID_52846
atgcaatatcagaactcggttaagagagttgagacatcatctagaagatatgtaattatcttatgtgtccaagtgattaaatggaagggtcacaagatgaaaaaggtgcgtgaatatagggataaaaagacaatattgcgagaagaaagtgagacaaatggtaagttaggtcgcattacatttgtgctctacatgaaggaactagaagtgagcgaagtaaatggattggggcttacacaaatttcacaaccggatgttgtgagaaagattctcagtgtcctcccaattgacaaatatggacacattgtcactgtactgcatcaattggatctttcagttaccacacctacacagatattgggaaagatcaatgctcatgagatgtacatgcacatcaatgataaggatgagtcatcttccaagagaaaggatttggctctcaaagcaaatcaagaaagaaaagaaaaggctaaagtacaaatttag

SEQ ID NO: 9472 - DNA, 339 bp, Zea mays
  Peptide Sequence Number=SeqID_52847
atgacgtggcaggggcaccggactgttcggtgtgcaccggactgtccgctttatgctgatgggggttaccagctgagaattaggcgtcttgagggtacccctaattatggtccccgacactattcttcctccccaacccgttgccccgcccatgatcgaagccacgagccgaccaatgctcgtcgacatgggtacgaggcaagtcggtcttgctcctggcctttctacgtgtgtgccgccgaggaggacacggtggcacatgccacgcttaggttatcttggcgacaacatatggcatatgctatggagttggtggtggtgttgtgtgagagcacctag

SEQ ID NO: 9473 - DNA, 624 bp, Zea mays
  Peptide Sequence Number=SeqID_52848
atggccttcctcttaaggctcctcaagacgtcaatggcggtgtccgtgtccagcatctgcaggaccgacctggagaaacataggttctattttaaccttacacttacaactatgttctccttgttctatggtctatggaagcacgtcttcagcaaggcagagttccatgtgcttatcctcggagttcataaggctggcaagacgaccttgctagaaaagttgaagtcgatctacttgaagggagaagggcttccgcatgatcgtattgttccaacagttggccttaatattgggcgtattgaagatgcaaatgtaaagcttgttttctgggatctgggaggccagcctggcctacgaacaatatgggagaaatattatgaggaagcccatgctgtaatatatgttatcgactctgcttctgcatcatcatttgaggatgctaaatctgctctcgagaaagttctccgccatgaagatctgcatggagcgccaatacttatatttgcaaacaagcaggattcaccagcagctgtcacggaggaagaattggctagacatctgcatcttaaggagttagacgagaggccatgcatgttccaggctggatctgccttcaatgggtga

SEQ ID NO: 9474 - DNA, 5736 bp, Zea mays
  Peptide Sequence Number=SeqID_52849
atgctccgatctcaggaccgccgacccttccgcccgccggatcgggctccacggcctccccacccccaccgcgaccagcacaaccacaacgaacaccggtaccagcctctctcccacccccacatcgaccgacgctacagcaatgaacaccggtatcagccccgcggccagcatcagcgcggttgccacgtgcagccgccccttcgcccgtcgcagttcgaggtattcctcgtccgcccgggccccgatttatccgcgccgaccgccattgaggtggaggccctcctcgcgggcctcccgtcgccggccccggccagcatatccgtccaatcctccggccgccatgccgcgcgcctcgtcttcacctccatcccggccgccgcggccgccgcgcgcgagctctgggcgctccgcctcgaggggctccacctcctcaccctggacctcccgcaccccgccctcgccgcccacgcctcgccgctcatcgcctcgctcttcgcctcccacgcctcccgccttcttgactctgacatcatggtcctctcggccgcccgctctgccgagcttgaggcgtccgtacgggatctagacctcgagaagaagacactggagtctgagaaggaatttgtcgactccaaaattgcggagtacaaggaggcgatgtggtcgatacagcgggcaatgttgcgtggatcgggggacaaggaggagggtgtcgacttgtttgcggctgtagatgatggggaggtggactttgttaaggtgcatatgatgctgctgcgtgagtgccggaggcttaaggagggcctgccaatctatgcataccgcaggaggattcttaaccatattttcgccaaccagtataacccaagagaagttggcagtcgtgttcctctccatgccacttctgttgggcacagctgtgaagtagcgagacacactaaccaagaatgcacctacaattgcattcttttgtggatagaggtagtatggttcttggttcaatactataatactgaaacttttactggagtatttgcgaagagacttgcagtgtttccaaatctcccaagtgaccaatataatcaacgagttgagcccttgtttgttttctttctcaatctgtttaatcacccaagaccaccaactgagaagcttgctgtatctgctgagaagaaaggtcatgatttaataggagaaacaggttctgggaagagcacacaattggttcagtttcttgctgactcaggtgttgctggtggtggttccatcatatgtactcaacctcgaaagcttgctgctatatctttagcacatagagtagatgaagaaagtaagggttgctatggggacagttctgtgttgtcatattcaaccttactaagttctcaaggttttggcactaagattatattcaccacggacagttgtcttttgcactactgcatgagtgatgtgaatctggatggcatttcgtatattattatcgatgaagctcacgaaagaagcttgaatactgatcttctgttagctatgatcaagaagaagctgcttgataggctggatttgcggctcattataatgtctgctactgctgatgctgacagacttgctgaatacttttatggctgtcaaatatttcatgttagaggacggacttttcctgttgaaattaaatatgtcccagatgtatcagctgaggcttccttgaatagtgtaccaagtatttcttctgttgcttcctctactgcttcctatgttactgatgttgtacaaatggtaaacatcatccacaagaatgaagaagagggtgctatacttgcttttttgacatctcaactggaagtagaatgggcctgtgaaacattcagtgatccaaatgctgtggtacttccgatgcatggcaagctttcttctttagaacagaatcttgtcttcaaaagctaccctggaaagagaaagattatcttctgcacaaatatagctgaaacatcattgaccataaaagatgtgaagtatgttgttgattgtggcttggccaaagaatacagatttgttcccactagtggtctcaatgtactgaaagtcaactggatttcccaaagctctgctaatcaacgtgctggccgtgctggtcgaactggagcagggaagtgttacaggctctaccctgaatctgattttggtatgatggaagtgcatcaagaacctgaaattcgtaaagttcatcttggcaccgctgttcttagaatacttgctttgggtgttacggatgtaaagtgttttgagtttattgatgccccagatcctgaggctatcgctatggctgtgaataatcttgaacaacttggtgctatagaatgtaaacgtagtggatttgagctaactgacattggacatgatctggtcaaattgggtattgagccaaggcttgggaaaatcatgcttgattgcttcagctatggtttgatgaaagaaggtttagtcctagcctctgttatggcaaatgctagtagcatattttgtagagtgggtactaatgaggagaaatataaagctgaccgcctgaaagtccctttctgtcaccctgatggagaccttttcacctcacttgctgtttataagaagtgggagactgggtatggtaacaaaaatacatggtgctggcagaatagtatcaatgccaagaccctgaggaggtgccaggaaactatatctgaacttgaaaaatgtctaaagcatgagctaaacattatcgttccaagttactggagttggaaccctgagaagcctactatgcatgatacatcgctaaagaagattattctatcatctcttagaggtaatcttgctatgttttctggacatgagaatcttgggtataaggttatttcagcaggtcagcgtgtgcaacttcacccttcgtgctcattgttcatttatggcagcaaacctgaatgggtggtattttcagaaatcttgtcggccgtgaatcaatatttggtatgtgtaactgctgttggtcttaacgaagtgcttacagttcaccccatgtcttttattaagcaactggaggagagtaaattgcagaggaaagtgattactgggataggaaataaatcgctgagaagattttgtggtaaatctggccaaaatctgcagaatattatctcacttctgagaaaagattgcagagatgatcacataatggttgatttagacttcagtagcagtgaagttttattatttgctaaagaacatgacatggaaaaggtcttttgcaaggtcaattatgctttggaacttgaagctaaattgctgagagacgaatgtgacgagagaagacctggtagctctactattgcactatttggctctggtgctgaaatcaagcatttggaacttgggaagagatatctaacagtggaaattctgcatcaaaatgctcgtgttatagatgaaaaggaacttgtttgtttggtagattctcttgttcctggtatagcaaattttcataaaaccgggaattttcagacaaacttagatgaaacaaagtgggggaggtttacgttcctcaaaccggattatgctgaagatgctatttcaaaattgaacgggattgagtttcatggttccttactgaaggttagtcctgtaagcatttacagccactcagggctaccatttcctgcagtaagagctaaagtttcttggccacgtaaggcaagcaggggagttgcacttgtaacatgtgctagtggtgaagctgaatttattgtaaaggactgctttgcccttggagttggtggaaggtatgtcaactgtgaggttagtaataggtacgcaaactgtgtctttgtcacagggattccattgcatgtaacagagccagaattgtatgatgcttttcatagtacaacaactaggagaatccttgacatccgcttgcttagaggacagcccacagctagctcgtccgtttctgaatgtacagaagcactgatgagagcgatatcactattcatgccaaataggaactttccttgccaaaaattccgtgttcaagtgttccctccagaagagaaagacttaatgatgaaagctaccataacctttgatggaagttttcacagagaggctgcaagagcactggaccatcttcaaggaagtgttcttccttgttgtctaccttggcagataatccagtgcgagcatgtatttcatagtactgtctcctgtccgatgcgcatttacaatgttatcagccaagatgttggtgctctacttgagagcttccgtagccaaaaagtgaccaccactaccaccataaccggcgccaagcagattcaagccgagggcaagcagattgagcagctgacaaacaacgcgatggagctgatggggaagatgtttacctgccagagtgagttgcttgtcgaggatggctttagtgttagagccttagagagtcgttttcttgtgtacataagtggcattaccagaaccactagtgatggcgtggcatacaatttggagaagaatgagaatggaaatttccgtgttaagcttactgcaaatgccacaaaaacaatagcagatttgagaaggcctcttgagcttctgatgaagggaaaaataataaaccatcctgatctgatgttaagcacagttcaattgctatggtcccgtgatggtatggaacaattgagatcagttgaacgggagaccggcacttatattctgtatgacaggcaaagtctgaatattaaaatttttgggagcactgataatgtggctgcagcggaggaaaaattggttcacgcacttgtacagctccatgagaagaagcctcttgaggtttgtcttcgtggccggaacctcccaccaaacttgatgaaggaagtgattgtaaagtttggggctgatttagaaggactgaagaacgaggtccctgcagtagatcttcagttaaatacacgaaggcagacactttatgttcgaggcagcaaggaggataagcaaagggtggaagggatgatctctgaactgataacctctagtgaccataatgctcaactgtcgtcagagaatgcatgtcctatttgcctgtgcgagctagaagatccctttaagcttgaatcatgtggccatatgttctgtttagcttgcttggtggatcagtgtgaatctgccatgaaatcacaggatggcttccctcttcgttgcctcgaaagtgggtgcaataagctgttcctcctagctgatctgaggtctctgctgcctgacaagctggacgagctgttcagggcttccttgaatgcatttgttgcatctagcgcagggttataccgtttctgccccacaccggactgcacatcgatttaccaagtagctgctgcaggcgcacaaggcgacagaccctttgtctgtggggcttgctctgtggagacctgcaccaagtgccatctcgagtaccatcctttcatctcctgtgaggcatacaaagagtacaaggcagacccggatgcaactatgcttgaatggcgcaaagggaaggagaacgtgaagaactgcccttcatgtggatttacaattgagaagagtgaaggctgcaaccatgttgagtgcaggtgtggcagccacatttgttggaattgcctggagaacttcaagagcagtgaggagtgctatggccatctcagatccgtgcacttatcctatgcagatctgatgtaa

SEQ ID NO: 9475 - DNA, 120 bp, Zea mays
  Peptide Sequence Number=SeqID_52850
atggccgaagtaacaggagccaaggccaagcctaccatcgacctcaaatgcctcaagcaacctagtgatgagtacaaggtcaccagctccctccttcgtcccaggaccgcatccctatga

SEQ ID NO: 9476 - DNA, 350 bp, Zea mays
  Peptide Sequence Number=SeqID_52851
atgggacagaggacacctgccttcaccaaactgctgatcagggacttcctctgcaacctcctcgggaaacacagactgctcgttgtctacgtaaaggaatcgcccggtgggggctgggtcggggcagggacaccggagggggggcggttcacggcggagcagctcggcggcggcataaaacaactccggcgaggaattaagcgcagcagaaggcaatacacgggtttggaggggggcgggaaggttctttacctcaaggcgggctccggggactcctcggcggcggcaatggcgcgacggtggcccggggcgacggtggcggacctccgcggctgcacagaggacgtcgg

SEQ ID NO: 9477 - DNA, 477 bp, Zea mays
  Peptide Sequence Number=SeqID_52852
atgggcgcgattaaggtcaaggctcagtccactcaagggacacggtctcgcctcgcccgagcccagcctcgggtaaaggcagccgaccccggaggattcacgtctcctaagtccagcctcgggcgacataggaagctccgcctcgcgctgaccccagggttcgggcccagcctcggctccggaagacgacgaactccgcctcgcccgaccccagggctcggacacagcctcgacctcggaagacggttttcacctcgcccgaccttagggctcggactcgacctcgacctcggaagacggactccgcctcgcccgaccccaggggtcggactcagcctcgaccccagggctcggactcgacctcgacctcggaagatggactccgcctcgcccgaccctaggggttggactcagcctcgactccggaagacggactcgacctcgacctcggaggagcctccacctcgcctgacctag

SEQ ID NO: 9478 - DNA, 1674 bp, Zea mays
  Peptide Sequence Number=SeqID_52853
atgatggtcctcgccttagttgtcaccaccttgtttgccattctacttcttttctctcttcgctcatacctccactttcgcgccaccccattctcggcagagggcgtaggagcaggcgccccttccccgtattcgtccgacaacagccccgacactgactcgggtagtggctattgcacgtccacgagaacgtttcacatcatgtacacatcatcgttttcgccattgtcggacgtcccgttcgtctttccggccttcgcattgttcttcctccccaacctgctacccccacccatggtcgtagccacgagcagacagacgctcgtcgacgcggggctggcaagatactcgcattctatcgtccttctcggagtgacgcctggtgcggatgcacaggtcttcgccgtgtccttctccggcaacgaacagacatgtccgcctgttcccttctcctcctgctctacgaaaccttggaagtgggggagacgatggatgaggaggcagctatatcagtactcgagtgttctcgagtcctgctgcatcccagtttcccaacaagagcggcacggggatcctagagcagcagacattcgcgttgcaatggtgttctgcgcggatttcgctgccctccggccgtcgccggccgacgtccgtgtcgtcacgtccgacgggagcgccatccgtgcgcattgctccgttcttgtgagcgagcgaggctttcctgttcctttccgtgtgtcaattgatgcggaccgatcacccgacgctgataagggcacgcgccgcgggtgggacgccggctgcaccgtccacgtcctcggcgcgcccgctgacgccgttgccgccttcctccgcttcctctactccagccccagggcggaggacgcggtgggcgcgcacggggcggcgctgctggcgctggcgcacgcgtaccgcgtcccgtggctgaagcggcgcgcggaggccgcggtggcggcgcgcctgaccgcggagcgcgcggtggacgcgctgaagctggccgcgctctgcgacgcgccgcggctgtacctggcgtgcgcgcgcctcgcgggcaaggacctggacgccgtggagcggtccgaggggtggcgtttcgcgggccgccacgacgccgcgctccagctgaacctgctccagctcgtccacgacgcccaccagagaaaggagaggtgggagagggagcgcgcgtcgcagcacgtgtacgggcagctcagcgacgccatggccttcctggaccgcatcttcgccggcgatggggagggatggtccgcgtgcgccagtgcagcctcgtcgcgcgaggacggcggcgtccgccgggggctcgagcagctcatgcgacacttggccgcgtgcggcggcaggaccaggaagcccgccgcctgcccgcgctgcaggcgcgcgctccagctcctccggctccacgcctcagtctgcgaccgcgccggcggcgagccttgcaacgttcccttgtgcagcaacctcaaggccaagatgcaggaggaaggagtgggcaagacatggaagcttctggtgaagaaagtgaccagggctagggtgatgtccgccctggccagcagcagcagcagggaggtgccagaggttgtcaagaagtcttgggcgaaatatagcagcagtagagcttcaagaattagataa

SEQ ID NO: 9479 - DNA, 660 bp, Zea mays
  Peptide Sequence Number=SeqID_52854
tataactgttcctcgagcagctcgaccctagtgattgtacaatcaagagggaaccatgaggccttctcatgtaagaaactaggaacatgcttcattgcgtcttttgttgagcatgagctacatgctttcaataagctgattcttgattaccttggcaagtcctctgatagtgacccgtcttcaccagtggagcacttggcctccagatcaagccggaaaacattgatatatctagttctcactcttggccacatatatccagattatgatttcagtgctgttcgggcacacttgttcttccaagaagaggagttggaaagtttcaagcagatggtagacacctacttatctgatgcctctaggcaatgggcagccacaaatgaaggcagttctcttctggacagtatgactaaagcaattgatgaggttatcaaaattaaagagtgtgacatctacagctataatccagactctgacgcagatccagttcttgagaaaggggccatatggtcgttcaactactacttctacaataggaagctaaagcgagttgtgagctttcgatgttactgcactagcaaattatcaggagatgacttcttaaccggtgttgcgtctgatggtgaagaggaagatgccttgattgacatggacatatga

SEQ ID NO: 9480 - DNA, 1344 bp, Zea mays
  Peptide Sequence Number=SeqID_52855
atggacaccgcgctctgcgacgacctgctgcaggtggtgttcggccttctaccgccctccgctgcaccggccgtgtccctcgtctcccgccgctggctcgcactcctcagggccgcgacgtcgtccctcagcctccgcctgcctgcctcctcggcggcgaccctcgccgccctgctgtctcactaccccttcctcgccgccctgaccgtggtctccgctggtacgccggtccacgacgccgacgccgtgctgctcgctgtcgcggccgcgccggccgcttcccggctctccacgctgcggctcttgcccgattgggcggtctcccccgccgcgctgctcacggtctgccctgcactcgccggtctgacgtcgctccacctcaccgctgtccgccccctatctttccgctggctcaagctgttgccgcgcctcaagtcgttcgcccttgtcaactccgccgccaccgttgactccgcgggctcgagctcggatgacgccgacggcgaggccgaggacgtcgcaggacattgccgctggagaagctgtcactttgcggcatccgctccggcgaccgcgggcttgggtgctgtggcggcgcttcgtgcttgccgtgctgtcgccgaccgtgtactcctccttgcagccgaccattgccgcacgctaacgtccctcctggtctatgacggcggcggcagcgaggcccttcaccggttcatccagcagcgtgctgctggtctgcacaccttggaccttcgcctcccgcttgacctgcacaacgatcatctcctcgccattggagctgactcagttcacaatgctacacatggcctagcttcacttcgcctccagagctgcgtccttatcacaggggacggcctccggtccctggcacgcacagccgccggagccggcatagaagagctcgccttggtgagttgcgacgtggtggagcgggagcccgggttgctgacattcctcagtcagagcatgccgcggctccgtcgacttaacctgtcttacaatgagacactgaacgacaaggtgatcggcgccatgctttcatcctgccggaatctcatcgacatcaggctcagggggtgccggggcctgacgggaggctcgctcctctcgctgcttaggcactgtgggcagtcactggagatccttgacatctcccgctgtccgggcattgctgtaggtaacgttgagctctttgcccagcgcgccgctaggttgaatcatgtgatcatcgaggagagcgcgatgtcggaggaattgaaggcaatcgctcagaaaaaaggcatgaaggttggctcattgccgtgcgaaggaggaccattctga

SEQ ID NO: 9481 - DNA, 1044 bp, Zea mays
  Peptide Sequence Number=SeqID_52856
atggccccatacaactttaaagcttataggttctataagcttagaggtggaaagtacgacaagaccaaaaaatgtgtgccactagacatccatcatcactttctggaatttcaaaaggaaatccagatactgatcaaagttttgtttgaaaatttgaaaaaaggcaggaaaacttatactggcggaaaatgcgaaaatgcaattcagattgttctctgcatgtgcttaactgctcatacacgcttccatgcaatgccatacgctgagtatatatacccgtcatgggctcctcccaaacccatagctctagggctgaaaccagcaaagccaacagaactgcacagtgtagtagttgcacataggcgtccgcgcgtcgtcctagctatggatccatatcactaccaaaccatgtatgacccacgcggcttccccatcatccacccgcagccttacctccagcacccggtggccggcgccctcggtgacagcagggtgcgcggcggcggcagtggcgcgcggcggcgtcctggcgccaagctctccacggacccgcagagcgttgcggcgcgcgagcggcggcaccgcatcagcgaccgcttccgcgtgctccgcagcctcgtccccggcggcagcaagatggacactgtgtccatgctcgagcaggccatccactacgtcaagttcctcaagacgcagatcagcctgcatcaggccgcgctgatgcagcacgaggaaggatgccatgctgagctcgccgcctattccgcggtggcggtggttggtgacaacgaggtgacactcgcgtcccatggtcgtaccggcgcatgcgacgagatgatgcagctccaggtggcggcggaggaagctttgagttatggtgttgatgcccatcagccgtacgggctcgatcccaggcagctgagtggtgggcacgagctgccaccgctgcctgcttcttgcatcttcctcgaggagcctgcagacgcatgctactctgtgtgtgacctcgacgacggggacaccggtctgcccggctcttactag

SEQ ID NO: 9482 - DNA, 1377 bp, Zea mays
  Peptide Sequence Number=SeqID_52857
atggagagtcatgatctccgggcagaatgggaatcacggcttgtgggtggttatgagattgatggttctggttatggttatggtgctgctagtccactacagccaaacaggatacttgctgagtatgttgatgtgtactcacccttgctctacacaccaaaccccccccaggttgtcagcattgcaaccactgctcaggcgaagatgaagctgtggaaggagacttccaggagttccaagattacgacgagttctaggtgtgggttagcggcaacccccagtcggctgcctgtgaaggccgcgttatctacgtttcttttccgcactttgatttattgtaagaactatatggacgtctcagacatggctcgacttagacacactgcacgaaagtcagtcatccccttcttaccctcccgccttgctgagcgtccgcttcgccgtcccgtggccggacagtccagccacttggagagactacaccaccgcctgcgtgaggagcaggagcgtcgacgacaggagcagcggagctcttccctctcgctccaccaggagatagagtctgtgaggagctgctcccctgtgctttctctggagccgccccctgcaccaccactgggcgccccagcttctggagtagctgctggaggagacccagacgacggagatggcgacgacagctcgagccacgacaccgacttctctgctaatcctgagccggaaggatgggttgctcgacccatcactcgcgacgctgctcgcgggtgtcacttccatgatgcgctcgacaccctgctacgtcgggcatttgaccggcatacttggtccgtcgagtatcgctgtgtggtctaccagcatagtcgcggggtctacccggaccgctgggaggcgacttgcttggtgcgctgcccggaggacagtctccagggtgcagaggcctgttcagagcactattctatctctgagcgggactcagctgaggcagccatgcaagatgctgcacggcgtgcgctttcgcactactgctcggttttcggtggggcagctgacggtcttgacctgaagtattacccccgccgttcatctggcagcacaggaggcgtgattgtctcacctgtcggtgagggcaatcctaggttgagcagcacagtcaacctagccgccgtgctaaacacggagctggaccatgcattagacgagctgagtagggctcgtgctgagatcgccctgctgcgggctgagcgcgcggaacgtcgttttctggatggtggttcccccactcccgttgggactcagcacccgtaccgctcacctcagcgtggacaccagtcttatggcaatcccgcctgcaagaccaagatcaacctagaaccatag

SEQ ID NO: 9483 - DNA, 483 bp, Zea mays
  Peptide Sequence Number=SeqID_52858
atggcgacatcaccgagtgattcctctgcttcttttgtctcccattcctctagccgtgaaccaaccccagagtgggatcctatatcggcatatgagaaacagggacctttgcactgggatgcagatggatgggactttgaggttacatcggaatccgacggcgacctcaccgatggggacgacctccagttcctcgatggggagctagactccgacaccagcactgactggttttggacgtacgacggagaatcgtcggatgtggagtcctttgacaatgatgacgacccgatgtctggatattggatgagcatcgtctcctcggacgacggagatgacgagaacaacgacgacagcagtgactacgacagaagtgacgaggacagcgatagaagtggcgacgatgatggtggggcaagacaatatgatgagatgcctccctgcaagcgtcgtcgactgctgcatggtagcttattctggtag

SEQ ID NO: 9484 - DNA, 807 bp, Zea mays
  Peptide Sequence Number=SeqID_52859
atgtggattgggaaaaggggcaatgtgtttcttcaaataaggtctctttttaaatggttatgcgatgaagggtactcaccctcatcaccttgggagtgggatgatcaaggactccctggtttaggggagggcctaagatttttctatgagttccatgaacaggggaatgtgtggatggaagactctctggccattaggacatcctactgctcagaggtggaagggttcccacatctgttgcgaagttgtgcgcttcgcatgggaatccgcaagaagccggaatacgtctggaaggagtatctcgagagcggaatggagaaatgctctatggcagtctacctgggagaaagccgaaactatccgaatcatccttctttccaagtcaattttaccggataccgctttccagatacttgccagaatgttgcccgaacagccctccgacaactatgccagaactacaacaagatgatctttgaaactccccttcgctactttccacccagcaacaagaatacccccacctggaggaaaagacttcaggccctgtcaggaggagatcctatcgaggatgatcccaccatcgtctacatggctggataccttcacacccttgataaccaatatgatgacctcaccctccactgcacccacctaacctctcgggtggaaagcctggagcaaaaagttagggaactttcaaggcaaaaggcgtccctccaagagagcctcgcaatagcagaaggcgaggaaaccaatactcgtgaggcctaccgcaccctaaatatggattacgacaagatttaa

SEQ ID NO: 9485 - DNA, 813 bp, Zea mays
  Peptide Sequence Number=SeqID_52860
atggaggcccgggcccacatgtcatgtaaccggcgcaacggttactacgtgcaaggaaaccgcaccgccactcgcaccaatgccgcgtcttctcgactgcggaaccagtgcctcgactcgaggacaagcgacacctccgacaagaggagcgggcgccgtttcaccttcgtcatgatgaccgcgtcaaaaaaggatccttccagcgaaggaaacgggccccaagccctcctactgatcaggggtttgaaggttgcaccctccggggttcggcaacagccccagagcacttgggctccgtgccctttactgatcaggggttcgaaggctggcccctcgaaagggttcgacagccgccccagagcacgcagattcagggatgaccctgggtacgtctgttacatggccgaggctcgggctacgctcccaaggtaccctagggaaaacaacgttgttcgccccgctccagctactatgccaaccaccagggtaaaactgagtcatgatctcccacgagttcggcctcgggcgcaacagggagctccgcctcgcccgacctcaggcctcggcctcagcctcggccttgggagaaggtctccgcctcgcccgaccccaggcctcgacctcagccttggcctcgggagaaggtctctgcctcgctcgaccccaggcctcggcctcagccttggcctcgggagaaggactctgcctcgcccgacctcagcctcggcctcagaagaagcctccgcctcgcccgacccgggcctcagaccgactgcgctacaggggatacatcattaccctactcctagctag

SEQ ID NO: 9486 - DNA, 603 bp, Zea mays
  Peptide Sequence Number=SeqID_52861
atggctgataaagcgcagttcaagtcagggcctcgtctaccaaaggacgcgacctcatccgagccgggaacagtagtcccgggcggattcactcctcgcccgagggcctcctcaggcacctcggcctcgggagaaggtctccgcctcgcccgaccccaggcctcggccttagccttggcctcgggagaaggtctccgcctcgcccgaccccaggcctcggcctcagccttggcctcgggagaaggactccgcctcgcccgacctcagcctcggcctcagaagaagcctccgcctcgcccgacccgggcctcggaccgactgcgctacaggggatacatcattaccctactcctagctagctgcctcaagctacgaaggaacaagaccagtgtcccatctaaggttactccgacaacaggtaatgatggttcctcgcgtgcgcccatgacgtcggaccgctctcaaccccctacggaagcaagacaacgtcagcaggatccatgccgcccgacagctatgcttctacagggctcaaggcacttctccgacgaccatgttagctcgtgtacagggctcaaggcgcttctctgccagccacgttag

SEQ ID NO: 9487 - DNA, 522 bp, Zea mays
  Peptide Sequence Number=SeqID_52862
atggcggcgctcacaaggtgccacggcccgctgcagctgtctatccccaaggaaggcggcaacgagggggagcctcggcaaggggtttgggttccccctccccttcgatcggtcgagagcaaccaaaaaaggcaccacacaaggctcttccctggagttcatagaaggagagatgttactgacagaagtgggaacaatcttcctggaactgtggttgataccgagatttgtcatccgcgggagtttgatttctacctttgtagccatgctggaattcagattcgtttctccagggaaccaacaggccaatacactatcatgtcctctacgatgaaaaccgtttctcggctgatgggtcgcagatacttacaaacagcctgtgctacacatacgcacaatgcacgcgcgttgtctcagttgatttttgcttactttttagtcttcatgtaccacctgtctgagattgatgaactgagacaaaaaccattcaaaagaaatggcccagactttgatgctaaataa

SEQ ID NO: 9488 - DNA, 357 bp, Zea mays
  Peptide Sequence Number=SeqID_52863
atgatgagcaaagccttagacgatgaagttgttagcttcaactcacgccttcgcagcatcaatgcccacacgaagctcctcaacttctcttctctagttcgcttattgctgttggaaaaggtattttcggattcagaactatggatatggatcacgaccaggacgaaggctgagccagacgaaggtcgggggcagccgaagctgtgcgcagggaagcttcggctcgatggcagaagggggaaccgacttaaagatgaaaagacctcgggggcctcgacagatttccataagccgttagcaaatgtaatgggcatggatgtaattttacgtgggctgcgtcccgcgtctataaaatag

SEQ ID NO: 9489 - DNA, 1056 bp, Zea mays
  Peptide Sequence Number=SeqID_52864
atggatggcggcaatcacccccgcagcggtgagccctcctttccgcaacacctccagggccttcaaaaggggctggagattcttctgtctgtcgtgcggggtcccgtagcgccaagcatcggcggcgacggtcaccactcgctgagtaaacgacgggagcctcccgtcgtcatttcagaggtagaaccaccggcgctgccaccctttgttcgaggacgcaaggatggcgagaatgtactgcggcgcccgcgcctgcctcagctggaggatgcagccaccggcccacactgccgtgtggacccttctctcccccgtcggcgaagcaaaaagctccgcggagaagagatgagtccacaggtcccagtgagggtcaatccccaagtatccttcgcaaaccgctgtgaagatggcggcctgcgagatggagttagggctgaggttgtgcaactccaccccgtaaacatgcagaatcgcccgcataaagcggcttgccggcactccgaacccccgctcgtggaaggagacgaagctcacgacataccccggcggcggggacggggcgactccgctcgggggggcatccactccggctgcctctcatcggagagagggcgaagtaaaccctcagcgacgagggcctccaggtcatccgccgtgactgtggagaaaggccatgggtcgcacggcgggataatggacaggcggcatcgttggcaggagaagcgggcgacgcttcgccttcgccataatgaccgcgtcaaaaaagggaccgggaaagggagataccccaaaagggttccttctccgcgaaggaaacgggccccgagccctttactgatcagaggttcaaaggctggcccctcggaggggttcaacagccgcctcagagcgctcgggctccgcgcccactactggtcagaggttcaaaggccggcccctcggaagggttcaacggccgcctcaggccactcgggctccgcacccactactgatcaggggttcgtaggctggccctcgaagggttcacagccgcctcagacacagagcgagggatga

SEQ ID NO: 9490 - DNA, 1344 bp, Zea mays
  Peptide Sequence Number=SeqID_52865
atggagtaccgtcccgggctggaaaggttgctggagactgcccatctggagcttgacgagaagttgttcgtcaacacgcagcagacccctacctggcgcgccaactgtcgacgtttcgaacccggggggtccctagaccgacgagtaaattgtcgccacgtgccccagcccagatgggtcggcgcgagacggagcgcgaagggggaagaagccggagggagacagggtaatgatggcgcctcctgtgacgtggtcggtccgagccctgggttgggcgaggtggaggctcctccgaggtcaaggtcgagtctgccttccaaggccgaggtcgagtccgagcccgagtccgagccctggggtcgggcgatgcggagttcgtcgtcttccggggctgagcccgagtttgagccctggggtcgggcgatgcagaattcgtcgtcttcaggggctgagcccgagtccgagccctggggtcgagcgatgcggagttcatcgtcttctagggctgagcccgagtccgagccctggggtcgggcgaagcggagttcgtcgtctttcggggctgagcccgagtccgagccctggggtcgggcgaagcggagttcgtcgtcttccggggctgagcccgagtccgagccctggggtcgggcgaagcggagtttcctatggcgcctggggccagtcttggctgctgtcagcatcactctgtcgagtggcacagcagtcagagcggcgcaggcggcgctgtcctcttgtcaggccacctttgcattaaatgcccctgcgattcggtcggttggtgaggcgacttggccaaggttgcttcttggtgaagactgggcctcgggcgagccgaagctttgtgctgatgggggttaccagctgagatttaggagtattgaggggggtcctaaaggaaaactcatgggtttcatggtgtcagaccaagggattgaagactcggcaaaaaggtatgccaatttacaagctcttaaggaaggcgccacgttagtggcggaaaggaaaagcaagggtcacgccctcaaggtgcagaagctcgtccacttcatcagcgaagatgtgtctggatgcatcgtgaaatggtccttcgagctcaacaaactcgatccccaagggcacaatttttgctactctattcgccatcactttgacgccaccaacaacattgctgaatacgagggccttgtcaatgggctcaagatcgcagccgaggcgacccctaggaaatgggccctcctaggctacacaggaagatctgtcgcgccaacctcaggagtcgggcggaaggtgctacgattctgtaagatacagagcgtcttgtaa

SEQ ID NO: 9491 - DNA, 1371 bp, Zea mays
  Peptide Sequence Number=SeqID_52866
atggccgccgcgcttgcgagctcgccgcttgttcacctaactacctcccgcctccgcctccccaggccccaggcctccgcttctagttcgggtccagtctgctcgatcggcgtgtgcttgggatggaggctgaaggtcgggtggagggccctgaggcggcgcgaccggcttcgatgcttctccaccgacgggggcggcggggaggagggggaaaagcgtggcgaggaggagacatcggcaacggcggcggcatccccggcctcggttccagcggagacacagactcctggtgtatcaagcgagccaccgctgttgagttttagtgttgataatatcgatacagttaaactgttggaacttctaggcccagaaaaggttgatccagttgatgtcaaggcaattaaggaaaaactctttggttatacgacattctggttgacaaaagaagaaccttttggtgatcttggtgaaggagttcttttcattgggaacctccgtgggaagagagaggaaatctttgcaaaacttcaacggcaagtacgtgaacttaccggtgataaatacaatctttttatggtggaggaacccaattcagaaggggatgacccacgtgggggaccacgtgttagttttggtttgcttaggaaggaagtttctgagccaggacctactacgctatggcagtatgtcatttctctgttacttttccttctcactatgttctcctgcattgagctaggaattgcatcaaaggaaattgggcactttttggcagcatttccaaaaaatgttaaactgggaattcctttctttattccgaacttcacccttggaacttttggtgcaattactcagttcaagtccattcttccggatcgaaagacaatgtttgacatatcaatggctggtcctgtggctggagctgcactttccttttcaatgttctttgttggcttattactctcttcaaatcctgttggggcaagtgatttagtggaagtacctagtcagctgttccagggttcattgttgcttggacttattagtagagcaacgcttggatacagagctatgcatgctgctacagtttcgatccaccctcttgtgattgcaggctggtgcggtttaactactagtgcatttaatatgcttcctgttggttgtcttgatggtggaagagcattacagggtgcttttggcaaggatgctttgtttggatttggcctcacaacatattcgttgcttggactaggagtgcttggagggccactgtctcttccttggggtttgtacgtgctaatatgtcagagatgcaatgacctcattcgatccttcttatttctcagagaacacccgagaaaccatgcttga

SEQ ID NO: 9492 - DNA, 327 bp, Zea mays
  Peptide Sequence Number=SeqID_52867
atgcggagttcgtcgtcttccggggctgagcctgagtccgagccctggggtcgggcgaagcggagttcgtcgtcttccggggctgagcccaagtccgagccctgggtcgggcgaagtggacatcactctgtcgagtggcacaacagtcagagcggcgcaggcggcactgtcctcttgtcaggccagtcagtggagcggcaaagtgactacggtcacttcggctctgtcgactggagggcgcgcgtcaggataaagggcgccgaacatggtgtctccagtgagctgctgacgggtaatccgagtggacgcccgtgccccatttgttag

SEQ ID NO: 9493 - DNA, 1569 bp, Zea mays
  Peptide Sequence Number=SeqID_52868
atgctatggagccttcgcgatctcaaccaccatgtcactcccagccgtgccacacgacatgggtgctgtcctctgcctcctggagtcccgcgaccttcccgccgctggctctgcttcctcctcgccgcggtcctcctacaccgcccgcagcccccgcgcctcggctacagcctccacgcccgcgcagcgtatgcaggcctcctcgcggaccgctaccttgctaacgcgctgctcgtgttctatgtctgcctcctggaccacctgcctcacgcgctcagggcgttcgacgacctgccccaccgcgacgtcgtcgcgcactcctccgtcctcgctgcattcctccatgcgggtctcccgcgccgcgcgctcctccagctcaggaccatggcctccggcggctacgtcgctgacgacgacgtcgcccccagcgcgcacgcgctttccgcctccgccaaggcgtgcgccgtgctccacgacctccgcgcgagagcctacgtgcacgggaccaccgtcgtgcgagggtacggcgacgatggcgtcgtgctgagcgcgctcgtggacctgtacgccactcgggctatgctcaggacagatggggtttggctggacggctgcacatttggctctatgatgtcggtgcttgggaacatgaagagagcgaggcagggtagggaggcacacacgcaggagctgtgggcgactggggcgctcagcttcgtcggcccatctcgtcgtcgcccgcccgctggacgagggcctcgtgcatttactgaaagtagtgttttatatacactgcatcggttttggaaggaagagcatgattgggggtggaaaaagtttatggaactgtcagaattacacgatggctttattgcacaggatgctcttaccatcaaagccaaagttcaagtcattagggagaagatagaccgtccatttcgttgccttgatggccagtaccgaagggaactaattagggtgtatctatcaaatgtggaacaaatttatcggcgttttattgatgaaaaaagaaggacgttcagcaggctgattgaggataaactcgggtggtccagatacttgaactcgctatcaactttcagtagacctactaaggagcgatctccgtccaattatcagccaatgaatttatgcactgagggaggaagagcagcttgtgtattggtggagagaggatccttggttgaaagtgatgtttctccatatctttataagaagaaaaaagaatgtgccatcgctggggatgggtacgatgatcaaggattctcgctcttattggtcacggtggcgggttcttgggctccttggcagcgtcgaggcacggtatctgcccacgctgttgtcggggcctcccgcgggtacccatgctcgacctacttcattgaagttagcagtgcaggcatagaacctatgaaacatggatacttggttacaaagttcaactttcagtcaagttttgttcaacaagggtctaatagagacttccatgaaactgatcgatttgtcgttggtgtcatgtatgggaacttatggtttagaagcagctaa

SEQ ID NO: 9494 - DNA, 89 bp, Zea mays
  Peptide Sequence Number=SeqID_52869
atgggggcgcggctgcggccgtgggcacggcggtggcgcggcgagggcgtgggcacggcggcggcgctgcaagggcgtgagcacagcga

SEQ ID NO: 9495 - DNA, 87 bp, Zea mays
  Peptide Sequence Number=SeqID_52870
atgggaacaaatgggcatctctacctcgacacgggagatattatgctttctgtatgcatgtgtgcaaggttcaccttagggtcgtga

SEQ ID NO: 9496 - DNA, 921 bp, Zea mays
  Peptide Sequence Number=SeqID_52871
atggatgatgtttatgaagaaagccatcgcctgctcggacttgatgttggtgaggcgtcggaccttgattcacttggagaatttgtcgatggcgaccaacaggccttgagctggcagatggaagactctctggtcattaggacatcctactgctcagaggtggaggggttcccacatctgttgcgaagttgtgcgcttcgcatggggatccgcaagaagccagaatatgtctggaaggagtatctcgagaatggaatggagaaatgctctatggcagtctacctgggagaaagccgaaactacccgaaccatccttctttccaagtcactttcaccggacaccgcttccagatacttgccagaatgttgcccgaaaagccctccgacaactatgccagaactacagcagacaacaaaaatacccccgcctggaggaaaagacttcaggccctgtcagggagagaccctaccgaggatgaccccaccatcgtctacatggctggataccttcacactctcgataaccaatatgatgaccttgcctcccactgcactcacctaaactcccgggtggaaagccttgagcaacaagtccgggaacttacaagggaaaaggtgtcccttcaagagagcctcgagatagcggaaggcgaggaaaccaacacccgtgaggtctaccgcactttgaagatggattacgacaagaagctaaagaagctcgcccccgcaagaaaaatctgcaagaagaccaaaagccaaggatgccaaactgagcagaaggaagaagcccctccagccctacctcctaccagaatagggaactcgtctgacaccgaggaaatgtccctagccagccttgatgaccttctcaaggaatttgggggacactttagagaaggagttcgggagtaccctagatag

SEQ ID NO: 9497 - DNA, 267 bp, Zea mays
  Peptide Sequence Number=SeqID_52872
atggaggcaagaagagcttcgaggtacgaagtgcataagagaaggtgcataagttcatctacaactattctaaatcgactgtccggacatgagaagttttttggaaaaacacctacgcacggaccgtccgggcccttgcggcggaccgtccgtggcaccaaggtaccctcggacaggaacactgcaaaaacacaagtctaccctttggaccgtctgacggagaagcgagcaccgtccaagaccaagcgtggaccgtccggtcggtga

SEQ ID NO: 9498 - DNA, 111 bp, Zea mays
  Peptide Sequence Number=SeqID_52873
atgggcataaattcacatttaagcacttgtgttgacactcaatcaccaaaatacttagaaatggcccaagggcacatttccctttcagcgtatttatccggcgaggagtag

SEQ ID NO: 9499 - DNA, 568 bp, Zea mays
  Peptide Sequence Number=SeqID_52874
atggcgcttcctgttgacatggcgcccgagtccgagccctggggtcgggcgaagcggagtttcgtcatcttccgggtcttagcccgagtccgagccctggggtcgggcggagcggagttcgccgtcttccgggtcttagcccgagtccgagccctggggtcgggcggagcggagttcgccgtcttccgggtcttagcccgagtccgagccctggggtcgggcggagcggagttcgccgtcttccgggtcttagcccgagtccgagccctggggtcgggcggagcggagttcgccgtcttccgggtcttagcccgagtccgagccctggggtcgggcggagcggagttcgccgtcttccgggtcttagccccgagtccgagccctggggtcgggcggagcggagttcgccgtcttccggtcggagtggcacaggcggcgctgtccttctgtcagactggccagtggagcggtggagtgacggcggtcacttcggctctgccgggggcgcgtgtcaggatgaagctttatgctgatgggggttaccagctgagaattaggcgtcttgagg

SEQ ID NO: 9500 - DNA, 228 bp, Zea mays
  Peptide Sequence Number=SeqID_52875
atggaggcccaggcccacgcgtcatgcaaccagcgcgccggttgctacgtgcgagcaactgcaccgccgctcgcaccactaccatgcctcctcgactgcggaaccagtaccacgactcgaggcaaccctgcgtacgacccggcagtgccagccagggaccgggaaagggggataccccgaaaaggatccttccccatgaaggaaacaggctccgagcctccctactga

SEQ ID NO: 9501 - DNA, 2067 bp, Zea mays
  Peptide Sequence Number=SeqID_52876
atggccgccccctccctcagccgtggagggtgccgccgccacctcacccttgatgctcgccatctccctagccgccatctccctcatggcgccaagcccatggctttcctggtgctcgcctctcccagccgttcctatctccagcgctggctgccatctcctccacgaggtgtcttctctgtcgctactccctgcgtgattcccttggccggcgtcctcgactactcagccatggaggtcgctgccccttcttttcctcatcttcctccatcggttctgagctcggcgcccctgctccctgctcctgtccctcccatggacgccgccccctccctcagctcactccctctagctgccatggagctcgcccctgcccaagtccgcagcatgccggagaagacctgtgtcctcgacgcgcgccaggtgtttgatgggagggtgcagatggttctcggggacgtggtttacacggctgtgccgttctacaagagggtgctgatggtcgaagaagacgcatttggcttgttggtgctgctcctcgtgcgagagaaggagccagtagtgccaccactgtccagcagcttgaggacttcaaggtcggtggctagtgcagcccccgcccaaagcttagctgacttctgcaaggattcctcctcttcagctgcacacgctggtgctgttgttggttttgttgtaatgggtcagaggtggcagcaggaccattggcaccttcatcaatttaagttcagtgtcagcggtgagggggttacaagcgtccacgcgggagggagcgagcggcctcacgcgagcgccgtcccgtccttccccgcgcggacaaccctctgcaatagggcccctggtccttccttttataggcgcaaggagaggatccagcctgagttcgcttggggtagggtaatgatggtgcctcctgttgacgtggtcggtccgtgccctgggttgggcgatgtggaggctcctccgaggtcgaggtcgagtctgtcttccaaggccgaggtcgagtccgagcccctgggtcgggcgaggcggagaccgtcggctgaggccagggctgagtccgagccctggggtcgggcgaagcggagtttgtcgtcttccggggctgagcctgattccgagccttggggtcggacgaagcggaaatcgtcgtcttccggggctgagcctgagtccgagccctggggtcgggcgaagcagagttcgtcgtcttccggggctgagcccgagtccgagccctggggtcgggcgaagcggagttcgtcgtcttctggggctgagcccgagtccgagccctggggtcgggtgaagcggagttcgtcgtcttccggggctgagcccgagtccgagccctggggtcgggcgaagcggagtttcctatggcgcctgaggccgggcctggctgctgtcagcctcactctgtcgagtggctcagcagtcggtgcggcgcaggcggcgctatcctcttgtgagaccggtcagttgagcggcgaagccacctttgcattaaatgcccctgcgatttggtcggttggcgtggcgatttggccaaggttccttcttggtgaagactgggccttgggcgagccgaagctttgtgctgatgggggttaccagctgagatttaggagccttgagggggaccaggctttctcggttgcgttttgttccggtgggtgcgcgcgagcgcacccgccgggtgtagcccccgaggcctcggaggagtggtttgactccttcgaggtcttaatgcctcgcgcaatgcttcggctgggcgagaggacggtcaaggacagactcgacttttttacatacgcccctgcgtcgcctttccgcaaggaggaaggggggaaagcgccatgttgccctcggagggcgccgaacatggtgtctccggtgagctgctggcgggtaatccgagtgggcgcccatgccccatttgttaggagtcggctagaggcccggaggcgcgctcaaaagtacctgcgggtgatctaccggacccggtccccttccgacggggtccgagggctcgatgcctccctctga

SEQ ID NO: 9502 - DNA, 360 bp, Zea mays
  Peptide Sequence Number=SeqID_52877
ccgtcgtgccgtcaatggggctcggtgtatgcggctcgctctaccaaggttgatttgtcccttggggaggagtgcggtggttatgagatcgatggttctggttatgactatggtgctggtaagtggtattctttccgtttggaaagggcgaagatgaagctgtggaaggagactttcaggagttccaagactacgacgagttctaggtgtgggttagcggcaacccccagtcggctgcctgtgaaggccgcggcgaagcagagttcgtcgtcttccggggctgagcccgagtctgagccctggggtcgggcaaagtggagttcgtcgtcttccggggctgagctcgagtccgagccctag

SEQ ID NO: 9503 - DNA, 453 bp, Zea mays
  Peptide Sequence Number=SeqID_52878
atgagcatcatatgttgcccgagaaggggtatgatgcagcttcatatccttagaggttctaattgtgactgtcgctcgcgataccaacggttcgcgcttaactcccctacccaggcgacccccacggcggcgccgcccaaggtcgcggtggtccatcgccggatttggctcgggttcggccagacgccccaatcccgctcgggcacgcaagaaaaacatagaggcgcacatcacgaatctaatagaggcggccataccggcgataacggtgatacgtccctggaccatggagatgcgcggcgctacgtcgacgacgaagaattcccatcaccggggtgctcccgcgcgcctcccatcgccgcgcgtgtcttcgtgaagggtttccgatgctccgacgccccacaccgtggctcgacggtgaacataggcgtggttcgcccgcggcggcgatag

SEQ ID NO: 9504 - DNA, 303 bp, Zea mays
  Peptide Sequence Number=SeqID_52879
atggggctcggtgtatgcggctcgctctgccaaggtggcaatgagaatgatggttttggcattagctatggtaatggtaagtggtattctttccgtttggaaagggttgtctgcattgcaaccactgctcaggagaagatgaagccgtggaaggagacttccaggagttccaagattacgacgagttctaggcgtgggttagcggcaacccccagttggctgcctgtgaaggccgcgtgtatctatgtttcttttccgcactttgattattgtaaagactatgtggatgtctcagacatatga

SEQ ID NO: 9505 - DNA, 366 bp, Zea mays
  Peptide Sequence Number=SeqID_52880
atggtgcacggttctttgtcgaggtactgccctgggtcgtggcgaataccggtgacgacgatagtctccagcgggatggcgcagaggtggccaaggagcatgtggccgggggaaatcaagaggtgggagagcgcggcaccaacaccgtggttggaagagcgcgacgagcacatccttagagcccacagcaccgcagaggacggcggctcgggcgagatcctcaggcccggactcgagacgaaggcggcggagaatgtaaaactggtattgtcagggaccataattaggggtaccctcaaggctcctaaatctcagctggtaacccccatcagcacaaagctgcaaaggcctgatgggtgcgactaa

SEQ ID NO: 9506 - DNA, 266 bp, Zea mays
  Peptide Sequence Number=SeqID_52881
taaccgcggcggagaagggtggaggggcttaccggcggcgagattgctccggtgaagtggtcgaggacgtaggggaggtctcggggatcacaacggtgtgcgggtcaccgtcgaggatggccagagttggccggtccacaagtccgaagtccggtgaagtcgatctcgggcttccggtgaagtccggcctggtccgagggcttggaaagcttcacaggccactggcggagctagccgaagcactagctcgacttgggggtggctag

SEQ ID NO: 9507 - DNA, 237 bp, Zea mays
  Peptide Sequence Number=SeqID_52882
atggagactgaactccccccaagaccatgtggaaccaacgccatcacttcggactcgaggtctccaccaagaagacgacatttcgttggggcgtatcaggtcaagatggcgcaccttgccacgctcaagggggagttcgacaagctgtacatagaggacgcgaaggtgttggacgactacgccaacaaaattagcggcattggtggcgcggtactgagagcacctagaggggggtga

SEQ ID NO: 9508 - DNA, 1938 bp, Zea mays
  Peptide Sequence Number=SeqID_52883
atggcgaagaagctagggaagaaggcgcgcaagttcgcgcgcaagaacctgcagtctgccgccaagcgcaaccgcaagatccgcaaccagttcaagcaccgccgaggaccccgcggaggcgagtctctgctccccacgcttctcacccccgcttgcttgtttttttcaaaaatttttaggctggttaccgacgatgctgctgctactttgatccacggtttggagtttccagaggacgatgctgaactagatgctgatctgtctgacagtgatggttatctttctgaggatcctggatgtccatactattctgacagtgaggatgagaaagctgccaaagattgtatcatggaagaaggtttggacagacagaatgatgacatgaatcgagatatcaagaagcaaaagaaaaagttgaagaagttgctggataaggaccctgaatttgcaaattttctcgaaaaatggcagtcggagttggagagctccagaagtaaaggagattctgatgaagagggtatggattctatggatgatgacgatgactccaatgatgggaatttaccaaatgctaaggtccttacaagaaagacgataagtgaatggtgccagttagtgtcaaaggaacctaaagcacctgccttgcgtaatctactaaatgcttttcgagatgcttgtcgatatggtgttcactctgatgggcccttgatgcagagatttcaaagtgccagggtgttttatcaaataataatgtttgttctttctgagtcggacaacattttccgtgctcttttggaaattcaagatgacgttaacaaaggaaaaattatgaacctgagaaattcaaagaaatggctaactgttgattctctcataaagtcctacttatcaagttctcttgatcttcttagtcaacttacagacaacaagatacttgcctttgttttgactcggttgagggtatcagtggtccttttttctgcatatccatcaacatcaagtaggcttgtcaagaaatcatatgagagggcaataatctccgtggagcaactgaatgctattcttagacaggcttctaaaaccaaggaaaaggaagatctcaggaagatagataactggcaatatattagttgtgtcaacctatgggttcggtttctgtgttgtcactataaggattacaatctccatcccttattttctcaagttcttcaagtaataagaggagtggctcacttattcccaggcacaaggtacttaccgttgagactgaagcttgtgcagatgctgaacgagctttccacttgcagtcagatgttctatccaattccatcgttgctctttgactgcctagaattaagagaagtttctcagaaagaacaaacacaaagaacaaagatcaacttttcgtcgttgttgaaggtgccaaagaacctgctgaaatcaagggattttcaagaggagtgtattctttcagcgattcagattctatcagcacattttgcccagtggagttaccatgtttccttcccagaagtagccaccattcctcttgtcctcttgaagaggctacatgagcagacaacagtcgaatcacttcgccgtcctattaagcgtttgatagaccaggtgacggagaacaaggattttatagaaaggaaaagagaggttgtatccttttcaccaaatgataaggcgtcagttgatagcttccttcagggagaaaaacactttaaaataccaagggaatttctgagagacatctcacatctggaatcggttggtttccaagtgagggccacgaagaaccacatcaatgtagaacattttagtgcagatatacgccgaggcagctattgtgtaacctctagtgagactgattcctacgagtcctcgagtgctcaacaattttgtacgattgtaaccttaattccgaagtga

SEQ ID NO: 9509 - DNA, 162 bp, Zea mays
  Peptide Sequence Number=SeqID_52884
atgggagagaagaggtgccatgggtggcagcatcaagtggaggaggaagaaggccggctggagcagacaatagcgtggagaggaagggagggagcaggcgcttggggtataaaaggagggagcaagcttcagccattagcggtgttctacaacggttattaa

SEQ ID NO: 9510 - DNA, 258 bp, Zea mays
  Peptide Sequence Number=SeqID_52885
atggcccagaccgaagctgccttcttcataaatgatacgaaggatccttcagctgaagcaaccttgacgggcgagaaatttttcaatgatgtctgggtgaatgctgaattatctccgccgctggaaccgttcgatcccctagcggatctagaaatgaaggaggcgctggatattataaacatggctgaatccgttgttgatgaagttgttaacaaattactgcacgaagttgcagagaaagtccttaaagaggaataa

SEQ ID NO: 9511 - DNA, 576 bp, Zea mays
  Peptide Sequence Number=SeqID_52886
atgatggttcagatcgtcgagcaccacgacttgtctcccgaggacttcctgatggaggaaggggcaacatcttctgtgccatggggctcttactgccttgcgcctggtgctgctactatgtacactgcacagcagcacacgcccgcgcagacatccagggctccgtcgggggctgctcatggtggggcgctgtctgcagctaaggagttgctgcgcaacccaccaggttccatggcctcgccaggggggggcatgagacagtggcacgaagatgttgaccgtctcctcagcatgggacattctggttcggccaggcccaggcctcggtcattccagcgtcaacgcgaggtgtcgacatctgtgcgctcaccctcagtgaggggtgcacggactgacgacctgcgggcagaactcaacgccggtgtgcgggcgaagatgctcgaatctctctggagaaggtgtcacacccgggttttaggggcaccaagacccgggcacgaacataatcaccaggttgatccgcaagcgcccaatcatgatccgagggtcaagatccaaccggtatacacgctctga

SEQ ID NO: 9512 - DNA, 1284 bp, Zea mays
  Peptide Sequence Number=SeqID_52887
atgccgaccctcgacgacccaccacgagatccggatctccgatgcgccggctggaggtccccagcccgccgggcttcttccccttctgctcccaaggtcacgcctcctccgtcacatccgaggcccaccgatgaatctggctctcagcagcaagaatctgctaggggtgatgccggcggtccatacccggctgttgccaagacagcgtctgcggcttcccatgtcccaactagggatccggcggcagcggcaccagcgtcgggtggcgtcgcagcggtggaggaggccccagctagggcattcgtgcccccttcggacactgggggtgacacgtccagttccagccccccgcctgctccagaggacatggaggtggtgttcaggcgacgactccggtctagtgtcgagcaagaagctgcgccagtccccctcccccgtatgctgtctcgtgcccaccaggtccttagtgacactagggtagcaattttgcgggagtgggaggcgcttgaggctgagcaccagcgcctcagcgactggcgcacccaactggaggagcgcacccagacggcgtccttccagttcatctccgagcggtcccaactcgagcaggacaacaaggagtacaagagggacctccagaaggtgtgtgccagggagctggaggcgtcccggagggaaaagaaggtggccaggagggaggaggtcgtgtctcagcgggaggccctcacgacagagtatcaggccaagctgagcgccctggaccagactctagaagcccaggaggcccaccaggtcaaggctgtggagaggctacaaaagtgggagcaagagctcgagggcaaggccagcgacgccgccctcgtcgaggagaaccttaaggcgaaggagcgtccttggacaggcgggagacggacctcgccaagcgagagacggatctcgtcttcagggaagaaatgctcactcggcgaggcgagttgctggccgagcatgagctcgaggcagaggagaaagagaggaagctggaggagcagatccaccagttcaacgcagcgctggtggtgccggatcctcagggcccgcctggaggcagagggcggcaagctctgtcgggcggtggttgagtatgtcctgacgtgcttccggagccacgaccccgccatatctttggcgccggtgatcgctggttcggtagccgccacagaagacgctgctcgggagggtgtacaggacgtcgtggagctagtggccgagcgcttccagcgcgatcctgccgacgacctgtag

SEQ ID NO: 9513 - DNA, 231 bp, Zea mays
  Peptide Sequence Number=SeqID_52888
atggggaagcctgtcccgtcactcctcatgctcctcctcaaccgagtgaccgcacttgtacccaccataaccagaatgggagaccacgtctcaggtcgcgtgaggggatatgtctgtgggcaggttcactcaggattaataacattatgcaaaaagaaaactaagttaaggaataacttagggtttctgggtcatacggggcctttagtggtttatgcttatcactcctag

SEQ ID NO: 9514 - DNA, 375 bp, Zea mays
  Peptide Sequence Number=SeqID_52889
atggctcaccggagagcttggtccacgcgcgggggcgggcgatctaagtccggcgagggcgatcttgaccttccgctgaagttctgccgggtccgagggctgggaaagcttcacaagctaatggcgaagctaaccgagcggctggcgcggcttggaagtgactggagtgggctggccacggtggccgaggctctggcggcaatggcaggcggaaaagagctcgctggagctaaggaggggcgtctggctggcgaaagatttggagcccagaaatccggtctgtctctctgctcagacccgaggcaaatccagggttttgtcgtgtctagggctcgcgtcccaatgccatcttctggcatgcgacagaggggttag

SEQ ID NO: 9515 - DNA, 237 bp, Zea mays
  Peptide Sequence Number=SeqID_52890
atggtggtggccccctgggtgaagtaccttagccaagaatacgaccccatgttaacgtgggctgccagcacctaccgctccccctcttgcccatctttcaggggctcgactacggacggcgaatacgtggctccggcgaactccggcgacgaacggcacactccagcgaactccacgggctccggcgacgaacggcaaactccggcgatgaacggcaacgaacgacaacggcactag

SEQ ID NO: 9516 - DNA, 1563 bp, Zea mays
  Peptide Sequence Number=SeqID_52891
atggcgggtggcggcgagggggatcgcgtgggtgtcggggggagcccagcagttcgtggaccggagcaagtgacctgcgccaagtctccgcggcaggtgatcaatatcctcaactacgagggcggcgagatcgacatcatcctggctgaggtcgatcttccggtctccaagtgcttcaagatgctcaagtacattgcccggaacaaggacctgcgtcacatccccatcataatgatgtccaacagagacgaggtgtctgttgttgtcaagtgcttgcggcttggcgccgccgagtacctggtgaagccgctgcgcacgaatgagttgctgaacctttggacccatgtgtggcggcggagacggatgcttggtttgcccgagaaaaacttcttcaatgacaacttcgagttggtgctctcagaacctagcgatgccaataccaatagcaccaccctcctctcagacgagaccgacgataggcctaaaggaaacacgaatcaagaaacaggcacctcaaagcaacttgaatacgagtctaatccttcggttgctgagcccgaccagagagaaaagatggagggtgttccaggctctgccctagatgccagtaaaaaatcctctccaagaagagcgttttcacgccctataaaaactaacctgagggttgccgagtcgtctgcatttctagcatatgtcaagccaagcaccccagccaccagctcatttgacagcgaattacaaaggggtggcagccgattagattccttggataaccagggtaattgctctagcgcaaccgatagaagtgacactggtactgatgtaaatattcggagtaaagaagcttttgagatgcctgcgcagtaccctatggtatggttttcttcctctaacatgcatatggagcgaagcagcgaaggccataatgatacttcaggaactccacctgcataccatttcccattttattacccagggatggtagagcacaacatggcactttcgtcggcgcaagattttcaagcaaacataaacaatgctcaagcacatacaccgccagcgatgcttcctcagtacaatgtttatcctcagtgccatggtttacctgtgataccatcatttcagtttaatccttctggcatgagtacgcactcaagtcatttaccaacgcaaaatgtgtggtcatcggcatcgagcacaccaccagtgcctgaggaaacatgcagtcgctctgaaaggagggctgcagcacttgccaagttcaggctgaagaggaaagagcgctgctttgacaagaaggtgaggtatgtgaaccggaagaaactcgctgaaacgaggccaagggtgcgaggtcagtttgttagacagccaaccaatacggatgtcatcagcattggagatgatatatctgaagacgaagatgacgatccatcgtccagggaggataatcttttgagaaaaacagggctattattgtacattcctcctattattccttattccatgtgtcttttagatgaccaaggatccatttctggaggaatggggaactacgttgattaa

SEQ ID NO: 9517 - DNA, 1464 bp, Zea mays
  Peptide Sequence Number=SeqID_52892
atggctgctatcggagcaatcggagaggcagtagtcacatgcggtcatggagtcctgcatggcgctggggttatcgagcccggagaaatcccaaccagagtcgggctcgtcatcttcctcagaacccagaggcccggcgccggcgccgtcgactcgctcgacagccgacgaggtgccgcctcctgcttggccatgcctgccccgcctcctcctccatcggcggggaaggtgacgggacagacccggatgttgctcttccgccacgtggggaagacgtcgtcgattctgccgccggtgggcgggctgatggccgccattgtcgctgtcgcgcggcgaagtaaggagtatcatgtcgtagctgccgtcgagggacatgaactcaagacttccgaaacgaagcatcgtcccgggttggagaggttgctggagactacccatctggagcttgacgggaagctattcgtcaacacgcagcaggcccctacctggtgtgccaactgtcggcgtttcgaccccggggggtccctggaccgacgagtaaattgtcgccgcgtgccccagcccagatgggtcggcgcgagacggaacacaaaggggggagaaacagcaaaggggaaactcgcggcctccgtgttgtcctgcgcccaagtcgggtgtgcttgcagtagggggttacaagcgtccgcgagggagagtgagagagagagagagactatccgccagcccgttctcccgcgcggccaaccttctcgtatgagagccctagaccttccttttataggcgtaaggagggcccaggtgtacaatggggggtgtagcaatgtgctaacgtgtctagctgagaggagtcagagccctaagtacatgccgtcgtggcagtcggagaggttttggcaccctgttcatgtgatgtcgtggccgtcggaggagcgcttgagctttgtggaacccgaggtcgggcgaggcggaggctcctccgaggtcgaggtcgagtctaggcccgagggtcgggcgaggcggagaccgttgtccaaggtcgaggctgagtccgagccctggggtcgagcgaggcggagtccgtcttccgaggtcgaagctgagttcgagccctggggtcgggcgaggcggagttcgtcttccaaggtcgaggttgagtccgagccctggggtcgggcgaggcacagtccgtcttccgaggtcgaggctgagtccgagccctggggtcgggcgaggcggagtccgtcgtccggcgtcgaggttgagcccgagccctggggtcgggcgaggcggagcttcctatggcgcccgaggctggacttagctgctgtcagcctcactctgtcgagtggcacagcaatcggagcggggcaggcggtgttgttttcccgtcaggtcggtcagtggagcggcgaagtgactgcggtcacttcgactctgtcgactgaggagcgcgcgtcaggataa

SEQ ID NO: 9518 - DNA, 318 bp, Zea mays
  Peptide Sequence Number=SeqID_52893
agcaagccaccacagtcacgacgtgaagcactccatgctagtagagtttctgcatcaataaaggtttccacagatattttcttaaagagcacaagatatccaaacaggaaggttgccttaggcagagtacttagccaggaccccaaaaccaaagttggagatgttgctttaggcaaagaattttggatggtgcgtgttagtctggtatctgtgcgcgatgaaccactaataaggccatataacaacttcaaggttcttggacaagtaggcaataatccaattgcatggccttcaagttgtattgaaaaggttaactga

SEQ ID NO: 9519 - DNA, 405 bp, Zea mays
  Peptide Sequence Number=SeqID_52894
atggaggaccttagtgttcaagatgacctgacttatgctgagtaccctatcaaaattcttgatactttgacttgggtcacgagaaataaggcttttctgtgggatcacgggggtgcaaggagcctaccccaaccaccaattcggctgacggtccatcggtgctccaccaatttctcaccgtcgctcctcatccgccacgggtcgtgccatgctgtgaccggggatctccgtgccttgatatctggtatggggtactctatagcatttgcattatcttgtacactgcgtatttctaatcgacaatggggtttgagctccgtggctgtgggcgccttgctcaccggcaagctctgccgtggaggccagtggcgccgccgcgtcctgaggattaggttggaggcctag

SEQ ID NO: 9520 - DNA, 621 bp, Zea mays
  Peptide Sequence Number=SeqID_52895
atgaggacaaggctcaagaagaagaggatgaagatcaagacgatgagccacctcaagaggaagacattgatcaagggggagatgaagatgatcgagatagggaagatgatcaagagatacgggatcaaagaccgccacacccaagagcccaccaagcaattcaaagagattaccccgtcaactccatactcgatgacattcacaagggggatagaggatgcactaagagatctggattgggtggtggcaatgcaagaggagctcaacaacttcacaaggaatgaggtacctgtgacggaacctcccaaggtattaggcccacctacagttgtccttgtcctaaggaccttggacaaccctgtagatgcacataatcactcgacaagttcggtgggaggcaaacatcctccctcgaccaacttcactgttggggctcttccttgggtaccacatttgaatagaaacaacaaaactctgttgtttcctcacctacaacaacatgggttcgaaaaccctgagtacagagtgtacttttgcaagtcttacccaacaaaagaaaaagactctcaaggatatgctggcttgagggagtcaaggttaagtaaagttacctgcatctag

SEQ ID NO: 9521 - DNA, 408 bp, Zea mays
  Peptide Sequence Number=SeqID_52896
atggcaatagctctgttcatctcgcctctcacgggcactgtgcggggggcccgttacaatgggtcggatcacacgtgggcctccgagctggacggggtcgcacggtgggatgacctcgtcgcaggccttcgtctgatgtcgtatggggcgaagggtgtccctgcccgttttatctctgttggaccaacgactgcagcgaagggtggcgtctttgccttcgccccaacaggtggaacaacttcgatgccatcacggactcgcgcacatgatggtgcggggacatcccgcggaagggaggatactcccaacccgccaccagtaccaccgacttcggccgaggctatcgctgccctagtcaatgccaccgctgataatacacgcttcttgcacgaaatggcgggcaattag

SEQ ID NO: 9522 - DNA, 180 bp, Zea mays
  Peptide Sequence Number=SeqID_52897
atggagccccctggacgatggatggagagccctctgttgtgcccctcgcggatgaaggaaaagtggtggggagaaactcaagtccacgatagtaactccggcgaccctaagccgggcacgaggttgcgcgctcacgacaagcccacgcaggttatctccggcaaggatttgcattcttaa

SEQ ID NO: 9523 - DNA, 501 bp, Zea mays
  Peptide Sequence Number=SeqID_52898
atggtcagcagtaacggctatatcaacggctatattgcatttaatgcgtcgtcagatgtcagacaaaggcagtcgcagacggttcggtcgtgcaccccggacggaaaaggtgtaagcctatttccctttcacactgctaacccgtgtcggtccattggaggaggtgcagtgcgtccagctcttcatgagcggcctcctaccgccgctcagccacgcggtacacatccacaatccgcattcgcttcctgcggcaatgagtctggcgcgctaagtggagctgatggagcttggcaagggggcctcgatccctgccagggccgcaccgtgtgctctgctgcccgttccgacgcccagtcacctgccagcggccccccaaaccctggcccttgcagcgccgccaccagtaggtgctgcggcgggcgcagcccgagcttggggctagggcaggctcctgtcaccggaagagatggcggaacgacgccgtcaggggttgtgctttaa

SEQ ID NO: 9524 - DNA, 798 bp, Zea mays
  Peptide Sequence Number=SeqID_52899
atgtcttctcgctcccttatgcaccgcgtctttcctccttccaagcccccgggtgggggatgcccgccgtctttttgccccatcgttggagggacgcaactccgtgggagttggtacctttcagccatcgttcggcttcaaggattttcatcactcagcccggttgcccctctccgctggtggtcaccccaagacggtgacctccaagctcctggatggggagaggcaaaaccgggctgcgatcttggtcccacccttagcttcaaggatgttcatcatcctcgctggggtgggtgccgggctgagccggcgctctacctcccgcgcgggttcgtgggtcatcctctcccgcggcattcgagggagagggcgctcactgaccctgcgggcggcccggacttcgacaacgcggggctggtcgacggcaagcgtcgtcacctccagcgtgtcgggttcgtcggcttggctcccggcggccccttctgcaggagggcggctgccgcgccgtgccggtgccccactcgtccgggaggatttgagtggggatctgccggggggccgatggcccctgccgttggtgccgaggcggaggcggctcgagaagtccccgtcaccgacgggatcaccgccaccatccgcgcttcgggcctccggttcttcgtacttgtcctcgcccctcgagcatcggagtccctcggctcggtcggccttgctgtccgaggctcctctagcttagttaaagagacccctcggccgctcttcgatgagccgaggccaggggtagcgatatcagtatga

SEQ ID NO: 9525 - DNA, 972 bp, Zea mays
  Peptide Sequence Number=SeqID_52900
atggcggaaccaataccgcgactcgaagcgacccagcgcgcgacccagcagcgccagcctgacgcggcggccaacgcggccaaaagtgggccggcagtaatgacggtggcaggcgcgtgggagcagcggtcacgtcgtcagccaagctcacgtcccatccgggggcagcaagagagccccctctcacggcgtgaagacaacgcgcccgagatccgttcctcgaacggctcgcgcacgcgcaacggctgccccgccaactactcgccccgtcgcattaactccgcggctggacgggcggcgctcctggcaggagcagcgggcgacgcttcgccttcaccggactgggaaaggaggacaccccgaaaaggatccttccctgtgaaggaaccgggctccgagccccccccccctactgatcagaggttcgaaggctggccctccgaggggttcaacagtcgcctcagatcgcgtgggccctacacccactactggtcagaggttcgaaggccggccccccgaagggctccacggccgcctcaggctactcgggctccgcgcccattactgatcaggggttcgaaggctggcccccgaagggttcacagtcgcctcagacgccgagcgagggatgaccaggggtacgttcgatacataaccaaggctcgggctgcgctcccgagctcaccggagacaccatgttcggtgcccatcgagggtaacatggcgctctcccccctcctccttgcggaaaggcgacgtaggggcgtatgtaaaaaagccgagtctatccctgatcgccctctcgccctgtgcggaggctcgggggctgctctcgcaaacccggctccggccgaaccgttgacagcgtcaacataccagcccgagaacttgggccccgaccgtgcacccgggctacggccagttcgcatgagggaaccaccagaccagccgaagcattacgcgaggcattaa

SEQ ID NO: 9526 - DNA, 822 bp, Zea mays
  Peptide Sequence Number=SeqID_52901
atgacttcccacggatcctccgatgacggaaatgcactgacccacactgacggacttgcacgagagggatttccctgcatcttgtgggaggtacttcagggggccggatatttgacaccccctcagtacgcggtgcagcagttcgagaagcaccgggtgcctcgctgtagggtgaggatgaccttggaacctcatcccctgcagccaggctggcgctccttggactctgagtctctcgggtaccgagcggaggacacaatcgagacaatcgctctgcacggactgactaccttctgtggattccatcccctggagctggctacccaccccatggggttgttccccgcagaaaaggaggacgacccgatgtggagggatcgggtggagcatgccaaggacatctgggctctttacccaggccacactgcgcacttgacagtacggtgcatgaatgctctgtaccgtctgcaggtgatgcgtggtgaggccatgtctcatttgatggcactactggaggccaccaagatcaccctggacaacagggaggagctcgtgctgtctggtgaggttcatgagttggaggagctagtgggcacccgggaaaacaccatcgagattctcgaggatcagctcctcaacactcagcagcagctggcagaagcaaatgagcacctagacatgcatcaccaagagatccatggtgaggaggctgacgaggacgttgacatcgagggaggagacgagtctgcttccagtgtagacaccgctggctcaggaagaccaccttcccccgagtctagcgttgcctcgttcgctcactag

SEQ ID NO: 9527 - DNA, 633 bp, Zea mays
  Peptide Sequence Number=SeqID_52902
atgaatgctgtggtaacttcacaactacttgtcagtttatatagtgctgcaggtaagaaggcgaagcggcggaattgttacaccaggcgcgcagtaacttgtacccgctgcgcagtggaccgcaaggatcaaacagtaactctgcaaggtgggaccgacacgcgctcggaagtcggatcgtttctccgcaacgagctcagggaaggtgttttttggaccttcggcttcccgaagctgaagaggcttttttcacgggtcaagctcgttacgaaaaacgatctagcaccgcgaaaggggctactgttggggtcgtgcttcggtgcgccgaaggtctcacacgaagaagcagcttcggctgaagtcgtctccaagagatggccgaagggcgtatcatcccttggaactcacacatgtgagatagccctaggtgccaggaggagcgagtccgcggccgcccaacccctctgccaccatagaccggctagcagaaccatccccaaccccgtcctgccctcggagaagcttgtgcacacctccgtgaggctccccgagcaaggaatcggagttcccttcgccggagaggccagtccgcgctcgccggagttctcacccccgccggagcacgtggaccgg

SEQ ID NO: 9528 - DNA, 420 bp, Zea mays
  Peptide Sequence Number=SeqID_52903
atggtgacctccagtttgatggtgggggaaagcgagccgggctgcggcctctgcccctccctcagcctcaaggattttcatcaccagggctggagaggggacgtgcctggctctcggacgcgagcggcttcggagccgctcccggcgccggcgtctgccacggcagctggaagaggtttttccgccgacgagcctgccggtggcatccgcggaccgacctccaactctacggccttctgccggtccttgcctcacgagtttgggcacgggcgggggcctcctagcagcagcatccgccctgaggtcatcgctgctgctgttcggcccccggggcagaagtcttcatcgtcgccgctgctggggcgggcgacggcgagccgttcgtcggtcttctgttactccgcagcccccccccactga

SEQ ID NO: 9529 - DNA, 471 bp, Zea mays
  Peptide Sequence Number=SeqID_52904
atggtcgccttccaagggggtcaccctccttttaaaggcggctctccctacttgcatccccagccgtcacgggctgagtcttctccaacacactccaaggtcctcccctacggcgcgggggctgggtccacacgtcatgcaagccgactcagagcagaagaagccaaaccgccgcgcgcgggaccgggaaagcggaataccccgaaaaggatccttccccgtgaaggaaccaggctccgagcccccctactgatcagaggttcgaaggctggccccccggaagggttcgacagccgcctcagatcgcgtgggccctacacccactactggtcagaggttcgaaggccggcccctcggaagggttccacggccgcctcaggctactcgggctccgcgcccattactgatcaggggttcgaaggctggcccccgaagggttcacagccgcctcagacgccgagcgagggatga

SEQ ID NO: 9530 - DNA, 531 bp, Zea mays
  Peptide Sequence Number=SeqID_52905
atgccggcggcatgcaactgcaccaagggggcgcaccctcttgactttgacgcgtccagcatggaggcccaggcccacacgtcatgtaaccggcgcgccggttactacgtgcgagaaactgcaccgccactcgtgccagtaccgtgccttctcgactgcggaaccggtgccgcgactcgaggcgaccctgcgcatggcccaacagtgccaaccgagcacatcggtcacggggcaggcggcacctttggcaggcgaagcaggcgacgcttcacctccgccataatgaccgcgtcaaaaaagggacccggaaaggggatactccgaaagggatccttctccgcgaaggaagcgggccccaagccccccctactgataagaggttcgaaggttggcccctcggaagggttcaacagccgcctcagagcactcgggctccgcgcccactactggtcagaggttcgagggctggcccctcggaagggttcaacggccgcctcaggccactcgggctccacgcccactactggttag

SEQ ID NO: 9531 - DNA, 597 bp, Zea mays
  Peptide Sequence Number=SeqID_52906
atgaacagtggcggttacgcgctagatggcaatagctctgttaatctggcctctcacgggcactgtgcgggggcccgtaacacgcggcggccacgcagggcccgttacaatgggccggatcacacgtgggcctctgagctggacgaggccgcactgtgggatgacgtcgtcgcaggtcttcgtctggtgccgaatcggcgaagggtgtccttgcccgttttgtctctgtcagaccagcggctgcagcgaaggcttcgagcgaagggtggcgtctttgccttcgccccaacaatagcgttggactatgtccatacgtctaaaaatctggcagctcaatttactaaggggctatcacgtagtgtgatagatagtgcctcgaattatagaattgatgaagccaaccttcatcagaaacaactagcgaacccgaaaggaaaaaccatggaacttcgcctgtgtataagcatagcgaaggtgcgtaccgaagcagacaacttcgacgctgaaggaattcgtgtacgaagcaaagaagaggaagacttagaagacttgttcagtacgaaaggagaaagaggaaagacgacattgcccctgtaa

SEQ ID NO: 9532 - DNA, 496 bp, Zea mays
  Peptide Sequence Number=SeqID_52907
atggatagtgccaccccggcagccgagagggatccgccggcgggaggggggagctcctggcagggtgggggatccgccagcgggaggggggagctcatggctgcgttggagatccgtcgacaggaggggggcggagctcctggcggggtggtggagttgctggcaccgtggtccgtgatgggagctaacggagctcctggcggggaggtggaggggggccttctccggtccagaaccttcgcgagcatcgcagaacgaagatgggcgtcgttggcaaacttcatcgcccctacgcacgcgcggacgtctgaccgccacacgctgacggtcaggctcgtcaggcaggaccctagcccctgcgtcagggtcgtggaccctgcgcagagagtacctaattcctctgagggaggcatgatagagaaacttagggatctcgacaagttaggacaagggtttacatcagtcgatcctttggaggagatcgacatagaagatg

SEQ ID NO: 9533 - DNA, 234 bp, Zea mays
  Peptide Sequence Number=SeqID_52908
atgggaggcaagtccttatcattgcctgctcctgtgtttgccccatcagcaggaaccgccaccacgaggaaagaacaagctgcattcaagtccttaccgcaacctgcatacatgtcgtcgccgcaagagaggagcaagtgggagctagtatgggcgtgttggtttacgggttctcttggagatgctctaagaatgatattgttagaggaggcggtatggacgggtaacgaatga

SEQ ID NO: 9534 - DNA, 237 bp, Zea mays
  Peptide Sequence Number=SeqID_52909
atggtccatcgctttgggcgctgcgaggaggccggcaccggtggcccagcaatgagggaggtggctgcgctgctccacctcgacatgcagcaaatgtcatcgtcatccgacctcgagcagcagacaggggaggcacacggatccggcagcggcgattcagcgcctaatggtcgcacaatgcgccagggacgcggacgcgatctacgcgatgctcgcgtcgacccggtcgctcgctga

SEQ ID NO: 9535 - DNA, 606 bp, Zea mays
  Peptide Sequence Number=SeqID_52910
atgaggaaagttatgaagaaaatatttgtagggacttcaaaaatgattctgaaggattctatcgatgagtattaccatcatacagaggaggaagccaaagactatgaaccatgtacaacagtcttcaacacaagaatcaccaagcattgtgatcttaggggcgagggagtgggaaatggggttgcatgcgattatgacagaggggatttatttggagtgtggtttgctttgagcgagatgggagttgagggagctggtgggggtggtttttataggcgagtggcattgatggtggtgctcgggtgcggagtggcggtgatggagcaggtgacacgaggcagcagggctctagccaaagtggagaaaaacttcactacccaatgcatgcagaggactgggcatactaactcagatctggctgagagttctagtgctacccctgctgcccgtccagctattgaccctgctattgcttcgattctccagtctctcactcagcagcaggctcacctggcatccgagcggacccggttatccgagaggatgctctcgatgtttcagaccatacaggataggcaggattcgcttcagcagcagctactctag

SEQ ID NO: 9536 - DNA, 1577 bp, Zea mays
  Peptide Sequence Number=SeqID_52911
tccagtgtgcaccggacactgcactgtgcaatgtccggtgcaccggcagccgcgcgctaaaatttcctttcctctgtgcgctgtccggtggttcaccggacagctactgtgcgctgtccgtgaccttgattgcccgtgtgccgtatcctgtcctgcctggattgtcacctctcgtgtcaggatgccgcgcacgaagaatgtgtcggcgccagggggaggcgatgatgaggatcctcgtcgccccttcaggcaggtcaagggcaagacagtacacttggagcagcaggaaggccgcaagaagcggcgtatggacagagcagcccgtgcagcagcagcagcagcagccgctgcgtaggccgagcttggagatcagccacagactccgtccgatcagattgcataccgtgttcgtcgtctcgcctctcggcctcgctcctccactcacaccactgcttccactccaccacccactctgcctgctcccgtcacccctgttgcgccatccaccaccacagccatacccgctacctccactacaccagcttccactgctcctcctcccactcccgcttcagctcctcctatccctccacctcgattccgggagcgcgatgagactgaggtatgaccacttgctgcggatcccagactttttgaccttcagcgtgctacagcggcacggcacccgtattcaggagtcctttttcagagcacagatgtctgcacatattgctttgcgagtgcaccggcttttggatcttccagcttttctgcttaccgccggtgctgactctaaggtgcacctcacatatctgcctggccttctgactctgttgactaccagcggtaggtatgttgaggagtgggtccgagttttctacgctactgtatggatagacccagatcatcactggatgaggtttcgttttgagcgagaggatgtcaccattactgccagtctgattcgccagctctttggatttcccgagtcgtcgactcgacttcacagcttatgctacggcacctctgaccctcctcgtcgccctcacggcggtgtggctccgggtacagctcatgtcacggctctgttccgcccgcccttctcagatgggtcgcgacgttcaccggcagattttactacagcagccaagtacttatttgagcttatcagacggacccttctgccgaggatgggatacagggaggctaccacacatatccagctctggctccttggtgccctggtctctcactctgagtttgacgtcgtggatttccttatttgtgagatcgaggacaccgttttggatggcattcgtgctcgtcgacagtttccatatgctcactacttgtgccacatctttgcgcagttgattcggcctccacagtttcagggcacacttgaggcctcacgccttgtctttgggtcctaccgtcctgcgcctgaggctcctgtgccagcttctgctccagtttttgactctcaggccgaggatgctgctcttcgacagttcgaagctcaggacgcagcagttgatgatgatgaagcgtcccaatcctctgggactcaaatgtga

SEQ ID NO: 9537 - DNA, 441 bp, Zea mays
  Peptide Sequence Number=SeqID_52912
atggcgggggcgcggatttcgcgcgatccgttgtggcatcccggccacgtccgcgcccttataggtagcaggaccgggcttacctctccctcttgccttcctactcttgcgaccgccaccgtagtggagatagagtcgggagcgaaacagagagtgggggagattgcccctcgcggccgccggcggtggaacccttacctcgcccacgccgcgtccctggtttgcttcctgagtgcatcgctgagacattgggaagacgctcgtgcccccgggaaagagaaggtggccgtgggctgtgggaaattgctcaccggagtccgagggttaccgccgagccgcctgagcgtgttggcagggccgtcaccgcttcataccgagtggcgcggagttgattcgcgactcattaaatccgggccgttcaccggtgatccaacgacttag

SEQ ID NO: 9538 - DNA, 1056 bp, Zea mays
  Peptide Sequence Number=SeqID_52913
atgtggaaccgccgtgggaagaagccggtggtggagactagagacgaccctgcgccggcggccaccccatcctctaaaaagaggaaattaggtactgctatgggaggacttggggtttccgatggtttttctagagagttgatgaggacatgcgcggccccggggggaaggatgtcttcgcccgagctccgggagtcttcggctcggatgctgagggttaccgggggttgttggcctaggaatgttcctatcccctgcgcggctggcgaggacttttttacatctcgcatggccgaagaggcagcgggggctgcgaaggctacggccaccgtcggaggcaagccgccgctggcggcgaagtcgggtgtccctgtgtctagcaaaatgccggaggcaacggcaggcgccggaggctccaaatcgacaaaggctgtgccgccgtccagcagagtgccggaggtcgcgaaggcggcccgagcgttgccgtcggcaggcaagcgtgtcgccgacttcgccaccgatattagtgtggaggactatcttggtgtgccgaaggcgaagggcggggctcttagcgccggaggcgaggtgttggccctcgcggctgtcagggatgaggcgggcgctgcgtcccgccggctgaaggaggtgacggaggcgctaagtcaggtggctgacttcgccaaccgcacagcgtcgggggccctcacggcagttgtgtctgccgaagtcgagagacttcggacacaacatgctgacgccgtccgtgaaaaatcggccgccgacagcaagtgccgcaagctggcggacaaggtggccgcgctggagggagagaaggctgacctccggcgccaattggcgggggagaggagggagaccaacgaggccctcgtcaaggcgcaggctgcgcaggcggaggctaatctggcacgggcggagggcaatcttgccagggagcgcgccgagcagctgcaggagcggctcatcgccctggagagccgcgtggagagggccgaggccgcgacgcgcgcggaggccgaacggacgcgcaaatag

SEQ ID NO: 9539 - DNA, 321 bp, Zea mays
  Peptide Sequence Number=SeqID_52914
atggagagttatattatgttgatgcatcaggtccaggcaggttcaaccggggtgcaggacaagttcaatcgggtccagggaggttcaactggggtccatgacaagttcaaccggggtccagggcaagttcaacttgggtccaggctcagctacatcagtgggctttgcctgaaagcccatgtaaaaacacatcaaaatctgacgcctatactatcttcgtgcactagtactttagtatcataccagaagttcaagggacaattcactcaacttgacaggtggactattggtgcatctattgagaagctggaaaaaggatga

SEQ ID NO: 9540 - DNA, 297 bp, Zea mays
  Peptide Sequence Number=SeqID_52915
atgcgcggaccgttcgcttgctcaaaatggtgcccaacaggtagccaatttggtttctcatggcttgctccagtgccagatgtcgaagtgacattaccagctcatgtctccactgttgtcaagggcaccccaagctatcttgatcaggaatacttcctaactcacaaatttactgacaagagtgatgtttacagtctgggtgtcatgttccttgaaatgttaactggtatgaaaccaattgagcatggtacaacacatagtgagagagatgttgtacatgaaatacggtggaaataa

SEQ ID NO: 9541 - DNA, 303 bp, Zea mays
  Peptide Sequence Number=SeqID_52916
atgcccaagggcttcggtcccaagacctccaggtgggcgacttggtgcttcgactacgacaagacgcccgagggcggcacaagctcacgcctccctaggaagggccgttcgtcatcgccaagtctaaccatcaaggaagggtcagccttgcctcggcaaagcccgaccctccctcgggggctagaaggggcgaaccccctccgcgtcaaaattttcctcggaaaaagtctttcttccagaatttctttcgtgcttttcgactacttcggtagtgggatcatgaaaacgatggagtacacgtaa

SEQ ID NO: 9542 - DNA, 801 bp, Zea mays
  Peptide Sequence Number=SeqID_52917
atgcaggtggcatgcaaccgcaccaagggggcgcaccctttcgacttcgacgcgtccagcatggaggcccaggcccacacgtcatgcgggcggaagcagcagtcaagtcatcagcaagctcacgccccctcctgggacagcgagagaaccctctcccacggcgttaagacgacacgcccgtgttccgttcctcgaacggctcgtgcacgcacaacggctgccccgcgaaccactcgtcccgtcgcattaactctgcggcaggacaggcggcacctttggcaggcgaagcaggcgacgcttcacctccgccataatgaccgcgtcaaaaaagggatcgggaaaggggatactccgaaagggatccttctccgcgaaggaagcgggccccgagctcccctactgatcagaggttcgaaggttggcccctcggaagggttcaacagccgcctcagagtactcgggctccgcgcccactactggtcagaggttcgaaggctcgcccctcggaagggttcaacggtcgcctcaggccactcgggctccgcgcccactactgatcaggagttcgtaggctggcccccgaagggttcgacagccgcctcagagcacgcagagcgagggatgaccctggcctcagcctcggaagacggtctccgcctcgcccgacccagggctcggactcaatctcgacctcggaagacggactccgcctcgcccgaccccaggggtcggactcagcctcgatctcggaagacgaactcgacctcgacctcggaggagcctccacctcgcctgacctag

SEQ ID NO: 9543 - DNA, 477 bp, Zea mays
  Peptide Sequence Number=SeqID_52918
atggctaccgcccgggggatcgatccctttttaaaggtggctctccccactcgcatcctcaagcgtcacgggcaaagtcttcaccaacgtgctccggggtcctccccctacgacacgggggctgggtcccgcacgtcatgcaagctgacccgaaacggaataagccaaaccactgcgcgcgaagcaggcgaaagggcggaccgccatgcaggagtcatgcaaccgcaccacggttgtgcaccctttcggcttcatcgcatccggtgggtcagcgtgaaggccttggtccacacgtcatgtaaccggcgtgccagttactacgtgcaagaaaccacaccgccacttgcgctaataccgcgtcttctcgactacggaaccagtaccgcgactcgaggcaaccctgcgcacggcccaacagtgccaatcgagcacaacgatcacgggccagtcagccgtgggagaaggcgcgacggttga

SEQ ID NO: 9544 - DNA, 555 bp, Zea mays
  Peptide Sequence Number=SeqID_52919
atggctggtaaccaccatcagtacaagctgcagagactgatgggcaccattcaggtcaaggcttcgtctacccaaggggcgcaatatcgcctcgcccgagcccagcctcgggcgggaactgtagccccggatgaagttacgtctcgcccgagtgcctcctcaggcagtgggcgcaccctaggcacgcccgaggcccaactcgagcaggcttcgtcgagaagcaaccttggccaaatcgcctctccaaccgaccgaaaacagctccgctccgactactgtgccacccaccaggatgaggctgacaacagccaagttcagcctcaggcgcaacaggaagctctgcctcgcccgaccctagggctcggcctcaacctcggcctcggaaggcggtctccgcctcgcccgaccccagggctcggcctcaaccttggcctcggaaggtggtctccgcctcgcccgacctcagggctcggccttgggagaagtctccgcctcgcccgaccttgggctcggaccgaccgcgccatgggggatacatcattaccctacccctag

SEQ ID NO: 9545 - DNA, 435 bp, Zea mays
  Peptide Sequence Number=SeqID_52920
atgtcggacgaccttgttgttcctgtccactttgaagttggccaagaattttgctttcgcctcctggatcatccgctccttgtgctcctcaaactggagctgctcgtcagccggcaagtatgtgttgtccccagcggagtcgccaaaaagtatgttgacgcctttccggagcgtcaaacactcaacaagaaccgtggcggtgccctctgcacaggggcggacggtccacggcctggtgcgaggcgcggtggtactctctgcgcaggggcggactatccgcggcctggggccggacggtccacggcctggtgcgcggctagggcttctctgtctgacgaccggacggtccgcgcgtacgcaggggcggcggaagtcgccggcggcggcctggatctcgctcccgggagggaccccgtcggggaggagagatcctag

SEQ ID NO: 9546 - DNA, 255 bp, Zea mays
  Peptide Sequence Number=SeqID_52921
atgcaggcggcatacaaccgcgccaagtgggcgcacttcttcgactcccaacacgcccagcatggaggcccaggcccacgcgtcaggcaaccggcgcaccgaatgcttcgtgcatgcaactgcactgccacttgcgccaccaccgcgcctcctcgattgcggaaccaataccgcgactcgagggaccgggaaagggggataccccgaaaaggatccttccccgtgaaggaaccaggctctgagcctccctactga

SEQ ID NO: 9547 - DNA, 333 bp, Zea mays
  Peptide Sequence Number=SeqID_52922
atgaggatcaagctcaagataatgaagaagaagatcaagaagatgagccacctcaagaggaggacaatgatcaagggggagatgacaatgatcaagacaaggaagatggtcaagaagtatagggtcaaagaccaccacacccaagagttcaccaagcgattcaaagagatcaccccatcaactccattcttggtgatattcataagggggatggaggatgcactaagagattcggattgggtgttggcaatgcaagaggagctcaacaacttcacgaggaatgaggaaccaagtgggtattccgcaacaagcaagatgagcatggtgtggtga

SEQ ID NO: 9548 - DNA, 1089 bp, Zea mays
  Peptide Sequence Number=SeqID_52923
atgctggcctcgctgccgaccctcgatgagagcggcgtgacggttcgtcagatcagtggccgggaccctcaccgcgggattcggatccctggtgcatcggctggaggcctccagcctgccggcgtggctcccagtgccaccaccggagcttccagcgactccaccgtggctccccgccccttggataagggcaaaggggccgcaagcagctcctccgcccgaggcggcgccggggagtcggaggaagagaggtggcgctggctgcgccgcgccaacgggtcgtttgttttggacccccccagtgggaccgaggaggtcggctcccagaagcgtcagaaggtcgttggcagggccgaagagactggctcgcaagcccagggcgtcaacaacaacaacaatagcagcagcagcagcccgcttccaaggccgttggaagggcttcctttccctctgctcctaaggtcgtgcctcccccgcctccggctgctgccaccgaaacagcgccaccgggccccaggctccagctgggggtccggcagcagcggtgccaacgccaagcggtgccgcagcggcagaggaggtccccattgctccgacggctgccacagcctcaacgacggcgatgacgtcgactccatctcgccgcccactttggaggagacggaggtgatttttgggcagcggctcaggtccggcgccaagccagaagcggcgccgctggaggagcgcaccaaggcagcgtcccgccagttcgccttcgaacggtccgagcttgagcagggccgcaaggactacaggaaagacctccagaaggtgttcgcccgggagctaaaggtggcccggaaggagaagaaggtggccaagaaggaggagaaggacctcgcctttagggaggagatgttcgaaaggcgggagaagctgctggccgatcatgagctcgaggcggaggagaaggagcgggcgctggaagagcgggtccgccagttccgtgtggcgcaggcggcacaggcagcaccgggcgcccaggcggtggaggtaatgaagaagacgcttgaagatctccaggcggagcagcgcgccagggtctag

SEQ ID NO: 9549 - DNA, 144 bp, Zea mays
  Peptide Sequence Number=SeqID_52924
atggggtccaggcacaatgcttgctctgccgaggctgagtgccgagatgatgatgatgatggttatgactatggtaatggtaaagaagaaggcgtcgaggtggatctccaggagttccaggacgttgatgagttcgaggattag

SEQ ID NO: 9550 - DNA, 1998 bp, Zea mays
  Peptide Sequence Number=SeqID_52925
atggtgtctccggtgagctgcaagcgggtgatccgagtggacgtccgtgccccgttcgttgggggtcggctaggggcccagaggcacgcccaaaagtacctacgggagatagagaaagaggaaaaaggaaaaggatacgaaatcgaacgacgtggcgtaccttttttgacgcggttattacggcgaaggcgaagcgtcgtccacttctcctgccagaggcgccgcctgtcccaccgcggagttaatgcgacggggcgagtggttggcggggtggccgtcgcgcgtgcgcgagccgttcgaggaacgggtcacgggcgcaccgtcttcacgccgtgggaggaggctctcttgctgtccctggatgggacgctggcgctgctgggtcgtgcgctgggtcgcctcgagtcgcggcataggccccgcaaccgaagaggtgtgacggtggcacaagtggcggtgcggttgcttgcatgcagcaactggcgcgctggttgcgcgacgcgtgggcctgggcctccaagccggcgtgtcagaagtcggagaagtgcgtccacctggcgcgattgcatgccgcctgcatggctgcccgccccttccgcccgttggtctgggcgaaagtggggaatcgcttgtaaccgctgggcggttgtgtgcaccgcgcacggcggtttggcttcttctgcttctgagccgggagagtcgcctttaaaaggagggcgacccctttcggaaggcaaccatgtcttcttcctcccttatgcgtcgtgtctttccatcttccaagcccccggatggggggtatccgccgtcttccctcctcctcgttggaggaacgcaactccgtgggagttggtacctttcagccatcgttcggcttcaaggattttcatcacgcagcccggccgcatccccccaccggcggtcacccaagatggtgacctccagtttggcggtgggggaaagcgagccaagctgcggcctttacccctcccttggcctcaaggattttcgtcatccaggccaagatggaggatgaggcgagtcggggggctgtccccgcatgggtcggctgcccttttcttcccccggcgcctggggagaaaggcatcctccagtctcacggggacttcctccagccatgccgggataggtaggccgccgttactcggctggggcgccggtagccctgggtctccgtctcccggcctgaatggctggttctcgtcctctgcgggtgagagcccccctgtcgtaacacctgcctcgaagctgctgccgaagccgcttcgccgcctggggcggggggtggttgtcgttgagtccctcggctcgatcgaccttgttgtccgaggctcctctagcttagttaaagggaccccttggccgctcttcgatgagccgaggccagggccgggttgcccgtcagcggggctgacgccggagtcgatcagccgaggcctcgggtcgggctggcgcccttggaagatgcttggccgaggccccaggggtaaccggccgagccgcctgctcgggccggattcccggagaagtccccggaccgcgtcgccgtccgaggctgggtcggacctcgctgaaggcgtcgtcgatgccgagggtgctacatcccccttcagcgtgaagacccgagcctgcaggatcagattgtcttgtagcgtgtgccttctgcggccgccgaggccagaaaacacaccctcgctccgttgtaaagccgcgtctcctttcctcttatttcgagcatctggactttccgttggtaacagggatgtttgtgtgggcgagagttgcttctcgcggaaggtgatgagtgagaaggtgatgagtgaggatccacttttcgaagtagtcaaaaagcacgaaagaaattctgctaaaaagatatcctttttcgaggaaaatttcgacgcagagggggtctccccccttttagccctcgagggagggtcgggctatgccgagccgaggccgacccttccttga

SEQ ID NO: 9551 - DNA, 3024 bp, Zea mays
  Peptide Sequence Number=SeqID_52926
atggccttggcgctgcaatggcccctccaattcccactccagctccaggcgcggcctcccgccgttaccgcgggccatcaccgtcgccgccaccgagtcctcgccgtctgccgctccccgccgctcccagctcgctgttgtgccagcgccgccgctgcggccgacacggggaaggcgcagacagcggcgaggagggcttacccattcgatgagatcgagccgaggtggcagcggcactgggaggagcaccgcacgttccgcaccctggacatcggcgaggggctcgacacctccaagcccaagtgctacatcctcgacatgttcccctaccccagtggggctgggttgcatgttgggcacccccttggatacacggcaactgacattctgtcaagattcaagcgcatgaaaggcttcaacgttttgcatccaatgggatgggatgcatttggtcttcctgctgagcagtatgctattcagacgggaacccaccctaagattaccactgaaagaaacattgagcgctttcgcacacagcttaaatcgttgggtttttcatatgattgggatcgtgaaatctccacgacagagccgggttattataaatggacacaatggattttccttcaactgttaaagagaggacttgcttatcagggttctgtttttatgttcttagtgttgcatttttggttttcaatgatttttaggctggcattgatatcttacaatcaggctgaggtacctgtcaattggtgccctgctcttggaactgtcctggcgaatgaagaagtagtagatggtgtgagcgaacgtggtggctatcctgttatacgaaagccaatgcgccagtggatgctaaggataacatcttatgctgatcgtcttcttgaagatttgaatgatcttgattggcccgagagtatcaaggaaatgcaaagaaactggatagggagatcaaaaggtgctgagcttattttttctgcagttgaccaggaaggacatgacctgggtgccactttattggtttacacaacgaggcctgacacgatttttggtgcaacatatcttgttgtggcacctgagcatgttttactgtcatctctaacatctgaggaacaacgagcacataagtggcaggtagaggaatacagagaactttcagcaagaaagagtgaactagaaaggactgaacttcagaaggaaaaaactggggttttcagtggttcttatgctaagaacccagcaaccggggaaatcattccaatatgggtggcagattatgttctaggaagctatggcactggggctatcatggcagtgcctgcacatgattctcgcgaccatgaatttgctgtgaaatatgaacttccaatcattaaggttgtaagtccaccgaatggtaattgtgatccagtggaggcatatgaagatgatggcatcatgattaattcatctagttcttcatctggactgaatattaacggaatgctttcccaagatgctgctaagaaagttactgagtggatagagaataatggttttggaaagaaaaaggtaaactacaagcttcgagattggctttttgccagacagcgctattggggtgaacctttccctgtgagctaccttgatgataccaatgaaatggttcctcttacagaagatgacttgcccttgacccttcctgaattggatgatttcactccaactgaggagtttgaatatgggtgtggggaatgggttagaaccattgacccttcatctgggaagcctgcgagaagagaaacaagcaccatgccacaatgggctggatcttgctggtactatttgaggttcatggatcccaaaaactgcagtatattggttgataaggctaaagaaaggtattggggtccagttgacatctacgttggtggtgctgaacattctgtcttgcacttgctttatgcaagattttggcacaaggttctttatgacatgggtgtagtctccactaaagagcccttcaagtgcctgataaatcaaggattgatactaggagaaattgagtatactgcatatagagacaatgaaggcagatgggtttctgcagactcagactcaagtttgattgattgctaccaagaaaaagtagctccagacaaggttacaaaagttggagatcattatgttctgaaggataatccaaacattcgtctgaatgctcgtgcctacaagatgagtaaaagtcgagggaatgtcatcaaccctgatgatgttgtttcagaatatggcgctgattctcttcgcttgtacgaaatgttcatggggccattgagagattcaaagacatggagcactgggggaatcgaaggtgtgcaccgcttccttggacgaacgtggagactcatagttggtccacaattatctgatggatcatataatgatggaaccatgactaccgaagatgaaccaaccttggatcagcttcgagttcttcacagatgtattgcaaggtacgccctggccataacacgggtgtgttataacttccaagtacacaataagagaaaagcaggcccatcttataacattcaggtcacggaggaaattcaggaaacaagatttaacactgcaatatctgcaatgatggagtttgtgaatgctgcatacaagtgggaaacccagccaaaatctgttattgaatcctttgttctgctgctttcacccttcgcgccacacttggctgaggagctttggtttcgcctcggacatccacaatcattggcctatgaacagtttccagaggcaaaaagtgagtacctggaggaatcaaagcttgtactccctgtccaaatcaatggaaagaccaggggtacaatccttgttgacaaagcgtgctctgaggatgatgtttttcaaattgcagcctcggatgagaaactctccaaatatcttgatgggaaaggcatcaggaagaaaatttatgtgcctggaaggatcttgaatgttatcttagatcaacaaaagtcaaggacctga

SEQ ID NO: 9552 - DNA, 375 bp, Zea mays
  Peptide Sequence Number=SeqID_52927
atggctcgtggtagatcggatttagtccgaatattcttttcaaacggttgtgaattttgtctgtcgtcccaccttaggttgagcacagagagtgggagggaaggccttcgaattcgccattcgttgatgtacacttgcacaatgtatgtgcacctgctgtcttataaaattgtcggccttggcccaagccaaggaccctttcgcttctctcagtctacgactaggcggcggcggcggccttcacgcacgagccttcgccgcctatacttgcgcttcgtcgagccggtgaattgtggtctaagaacaagagggaaggatctttctccagacttcgcaattttggacgacgagattcataaccataatcatgtttaa

SEQ ID NO: 9553 - DNA, 636 bp, Zea mays
  Peptide Sequence Number=SeqID_52928
atggctgatgtcgtatggtccgaagcatctgatgcgctcactctgagatttgatcttgaggatgatgcgctcgaccttcgtctggttgcgccgaataccttcattgcccttctacccaacgtggagctggctgatcggatgctcagtgagggtcagtccttctatgcacctcctctttggatgcacgtcaggaggtggccccgtcagttcatggcctccggtggaagggagatgcctatcctattggatattgagcttcgcggcctccctgttcacctctgggatatacattctactgggcagcttctcgttggacactgcctggttcatgagctgcttcctattcctgaggacgtttttgatttgtcttcattctggctacgtgtttggtgtgatgatccggataatctgccttcatctttggatctccatgtggaggagccacctgttcacgtggacgttgggccgacttccccacacacggtgacttatcctgtttcgatcctggttcctagacctaggagttcgccggaggtgcttccgcctcctccaccttcgccgccaccatcggacagtcaggatgaggattgtggccactttttcgggagtcagcagaggcgccatttcaactcctaa

SEQ ID NO: 9554 - DNA, 741 bp, Zea mays
  Peptide Sequence Number=SeqID_52929
atgcactgtttgatgtccggtgcaccggtatgggcagccctgacgtctgcgcgcgctgcgcgcgcatttaatgctgcgcagggagccgttggcgccgcaccagctccccctgttgcttcagttcctgagccggcggcgcctgtgtctcccccacatctagcattggaggaacctgttattgcgccatttattcctggtgctccggctgctgtgactgagaatatgtctgcttcagttatggtggactttcccctcgcggtgtcccagatttcaccagcttcaacgcctttgggtctccctggatttttcccggctccccctcaaccttggtattgcatgcctctgaaggtttattttagaaggggccagaggacgcaacagcatcagttggataccttggctgatcctcggtctgttcctaacagtatctcagacattggtttggttgctgaacctttgcgaacacctgacctggccacccttgttcaacctagttcttccttcagtaccatggttataaaggttgcggatcacattttgtcggctcctcttcctgtcagaccggggaacaataattcttcagctgcacctccacgccgtattaggcacattgctggtattggagttgaatttcagtttgcctttggtgatggtcagagcagattcaggaagaagccccttcccccgtctcatgtccaggcacttgctgccctctttggctggacagcccctgagctcgat

SEQ ID NO: 9555 - DNA, 1296 bp, Zea mays
  Peptide Sequence Number=SeqID_52930
atggccgacgagggaagcgaggccgaggcgctcgagaaagacggcggcaaggcttcttcaccttcggggccagactcggagacgacgccggcgcgggagcgggagtggaagccgctgtgcgacgtcacctcgaaccggcgcatcgactggtgcgagctggacggcgacgtccgcgtggtcggcgccaacgccagcgtgacgctggtggcgccgccgggcgcggacaaccggaccttccgcgcggagtcgtggcgcatcaagccgtacccgcgcaaggcggacccgaacgcgatgcgcttcgtgcgcgtgctgacggtgcggtcggtggcgtcgggctccggcgaggcggcgtgcacggacggcggcgacgacgacgtgccggcgctggtgttctcggaccgcgggtacacgggcaactacttccacgcgttcacggacgtgatcctgccgctgttcctgacggcgcggcggtacgcgggcgaggtgcggctgctggtggccgacctccagccgtggtgggtgggcaagttcctgcccgtgttcaggagcatctccaagtacgagctggtggacctggaccgcgacccgcgcgtgcgctgcttccgccacgtccaggtggggctcaccagccacgccgacttcagcatcgacccgcgccgcgcgcccaacggctactccatgctggacttcacccggttcatgcgcgccgcctacgggctcccgcgcggcgacgtcgtcgcggcggcgccggcgaggcggccgaggctgctggtggtggcgcgcgcgcggacgcggcggttcgtcaacacggaggagatcgtgcgcggcgccgaggccgtcgggttcgaggcggtggtgtcggaagggacgcacgaggtggcgcccttcgcggagctggccaacggctgcgacgccatcatgggcgtgcacggcgccgggctgaccaacatggtgttcctgcccacgggcggggtggtgatccaggtggtgccgctgggagggctggagttcgtggccggatacttccgaggcccgtccgtggacatggggctgcgctacctcgagtaccggatcgagccggaggagagcacgctggtggaccagtacccgcgcgaccaccccatcttcacggaccccaacgggatcaagagcaagggctgggagtccctcaaggacgcctacctcgacaagcaggacgtgaggctggacatggagaggttccggccgacgctccaggaggccatcgcgcacctcaggaaggccaaggccaaggccaatggcgacggaaacaactag

SEQ ID NO: 9556 - DNA, 297 bp, Zea mays
  Peptide Sequence Number=SeqID_52931
atgggctccaccatgcctagcgagcgcaagactgactacgcggagcttgccctagcagaggcaaagacaaaggcaaaagcaacccccagcagggcgatgcaagaatggaagaaacgccagaactcagaggctcactttatccaggcgcctgtagatgccacaactggagagcaccttaagttgcctcagcctgctgcacagtttgagcatgctgccataaatgtcgatgccacagctaagaacggtactccgttaggcaaagtcgacttcgatttcgacactgatgatctctcgtag

SEQ ID NO: 9557 - DNA, 1431 bp, Zea mays
  Peptide Sequence Number=SeqID_52932
atggcatgcgagaagaaacccgtcagtagttttaccgtcaggttggggttggcgcttcttgcaggatgcgttcttgtggcgatgatatcacttgccgcaatgttccggcatgacgcggttcctctgcagacattgagcttgttgttctcagtaggtccggtttcttcagtgatgtggggagaggaaagattaggctctcatcgtttcggcagaaacagagtgccggtgctgtgcgacttttcgagctcgaggtccgacgtgtgcgagctgagaggcgacgtccgcgtcctccccaacgctacgatcgtcctccaccatccgttggcgaggcgccagtcatggaggatgaagccgcacggcaggaagaacgaccggcacgcgctcgcccgcgtcactgaggtgacggtgactgtggcgacggcgtcggcgtcgccgcaccacacctccggcgccgccgccgctgctgctccccgatgcacggccaaccacaccgcccccgcggtcgtcttctccgtcggaggctacgcggggaacatgttccacgacctgaccgacgtcctcgtcccgctgttcatcaccgcgcgccggttcggcggcgacgtgcacctcctcgtcggcgacgcccagccgtggtggctggacaagttccggccgctgctcggcgggctctcccggcacgcggtggtggacatgagcagggggagcagcagcgggggcgtgctctgctacccgcacgtgatcctaggcctcgagttccacaaggagatgagcgtggacgccgcgaggaccgccggcggcggcgagtactccatggccgacttcacgctgctcgcccggcgatcctacggcctgcctcgggacaaggccatccgtgtccacggccgcggcggcggcggcgtccggcccaggctgctgctcatctcccggaagtcgacgcgggcgttcaccaacgccggctccatcgcgcgggccgccgcctcgctcgggtacgaggtggtggtgggcgagccggcgcggcacgcggacctggcgtcgttcgcgcgggtggtgaactcgtgcgacgtgctggtgggcgtgcacggcgccgggctggcgaacctggtgttcctccccgcgggggccgtggtggtgcaggtggtgccgctgggcgggctggacgccatggccgcggacgacttcggcgcgcccgcgcgcgacgcggggctccgctacgtgcactacggcatcgccgaggcggagagcacgctggcgacgcggtacccgcgcgaccaccgcgtgctgagggaccccgcggcggtgcggagcgaaggctggatggcgctgcgggccgcgtacctggtgggccagaacgtgacgatcgacgtccgccgcttcagtggcgccttgcgccgcgctatggagctcctgcgccagacccacgaccacgagtga

SEQ ID NO: 9558 - DNA, 657 bp, Zea mays
  Peptide Sequence Number=SeqID_52933
atggagcacgaaggggggaaacgaggagacgggcgtaaaggggaaacccgcggccttcgtgtttgtcctacgcccaggttgggtgcgcttgcagtagggggttacaacccaaccggcaacgcgcccagcgccagcgccgcggcggcccagctcccgcgccagcccagcgccgcgctcggctccctcccgcgcgcgcgcacgcgcctgcacccgctcggcccgccgcgccccagccaaattcccgcccgcgcgcgcgcaaggcggccagcccagctagcgccagcccagctggccgcgcgagccagcccccagctcgcccaggccgcagcccaggccgcgcgctcagccgcgcatagcgcgccctgctgcgctcgctcgcgtggaggacgcccgccgccgccgcccagctctgcgcccacgtcccgcgcgtatcgcgcgtgggtagttccacgtaggtcgctgttcatcttccaaaaacccgaaccgtccgtatccgtcgcgcagtttctcggccaccaacgcttttcctcgtctcgtctctgctctctgcgtccctgcaccgtcggagtgtcgccctcgctcgccgcactcgctgcgcagcgaatctcgccatcacaccgccgtcgagccctcgtcccgctgcggtcgtccgccgag

SEQ ID NO: 9559 - DNA, 972 bp, Zea mays
  Peptide Sequence Number=SeqID_52934
atggaggtggtggaggcggaggggatgagggcaagcgacacctccggcaggcgaagcgggcaccgtttcacctccgtcatgatgaccgcgtcaaaaaagggaccgggcaaggggatatttcgaaaaaggatccttctcagtgaaggaaacgggccccgagccctcctactgatcaagggttcgaaggttgcaccctccggggttcggcaaccgccccagagcactcgggctccgagcccattactgatcgggggttcgaaggctggcccctcggaagggttcgacagccgccctagagcacgcagagtcagggatgaccctgggtacgtctgttacatggacgaggctcgggctacgctctcgaggtaccctaggacatttccgagaccagcgggaacgatttgtaatggaatcccaccggagggagcggccaagtccgacctcgggcgccataggaagctccgcctcgcccgacctcagggctcgggctcgggcttggccccggaagatgacgaactccgcctcgcccgaccccagggctcggactcgggctcggccccggaagacgacgaactccgcctcgcccgaccccagggctcggactcgggctcggccctggaagacgacgaactccgcctcgcccgaccccagggctcggactcagcctcggccctagaggacgacgaactccgcctcgcccaaccccagggctcggactcggcctcggccccgaaagacgacggactccgcctcgcccgacccccagggctcgaactcgacctcgacctcggaggacagactcgaccccaacctcggaggagccaccgtctcacccgacccagggctcggaccaaccacgtcacagggggagccatcattaccctacccctagctagctcaggctacagggaacaagaccggcgtcccatctggctcgccccgcgctcctccgacggccacgacatcacatga

SEQ ID NO: 9560 - DNA, 91 bp, Zea mays
  Peptide Sequence Number=SeqID_52935
atggctgacaaggtgaccgtcgttccgccgcgtgacccgtggcctttttccaccgttgctgtggaggatctggaggcccttgttgctgatg

SEQ ID NO: 9561 - DNA, 618 bp, Zea mays
  Peptide Sequence Number=SeqID_52936
atggcgactccgaaaagggggaagaaacgcctggtcctcgacgtcgatgtcgagttggacagtgaggccgaagtggcttcggctttcagtcgattgtcggtgtcaatcgttgccaagcctacaggcgaccactcctccacgggcaaggacctgaactgcacggctacatcagcagaccccttctatcgtcaagcagtgctcggaacctcgttcagtgtcggtaagtactatgagcaatttccgagttcaattccaacaacattgtatgtggtttcgcagataacccgatttgaaatggttcgtagtgacctcgcacaagccattgcaaagatgcatgtagttggaaacgagttgaaagatttggccagaaacaagataatggattcgccagatacggccaaagaggtgtcagtgaactttgcaatgtggcgcgtgtatgagcttgctcagtcactgctggaggaagcacaacatttagaagatctcgaagctggtccttcgctaccattatctgaatgtttcaataaccaatttactgaagatgaagatatgggtgacggggaatgggcactggatgatgtgaattctgaagagattgtggatcgtcagatgaagtag

SEQ ID NO: 9562 - DNA, 153 bp, Zea mays
  Peptide Sequence Number=SeqID_52937
atggcgagtgctctatcttggagacttggaagatggcgagtcttggaagaacatcaaaaggatgcaacggctggtatttatacggaggcggggtacaactcaaaaccatccatccgcccgaacgtggtaacggcgtcccgacgccgatactag

SEQ ID NO: 9563 - DNA, 306 bp, Zea mays
  Peptide Sequence Number=SeqID_52938
atgccgaagctcccttgcccacagcttcggctctgttccatcctctgtttcccttgtgcttcttcacattgtgattttgactcaagtccgaagggtccaagtccgaagattgcgatatggacgaaggtcttaagccgaagattttttagcttcagccttaagagcacgttttcaacatttccgaagatgtctcaagataacaaagttgtcgccgaaacaaagctgagcctttctgaagagaagaatcttgggtttcttgaatcgatagcaaagacgaacacagagaagatcactagggagatttaa

SEQ ID NO: 9564 - DNA, 1962 bp, Zea mays
  Peptide Sequence Number=SeqID_52939
atggacaaggatcgccagggagctgcacagaagcgccaggcggtcgtcatgcttcatgaagccaggccgaagaggcagcggggggctgcgaaggctgctgcccccggcggaggcaagccgccgctggcggctaaggcggccgtccctgcatctagcaaggcgccggaggctgcggctggcgccggtggttccaagtctgcgaaggctgcgccggcgcccagcagggtgccggaggccgcgaaggcggcccgagggttgccgtcgccgggcaagcgcgtcgccgacttcgccaccgacattagtgtggacgactatcttggtgggtcgggcgaaggccaacttgttattgttctgcctgccgtggtgaccacggcggctgccgtagtgccaaaggcgaagggcggtgcccttagtgccggcggcgagatgccggcactcgctgctgtcagggacgaggcgggcgctgtgtcccgccggctgaaggagatgaaggaggcactaagtcaggcggctgacttcgcagaccgcgcggcgtcgggggccctcacggcagttgtgtctgccgaagtcgagagacttcggacgcaacatgctgacgccgtccgggaaaaatcggccgccgacagtaagtgccgcaagctggcggacaaggtggccgcgctggagggggagaagactgacctccggcgccaactggcggaggagaggagggaggccaatgaggccatcgccaaggcgcaggctgcgctggcggaggccaatttggcacgggtggagggcagtcttgccagggagcgcgccgagcagttggaggagcggctcagcgccttgcagagccgtgtggagagggccgaggccgcgacgcgctcggaggctgagcggatgcgcaaacagcttatggattcataccatgagctgggcgcgcggaccgctgacttcgaagtgccggaccgagagcccggactttgctgcctggagtgggtacaggaggagttgcaggcactccccactatcgtggaggggttcatgtcttatgcctccctcgtcacctgcgagggggcgatgaacgtgctctctcgcgaagggtgccagcattatggggtcttcgaccaagctgatgaggattttgaccgtgatatctacaaggttgaggaccctatagtgaaggaatccgccggagccatctacgaccggatgtggggcccgcacggtcgagaggtggtcagggagcgggccaagacggcgaggggtcaggcggcgcgtggcgagagggtggatgacttcggggctttgaacagcgcgctgcctgacccggagtcgaacccggtggaggctgtgtcggaggccaccctggtgccgccccccggaaaccgcccgaaggcgctcctgatgcccccgcagccgctgcggccggcggaggcctgcccccggagatcaccgaaggcgctcctgatgcccccgcagccactgcggccggcggaggcccgcccccggagaccgccgaagttttctgattttggtgactctgggagctcagttgagtggactgaggagtcgtcagaggaggacttggactacttcgcggccttggatgtggcagcggcggaggcttcaccgcacgctgcggatgcagaagatgtgcctggtccgagtacagggcgtaggcggcgaagggcggttgcgaagcgtaggttgtgtgccctcgcacattcggctatgcttgcgagggcgttacatacttggtcaggtgtaattgttatgctggactggtgcgcatgtagtcggtctttgcgcggacagtttggtgtggtcgttttcgcgtttgttacgcttcgtccggctgtgccctcgggcaactgttgtgctagtccggctgcacccttaggcgacttctgcgcggatagtcttcgcggtagacttcggttttttgcacttgttgtgctagtccggctgcacccttag

SEQ ID NO: 9565 - DNA, 162 bp, Zea mays
  Peptide Sequence Number=SeqID_52940
atggtgggtacaagtgcggtcactgcacgggggcagccggggtcagtggagcattgtacgctgcaagatatggttgatggtgtgacttggcctaccaccctgccacagggttggacggtcgagtgggatgctgcttccacgggagaggagcaggaggagtag

SEQ ID NO: 9566 - DNA, 159 bp, Zea mays
  Peptide Sequence Number=SeqID_52941
atggaagaagaagctacatgggaaaccgaggattatttgaacaagaactactctgagtttctgccaaaaagtgttgagcaaaatggtaagttaggtcacattacaggaaagttgtgcttcaacggtgaaaacaatccctcagatgagaacttgaagtga

SEQ ID NO: 9567 - DNA, 438 bp, Zea mays
  Peptide Sequence Number=SeqID_52942
atggaaccgcgccatggaagcagggagcgtgtgcgtgatagccgccgtattgctgagttgtcagcagaggttgacagtttgcagcgagagattgtggagcgggataaggctataggctgggctataaattcacgatctatagcatgggattgtgagacgactgcccgagcccggctggaagagctaagcgtagcccaggaaaatttgcaagcgtataataacactctacacgaggaagtgcacgtgttgtatgaccagttgcatctgaacgtgccaccgaaggttgtggcaatgggagctggtgcatcaggagcagctggcggaggaccatatggggagttggatctctttggagcccctccttctatgaacatcgcggatgatcattcttccgaagctagtagtggagcggaaggagccaatgacgtggataactag

SEQ ID NO: 9568 - DNA, 657 bp, Zea mays
  Peptide Sequence Number=SeqID_52943
atgtttgagacagggcacttccctaacctgctgcaggatgttttgcacgcgttgggaacctacatccgacccctgtacgagacaaggcaagtgtatgagcctcctcgggcttgctactacatcactcacattcatgtcaaggtaatggatgcaggtgatagagggttcaggactctgtcagtacatgagtctctgacgccgctatccacctatgttgcttcggtcagcgatgctgttaggcgaactctatggtctctcagccacacctaccaacaacagctgcacaacacgaagtacatgcatcttcctctatgtattcgtggagagaaccaggccagcattgttccaggtggagcaaatgaagatcgcctcaacaccctagttgttgtggtggcaggtcttaatacagacctggatagtgctaccctggatctctatagggtagacttggagatggaggatgcacatgcaaggatcacagccctggaagctcagcttgctggaaggaatcccccggaagttcaagtcccagctatggcattatgcgctccccgcatgaagcgtcccgatcctttggggttcaaatgtgatacaattactagtcccatgaggctagtaaccacattccttacttcaaatagtacagagtttgagtaa

SEQ ID NO: 9569 - DNA, 1836 bp, Zea mays
  Peptide Sequence Number=SeqID_52944
atgaagagtgacttcaaccccaccaaacaaagcatctttgcggacgacgaggacgaggacgacgccgaggcgggcccgtttgcgcagcgccgccttcccccgacggcctcggtgcgccccgcccgcacggcgtccccggccgcgggagcgctccatcgcctcacgctcgccagggagcgaatcaagagctcgccgacacctaccggcgctgctgtgtcggcgcctaagccttccaacttccaatcccatgctagggagtacacaccagagcgcctcctggagctccagaagaatgcgcacccgctccttgggagcctcttgcgtgcccaaccacggactcctgtgactgagccccggtcgcagaagttgtctagtacccctgcaagttccactccagctaccaccaccacagctgcaacagaaacagtggttgttcttaaagcgccagattatatctctcttgatgctggtgatgtgctgagcagccggaatgctgctggtgagtcgagtgatgaggatgacaatgagataacagatcagattgcaatgaaggttgaggatgatagagatgatgatgatgccgacgaaggagagaggaaatgggaggaagagcagttcaggaaggggcttggtaggaggatggacgatgcttctactcagagagatatcaagcctcgagatccaatggtttcaggcgccagatcgacaccggaggtgatgtcgccgccggcgagccaccgccgccgttctcggttccttagctggccgctgctcttcatcgcgatcctcgcgatccactcgctggcagtatacctttttacccgcggcttcctcctcacccgcaccgagctggacctccacagcagccgcgacgacttctcgccgcagggcaacgtctcccccgggtgcgactcctggcccccggccgccgtcgaccgccttgtcattgtcgtcctcgacgcgctaagatttgatttcgtggcgccgagtaccttttttgcaggtggtgactctgagcgaaaaaatcgcttcactaagcttgctgccgacgaaaagacctcttcaaggatcttcaaagctctcgctgatccaccaacaactagcctccagcgccttaaggctctcaccacgggtggactccctacctttattgatgtcggcaatagttttggtgctcctgcaatagtcgaagataatataatgcatcagttggctaaaaatggaaagagagttgtcatgatgggggatgatacatggatacaactgtaccctgaacacttcaacaagtcattcccatacccttcctttaatgttaaagaccttgacacagtagataatggtgtaattgagcacttgcttccatctcttcacaaaaatgattgggatgttcttattgcacattttcttggagtggaccatgcaggacatatatttggtgttgactcaaccccgatgatccagaagttggagcaatacaatcagatcctggagggtgttattgacacattgagaagtctatccaaacctggtggtacccatgagaatactttgcttttggtaatgggtgatcatggtcaaaccctgaatgatgttgagactggattgaaagtcggcgaagacactcgacgacagccccttggtgaagatgtcggcgaactgcagtgtgtagacgaggctggcgcgctggagggggccgtggagctcatggagaagctgacgcagccaggaggcctctgccacgccgttggctacaacatggtgctcgacctccacgctggagtgggagacgacgggctgccgcttggcggcctaggagacgaggttggcgtccaataa

SEQ ID NO: 9570 - DNA, 570 bp, Zea mays
  Peptide Sequence Number=SeqID_52945
atggcgactgacgccgctgctaggcaagccgcggccgcctccgccttcttcaactccggcattgacgcacgcgcaccccacctcctccccacagacagccacaacgcggctcttcacttctccacggtggtcgccggtcttcaggccgccgctggcatcttcccctctgtgttgggtgctcccgtcgccgcgggcgcgtccctacagcacgtcgcgggcgcggtccccatctgcattgcccctgctcacagcgagcttgctggggacgaggcctctctcatctccggcgttgggccccgtcccgccgtcctcctcgctgcctcactgcgcagcaacagcacacctggtgttccccccatgccgttcctgcagcagccaccctccccagcggcgcgaccgcacccaccagggtctcaccatcctccgcccctctggcttcacctccgggactcctccttccgtcacgggtcccgtcctaggtctcgttccttctcactcatccccttctctgggttcgtcgcttcactagtgacaaccactgttcgatggagtttgatccctgggggctaa

SEQ ID NO: 9571 - DNA, 111 bp, Zea mays
  Peptide Sequence Number=SeqID_52946
atggggagtcatgatccccgggcaaaacggaaatcacggctcatgggtaaaggagaaggcgtcgaggcggatctccaggagttccaggacttcgacgagttcgaggattag

SEQ ID NO: 9572 - DNA, 1052 bp, Zea mays
  Peptide Sequence Number=SeqID_52947
agccaactggtggttatatcacaatgcgatgtgctcctgcagctgttttctatgcagctgaagctcttccatcaaatattaaagatcgcatcatcgagctcggatttggttgtctgttagatcttaacattgacagacttgatgtcagagtttttggaagttttctgatggcatctgtcaagaacgatgacaatgggccaagactggttgttggtaacaaatctttgccaatcacaccggaagttgttcagattgtgaccggtctcccccgcggcgagaaacaattccccgattggacttatcatgagatcaggactgcaagaaacacattcaggaagctatgtgatgaccagaacatgaaagacatgtttgctcgcagcaagtgtttggctgcatataagaagctttcatcgtatgaggtctcccggtgggttgttgaaaggatggacaatgttgagtgccctgtcactcgactggttggcacaccccgctggaagttttttacttccaaaatcatgaagagtatatgtgatcttgacaagacccctagacctggccgtcaggtgaagtacgacaatttggagtttaggaatgctgctgaaactgcgtatgctgagatttaccacaagggacaagatctgccaaggcccctgttttttgcgcagcccgctgtggtgtggtcatcccaccaaaggcatctaaaactgggccttctgagaactaagaagccatattttacaagagggccgatgtcgtcgtctgcatctgttgaagaaccctctagctctcgacgacagcctacttcgtctaatctgccatttgggctggtgagccttcagtctgcactatctgaagctatatcttgccttgatcatgagccaagcaaggttgcagcaatggcggctttgaaagattacgatatagctgtatcaaatgtctgccgcagcatcaactcaaaccagaagaagactaccagagctcaagctcagaattccaaggatcaaaagtctatccagcaggcgtacaccagcttgtactgcacttacagttaa

SEQ ID NO: 9573 - DNA, 384 bp, Zea mays
  Peptide Sequence Number=SeqID_52948
atggccaacccttccaacctctaccacctcctccaccacgaggagggcctggtgaacctcgacgacctcaacaacaggaaggggaaggaggtggagcattcccgcgcgtcgacggagaggtcaacgtcatcttcggaggacacgggtcaacacccgatcacctttacccgggcggatcaatggctcaacttcgatcatccgggcaagtacccgctcctcgtcgatccggcagactcaaagcctgagggagacctcgcaatacctgcgaacgaagctcaagccgtgacctctatgcagccgactaaggagacgaagaggatcaaccttgggttcgctgatgagcgcaagactgccatcatcagctccagcctggacgacaaatag

SEQ ID NO: 9574 - DNA, 984 bp, Zea mays
  Peptide Sequence Number=SeqID_52949
atggctgaaaggtaccaactcccgtggagttgcgttcctccaacgacgaggcggaaagacggcgggtatcccccatccgggggcttggaaggtggaaagacacgatgcataggggagcgcgaagacatggtcgccttccaagagggtcaccctccttttaaaggcgactctccctacttgcgtccccagccgtcgtgggctgagtcttctccaacacgctccaaggtcctcccctacggcgcgggggctgggtcccacacgtcatgcaagccgacccagagcagaagaagccaaaccgccgcgcgcggtgcatgcaaccgcccagcggttacaagcggctctccacttttgcccagaccagcaggcgaaagggcgggcagccatgcaggcggcatgcaactgcgccaaggaccgggaaagggggataccccgaaaaggatccttccccgtgaaggaaccaggcttcgagcctccctactgatcagaggttcgaaggctggcccctcggaagggttcaacagccgcctcagagcacgtgggctccacacccactactggtcagaggttcgaaggccggcccctcggaagggttcaacggccgcctcaggctactcgggctccgcgcccactactgatcaggggttcgaaggctggcccccgaaggaatcccaccagagggaggcatcgagccctcggaccctgtcgccaggggaccgggtccggcagatcacccacagctcatcggagacaccatgttcgacgcccaccgagggcaacatggcgctctcccccccctccttgcggaaaggcgacgcaggggcgcaccataggaagctccgcttcgcccgacccagggctcggactcgagctaagccccggaagacggcgaactccgctccgcccgacccagggctcggactcgggctaggccccggaagacggcgaactccgctccgcccgacccagggctcggactcgggctag

SEQ ID NO: 9575 - DNA, 987 bp, Zea mays
  Peptide Sequence Number=SeqID_52950
atgcagcccggttgcacccctccgccggcggtcacccaagatgttgccgcgtgcctggctctcggacccgagtggattcggagccgttctcggtgccggctgctgtcgacgccagccacggcagctggaagaggttcttccgccgacgagacagccagggccacccacggaccgacctccaactctatggccttctgcccgtccttgcctcacgagtttgggcatgggcgggggcctcctggtagcagcatccgccctgaggtcatcgttgaagctgttcggccccccgaagcagaagtcgtcgtcgtcgccgctgccggagcgggcgacggcgcgccgttcgtcggtcttctgttgctccgcaggccccccctcatcgagtggggttgttcgtacccgcggagaggaacccctcggccgctcttcgatgagccgaggccaggggtagcggtgtcagcgcgaacagaggcagagttggctcaaaaagaagacctggtcggccggagcctggccgggtcgtccgttagcgggaccgacgtcggaattgatctgctgaggcctcgggccgggctgatgtccttgggggacagctggccgaggccccggggtgaccggccgagccgcctgctcgggccggattctcggagaagaccctggcggcgatggcccgggcttggtgatgacgttgtccttcagagcggagacccttggaccgtgtcgccgtccgaggctaggtcggacctcgccgaaggtgttgtcgacgccgaggtcgagaaggctcgaagaatcgctccggcagaagggcttccgaacgtgaagacttgttcggtctgcggaatcacttatccgaacccgaagcaccaggtcgcccacctggaggtctcgggaccggacccctcgggcgtggtagcgtcgcatggactgctggcccttgtcctcggggaaccgtattctaggtctgtgggcaagatggcctcggccccatag

SEQ ID NO: 9576 - DNA, 624 bp, Zea mays
  Peptide Sequence Number=SeqID_52951
atggctactgcttctagaggacatggtttaatgctccggttgcagcagttggaggcagaatttccagcagttgaaaaggctattatatctcagacggagcactcaaattatccacatgatgatggagctgagtggcattctaatgttcaacttaaacagaatgtgatcacacaaggagatatgcctcgtttcattatggattcatatgaagaatgtcgtggtccgccacaattgttcacattggataagtttgatgttgctggtgctggagcctccttaaaacgatattcagacccttctttcttcaagacagaacatgcctccaacatgatagaagcggatgttttaattgaaaataaacctcgtagaattaagctgaagctcaacttgtgcaacaatattccaaagccgaaggaagggaggcttgcctcgatccctttcttagaccctactcatgtgggagccttcgacactggtctgcccattgttggcacataccccttcgtttggcccttagattcaatttctaggtccataaactttttaagtggttcgctgccggacgacaccccttcgtttgacaatggttcaccacaggtcgacaccccttcgtttgacaattag

SEQ ID NO: 9577 - DNA, 375 bp, Zea mays
  Peptide Sequence Number=SeqID_52952
atggcgcctcccgttgacgtggccggcccgcgccctaggttgggcgatgcgaaggctcctccgaggtcgaggtcgagtccgtcttccgtggccgaggtcgagtccgagcccctaggtcgggcgaggcggaggccgttggctgaggccagggcggagttcgagtcctggggtcgggcgaagcggagttcgtcgtcttctggggctgagcccaagtccgagccctgggtcgggcggagcggaattcgtcgtcttctggggctgagcccaagtccgagccctgggtcgggcggaacggagttcgccgtcttccggggcttagcccgagtccgagccctgggtcgggcggagcagagttcgccgtcttccggggcctag

SEQ ID NO: 9578 - DNA, 465 bp, Zea mays
  Peptide Sequence Number=SeqID_52953
atggcgacgccctcgaggagcgcctccgggtcatcctcctcccccggggccgcgtacacctccggatccgccagcccatactcgttccgtatctggtgccgtatcatcctccccgcccgccgcgccgagccgccgcttaacgccctcactaaccagcgccgtcctccctccctcaccccacgagcacctcaaggccccgccattggcgcgcgcgtgccgctccggagagcgtctggtagacttggcggggtgcgcttagcgcgtgggttttcagcgtggcggtggcggagcgaggaagacgaggcccccccggacccggagtgtgagggtaacgagattttttatacggcgagcagccgagcacattctttcttcacatctagcagtcagtcgcagcgcgtcacgggcgctgacgaccggggcccgcgcgccctcgtgccccgtgaagatattcttgtccactag

SEQ ID NO: 9579 - DNA, 753 bp, Zea mays
  Peptide Sequence Number=SeqID_52954
atggatacggaggcggtcccggcgctggcggtggtggacgcgcggttctgcgcggcgggcgcggccacgctggccgtggccaaggcgctgagcatgtccggcagcgacttcgccgtcacggacgcggccacgggcgcgcccgtgctgcgcgtcgacggcgtgctcttcagcctgcgccggcgctgcgtgctcgtcgacgccgaccgccgccccgtcctcaccgtccaagaatcggttcggttccttcgcctctcgctcgctcgctcgatctgtcctgtcggtgtcgggggctatagctcctccagtcgagtcatgaccttgcgctgcttggacggcgatgagaacgcaggcgctgatgctgaacacgcggtggaaggtgttccggggcgacagcacccgccggcgggacctcatgttcagcgtcgtgaagccgtccgtgatccagctgcgggggcccaccaaggatcaccggcagctaccacgacggcgcctgcgccgtctccctcggcgactccgacaccgtcatcgccaaggcaagtgcgctctcggctctccctcctcctacccacccgttcttggactgacacgtattgtttgttggttcggttggcgttgcagatcgaccggcggttcagcgtggtcagcgcgctgctggggaagaactcgtacagcgtcaccgtcaacccggggatcgactacgccttcgtcgtcgcgctcgtcgtcatcctcgacgagatgcattaccagcgatga

SEQ ID NO: 9580 - DNA, 750 bp, Zea mays
  Peptide Sequence Number=SeqID_52955
atgagatcgaggagaactggtacacctataagatcaagagatgacaaggctaaaccgaccatgcagaagtgctacgagtctgaggccgagaaatatcatgctagtgagacaatttcggtaccgagggcctcgtcactcccaagtccaccctatagagcaaccggcatgtatggaacttccagatatgttacagatcagtcagtgctactgcaaaagagtgaagcactccatcaccgaggatttaccagaccggaagatggtgaaaacatgaaccatgttggcaaaggaaacgtggacaggtggctccatatgctcatggataaccaacaagaagatcatgctgcgtaccattcttcagacgaacacgataatgacgaggagaatgcttcggatgagcagcgaacgcagagccgggttgacgaagagagctgcaggaatgggataactgaatattctgatgagatcatcgaggtcgaggacgagattgtttctgaccagggagcagaaagagggaggaacaactttggaattaaagacagagaggaaaagaatatttggttccataggactgacagcacctggggtttctggtcactgccatcatcaccctccatgatcctgggaatgagaaaaggtgtggaacgcatggctgtcgacgatgaccgcaaatatggctatgaggattcagtgtctaggagcagcactaagtttccgcgcccagcagcctgtgcagctgcgcctcgacgctag

SEQ ID NO: 9581 - DNA, 219 bp, Zea mays
  Peptide Sequence Number=SeqID_52956
atggagaagggagtgaatcgcgccgagaaggagaagggagtggatcgcgccgaggagtggatcgcggaccttccatccgcggcctcaggcagaactacgggtgaccactatgaactcaatgattgccaaactgacgtatatgcccgttatggaagacgaccgatgagaaaaatgtttgtccttgttgcagtggcggagacagaggagatggagaggtga

SEQ ID NO: 9582 - DNA, 390 bp, Zea mays
  Peptide Sequence Number=SeqID_52957
atggatcccaagcagcagctcgctctgcggccgatctccaccaggagagccggcagcagcgtcgccggcgaggcggccgcatcgttccgcgtctactacagcctgcggccccgggccgtgccgttcctgtgggagtccaagcccggcacgcccaagagcggcggcgccacggctgccgtgtcgcccgcgcccgccgagacgacggcggctcgtcgtcagctcccgccaatatcgccgccgccgtcgtaccactcctcgtcccagctgaagagggggaggaggtgccggccgagggcgtcgtgccacgcggcggttggcctcgtgagggcgctgctcgccgcgctcggcgtcaggaggccgcaacggcgccaagcagcctcgctcgtttga

SEQ ID NO: 9583 - DNA, 636 bp, Zea mays
  Peptide Sequence Number=SeqID_52958
atggagaaaaatatgattgctgtggctagtgagattgagaggcttcgaggagagcttgcaaatgctgaaaaaggggccactgctgtcaacccagcagcagctgttggtaactctgggtatgctgcgccttatggcaattctgcgtcaacatatactggaatgtatggcaatcctgatgcaacggacgatgatgcctctagccttttacgaatgcgaccgtccatgctcgccgagatcaagcttagggcatatttgggagtaaaaactgtcgtctccgccttgcctgagctcatctcgggcaaggaatacaacactgaggcaacctataagcatttaatgcgcatacctaccccgtgcagcttcgcagccggcctcaacctcgagacaaactctgcctcgcccgagcccggcctcggctacctgacttccgcctcgcccaagcccggcttcatcattgatattatcaatgaaaagcacccgacgtcatcagaaacagtagagctgacgtattacccaagggcttttcgccatattcagcattgtaccaactactacgacatggacaacctcactgggctcggcttcgcctcctcaccgtacgcggctaaccccgacactcctagcagccctccttga

SEQ ID NO: 9584 - DNA, 456 bp, Zea mays
  Peptide Sequence Number=SeqID_52959
atgggcaagagcaagaaaggtggcagctcttcacatcactcgggtgacaagcgcaagcgcgagctgactcctcccttggaggacttcggcaactcggaatactcggaggaggagttctcctccgagtccgagggttcttcggctcctgcctctcccccgacgtcgtctgatgattcagacgactcccaggggatcgtcgcggaggtatggacctacatccgggccatcgagcgtgccgggctcgagggctcggatgagtcggagtactcctcggacgaggaggattcctccgactcgtccgaggagggcagcggcggcgacggcggtgacggcgacgacgacgaaggcgacggtgacggtggcagcagcagcgacaagggcggtgatggcagcggcaagggcggcagcggcgacggcggcggcggcagcaagggcagcaacaaggccagtggctag

SEQ ID NO: 9585 - DNA, 162 bp, Zea mays
  Peptide Sequence Number=SeqID_52960
atggccgtagccaagccccttcctgcaacccctcaccgtgtccctaccggctaccgtgcaggtggtgacaaggatgatggttatgactatggtaatggtaaagaagaaggcgtcgaggcaaatctccaggagttccaggacttcgacgagttcgaggattag

SEQ ID NO: 9586 - DNA, 753 bp, Zea mays
  Peptide Sequence Number=SeqID_52961
atggctgaaaggtaccaacttccacggagttgcgttcctccaacgacaaggcggaaggattgcgggtctcccccatccgggggctcggaaggtggaaagacacgatgcataagggagcgaggagacatggtcgcctttcaagggggtcaccctccttttaaaggcgactctccctacttgcgtccccaaccgtcgtgggctgagtcttctccaacacgctccaaggtcctccccctacggcgcgggggctgggtcccacacgtcatgcaaactggcccagggcagaagaagccaaaccgccgcgcgcggtgcatgcaaccgcccagtggttacaagcgttcctccactttcgcccagaccagcgggagaagcaagcgacgcttcgccttcgccataatgaccgcgtcaaaaaagggaccgagaaagggggataccccgaaaaggatccttctccgtgaaggaaacaggccccgagcctccctactgatcagaggttcgaaggctggcccctcggaggggttcaacagccgcctcagagcgcttgggttctgcgcccactactggtcagaggttcaaaggccggcccctcggaagggttcaacggccgcctcaggccactcgggctccgcgcccactactgatcagggggttcgtaggctggccctcgaaggcgggaacgatcttgtaacggaatcccatcagagggaggcatcgagccctcggaccccgtcgaaaggggaccgggtccggtag

SEQ ID NO: 9587 - DNA, 606 bp, Zea mays
  Peptide Sequence Number=SeqID_52962
atggagccgaagatgccaaccagtgttggagaccagcagaagctgacaactattgtgacgggaactccttcaaagtggaaaagaatggctaatattctgatggttgtcttaaatccttcaaaggtggactcatctgtagtgccaaagattattgaaagtcctcctagtttcattgtcgctgaaaatgtgaccagtaagttgaaggtggatgacggcaaagaagtttctcttgatatgggcacgactggtgccttgaaaacctattcaataatagatgctgccagagaaaaggaacaagagaaaataaaagcttctaatgctgaagattcaacaaagggaaagactatattagtatccgaagaagcaccacccgcaacccgtgaatatattattttccatgctttgagcggaaaattaactaatgagcaaattgttgaagttcaggattatactgaagatttgaagtacccttcggtctcactcatacatggtggctatgatgaggatgactatctctactgcattctagacagtagggaaattgatggacgatttgatcgccagactgcgggtgtcgtttctgcggccatggcgccgtcgcgctag

SEQ ID NO: 9588 - DNA, 177 bp, Zea mays
  Peptide Sequence Number=SeqID_52963
atgtctatggagctgatggacacatttggttggcgaagcgaatggaggctgcacctggaggtgtcccaagcccattcgatgtttataggagagggcatagagtcgaaaaacagtgaaatctctgatgagctatgtagtccagcggccgttgagcatatgcttagttgtaaggattaa

SEQ ID NO: 9589 - DNA, 1101 bp, Zea mays
  Peptide Sequence Number=SeqID_52964
atgtggaatgctatagatttaatggttaagagaagaaacagaaagaagaagaaaagaagagaactgcaaagggctcggctatgtacagccaaggcagctcagtctggcacaccggactgtccggtggtgcaccggacagtgtccggtggtgcaccggacagtgtccggtgcgccaggctgaactccagtaaacaggccgctctcgggagaagtctggcgacgatcggctataattcaccggactgtccggtgtacaccggactgtccggtgagccaacggtcggcttgggcaacggtcggccgcgcaatccgcgcgtgacacgtggacgagccaacggtcgaatgggggcaccggactgtccggtgtgcaccggacatgtccggtgcgccaacggctcccgcatctgcaacggtcggctttgccatagaaggaaagaaatcgggcaccggacagtgtccggtgtgcaccggactgtccgatctgagcaaacggaggaaggagttgaaatagactccaagcccagcatcttagttgattctctttctagaggtgcttattttgccatcatgagtagagataatgatttaatggttgatgctcatgatttatggaatagaattaaagtaaaatattttgtggcaaattgtactacttctactccctatattgcttgtgatgctaaccattcaaagggagaagatcaagaacgatggacacccaacgatgaatctacctcgtcgataggtttggtctccactaataataaatgttttattgcttacaatgacggtggagacaaaagccatgatgaggaggaatatgaggatgatagcgaggatgaatcttcatcatcacaaggtactttttcctatattgcttccactgacattaatgacagggaaaatgagaccgatgatgtggaagaagaggagattcaccgtttctacaaccatctcaacaaagcggacaaagctctcttggttaagttgttgagaaggaacaaggaacaaggcgagacgcttctcaggctagaggagactctcatcaaaacaaacaacagcctggagaagatgaccaaagaacatgaggagctgaggtga

SEQ ID NO: 9590 - DNA, 156 bp, Zea mays
  Peptide Sequence Number=SeqID_52965
atgcggcttcatatccttagaggtatgaaggcagaagtcatccttgcatttgcagacatttgcactcatgagtttgatattattttacttgctgagatgtgtcatctcactcttgcattactcaatgcaggtgttgagcagagtgatgatggttga

SEQ ID NO: 9591 - DNA, 423 bp, Zea mays
  Peptide Sequence Number=SeqID_52966
atgccctttacatttatcaataactctatgataactcttcgaggtttaatctggtttttcatctttaagtcggtttccttttccgccgctactccgaagctcttctacaagcttcggctctgcgccaacctttgtgcttcttcgtaccgtggctctgatccgaatccgaagtcggttttcttttccgccgctactccgaagctcttctacaagcttcggctctgcgccaacctttgtgcttcttcgtaccgtggctctgatccgaatccgaagggtcatggttcacgtgacactatggcacatcggtgctggggagctgcgttgagaaatccccgcagtcccggggttgcgcgtgcaccaccactctccccaacgtgctccacctacatgaagaaggctcttgatctcctcaccggacactga

SEQ ID NO: 9592 - DNA, 474 bp, Zea mays
  Peptide Sequence Number=SeqID_52967
atgaggcgcgtggaggatgctgtgatgagtcctgctgggagatggaggacaggaaacacaagattggtggatctcaggctgggagtagcagccatcaccgctactcaggcaacctacctcaacagttcaagcaaggtcaccagcattagcctcaacatcagactctacatcagcgtcagcaccagcagcagtaccagaggcatttccctcagcagcaacaacattactgttagagcaaccaacaaggaggaaatccgtaccagcgccagagcaaccaggcacctagccttcctgccccatcaaccaaccagaacaaccaagcagctccagcgcaaggaggaggccacgcatgtttccattgtggggaacaaggcccctaccaggcagaatgcacctcaacaaggaggcaacaaccatgggcagcctcgtgcccagtacagaaaggtgaaccacctggaggccgagacaatctag

SEQ ID NO: 9593 - DNA, 672 bp, Zea mays
  Peptide Sequence Number=SeqID_52968
atggacgggaaacacacgctacaagacaatccgatcctgcaggctcggatcttgacgcttgaagggagcagcagcaccctcggcgtcgacaacaccttcggcgaggtccgacctagtctcggacggcgacgcggtccgaagatctccactctgaaggacgacgttatcgccacgcccgggccatcgccgccagggtcttctccgagaatccgactcgggcaggcggctcggctggccacccccgaggcctcggccagctgccccccgaggacatcagcccgacccgaggcctcggcaggcctcgacagcaacaatgaacaaaaacactggcattcgaagtgtcattacaaacagaactccggttccacctccgcaggagggggcaccgggagccaagccgacgagcccgacgcgctgaggctgacgacgcccgccgtcgaccagccccgcgttgtcgaagtccgacccgcccgcagggccagtgagcgccctctccctcgaacgccgcaggagaggccgacccatggacctgcgcgggaggtagagctccggctcagcccggcctccaccccagcgaggatgatgaacatccttgaagttgagggtgggaccaagatcgcagcccggcttgcttctccccacccaggggctggtggtcaccgtctcgggtga

SEQ ID NO: 9594 - DNA, 714 bp, Zea mays
  Peptide Sequence Number=SeqID_52969
atgtcccctgcaccaccgcagggcaactcgactgctggaggagaccctgatagagacggaaacgacgacgacgtcggtggcagttcgagccacaacatggagctctcggaggagcaggagccggagggatggatttctaggcccatcactcacgatgccgctcgcgggtgtcacttacacgatgctctcgacaccttgctgcatagggccttcgaccgacacacttggtctattgagtaccattgtgtagtctaccagcatcgtcacgggttatacccggacaagtgggaggctacatgcttgaggccttctcagagcattattcttatcactgagaggggcattgtcaaggcagccatacaagatgcgacacgcggggtagctgacggcctcgacctgaagtactaccctcactgttcgactgacaacgctagaggtgtgattgtctcgcccgttggtgagggaaatcccaggctgagcagcatggtcaacctggtcgtcgtgctcaacaccgagctggaccacgccattgacaagttgggcaaggttcaggtggaggttgcggaactgcgtgctaagcgtgcagcgcgccactatcaggatggtagttcctccgctcccatcgggattcagcacccttatcgctcgttgccccatggtcgctatgattacgacacccctgacagcaggacccagatagatttggagccatag

SEQ ID NO: 9595 - DNA, 684 bp, Zea mays
  Peptide Sequence Number=SeqID_52970
atggcgcctcctgttgacgtggctggtctgcgccctaggttgggcgatgtggaagctcctccgaagccgaggtcgagtctgtcttccgtggccaaggtcgagtccgagcctctgcccaagtccgagccctgggtcgggcggagcggagttcgccgtcttccagggcttagcccgagtccgagccctgggtcgggcggagcggagttcgccgtcttccggggcttagcccgagtccgagccctgggtcgggcgaagcggagcttcctatggtgcctgcggccgggcttgactgcctgtcagcctcactctgtcaagtggcgccgcagtcggagcggcgcaggcagcgctgtctttctgtcaggccggtcagtggagcggcgaagtgacggcggtcacttcggctctgtcggctggggggcgcgcgtcaggataaaggtgtcaggccacctttgcattaaatgctcctgcgatttggtcggccggtgcggcgatttggtcagggttgcttcttggcgaagacagggcctcgggcgagccggaaatatattcgccgttggaggggggcctcgggcgagatggaaatcctccgggctttatgctgatgggggttaccagctgagaattaggagccttgagggtacccctgattatggtccccgacataagtatactgcccaaaactaa

SEQ ID NO: 9596 - DNA, 471 bp, Zea mays
  Peptide Sequence Number=SeqID_52971
tcgtctccgccagttgatgagccagccctggctctcctggacctggaggctgattcgagcccaattccatcctcaccgtccttgctggctgtggtcgaagctacagaggagcccttggctgatcatcccctgccgccatcttcaacacctctcttggcattcggtgttgttggtgatgtttctctgcgtgtttacaccaggacaaggtggcagcacaagactcaggaagaagtttatgttggtacacctgctgcaaacgtttctgatgctttccttggcaaggtaaccaagccactggatcagctccttccgtgccctaatgttcctaaacaacgacataaggcccctccacaaggatctttacctcgtcgtagcagaagagtagcagatgaccgtgcgggagccgtgctgggaattggagaagactccacgcccgactgggaacaagagcctaacagatttcctcaataa

SEQ ID NO: 9597 - DNA, 225 bp, Zea mays
  Peptide Sequence Number=SeqID_52972
atggcggacattactccctcaaacacggtggttgcaactccacaggcttggctgctccatcgcccaagctgccaggcgcccgcccgccattcgaccatgttgcttcggccgctggggaatgttgtccattccgcaacacctccgggggccaaggccaagaggcagcagtgccgaaggcgctacgcgtttcaggttggggtgtacttttcaatgttcagcaagtga

SEQ ID NO: 9598 - DNA, 429 bp, Zea mays
  Peptide Sequence Number=SeqID_52973
atgccgttaatggggctcggtgtaactctgccaagatggctcgtcttagacacactgcacaaaagtcagtcattcctttctagccttctcatctcgcggagcgtccgcttcggcgtccggtggctgcacagtcgcggggtttacccggaccactgggaggcgacctgtttggtgcgccgtccggagaacagtcttcggggtgcggatatctgctcagagcactactctatctctgagcgggactcagctgaggcggccatgcaagatactgcacggcgtgcgctttcgcactactgctcagtgctcggcgggatgtcagacaacaggcgcagaggaggaaggcgtgctcagcaggagcatgcagccccgcaggatgaggcaccccagcaacagcaactgccaccaccacccccgatgaccatcgagtag

SEQ ID NO: 9599 - DNA, 252 bp, Zea mays
  Peptide Sequence Number=SeqID_52974
atggaattactcagcaagtcttacccgactaaagaaaagactctgaagggtatgctggttataaggaagtcaaggaacttcaaggaaggtaatcaaatccaaggaagatttccaaagttctacagaaaaagaaaagggaaaatcctgaatagtattgggtcggaagcagcccagacggcccaagtccagggaaaatgcgcacgcgcccgcgcccgcgtaggcagttttacacagagatccctacgattttga

SEQ ID NO: 9600 - DNA, 591 bp, Zea mays
  Peptide Sequence Number=SeqID_52975
atgagtaggccggactcctcaccatccccgcctgcgcacgtggaccggccgacttcgaccatccccgacagcgacccgcacattgctgtgatccccgagacctcccctacgtcctcgaccacctcaccggagcaatctcgccgccggaaaattatttttgcttctgtgctgaacctaagaaaatttgtagattgtaatctcgccgacggagagtacgtgctcatccccgagcaaggaactgtccaagaggaggaccaggagcaagcttccgaggctgctatcgaggatctccccacagccctagctattgaaggcaagccccgctctacaagagcaatatcccccgaagatgtaaatgtaaaaactgagcatgcaccatcgagtgcaaacagaaaaggaaaaacagggagaagctcgaaagaagtccctaaggggatgcagagcatgacaaagctacaaaaagccgttcctaggggagtgcagcgtaagttttctgctcaaaagtcattcctaagggaatgcagaacttacagcgaaaagtcaacgctgattccgccgaaatataaggcgaagcgtgaaaattcaacgtga

SEQ ID NO: 9601 - DNA, 606 bp, Zea mays
  Peptide Sequence Number=SeqID_52976
atggtagttattggaagattatatgcttctacccatgatgaagtaataaatgaatgtgttgctccagtatcaaataacacttctgcaatattgcttagggtactgcctttgaaactgttgctgctgaggtgggcgcgggttctatctgaactgctgaggtggattgcccgagaaacgagggcgattgctgcttccaggctaaggcccactgatcttgcgcttgcgatcctccatctctttgcgcttcctctccgtcatgatcgctctgtcaatcaggtgctgaaacgtgaggaagatgaacagtactcccgtactgttcacgctgacttggtattagcatcacgcttgtacccttactttccttcaagccgaaggtatcttcggactcgaatcggtaccacagtgggagaagcccaaagaatacgaaggttgacacaacgccgaatctatgagcaggaaagcttcggcgtgatagcagaaaaggaaaccgacttaaagatgaaaaggctattcagacctcgatggattactatagaattactaccaaatgtaaagggcatggatgtaattttatatgagctatgtcccgtgcctataaataggtga

SEQ ID NO: 9602 - DNA, 3771 bp, Zea mays
  Peptide Sequence Number=SeqID_52977
atgcatctggacggcgtcgacgacgagctcggaggcggcagctgcgccccctcccccgcgcgctttgagctccaagaggatccttccttctggaaggacaacaatgtgcaggttgcgatccgtatccggccgctgagcggcagtgaggtgtcgatgcaggggcagaagcggtgcgtcaggcaggatagtagccagagccttacctggattggacaccccgagtccaggttcactttcgatcttgtcgctgacgaacatgtcacgcaggagggcatgttcaatgttgccggggtgcccatggtggagaactgcatagctggctataacagctgcatgtttgcttacgggcagactggaagcggaaaaacacatacaatgcttggtgacatagaaaatggaacacggaggaacaatgtgaattgtggtataactcctcgagtgtttgagcatctctttgaaaaagaattaaggagagatgaaaagctcatgtttacttgtaaatgctcatttttggagatttataatgagcagattctggatctgctcaacccaaattctgtaaacttgcagataagggaggatgccagaaagggtatacatgttgagaatttgacggaacatgaaatctccaatgctcgagaagcgctgcaacaacttattgagggagcagcaaacagaaaggtagcagccaccaatatgaaccgagcaagtagccgctctcatagtgttttcacctgccttatagaaagtaagtgggagtcacaaggtatcaagcaccaccgcttttctcgactcaaccttgttgaccttgcgggctcagagaggcaaaagagctcaggtgctgaaggggagcgattgaaggaagctaccaacatcaacaaatcactatcaactttgggacttgtcattacgaacctaattgctgtgtcaaacaaaaagtcacagcatgttccatacagagattcaaaattaacattcctcctccagcttccattccattttgaaagttacacatttgatatttctcgctttctatccagttgtgctgctgagacattaagcacattgaaattcgcgcaacgagctaaatatataaggaataatgctataattaatgaggatgcttctggtgatgttcttagcatgcgtttacagatccagaaccttaagattatcattcatcttaaacttacctgcttttgcagaaaagtaatcagccgtttgcaaggacaattgggttctgataaaacagaaagcattgcctctcatgggtttgtctgcgagtcccctagcacattcaaatgggatcagggtcatggcatgttcactccacttacttttgataaaagggctacacagaggaacgattgtgatgctgcccttgtcgctgcttttaggagggaacaagagaaggaagcacaattgaaggcagtaatagatgcaaagcagactgctgaacagctggtagctcaaaagacagaagaggtaagaagtttcaagatgaggcttaagtttcgtgaagaacggatcaaaagattggagcaggttgcttcagggaagttatctgctgaagcacatcttttgcaagagaaggaaaaccttgtaaaggaattagaggtcctgcggggtcaattagatcgtaatccagaaattacaaaatttgcaatggagaatctacaattaaaggaagagctacgaaggttgcagtcatttgttgatgaaggtgaacgagaaatgatgcatgagcaaatcattgttttacaagataagctgcttgaggcacttgactggaagcttatgaatgagaaggaacctattaacaagggtctctcattatttggggagtcagctggcgatgaggaaaatgagtttcttcgtttgcaggctattcaaaatgagagagaaattgagtcgttgcgtaaaaaaatgacattctgccttgaagcaaaagataatcttgaaaggcatgtcaatgagttgaccacagagttggagcttacaaagaaacacaacaacacatataaagagttcaaggctgcccagctccaggagcaaggagaagcagatttacataacttgtctgacgctcagatggaacttaagactttggttgatgcaatagcttctgcgagtcaacgggaggcagaagctcatgaaactgctatcggtttggccaaagagaatgaagaattgaggctgcagcttaaggttttgattgaggataacaagagattggttgagctctatgaacacactgttgtcaatgttgaggcaaatcaagatggaaaccctgtagatgatctgttgaatgcccaaccagcagccacatcagatttccatgcacataactcatctagtgtggcacaggagtctaagatagtagacgaaaaatgcaccaatgaggacaatttctcaagagttacatctgttgaattgcgtcttcagctggaggagatgcatgaggaaaatgatagacttatggggttgtatgagaaagctatgcaggaaagagatgaattcaaacggaaaattttagagcaaagcgactctgaagctgtaaaacatattcagttggacgagaaagatgtcgaaatgagtgaagcagctgagaatcctgaagtgaaacatattcatgactccacaattgcagctttgaaagaagtgctgcagattgttcggagtaagttggagcttgtccaagataaggttgtgtctgctcaggatgcagtaaaatattttaaggcactcgaaatagctagtggtaaggccgaagaactttctgcaagaattgagcttcagcgtctaggtgcgcagcgtggtcaggaagaaatcactttcctgaagtctgtgctatcagaatcacagaagaagaaaaatgcttttgaaggcaagtatttcttgcctgcagcatcatgttggaacttggttttgaagaccaaaagtcttgcggagtccaagtttgatgccagctttggatcaatgaatcagaagaaagaacagttgaatcatctccaaactcgcaaaattgaactatctgctgcaagaacgagagcacgtgaatctgaaactgagttgaaaagcaaaattgatggccttaaagcgaaacttcgcgctcatgaagctcaaagaaaggaggaagaaaaggtcctgtttgctattgataacctggatacttccactacactaatgcataaacccaagaactatggcaaggcaaccgacctgctgaaatctgaggaggatcggatgaagcttctgtgtgaactacagaaggcccgcgaacagcgctccatggtacataaggaaataagaagcatgaatgagtgtgattatattgatcgtgagattggagtccttgaagcagaaatagaggattcctgcatctccatactggaaactgacattgagaagtttgtccgtgacaacactttagcagagatttgggagggtagcgcaaaggatctggaggcattgctggtcgattaccaagactgtgttttccaagtcaacttgaaggaggaagagatcaaggtgtgcagtgagtccttgcagtatcaagccagggacatggataaacttcagtcgaagctgaaccaagcgatccgggagctgggtgagcttctgcaagatagaagaagcctaaccgcttgcagtctggatgaacccacgctgcccgttggtgaaaaggtggcagcagaccttgaggccgtccggattcatgtcgatgaagctaagcagcttttgattctcgacaaccaagctaattcatga

SEQ ID NO: 9603 - DNA, 1989 bp, Zea mays
  Peptide Sequence Number=SeqID_52978
atggggcggtcgcgaggggtgcagaattccggcgacgacgacaccgtacacaggtcgaagcggaggagggtcgcatcgggcggggatgcgacggactccgtttccgctggcatcgggggagctggagaaggagggggcaagaaagcgctctaccactgcaattactgcaacaaggacatctctgggaagatacggatcaaatgctccaagtgccctgacttcgacctttgcgtggagtgcttctctgttggcgctgaagtcaccccacatcgcagcaaccatccttacaaagtcatggacaacctgtctttcccacttatttgcccagattggaatgcagacgaagaaattctcctccttgaggatatgtctcatgttaatggcaagaacaggaaggagcttctagctatggctaaagtgcagggtgaaagtaaaaaagaactattttatgttggaaaccctaatccctcagggtgggttttgtattgcatgtatattagaaaaagagttacatgggctgggccaaggtccataacacttaagaccgagtacaataaacaaacacaagaatctaacacccccacactcgaaactctagctgtgggagatgttgagactggaccaaaaccccaagaacagcgacgagggaagacccttgttgaagctgtcggcgtggcggccggggggggggggggtgctgccatgggccggtcgaccgtgtccacagcaaagacggttggggccgcagcgttcgcgtcagcgctaggggagggggcattagcagctgcagggccctgggcctgcacaaccaaggcggaagaatggccggggaaaggatgggtggcttccatggctgggacttcactgttgcctggagagctgactcctaaggctgaatctccattttctccctccagggtcaaggtggaagatgcacttggagaaggtctagcaggtcgatcaccttcgcacatagctgttggtgcaaataaaaaagcttcaaatgtgggacatattaaagatgggtctaatgtatcaaaagttgaagatggtcatgtcgatagaagtgttggtgtgaagaagcccagatattctgcagatgaaggcccttcgttgactgaactgagtggatacaatgcaaagagacacgagtttgacccagagtatgataatgatgccgaacaagcgcttgctgagatggaatttaaagaaactgattcagaaactgatcgtgaactgaaactccgtgtgctgcgtatttatctgtccaggcttgatgaaagaaaaaggagaaaagagttcatattggaaaggaatttattgtttcctaatcccttggagaaggatcttacaaatgaagacagggaagtttaccatcggtataaggtcttcatgcgttttctttccaaggaggaacatgaagcccttgttaggagtgtcattgaagagcgaaaaattcggaggagaattcaagaactccaggaatgtcgttctgctggatgccgcacacttgctgaagcaaagatacacatagagcaaaagaggaaaaaagaatacgagctgaatgcccaaaaagctaaggaaagtaaccaccttattgcaaatactaaattggtgcagaagatgaatcgacctatgaagattgagtctgatgggaatttggatccaaagaaaggtggtgttggcttagattctcctaaaactacaggacttacaagtgttaagcagtgggatgactgggatatagttggtcttcctggggcggagctattaagtgctagcgaaaagcttctatgttgccagaacagactgctacccagtcattacctgagaatgcaggaggtgctgatgcaggagatattcaagggtagtgtcctaaagaaggaagacgcacacgtcttgtttaaggttgatcctaccaaagtagatagtgtttatgatatggtaacaaaaaagctgggcaaccatgtggagttgcctacggtctag

SEQ ID NO: 9604 - DNA, 1212 bp, Zea mays
  Peptide Sequence Number=SeqID_52979
atgcagagcatccagcaactccgacttcccaaagcagccgacatgcgaaacaaacgaaaagcagacatacagcccgaagcgaaaggtctcgataggtcatcgttgtcgggctcaaggcacagagcagctccgacttccaatcttgaccctccgccctgcctccggaatttgcctaaccttcgaaacaaactggaccacaaagaagggaggtcccgcctccgccattcaggccgactgcgcaggcctgccgacgcaccaacgccgaacaccactctggcacatgcgctggtccgggaccaacctgccggcgcctccgatggttggcacgcggaggccgccaacctcgcgcgcaccagattccagccctccgcgcgcggcgccgctccctgccctgggggcgacagacagcatcgtctccgcgcctgcgacccactgccggccacatgcccccttgctgcgcgggcacccagccaggacccgcatcccccggatgtgccatacaaacgcctcgctctttgccgccaggatgccgccgaggccctggccagcccagccgcgctggcgaagggtcgccgtcccacacgcgccgttgccacctcctggaatttcatgcagttagttttctcgggggatccctctgggagacttctgaaatataacccacagacaaaggaaacgacagtactgcatcgcaacctccaatttcccaacggtgtgtccatgagcaaggatggctcattctttgttttctgcgaaggatcgcgtggcaggcactcaatatttgtgttcttcggagacaggttgagcagatactggttgaaaggcgagaaggcaggcactgtggatcttttcgctatcttgcctggcttcccagacaatgtgagaacgaatgagaagggcgagttctgggtggcaatccactgccgccgaagtctgtacgcccggcttatgagccgccatgtcaagctgaggaagtttttgctcagcctcccgatccccgccaagtaccactacctgatgcagatcggtggcaggctccacgcggtcatcatcaagtacagcccagagggccaggtgcttgacatcttggaggacaccaagggcgaggtggtgagagccgtcagcgaagtggaggagaaagacgggaagctctggatagggtctgtcctgatgccgttcatcgctgtctttgacctcgcgaaggcgtcttag

SEQ ID NO: 9605 - DNA, 351 bp, Zea mays
  Peptide Sequence Number=SeqID_52980
atggaggattctatcaaagagtatcaccatcatacagaggaggaaaccaaagactatgaaccatgtacaacagtcttcaacccaagaatcaccaagcattgtgatcttaggggcgagggagtggaaaatggagttgcttgctatttggcagaggggattttatcaggtgacacaaggcaacaagtgctacaaggggtggggaacgatgttgttggcgataatggcagcggtggagtgcgctcaaagggggggtgggcggcggtgctagtgcgcatggaggcgggcacgcgtgcggggggcacggagaaaacctttcttaaaaagaaagaaaacacacaagctcagcaatga

SEQ ID NO: 9606 - DNA, 195 bp, Zea mays
  Peptide Sequence Number=SeqID_52981
atggtgcccgtggtgcgaacttcgctgggtcaggggctctggtgtgtccgtgtcatcgactaccggccgtcggcgccaactcttctccacggaaccacaccacggcgtggccgagtctccctatggcgtaattcgtgcgcggaggtaggagacgcgccctgggccgttggatcgggcgtgttcggacaggattag

SEQ ID NO: 9607 - DNA, 516 bp, Zea mays
  Peptide Sequence Number=SeqID_52982
atggtgccagcaactccaccgcctcacccctccccccgtgccggtggagatggtcgtcgctccgttcggtcgtctccgcgaccgcgaatcttcaccccgcgtcgtcgcgtccttcctgcttccggctccagcgctctggtgtccggcacagctccatcgcgtcctgcaaaaggaggtagcggggtggcaggtcaacccgccccgggcttcaagcacagtgtcatcggcaacctccagaggtgccccacccctattgtcgcccttcttatctccttcctcaccaagcagtccctgcagtgcgaggtctctaaattggtgaggctgacacagatgtcacacggatgtcgctgcaacgctcgcccatgctgctccctcttcaaggacgcgactttcctccattgtggcattgttgataaggccgatcttgctggtgtgcactctctcagttatatgaacaacataaagttggggcgtattcttggccttcgccttcggcttcctgacattgttatgtaa

SEQ ID NO: 9608 - DNA, 411 bp, Zea mays
  Peptide Sequence Number=SeqID_52983
atggcgatgtgcgacgctcagcacagcactagacttcatttagagagaatgcaccaagctgctatacccgacagatacccgatatccgcccgatacccgatgggtacgggcacgggggttgccgctttggggctcggcacctacggcgcgcacatgttccgccccaagaaccccgcgtacaaagaggtttggcacacggcgtccctgtaccatctcgtccacaccgcggcgctgctcggggcgcccatcaccaagcgccccaacgttttcggagggctcctcactgctggaattgtgctcttctctggaacgtgctacaccgtggcttatcttgaagacaggaagttttcttcaccggcaccattggggggctttgcgtttattgctgcttgggccagcctcctcttctga

SEQ ID NO: 9609 - DNA, 132 bp, Zea mays
  Peptide Sequence Number=SeqID_52984
atgtcgcgcacgttcgacgactactatatcaaggattgtggcgtcatctcggcgccggagccagaaaaatcacaaacccaagagaccttaaagaaattcttgagacgggctcaaaatgagttcggattgtga

SEQ ID NO: 9610 - DNA, 516 bp, Zea mays
  Peptide Sequence Number=SeqID_52985
atggtgcctcccgttgacgtggccggcccgcgccctaggttgggcgatgtggaggctcctccgaggtcgaggtcgagtccgtcttccgtggccgaggtcgagttcgagcccctaggtcgggcgaggcggaggccgttggctgaggccagggcggagttcgagtcctggggtcaggcgaagcggagttcgtcgtcttctggggctgagcccaaagttcgtcgtcttccggggctgagcccaagtccgagccctgggtcgggcggagcagagttcgccgtcttccggggcttagcccgagtccgagccctgggtcgggcggagcggagttcgtcgtcttccggggctgagcccaagtccgagccctgggtcgggcggagcggagttcgtcatcttccggggcttagcccgagtccgagccctgggtcgggcggagtggagttcgccgtcttccggggcttagcccgagtccgagccctgggtcgggcggagcggagttcgccgtcttccaggacttag

SEQ ID NO: 9611 - DNA, 513 bp, Zea mays
  Peptide Sequence Number=SeqID_52986
atgcaggaatcccttgcaggaccgccatcgcagcaaaatcctcccgagggcctccctacactgaccactcccctactgcccttgcccctttcggatctattctgggccaagggatcagagatccacggctcagctcagtttcatccaaacgctgccgaacttttaatcgtggtcgttggctgggatccgacggtgagcaccaatctcctagctacagccgaaccccaactacggcggcgcacacaccacggcggaggcatcaccggagttcccaatccatgcctacaagcatttagttctcgattccctagcgctacgcgtagtagagatctcagcgaactcgacgaaggtcttcttaccgcgcttgaggcagggttgaatgctagctacgacgagcgatgctccgcggctgtgcgatgcggaatttctcatggttctggttgctcccacgccctcggatgtccaccgaagcttcgttgtgatctcgcagacccatctcgacttaatccttga

SEQ ID NO: 9612 - DNA, 363 bp, Zea mays
  Peptide Sequence Number=SeqID_52987
atgaagacaccgcacccatgcgacgtctcctggccacatggaggacggtgcctgaccccaccacatgggcaggccaaagggcgccacatggcaagagaaggcaacacatcccagtatgtatcgtggggtccggacctccacagaaggacacatgacccctatacgtataagtccggagcctccgagcggcgtcagggtcatccagcaggcggcgtgcctgctgggtctgcagcgaatagtgcgcccgtgccaagcagtgcactatgttaccccttctacaagaagcttcccctgcacgccgaagatacgcagatctcggacgataggacacaaggggattgccccggcatcaaatatttatag

SEQ ID NO: 9613 - DNA, 669 bp, Zea mays
  Peptide Sequence Number=SeqID_52988
atggcggcgcaagggcaggaagggcggtttcctcttctctggctaagtctctcgggttgcgaaaacctaagagggaggcaggaagcggagcaaagaaccgtcaccagaccctctcccggcgcttctggcaggagaagcgggcgacgcttcgccttcgccgtaataaccgcgccaaaaaaggctccgagcctccctactgatcagaggttcgaaggctggccccccgaagggttcgacagccgcctcagatcgcgtgggccctacacccactactggtcagagcgggagcgatcttgtaacggaatcccatcagaggaaggcatcgagccctcggaccccgtcgccaggggaccgggtccggcagatcacccgcagctcaccggagacaccatgttcggcgcccatcgagggcaacatggcgctttccccccctcctccttgcggaaaggcgacgcaggggcgtatgtaaaaaaagccgagtctgtccctgatcgccctctcgccctgcgcagaggctcggggactgctctcgcaaacccggctccggccgaaccgttgacagcgtcaacataccagcccgagaacttgggacccgaccgtacacccgggctacggccagctcgcatgagggaacaaccagaccagccgaagcattacgcgaggcattaa

SEQ ID NO: 9614 - DNA, 57 bp, Zea mays
  Peptide Sequence Number=SeqID_52989
atggcggtcagggagatgcttgcggcctactgggtacgtttataccttcgcctctaa

SEQ ID NO: 9615 - DNA, 237 bp, Zea mays
  Peptide Sequence Number=SeqID_52990
atggcaacgggtacatacccgtcaggtagtaccattccatacccgtacccatcaaaaaaattctacccgtcgggttacccatatatactcgcgggtataaaatcttacccatacccgtacccgcgcgggtatttttacccgtcggcctactacaggggtgcaatgggaattttgcttgtctatgatgttactgatgagtcatctttcaatagtacgtgcacagtgcatttcaactaa

SEQ ID NO: 9616 - DNA, 483 bp, Zea mays
  Peptide Sequence Number=SeqID_52991
atggccatcgcagggctgcgcctgctcgaggagcgcgcccaggaggcgatcttagcgtcttgcagggatgttctacgagcctctgggttccggttcgaggacgcgtgggccaaggtgatcccaggctcggataaaggtgtatatgcttgggttgcggcaaattatgctcttggaaggcttggaggggatcctaacaaaaccgttggaataattaaacttgggggcgcttcagctcagttgcaagactggaacaaccgactaccattcaatgttgcaagtgatttctattctcaagaagctacgagcgaaaattttgtgtctcaaaggatctcaaaggactgccacagcaaccgcggtgctgtggaggacgcctccgcgctcgccaactcccttggcgtgctttgcaaggcctgcaagcctgagaagcttcagtcaaactggagagataggtgtttggcattctcttttagaaggcccatttga

SEQ ID NO: 9617 - DNA, 822 bp, Zea mays
  Peptide Sequence Number=SeqID_52992
atgtcttcgcgctcccttatgcatcgtgtctttccaccttccaagcccccggatgggggatacccgccgtctttccgcctcatcgttggaggaacgcaactccgcaggagttggtacctttcagccatcgttcggcttcaaggattttcatcagccagcccggctgcaccccttcgccagcggccacccgagacggcgaccaccagcccctgggtggggagaagcaagccgggctgcgatcttggtcccaccctcagcttcaaggatgttcatcatcctcgttggggtggaggccgggctgagctggagctctacctcccgcgcgggttcgtgggtcaccctcccctgcggcgttcgagggagagggcgctcgctggccctgcaggcgggtcggacttcgacaacgcggggctggttgacggcgggcatcgtcagtcccagcgtgtcgagctcgtcggcttggctcccggtggcccctcctgccggaaggcggctgccgcgccgtccgggtcgtccgttggcgggaccgatgctggagttgaccagccgaagcctcgggttgggctggcgccctctgaggacggctggccgaggccctggggcgaccggccgagccgcctgctcgggccggattcccggagaagaccctggcagcgattgcccgggcgtggcgatgacgtcgtccttcagagtggaaatcctcggaccgcgtcgccgtccgaggctaggtcggacctcgccgaaggtgtcgtcgatgccgagggtgctactgcccccttccagcgtcaagacccgagtctgcaggatcagattgtcttgtag

SEQ ID NO: 9618 - DNA, 48 bp, Zea mays
  Peptide Sequence Number=SeqID_52993
atgggcacaccggacagtccgatggtgcaccggacagtcgacagttga

SEQ ID NO: 9619 - DNA, 216 bp, Zea mays
  Peptide Sequence Number=SeqID_52994
atggtgttcgatgaatggctcaaaccggatagccttgtcgaaatcatagctcctagtcgattcggacatggtaagcggatccatttatttcccgtacgtgaattaaccacgcgatgcggagaaccagaactgatcgaccacaagatggtgctgatgaacggaactggagatggacagacgaagcaagtatcgggacaaaggatggtcgtcaagtga

SEQ ID NO: 9620 - DNA, 186 bp, Zea mays
  Peptide Sequence Number=SeqID_52995
atgaggactgaggccaacacagtggtgttcggtggtgcctcgctagagccaacaaattcctacaccaaatacctctacatgaagcctaactcagttctaaacactgctagggaaaaagcgaccgagaagctctctgatttctctcgctcaggacacacccctgcacgacttgtcgatgatgactga

SEQ ID NO: 9621 - DNA, 1134 bp, Zea mays
  Peptide Sequence Number=SeqID_52996
atgtaccagtactccgacttcccgtggccggacaccgtcaccgaggtgttccccgaccaccggcaggtcatgtcctacctggacgcctacgcgcgccacttcggcgtgttggactgcgtccgattcggccgccgcgtgctcgggatggagtaccacggcgtcgccgaggacgacgtggcggcgtgggaggagtggggcggaaacggccaggcgttcggctgcgccggcgctggcgagtggcgcctcaaggtggccgacgccgagggacgcattgagtactcgtatagatatccatatgatcctcctccttatagattgtatggtgcttctccttgttatgcccctccttttggtgcttctcatgcgttccctctcctaacggtggtcctcctcgtgcttcttttcgttctccgccagtcaagaatatttttgaagtttgtaaagtggttagtgcactttgaccttgttgagggcaacggtaaaaagccgagcagattagatgatgctatgccgctcaaagctggagcacaagtggcatgctcttcgtcactagcccaagtggtgtgtgtggcacaattatcatttctgcttgtaaaaattggcatgatgccatccgcattatgctttggaggtattcactgcgtgccctgcacagatgtgaccgttttgaaaaatatactgataattcctgggtgtcccccccaatgggtgtgggcaagggacggcttggattttggtgactcggagtactcagaggaggagttctcctctgagtctgaggggtctccggatcccatccccctgcgtgagtcgtctgacgactcagacgactcccaggggctcgcggcggaggtctggacgtacatccgggccgtcgagcgctccgggctcgagggctcggatgagtcggagtactcctcggatgaggaggactcgaacggcggcggcgaggacgagggcggcgacgacgacgacgacgacgaaggcagtggcgacggtgacggtgacggcagcggcaagggcggcggcagcggcagcaaggacggtgacggcggcggcagcaggggcggcagcggcggtggcggcagcagcaggggcagcaacaggggcggcagcaacagggccagtggctag

SEQ ID NO: 9622 - DNA, 981 bp, Zea mays
  Peptide Sequence Number=SeqID_52997
atggagagtcatgatctccggacagaaagggaatcacagcttgtgggtggcaatgagattgatggttctggttatgactatggtactggtaagtggtattctttccatttggaaaggatggctcgtcttagacacactgcacgaaagtccgtcatccccttcttaccctctcgccttgctgagcgtccgcttcgccgtcctgtgaccggactgtccagccacttggagaggctgcaccaccgcctgcatgaggagcaggagcgtcgacgacaggagcagcagggttcttctttctcgctccaacaggagatagagtccgagccggaaggatgggttgctcgacccatcactcgcgacgctactcgcgggtgtcacttccatgatgcgctcgacaccctgctacatcgggcacttaactggtgtacttggtccatcgagtatcgttgtgtggtctaccagcatagtcgtggggtctacccggaccgctgggaggcgacctgcttggtgcgccgtctggagaacagtctccagggtgcggaggcctgctcagagcactattctatctctgagtgggactcagctgaggcagccatgcaagatgctgcacggcgtgcgctttcacactactgctcggttctcggtggggtagctgacggtctcaacctgaagtattacccccaccgtccatctggcagcacaggaggcgtgattgtctcacctgttggtgaggacaatcctaggttgagcagcatagtcaacctagccgccgtgctaaacacggagctggaccatgcattagacgagctgagtagggctcatgctgagatcaccctgttgtgggctgagcgcgcggagcgtcgtcacctggatgatggttcccccgctcctgtcgggactcagcacccgtaccgctcacctcggcgtggacaccagccttatggcaaccccgactgcaagaccaagatgaatctagaaccatag

SEQ ID NO: 9623 - DNA, 303 bp, Zea mays
  Peptide Sequence Number=SeqID_52998
atgactgagctgctcctctcaacagacagggaccatacaggactttctctctgtcatcgcactgagcgcacgcttgtccctaggcatctgaggcatctaaggctggggtggggcctgctgctgttgctgctgaatagcggccagagtctgaccgatggcttgaactgcctgagtctgcatcaggaacatctgttcgatggacattgggggcgggggcggcagttgctgttgctagggtacctcttccggctgagcggcttgctcctgctgagcacgccttcctcctctgcgcctgttctctga

SEQ ID NO: 9624 - DNA, 886 bp, Zea mays
  Peptide Sequence Number=SeqID_52999
ggccttcttagagaaggttggccgcgcgggaccgaggacgggacaggcgctctcttggggccgctcgcttccctcacccgcgtggacgcttgtaacccccctactgcaagcgcacccgacctgggcgcgggacgaacacgaaggccgcgggacttccacctctctcacgctcgactccggccacctcgcctctccccccttcgcgctcgcccacgcgctcgacccatctgggctggggcacgcagcacactcactcgtcggcttagggacccccctgtctcgaaacgccgacatgattagtccacctcaaccacaagcaaaagccacgaaacacatggatacccaaacagaagaatcaagtcaggctcagccatatgagatacaaacacccaatcaaccctcacctcccattggtcaagcaaagttgactcgcaaagaactcaaagcaagaggtgcttgctactactgcaaaaatgaaggacatattattcgcgaatgccccaagaagcttctagaccgactagagaagaaagctgccaagcatgacctaagcgataattcagaagaacaaccattttataagtacgatgatgaaggaaccaggcagccaaccccgaccgcgcccaaggcacctacagccgacgctcctgctgaccgcaccaccccgacgccctgcccgcggccacccggcgcgacccgatcgccccagccgagcgacgcccagcgcgcgactccgaccgcgcccaggaccgcgccctgccccaacaccgacgctccagccgccgacctcgccacgcgcccacgacccgaccgagccgctacaccgcgtcacgacctcgagcacctcggccgcgccctgcgcgccgtgtccagtgccaagccgtga

SEQ ID NO: 9625 - DNA, 498 bp, Zea mays
  Peptide Sequence Number=SeqID_53000
atgggcatcccggctgctgaaggagaccctgatggagacggagacgacgacgacgccggtggtagttcgagccatgacacgaagctttcggaggagccagagccagatggatggatcgctagacccatcactcatgacgccgctcgcgggagtcacttccacgacgctatcgatgccctgtttcgtcgggccttcgaccgacacacttggtctatcgagtaccgttgtgtagtctaccagcatcgtcgcaggctatacccggaccagtgggaggctacttgcttggtgcgtcgtctggacgatgatctccggggtgcagaggccttctcagagcactattctattactgagagggatactgccaaggcagccatgcaagatgcagcacagcatgcactttctcagttatgctcgttgtttagcggggtagctgatggccttgacctgaagtactaccctcgctgtttggccggcagtgctggaggtgtgattgtctag

SEQ ID NO: 9626 - DNA, 1209 bp, Zea mays
  Peptide Sequence Number=SeqID_53001
atggtgggggtcccggccgccggtctggcgaaccgccacgccactccgttgagggttggcagccaggccaagatcgccgccctcaaccctaggtcgtcccagagtggagggatgtcctggggagggattagggtctcaggaatgaaagactcaccagtgatccccttcactaggagttccagttcctcccaggacaagtcagagcccggcccacgctggatccgaccgatgtcgttcgagccggtgaaccaacaacatagacacgccctattctgcagtggccaccagttacaggctcttgatcctatccaatatgggctcgaactccggcgccagcgatggcctggccctccattgcttccggtcaagccatggcccgtcgctcggcagcgccaggcggtcgttggcctccatactggcgatcacccagtcgacacaccagttttcccacctcgtgccaccaaggggagagatgtgtgcgaagatggccgcctagaggatagagtggggggtgaggtgctgaagctggaggccgagctcctccaacagcagcagaaagaagggcgagatcggcagcgccaacctgcaggagaggtaggagatgaagagcatgaactccccgacggtgagattgctgaggggagtggcgccggcgcggaccctcccagcaaacgccggcgtgctccatccaagcaggctgcgcaccaggttgagcaccacctcggactggaaacgctcgggacgaaccagcgaggccatggcgaccgcggcaacggagagctgaagagcgcgaatgcaaaggggcgtagagggctcggaggtgaaaggacgcagcagttggagagaatgcgaaagcgtaaccgctgcacgcggggagattcccttttcaaggaagaactaccccactcgtgccccaaaaaattccttctgacgcgcaccttgcgtccaagcaactcaatcactgacatgggggcccaagcctgcaagtcatgcagctggggtgctggtctccgagtgcgaagaaggcgaactgccacgcaaggagcaaaccaccgcgcacgatcctgtgtcgcctcggggccgctgcgagggaatatttttaacctaggcggcggcaacgaggcgccccgcgtgtggcccgacaaaaccgccatgcgtgggggccacacatcagtcaagccacgaggacagacacgacagttgatgtga

SEQ ID NO: 9627 - DNA, 549 bp, Zea mays
  Peptide Sequence Number=SeqID_53002
atggggacagatgtggcagttgacgtgaccgagggcggactgacagcgagccatggctcgccccagtcacgggcgactacaatgggtccacggcagcgcccgactccaccacatgggcgggtccagagccgccatgtgtccagaaagggtggcatactccaaggtgtcaacagtgagtccaaacccccacgagagagcgccggacccctggatatacagtccggacccccaaggttggtctcggacccctggatatacagtccggacctccaaggttggtcccggacctccacttgtgcaagccggacccctagaatgggattcggacccccacgtatggggtccaggccacccacagggaggtcccaaggtcccaagacagaacatacccgggccttgaactggaccggccttgaactggacctaggcgggggtccggtgtcgacatgtgtacagacccagtctggtgcggacatgtccgcatacacatctactctgcgcccaggtggagacctgatgctgccacatggcctaccgcacgtgacgtaa

SEQ ID NO: 9628 - DNA, 486 bp, Zea mays
  Peptide Sequence Number=SeqID_53003
atgacctcattaatcattacgatacttattgattatgacaagaacaagtatattggagatgaaacctacgggtacccgctaactgatgggtatgagtttgggcaaaatatcaaacccgtcacggggataccccttactacagtgagaagacgctatacccgcacgactacctctagtcacgtggtgaacaacaccctactccaccgcgtggacggctccagggtcgccacgtggccagggaagacgatatacaccaagatgtcaacagtgggtctggacccccatgggaaagcgccggacccctgtacatatagaccggacctccaggcaaggtccaggacccccgcgggcgcgacccggacccccgggacaggtctcggaccctttgtgtggggtccgaactacccacatccgggtcccgggactctgggacagagaatactcagaccttgctcaggcaggggtccggtgccgacacgtgtctag

SEQ ID NO: 9629 - DNA, 798 bp, Zea mays
  Peptide Sequence Number=SeqID_53004
atggacaagggcaaaggggctgccagtagctcctccgccccaggtggtacagggggtacggaggaagagaggcgacgccggctgcgtcgcgccgacgggtcgccggtctcggaccctcccagcggggccgaggaggtcgatgcccagaagcgacagaggaccgccgatggggccgaggaggccagcccccaggcccagggcgcgcagagacgtgccagtcctccaccaccaccaccaccatcggtcatcatgcggacgggtctcaacgcatcattattcgccagagcttcctccccgaccgcctccaaggccgtgcccgccggtgggctaggctcccagcagcaggcgttaccgggctcccatgctccagctgggggttcggcagcagtggagccaccgatggcctacggtgccacaacggcggagggggtccccactgctccgttggcagcggtagaggaggcccctgctacgtccacccccgtcatcgaggttgacgcggggggcgcgtccagctccgtcccgccgctcaccccggaggagacggaggtgatctttgggcggcagctccggttcggcgccgagccagaagcggcgccgtccgagctagcgcgggaccgccaagactacaagaaggacctccagagggtattcgccagggagctggaggcgagccggaaggagaagaagctggctaagaaggaggaacatttgaaccagagggaggaggtcgtcaccgagctgagtaccaagctaagtgctttgaacacaattttggaggagcagcagactcagtag

SEQ ID NO: 9630 - DNA, 462 bp, Zea mays
  Peptide Sequence Number=SeqID_53005
atggttcatatcgtcaagcaccacgacttcgtccccgaggatttcccgatggaggaagaagctgcctcctccacgccacgggcctccaaccgccctacgcctggtgctgctgctgtgcgctctgtgccgcagcacactcctgcacaggcatccagagcgtcaagggctgcccccggtgcgttgtccacagccagggagttgttgtgccaccctcctagctccacggcctcgtcgggggccatgaagcagtggcgtgacgatgtcgaccgtctgctcggcatggcgcactctggctccaccaggcccaggcctcggtcgtcccggcgtcaatatgaggcgtcggcatcggtgcgctcgccttcagtgagggctgcgccgaccgaggatctacgggtggagctcaaccgcagacgtgcgagagaagatgctctagtctctctggagaggcctgatgacctatag

SEQ ID NO: 9631 - DNA, 99 bp, Zea mays
  Peptide Sequence Number=SeqID_53006
atggggaagcctgtcccatcactcctcatgctcctcctcagccgaggatttaataacattatgctaaagaaagaagaactaagtcaattcgtaacttag

SEQ ID NO: 9632 - DNA, 318 bp, Zea mays
  Peptide Sequence Number=SeqID_53007
atggagcagaggattacccggtctacgctcgccggcggtcgggtggagtccggcgaccgtggactggtctctccggcgaagcaaacttcgattcctcgctcggggagcttcaccgaggtgtgcacggtcttctccgagggctggacgaggctgggaagggtttggctggccggtctacggtggcagggggatcgcgcggccgaggacacgccgtgtacgggcaaacgccgggggtgccttaggtggtatgccacatttttggtatacaactcaagtggttttggtgccatcatcaaggtgaacacggtggatctttag

SEQ ID NO: 9633 - DNA, 465 bp, Zea mays
  Peptide Sequence Number=SeqID_53008
atgggtgtcctagtatttggagctgtgatccagggggtccgggcacacggattggcttcccaagctaagtcctgcagttcctgttgcatgaatcaaagggtagaagataccagctggtgggacctatggatctatctactcatcatcggcaggatcccgctagaagcgctcgaccaccacctccacgccactggaccagcgatcaccggctccaaggagatggccgggtcgtggctccggaagcacgtcaagatgtactctatcaccgcccgacagagcctaccgccctcggcctccaggcgggcgccaagtatctggtccagacatcagaggcggtcgacggcggaatccagcaccgagagcgcgtcggagatggacgtcggcagctccgacattgggatggggctcacccctagcggcaccagtgccgtgctcgccttgccggcccaggcagcgatgcgctag

SEQ ID NO: 9634 - DNA, 321 bp, Zea mays
  Peptide Sequence Number=SeqID_53009
atggccatgatgggttcaacatcggaaaagatgtacctctgccaggtaagttattgtaactgcttccacactttcgtatctccgatgtattgtaatgtctgtgagacgggtgaaacgctcttgggaaagcgcctcagtgactggcgtacccagctggaggagcgcaccaaggtggcgtcccagcggttcgcctttgagcagtccgaactggcgcgggaccgcaaagactacaagaaggacctccagaaggtgtacgacagggagctggaggcgagccggaaggagaagaggatggccaagaaggaggagcacttgaactag

SEQ ID NO: 9635 - DNA, 615 bp, Zea mays
  Peptide Sequence Number=SeqID_53010
atggccatgaaccggtacagggccggcctaccaatgatggcgttgaaggggagcatggctgatgacgttgaggtatgccccaccgttgatcagcacatggcgcagccacatgttggcgatgacagggcggtgatgagcggtagtataccgacccctgccatattgttgaggcagtcggatgccccgaaggagatggtggtgctcctccaccgctggtgtggagcagccttcgggacccctggggtcgcggacaggacctcgcggcgcagggacttgacattcctgtgggaggaccccctcaggcgactagtacccgaggtcccgctctcctgcggccacatcaccgtcgtcggccctctccttgtcaggctagcgacgaggtggggaaccatccttggaggtttgctcgcaccgttcgctgacgcgcttcacgagcttgataatcttgcggcactccacggcgctatggcgactgttgagcctctcgtggccgcagttcttcttcttcttgccgtcctgggcaacggcccctgggccacccgtctgggcaaccccggtctgtggggccgagtgccatgcgtggccctcggtggctctggcacacttgtcggctag

SEQ ID NO: 9636 - DNA, 825 bp, Zea mays
  Peptide Sequence Number=SeqID_53011
atggacaaggatcgccagggggctgcacaaaagcgccaggcggctgtcaggcttgttgaagccaggccaaaaaggcagcgggggtcggcgaaggctgcggcccccggcggaggcaagccgccgctggcggcgaaggtggcggaggccgcgaaggcgacccgagcgttgccgtcggcaggcaagcgtgtcgccgacttcgccaccgacatttgtgtggaggactatcttggtgggtcggacgaaggccaacttgttatggttgcgcctgccgcggcgacagcggttgctgctgcagcgccgaaggcgaagggcggggctcttagcgccagaggcgaggtgtcagccctcgtggttgtcatggatgaggcgggcgctgcgacccgccgactgaaggaggtgacagaggcgctgagtcaggtggctgacttcgccagccgcactgcgtcgggggccctcacggcagctgtggctgccgaagtcgagagacttcggacacaacatgctgacgccgtccgtgagaagtcggccgctgacagcaagtgtcgcaagctggcggacaaggtggccacgctggagggagagaaggctgacctccggcgccagctggcgggggagaggagggagaccaacgaggctcttgttaaggcgcaagctgcgcaggcggaggctaacctggcacgtgcggagggcaatcttgccagggagcgcgccgagcagctgcaggagcggctcaccgcccctggagagccgcgtggagagggtcgaggccatgtcgcgcgcggaggcggagcggacgcgccagctgcttgtggatacataccgtga

SEQ ID NO: 9637 - DNA, 345 bp, Zea mays
  Peptide Sequence Number=SeqID_53012
atgacagctacatgggtatcctccatcggaatggtagcccccacgccagattcgccaggaacacaactcttttggtggaagaacaccagtttcgacgaggtgcaaaaggtcagcctcggagacaacgaacatgtggttgccggcaaatggaagttgttaggatcgattggtgggataattggaatggcaacactctatctcttcctcttgggagccatcacgatctctcaagcgaagcgggtggactcaagagctcaggaaacagagaagcggctgagggaaaagcgagaactagggttcgaattcaaggggatacgtcagcagaaatatgggttggctcgataa

SEQ ID NO: 9638 - DNA, 237 bp, Zea mays
  Peptide Sequence Number=SeqID_53013
atgaggcatcctgccgtgatcagccatttccaggtacccgagcgtcgaacgtcccaagacaaggacagttatgtcctcgggtactcggattatccccagaatattcccataaaggaggaaaacgaggaagaaactgtggtagaagcagaagttgtctcccaagctgaaaatcctccagcagagaataacttttacttcgacatctgcggagtggaccctgaacctcgtgcaacataa

SEQ ID NO: 9639 - DNA, 1299 bp, Zea mays
  Peptide Sequence Number=SeqID_53014
atggagagtcatgatctccgggcagaatgggaatcacggcttgtgggtaaagtggttatgagattgatggttatggttatgattatggtgctggttgtcagcattgcaaccactgctcaggcgaaggtgaagctgtggaaggagacttccaggagttccaagattacgacgagttctaggtgtgggttagcggcaacccccagtcggctgcctgtgaaggccgcgttatctacgtttcttttccgcactttgatttattgtaagaactatatggacgtctcagacatggctcgacttagacacactgcacgaaagtcagtcatccccttcttaccctcccgtcttgctgagcgtccgcttcgccgtcccgtggccggacagtccagccacttggagagactacaccaccgcctgcgtgaggagcaggaacgtcgacgacaggagcagcggagctcttccctctcgctccaccaggagatagagtctgtgaggagctgctcccctgtgctttctctggagccgccccctgcaccaccactgggcgccccagcttctggagtagctgctggaggagacccagacgacggaggaggcgacgacagctcgagccacgacaccgacttctctgctaatcctgagccggaaggatgggttgctcgacccatcactcgcgacgctgctcgcgggtgtcacttccatgatgcgctcgacaccctgctacgtcgggcatttgaccggcatacttggtccgtcgagtatcgctgtgtggtctaccagcatagtcgcggggtctacccggaccgctgggaggcgacttgcttggtgcgctgcccggaggacagtctccagggtgcagaggcctgttcagagcactattctatctctgagcgggactcagctgaggcagccatgcaagatgctgcacggcgtgcgctttcgcactactgctcggttttcggtggggcagctgacggtcttgacctgaagtattacccccgccgttcatctggcagcacaggaggcgtgattgtctcacctgtcggtgagggcaatcctaggttgagcagcacagtcaacctagccgccgtgctaaacacggagctggaccatgcattagacgagctgagtagggctcgtgctgagatcgccctgctgcgggctgagcgcgcggaacgtcgttttctggacggtggttcccccgctcccgttgggactcagcacccgtaccgctcacctcagcgtggacaccagtcttatggcaatcccgcctgcaagaccaagatcaacctagaaccatag

SEQ ID NO: 9640 - DNA, 420 bp, Zea mays
  Peptide Sequence Number=SeqID_53015
atggagagggagccggcgtccaaggcgccacttgcacagaggtggtcgagcgccacggacgagctcggtgctcaacctgctaccctcggcgaggtccaaaaagacagggcgttggaggtggagaacgcagatttcatggcgaatgctcgagcctgggtggaggaactaagtgcagccctggagaatctgcaagcatactgtaacactctgcatgaggaggtgcacgtgttatacgaccggctgcatccgaatgtgccaccagaggttgcaccaatgggagctggaacatctggagcagctaatggaggaccttctggggaattggatctttttggagcccctccttccatgaacctcgcagatgaacattctcccaaagctgacagtggagcgggagcagccaaggacgaagataactag

SEQ ID NO: 9641 - DNA, 288 bp, Zea mays
  Peptide Sequence Number=SeqID_53016
atggagagggagccggcgtccaaggcgccacttgcacagaggtggtcgagcgccacggacgagctcggtgctcaacctgctaccctcggcgaggtccaaaaagacagggcgttggagatggagaacgcaaggaggggaggaagggtgtcatccctggaaaagatagcaggggaagggcgccatgagagggagctcggcgaccaggaaaggaagagctctgcgcacagcacttgggcagatgtccggccatggaggaagagctccttctccctgctccatccgaactag

SEQ ID NO: 9642 - DNA, 267 bp, Zea mays
  Peptide Sequence Number=SeqID_53017
atgaccccgcaagaaataaagcatgggtccccgcgaactgttccgtcagccgtccccgacgtggacgagccaacttcaaaggatctcattgacggagaccgggtcttcgccctacaggccctaaacaaataccaagcccagaccaaagcatggcgcgaccacgcagtcatcccgagggagtttgtcacacccggttttaaaaaggcaaaccgaatgcgaaccattggactagctttatgtggggataagtcaagcagttgcttttag

SEQ ID NO: 9643 - DNA, 696 bp, Zea mays
  Peptide Sequence Number=SeqID_53018
atggccggctcggccgcccccgcgcgccctgccccgtgcccgcccggctcggccgcccccgtgcccgcccggaaacttaatttagaatttcgttatgctagtggcaatgagattgatggttttggttatggctatggtgctgttagacacactgcacgaaagtcaatcatccccttcttaccctcccgccttgctgagcgtccgcttcgccgtcccgtggccggacagtccagccacttggagagactgcaccaccgcctgcgtgaggagcaggagcgtcgacgacaggagcagcagggctcttcttcctcgctccaccaggagatagagtctgtgaggagctgctcccctaagcttcccctggaggcgccccctgcaccaccactgggcgtcccagcttctggagtagctgatggaggagacccagacgatggaggtggcgacgacagctcgagccacgacaccgacttctctgctaaccatgagctggaaggatggtttgctcgacccatcactcgcgacgctgctcgcgggtgtcacttccacgatgcgctcgataccctgctacgtcgggcatttgaccggcatacttggtccatcgagtatcgctgtgtggtctaccagcgctgtcgcggggtctacccagaccgctgggaggcaacctgcttggtgcgccgcccggagaacagtctctag

SEQ ID NO: 9644 - DNA, 2484 bp, Zea mays
  Peptide Sequence Number=SeqID_53019
atggtcgcggtcgcggacgcggggagccccgcgaggctcaacccgctccccaacaccgacgcagaggaggaggaggttctcaccatcacgcccaccaagtgttcgacaatatacctcaaccgcggcatctactccgtccgcaacccgatcctccaccgtcagcacctactccgggactgcgacggcaaccacgtcgacatccttcctacctccgagttcgacgagggtcccatcttcgacgaggagccctgcttccaccgtaacctcctggattcagatccagactctccctacgactgggtcgtccccgtcatcgccgtccacagcagcggctacactgagatgtcccacagcgaagccgacaaggtccccgcgaccgccgcgctacccaacctgcgcgagaagatctgctgtcggttcgtcgataggacgaagctgtccagccatgtccgcctcatccacttctccctaccgtcgccggaccaggcgctcggcatccccatcggcacgcatgtcttcgactgcaccagcgttgacgggaagccgtgtatgcgatcgtacacgccgacgagcaaggaggacgaggttctcgccactacgcccatcaggtgtttgacgaattgctttagcatcatacagtgtcgtttcttgcactcgtgcaattgcagaagggatgcagtgcagcataggcaatcatggccaccgcctgtacagtatgggatactgggtgatggtgttcaagtctggcttccgccttggccaccacctgtttgggaattctggctgtcactgaagattactggtccacagatgatgcattcggtaggatactttggattgccagttatgccagcgacatgtattacaatttcagagattgtgtctggttcaagcgagcaaatatttcctgaaatatttctacaaagcttacatgagtgcagagtttgtcttagtgaaaatactggcagaagtttactccagctcccatgccaccatttgttttgcttgatgtgtatgaagtctaattgcagaattcatgtgatagaagcggatttaacccaggtctggttaagagaagatgcagttgcttacttcaaaaatatgtttgatggtggcctgaggccaacctcaaatgcatttaacaaagttatagatggctgggtgaaggttgatatgctcaacgaggcccatgggttctttgatatgatgcctgaaaaggacatagatgatgttacagtggtcattttctactttggaggacaacatgtgggctgggaaatgaagacagaatggttgtctaatggttggctatgtttggtatgtggtgcatctgatactcaagagcttcctctacatttcattaaacttgcaaaggatacgtacacatctgactgcatgttcaaaaaaatcggatatggcactgtgagtgaggctttggtttacatgctgtccttactatttgttcgaagagattattgcaacgaggaaccattttttaggaatgtgcttgagcattatcaatgtggcgttgagatgatacggagggatttatttattggccattggaaacattatcttcaaagtgctataccacttcaaccctgctttgatggtctcataaatgttggcaaggtagccgcacgtaccctccaagatactgttgtagggaattcttgcattgtgtctagacagcctccatggccacccccaacgcgtcaccatttcagaactatgcatgctgaaactgtggcaaattggaaccacttattcagttggtgttttgcaaattcagatttgggtgaattactgactctcaactgccctgctgacagagcaatggtgctgctgatgtaccaaattgagttgagactgctcaattgggcctgggaagacgagtgtgttttcaacctgtgtctacttggattacacagtgctgttcatagcagcctagccaatgcttataaatcctggttgataacaatgattcaccgaacacactcaattggccaagatcatttttggcataacgtggataggtgtgtggtgtgtggaattaaggatagatgctgtgcaagattggcaaagctagttttatctgctacactgacacaagattctggcaagctttctcaacttgaattgcaccatccattgttgttgaatactcagtcaagcggcttgaggacaagccgcatttcaagcagtggggaatgtcagcatatcatcttctcctcaagtcaaagatggtaccagaagaatacggacaatgctgctacgacgacgatgactatacatggagtatatgaagatggaggcatcgcgggaaaaggcacaggcgtgccaggagagcgggctcggtgtctaatgaaaactagcgtccgtctagcttgggctggagtgggccttgtaaatgttggcaggtcgattggtcgtgtggaccgagtggtcgtgtggttacaagtaacacccaaaccctggctgtaa

SEQ ID NO: 9645 - DNA, 174 bp, Zea mays
  Peptide Sequence Number=SeqID_53020
atggggagtagctctctccgggcagaatgggaatcacggcttgtgggtggcaatgagattgatggttttagttatgactatggtgctggttgtcagcattgcaaccactgctcaggcgaagatgaagctgtggaaggagacttccaggagttccaagactacgacgagttctag

SEQ ID NO: 9646 - DNA, 2598 bp, Zea mays
  Peptide Sequence Number=SeqID_53021
atggatgcaaatcgtccacgcaaacggggcagtgtagactgcccccgctccctaccccgcaaccgcctcccgcacctcacgccccgccgtcctccgcactcccgcgcgtcgcagccactgcgaatccagctcccgcgcgccgcatccgccgcgaatccagctcctgcacgcccgcgccagcgcctccctactcccgcccgcccgccagcgcccgcaacgtcgcgagccgaggcggcaacagaggcacaaggaaagcaggcacctcgattctgccgctacttcgccgtttccgggctacccacgtccgcctcctcgtcgcgtccacgtccgcgactgctcgccaccgccccagccgagaagcggaagcagcggtggagccggagcggcggcgatgactcggggatttccatcgcgtccgccaagctcagcgaggtgcgggacctcctccgcggtgcgctcttcctgccgctcttcgagggattgcgggaggaaaggcccgtgttctgcctcagcgcggatccacaggacttcaacagggagggcggtgccccggttccgctggcgagctgcatcgtctccgacgcctggcagccatcagatcaagcagggatgcgcgagcgagacttggggggcgagcccatccacccacgccggtcgcaccacccccacccggcggccttcaagtctgcatctacattctgcagtccaacgccacccgcaccgcttgctttaccagcagtccagcactggcgtgggccgtccccgtccgttcccctcgccgatgtgagtttctccagccgtcaccgtcaagtaacggccccccaccccaccccgcgtctaggctccttctgggggaggccgcggctcaccgagctggctgcgcccccaccggcgggaacgacaatagtgccacactggacgctttcctggtgcagcacgacatggagaacatctacatggaccggcggggtggggagggagccagcggcgtctcctcccgtcgtctacacgcagcaccacaacgaggcagatccggactttggttcctgttggtacaaggagatgctcgaccatctcgacaacgtgctggacaacgaacccgtggtggtgaagagaggccaggacatcgtggaggtgaacccccagagcatcagcaaaggcatggtggacagcctgctgtcgtccatagtcagaacggggacagacctggtggatgggatggaggacgccgcgaaggtgttcgacgaaatgttgactaagggcgaggaggtaccatctgcggtgatgtacaatgctctaatcaatagctactgcacaggtgcaaatatggaaggcctttgtgcagacaagactcgacaattggttgacatcacggactggatcgtggacacagagattaccttgctcagggacaacaacaggccaaaacctggtggcaatgttacctttggcgagttgctcaagagcagtgtgctgacagaaggtgtccgggtgcttatgctggtctggaatgctaggactttcgtcgagtgtccactgaagcagtacccatgggagcaggaacatatggcttcgatgaaggagtacattgctcgctttggtcctggttctgcaaagcttgtgaggggaatgaagcaaccatggccgccaccaagggcagtcccgccgcggcttgattacagcgatgatgaggcttctattggtagtgctggtagtgctgggactagattgtaccccttgacaaagaagcgtgccaagcctgcagtgccattgggtgccaactatagactgattgatattcctgtcaacagttgtctcaacagcaacatatccaagatctatgtgctagcgcaatttaactctgctttcctcaaccgtcacctctcaagagcctatgggagcaacattggagggtacaagaatgaagggtttgttgaagtcttagctgcacagccgagcccagataatccaaactggtttcagagtactgcagacgctgcacacagagaaacatatgctgatattactgttgctgccctaccgatggctgagaaacgtgcaactgcatttggcctcatgaaaatcgatgaagaagggaggatcattgagtttgctgagaaaacgaaaggagagcagttcacagaaatgatggttgacaccaccatacttagccttgatgacgtgagggcaaaggaaatgccttatattgctagcatgggtatctatgtttttagcaaagatgtaatgcttcagctcctccgtgaacaattttctgaagccaatgactttggaagtgaggttattccaggtgcaaccagcattgtaaagagggttcaggcttatctttatgatggttactgggaagagatgtgggctgttctaatccgtattttcgctcaccaagagaaggttgattggatgtactttgttccttttgctggcacaacagttggccttgtgatatactcatacaggggctcaaggcagaatcctaaagagacagcacgggttacacaggccatggatgcggaggctgcagcggcaaacagtacaacacaagttcctggtgcttttggggcgtgcttgcaatttccctag

SEQ ID NO: 9647 - DNA, 111 bp, Zea mays
  Peptide Sequence Number=SeqID_53022
atggaagtaagatatgatgacaagctgactgcctttgcagaaaggcttgagattttcccaccaagaaggtttgggacttctacttcactatatgcagatgttgatctgtga

SEQ ID NO: 9648 - DNA, 552 bp, Zea mays
  Peptide Sequence Number=SeqID_53023
atggacttcggcctcacccgaccccagggctcggactcagcctcggctccggaagacgacgaactccgcctcgcccgaccccaggggctcggactcagccacggctccggaagacgacgaactctgcctcgcccgaccccagggctcggacttagcctcggctccggaagacgacgaactccgcctcgcccgaccccagggctcggactcagccacggctccggaagacgacgaactccgcctcgcccgacccagggctcggacacagcctcggctccggaagacgacgaactccgcctcgcccgacccagggctcggactcaacctcgacctcgggagacggtctccgcctcgcccgacccaggggtcggactcagcctcgacctcggaagacggactcgacctcgacctcggaggagcctccgcctcgcccgacctagggctcggaccgaccgcgtcacaggaggggccatcattaccctacccctagctagctcaggctacggggaacaagaccggcgttccatctggctcgccccggtaaacaagtaa

SEQ ID NO: 9649 - DNA, 1542 bp, Zea mays
  Peptide Sequence Number=SeqID_53024
atgagctatttcgcggcgacggagttacagctgggtcacaaagtggagttcggcgtttcgaggatttcctcgattcatgcggcgacttcgtacggtggacggccctccgtagaggtcttcgccaagaattactgtctgcattggcaaaaaagaaaggttggagacatgattgcacaatttggatcgtgcacgttcacgccgaggaccggtaagacttcggcggaagtcgtggagttagtaccctatgctcgcaacaagtggggcaactggtgggattactggttttatgtttcgggaggcgaagtcgaagacctcccagggctctctgcggccgtgatgtgctcccatttttatgtggcgttcccacaatttgaagtggcggaagatgatgaggacgagggggccctccggtgcgctgcccgcatgagcagtgggcgtgatttggttgaagagttcattggttatggagtgtggcccctggcgcatggctggatgctgggcgaagtatgccctcgccagatgcctactttgggccagcagctggtgcgaagtccagccttctctttggatctacgcggccgagacccggccgcattcgttcgtgaagtggaggacgaggcagtgagaattgtggggcggtatgcgctaaggacagagggggaggatgtcttcgcccgagctctgggaatctttggcgcgaatgctgaaggttaccgggggtcgatggccaaggaacgttctgatcccccgcgcggccgacgaagacatggactaggtcttaaacaagatcatggtgcagggtcggatgtgggacagctggctgtcctcccggctccggtggcggccacttcaccgacgacggcggttggtgcgaagggtgcttcgcaggacccatgggctgccttctgcgcgagcggcgcgatttcgttggccaccaccgctaaggatgtggcgggctctgtgtcccatcagctgaggcatgcgttgcagcagctgaagcatgcgaccgactttgccgaccatgttgcgtctggtgctttgactttggagtttgctgccgaaatcgagcgtctccgggcgcagcatacggatgcggttcgggagaagtcggctgcggaaaacaaaagccacaagctgacagagaggcggaggcccaaacttgcgcgggctgaggccagtctcgcccgccaacgtgccgaggagctggaggcgaggctcaacagcctgcacaatcgcgtggatagaactgaggcgtcgacgcgcacggaggtcgagcggacgcatgcgcagctcgtggacgcgtaccgggagctgggtgcgcggaccgccgctttcgaagtgttcggccaagaggtgggcctccgcttcctcgagtggctacaggaggagttgggggtgctcccgaccatcgtgacgggcctcatgtcctttgcctccctcgttacctgcgagggggccgtgaatgctttgtcccgcgaggggtgcgggcatttcgaggtcgtcgaccagtcggacgaaggcttcgaacgcaaaattttctag

SEQ ID NO: 9650 - DNA, 178 bp, Zea mays
  Peptide Sequence Number=SeqID_53025
gcccgaccacggccgcggggtcatcggcagccggttcgaccaccgccttcgaggcgtccacgcccgtcggcgcgggggctggcacggggtcttcgccatctccagtcagcgcgggggtcgacaagtgtcacacccggatttcagggcaccaagacccgagcgcgaacataatcaccag

SEQ ID NO: 9651 - DNA, 642 bp, Zea mays
  Peptide Sequence Number=SeqID_53026
atgggaaaaagaaaagggaaaaagaaaaagagaaggaattctccagctaactgggccaggggaggggatttcggcccactcagcgcggacgcgcttgcggcccagctggcccagctgcaagggagcgacggcgggggacggcgccgtagcgcgggcccaccagccagggagagagagggggctgacggcgttgacggcaacggagggggggaaagggctcgaccggggccggacggcggcgagctccgcggcggttctccgccgccggtccggttcttcggcggggaagtggtggcgaagtacgggcgggtgaagtgggtcacgggggtggggttaattggaccgacgggggcctatggcggccggtccgcggcgcggtggcgagtgtccgcggtggcgaagccgccggtgaggtttccggccataattgagtgggggaagtggcgtgtcgtgaacgtgagagtgtggcggagctcttggcacaacttaattgaacggaagatcgccagagagggagaggggagctcaccggggcaaggcgctcggggagggagggggatgggggagacggcgaacactggtgagctcgccatgatggcgggaatggcgctaacgccgattgggatggctcgggcaggctga

SEQ ID NO: 9652 - DNA, 792 bp, Zea mays
  Peptide Sequence Number=SeqID_53027
atggagctttccgtggacgactaccttgtgggtggggtcgcaatgttcgacgcccacacgggactggctcctgctggggcggagtccgggcaactggctgttgtctcggtggcggagtcagccggcgcggcagccgtgacgaccgtggggaggattgagcgcctccgaacgcaacatacggaagccgtcagagataagttggcagcggagaacaggagccataacctgctggagaagctgacggcggtagaggcggagaaagacaacctcagccgtcagcttgcggaagagagggacggcgcggaaaaagcgcgcgccgaggtccaaactgcctgcgctgaggccagccttgccctcaagcgtgctagcaacgtggagtcggggctgaagagcttgcgcggctatgttaacatgatggagacctccacccgtgtcggggttgaccgagcgcacgcgttgctcattgacgcgtaccgtcatcttggcgtgcgaaccgccctgtttgacaaatccggcgaagaggtgggccttcgcttcctcgggtggctgcaggaggagctggagacgctctcatccatcgcaaccggtctcatgtcctacacctcgcttgttacctacgagggggctgcgaatgccttgtcccgtgaggaatgtaggcatttcaaagtctttgatcgggtaaccgaggacttcgatcgtgggatcttccaggttggatacgaggtgttaaagcggtccatcggggcgctttacgataggatgtggggtccgcatggccgcgacactgtctag

SEQ ID NO: 9653 - DNA, 675 bp, Zea mays
  Peptide Sequence Number=SeqID_53028
atgacggaggtggcgctcctccggggcccgaccaacctcgcttccaccgtaagccgcgcctccgtctcctccccctcctcaacgctgtgctatttagccaatgccgacagcgacgtgctcctaagaagcggtagccccgagcgcactgcgggatctgctaggagtcggcgactccttgaacagcgcgggcaagaggccgtggaggaggaagacgagcggtggtcgttcttggcgctgctcttcgagctgttgcagaagtcgctgctcgggtgcaggacggtgggcggcgacggtgaaggcgaacacggcggcggcgggatggagatcgggctgcccacggacgtgcaacatgtcgcgcacgtcacgttcgataggttccatggattcctggggctgcccgttgaattcaagcccgaagtgcccctccgtgctcccagcgtgagcaagacaaaggtgataaaacttgatggggaactaattaaaccgtttgaggagaaatatcagaaggatgcttatacataccaagcgagacatggggcaaaagccaaagccaaaagtcaaaccaaacacacccaaaagcacttggagtcatggtcctcagataatatgacattactttctgaagacattcgcctctctaatgaagcattgtcagataaatccaatgaagcctga

SEQ ID NO: 9654 - DNA, 2163 bp, Zea mays
  Peptide Sequence Number=SeqID_53029
atgcaaccgagaaaggctggtccccttgcaaaaaagtgcgacgaaagcctccaagcgagtgccaacactcccttcgaggctcgggggctactgtcggggaccataattaggggtaccctcaagactcctaattttcagctggaagacggtgaactccgctccgcccgacccagggctcggactcgggctaagtcccggaagacggcgaactccgctccgcacgacccagggctcggactcgggctaagtcctggaagacggcgaactccgctccgcccgacccagggctcggactcggggcttagccccagaagacgacgaactccgctccgcccgaccgagggctcggactcgggctcagccccagaagacgacgaactccgcttcgcccgaccccagggctcggactccgccctggcctctgccgacgacctccgcctcgcccgacccaggggctcggactcggcctcggcctcggccatggaagacagactcgacctcggcttcggaggagcctccgcatcgcccaacctagggcgcaggccagccacgtcaacaggaggcgccatcatcaccctaccccgagctgactcgggccgcagggaacaagaccggctccgtcgctcctccgacggcctcaacatcacaccagctgggtgccaaaatctctccggctgccacatcggcatggccctcttagaggaggttggccgtgcggggacgaggacgagacaggcgctctcttggggccgctcgcttccctctcccgcgtggacgcttgtaaccccctactgcaagcgcacccgacctgggcgcgggacgaacacgaaggccgcgggattcccacctctctcacgctggcctccggccgcctcgcttcttccccccttcacgctcgccctcgcgctcgacccatctgggctggggcacacggcgacactcactcgtcggccgcgggaggtagagctccggctcagcccggcctccaccccagctaggatgatgaacatccttgaagctgagggtgggaccaagatcgcagcccggcttgcttctccccacccaggagctggtgaccaacgggcgaaagaggcgggcagccatgcaggcggcatgcaaccgcgccaagtggacgcgcttctccgactcccgacacgcccagcatggaggcctaggcccacacgtcatgcaaccggcgcgccggatgcttcatgcaagcaactgcaccgccacttgcgccaccgccgtgcctcctcgattgcggaaccaataccgcgactcgaggcgacccagcgcacgacccagcagcgccagcctggcgcggcggtcaatgcggccaaaagtgggccggcagtaatgacggtggcaggcgggcgggagcagcggtcacgtcgtcagcctagctcacgtcccatccgggggcagcaagagaaccccctctcacggcgtgaaggcaacgcgcccgtgatccgttcctcgaacggctcgcgcacgcgcaacggctaccctgccaaccactcgccccgtcgcattaactccgcggcgggacaggcggcgcttctggcaggagaagcgggcgacgcttcgccttcgccgctggccccccgaagggttcgacagccgcctcagatcgcgtgggccctacacccactactggtcagaggtttgaaggccggccccccgaagggttccacggccgcctcaggctactcgggctccgcgcccattactgatcaggggctgcgctcccgaggtaccctaggacatttccgagaccagcgggagcgatcttgtaacggaatcccatcagagggaggcatcgagccctcggaccccgtcgccaggggaccgggtccggcagatcacccgcagctcaccggagacaccatgttcgacgcccatcgagggcaacatggcgctttccccctcctccttgcggaaaggcgacgcaggggcatatgtaaaaaagccgagtctgtccctgatcgccctctcgccctgtgcagaggctcgggggctgctctcgcaaacccggctctggctgaaccgttgacagcgtcaacataccagcccaagaacttgggacccgaccgtacgcccgggctacggccagctcgcatgagggaacaaccagaccagccgaagcattacgcgaggcattaa

SEQ ID NO: 9655 - DNA, 657 bp, Zea mays
  Peptide Sequence Number=SeqID_53030
atggccctggtctctggaggtccaaggacgaatgctacaattgtggcaatcccgaccacttcgttgccagctgccccaagaagggcaaataagagtctggcccgcgctaccatcactctggtcggtgcaagggcaagtactcctccggcaagtacaagtccaagggaggattcgacaaggaggcgctcaagaataagtacctttagaagcgacctcgaccatgaccccgacgatgttgtatcttacttgagcgacgaggagactgagagacgggtcgaggacaagctgaacaagctgtgcttcatcgccgacaccgcaggaggcttctgcaccatggcacttggtgaggacgcggtcagcaccagcgatgacaaagacatcagcgacgacactacttctgaggcactaccttccactgatgatcttgtcgctgagatagaagagttgaaggcttctttggctagtcaggataagttgcttaggcaagctgcttttgagaggagacaggatacaagagggcatatttgtatggcaatggagatagagaaagtgtcaaataatcttatccaacatcctatgaagcagatgatgtcttcgacaagttccaagtatgagaggtgctttgaaaccaagaaaaggaggggcaccaatgaatga

SEQ ID NO: 9656 - DNA, 438 bp, Zea mays
  Peptide Sequence Number=SeqID_53031
atggtcggatacctccacaccctcgacaaccactacgacgagctctcctcccactgcacccacctaaactcccgagtggaaagcctagagcggcaagtcaaagagcttaagcaagagaaggcatccctccaggagagtctcaacatagcagaaggcgaggaagccaacacccgtgaaacctatcggaccttgaagatggactatgacaagaagctaaagaaactcgcccccaaaaagaagatccataagaagaccaccaaccaaggatgccagacagagaagaagaagaaggcccctctagccctacctccccccaaaatagatgactggtccgacgaagaggatatatccctagcaagcctcgatgatcttctcaaggcatttgaggacaccttagataaggaattcgctagtacctcggggaacgctctcgtgtag

SEQ ID NO: 9657 - DNA, 621 bp, Zea mays
  Peptide Sequence Number=SeqID_53032
atggcgagctcgccggtgttcaccgtctcccccatccccctccctccccgagcgcctataaaaggacccatccgagccccgtcttcaccacaccagctccgaccacctcctctgctttccctcgagccaatcgagctagcgtcgccgtgctgcctaccttgccccgcggaagagggatccgatcctccggaactcttagctccggaagaagggcaagaacccgaaccctccgagattaacctcttgtgccaggaaagcttcgacgaaggcaagtccatctttcccttgatgcattatttacctatttctctctaccactgcctaagcctggaatatgggatgggaatcgaattgcatgtaatgaatgtggttactagcctcctgggactagtaattgtatcacatttgagtcccaaaggattaggacgcttcaatgatgaagaggtcgaggacttcggcggccttgaaagctcgttgacccagacagaggacgcggggaccggggctgaagagcaatcggtgcctcaagccggccctggcgaagaccctacgacgatgactgccccaccggcgaagaccctgcagcggcggctgctccggccagcgaggaccctgcagtag

SEQ ID NO: 9658 - DNA, 336 bp, Zea mays
  Peptide Sequence Number=SeqID_53033
atgaaggcccccgcgctctggccagccatccgtttgattaggtggaagaaaactgcgatccatttccgagcttcgaggaatcgacggtcaagcttcgacgaccaagagatcgaactcttcgagttctacgaggctgaagaccctaagcatctatgtggtgaaggcaagaactggggtgtagttcgcttcgccgtcgtgcctttaatggggctcggtgtatgcggctcgctctaccaaggtgatgatgaggatgatgtttatgactatggtaatggtaaagaaggcgtcgaggcggatctccaggagttccatgacgtcaacgagttcgaggattag

SEQ ID NO: 9659 - DNA, 438 bp, Zea mays
  Peptide Sequence Number=SeqID_53034
atggatctcgacgcagctcaacgacgtcggcagggttgctcgccggtaggggaggcggtgccggccgagcatggggaaggggtggctcgccaggtgctgcgaccaggggcgatgcgtgcaagggcgagccgaccaggggcacgcccgcgcggactgcctggaagccgggcggttgacatctacggcaagggaagggaactgcttgttgttggagtagggggcgtcgaccaccaggaacaggagaggagaggggtggcggctaccaggaaagggtgttacaaaggctctgagcaaatagttcctcgtaatcactacaccacggctccgttggttatcacccgtgacacacgagtgacctcgccacgaaggcttatccctgcaagcgcaatcaagaacataagcaagaacatgaaagaaacacaaccaaatttgtattga

SEQ ID NO: 9660 - DNA, 525 bp, Zea mays
  Peptide Sequence Number=SeqID_53035
atgacgcttcacgtctggcacctccttagagaggctttccaagtcggcgatgaggtcctcggactcggcgagggcctcggcgtactccacgcactccacgtcgcattcgaacgcgtgtttgtatgtgcggacgacggtgatgaccccgttggggcccggcatcttgagcttcaggtaggttcctcggaacccgaccacctcgaacgtcagagtctcccttcggaagttggagggcgttccgaagcagacgggaaggtcgagtcatccgaggggctggacgcgcttcccgggaatgatcccgtggaagggcgcagcgcctgctcggacggaggacagatcgacacgcaggagcccgagggtctcggcgtagatgatgttgaggctgctgcctccatccataaggaccttggtgagcctgacatcgccgatgacggggtcgacgacgagcgggtatttccccgggctcggcacgtggtcggggtggtcggcttggttgaaggtgatgggcttgtcggaccagtctag

SEQ ID NO: 9661 - DNA, 807 bp, Zea mays
  Peptide Sequence Number=SeqID_53036
atgacgagacgcactgactatgctggatcggtcggctactctccgtgtgtgtggcagggagctcgacgccatgatctacggcgccgagttcggccaaggaaatgtgcccttgggccatttctaagtattttggtgattgagtaccaacacaagtgcttttgtgttgatctatgcaatgtagtggacaaagtgcaaatcatgtcaaaagtgctggaaacaggagaaaacaaattggagagagatagctttgtttcagccaaagccagctctgtctgggtgcaccggactgtccggtggtgcaccggacagtgttcggtgtgccaggctggctcaggcgaacttgccgctctcgggaaggaattaatggcgtacgactataattcaccggactgtctggtgtgcaccggactgtccggtgagccaacggtcagccgggccaacggtcggctgcgcgatccgcgcgggacacgtggccgagccaacagtcgggagggggcaccggactgtccggtgtgcatcggacagtgtccggtgcgccaacggctccaagactgccaacggtcggcttcgccaaagaaggaaagaaatccgcaccggacagtgtccggtggtgcaccggactgtccggtgcgccagacgacagaaggcaagaattgccttcccagattgctctcaacggctcctagctgccttggggctataaaaggggcccctaggcgcatggaggagtacaccaagtatactcaaagcattcctaagcaccaagacttcgattccacacatttgtttcttcgtgatagcatctag

SEQ ID NO: 9662 - DNA, 294 bp, Zea mays
  Peptide Sequence Number=SeqID_53037
atgggcatgctgcttgatgtgaaaaagagctcccacaagaagcatacgaatactcatgacaatgacagtacggacaagaatggagagcccgatgtgggaggtgatcacccggggagtattcacacagaaaatgaacagatcggcgaaccaaggcctaaaagatcaaaaaggctgatgaagagcattactgataaggaactagcggctgctgcaggtgatgaggaaccggcagaaaatcacagagcccatgattatgatggtacagaagaggttcaagacggcactgcagcctga

SEQ ID NO: 9663 - DNA, 1008 bp, Zea mays
  Peptide Sequence Number=SeqID_53038
atgtcgatgaactacgaagtggtcgagacacggaggacgccgacatcgccaacggcgacacgcttgctgacaaagtggaggtcaatctccatgtgctttgcgctggtgctgcacgggattggtagagaggtagaccatgctaacgttgtcgaagtagaccagtgtggcgcaagcgaggggggtgtagagctcctagagcagctgaccgagccaggacgtctcggccacaccgttggccacaacgcgatactcggcctcaacgctggagccagagatgacgggttgtcgcttaaggaccagaagacaagaagtcgaagagggccgaataagaagaccataatcgaggataccgtggaggtagcgaagaatccacttcgcagcggtgaggtggggctcccgcgaggtgtgcatgtgaaggcacccgtgctagactgcgtaggggatgtcgggtcgagtgaagtgtggcgcaagcgagggggtgtagagctcctagagcagctgacagagccaggacgtctcggccacaccgttggccacaacgcgatactcggcctcaacgctggagccagagacgacgggttgtcgcttaaggaccaggagacaagatgtcgaagagggccgaataagaagaccataatcgaggataccgtggaggtagcgaagaatccgcttcgcaacggtgaggtggggctcccgcgaggtgtgcatgtgaaggcacccgtgctagactgtgtaggggatgtcgggtcgagtgaagaggaggtagacgatgtaatcgccgcaccaaaggatgaacaaggtcgtgtccgacttggcctcgacgaagccgagggagaacaagtaggaggcaaagtgactgtaccaagcttgtggcgcctgcctaaggccatacaagagcggttaagcttacacaccatacccgagcgagtggtcgacaaagacgacggactagctgcagtacaccgtctcattaagagtgccatgaaggaaggcctttttgatgtctag

SEQ ID NO: 9664 - DNA, 324 bp, Zea mays
  Peptide Sequence Number=SeqID_53039
atggctaccgcccgggggatcgacccctttttaaaggcggctccccccactcgcatcctcaagcgtcacgggcaaagtcttcgccgacgtgctccggggtcctccccctacgacacgggggctgggtcccacacgtcatgcaagctgaccagaaacggaagaagccaaaccactgcgtgcgaagcagggaccgggaaaggggatatttcgaaagggatccttctccgcgaaggaagcgggccccgagccctcctactgatcaggggttcgaaggctgacccctcggaagggttcgacagccaccccagagcactcgggctttaa

SEQ ID NO: 9665 - DNA, 624 bp, Zea mays
  Peptide Sequence Number=SeqID_53040
atgcgggggaaggcgaactgctgctgcttggacagggtgcagctgtccgtcctccacccgggcgacagtcgccggctgcaccagggggtcgcacaacacgtcgtacgccgcgagggcggtactcgtgttccgggacagtcccgttcttgttcttgtggtgagagcgggagtgaggacctgccagtgcgctttggggcggccgccgctcgctggtgcggtgttggtgggcaggtggccgctgtcgtcggtgctgaggtggtggcagccagagaaggtttctccgccgatgagaccgtcggcgccacctgcggtcggacccccggctctctggctttgacggcttgtcctcgcccctcgtgtggggacgtgggcgagggccttcttacagcagcgtttgccctgaggtcatcgctgctgctgtttagtcgcccgaggcggaggtcatcgtcgctgctggtgcagcggtcgccggcgagccacctggagtttgttgtcccgcaggccctctggtgtggaggttgttcatacccacaggagtggaaccagagtcccatttgtaatggtaccctgagtatgggtgtttgttcattgtggctgtcgaggcctgaacatctgggtatttga

SEQ ID NO: 9666 - DNA, 168 bp, Zea mays
  Peptide Sequence Number=SeqID_53041
atggagagtcatgatctccgggcagaatgggaatcacggcttgtgggtaaaagacattatggtacaggtggctatgagatcgatggttctggttatgactatggtactggagaagatgaagccgtggaaggagacttccaggagttccaagactacgacgagttctag

SEQ ID NO: 9667 - DNA, 444 bp, Zea mays
  Peptide Sequence Number=SeqID_53042
atgatgctcaaatccattaggctgtctaggctcgagttaatccgatcttgtgctgatccacttcgccaaacgttcctccccaggctcacgaagggatggctttatgaaatatcgggcccaaagcctttcgcgaggtcttctagccttctagtggacccgggggatatctgtcccccacagaatccaaagagcccactcatgcacaagatcaattgtcatctttcaatcaagcatctccaccaactcaagatgaggatcaggctcaagacaatgaagatgaagatcaagaggatgagccacctcaagaggacgacaatgatcaagggggagatgaagttgatcaagacaaggaagatgatcaagagattcagggtcaaagaccgccgcacccaagagtccaccaagcaattcaaagagatcacccgtgaactccattctcggtga

SEQ ID NO: 9668 - DNA, 675 bp, Zea mays
  Peptide Sequence Number=SeqID_53043
atggtcgactccaacggtcgcctgcaacgtgaacagtgcgcagacagttcacacagagttagagcagcgccagaaggcgcaccggacagtgaaacagtgactgtccggtgcccaagctgtcagagctccaacggcgactttcactatcgcgccgtgggccaagcgcacggcacgacaagtcctgccctccacccgcagggcaatgcagcgcactgcctccctggcggactccgcccacgccgggtcagacaggtccacgggcatggtcacgctgcacttcgctcccaccgccttgccgctaatgccgggaacctggaggcagcagtcgacaaggttcaggtcgtgccacgtggcggcggggagggaccggagcgtggaggaagggagctggtcgattttgttcgggaggtcggcgtggaggtggtcggagacgagggagatggaggggaacggggagtgcgggagatgaagttggcgctcgaagcgccggacaggagcacgcttgagggtgacgaggtatatgagctccgtcgtcgaagtagggtgcttatggagccatcagaggagcgcggctaccgcacggaccgtggcctcgcagcggaggcggctcgtgggggtggatggagtggatggcattgcaattgttggtggttgtggaaggagtctgggaattga

SEQ ID NO: 9669 - DNA, 2151 bp, Zea mays
  Peptide Sequence Number=SeqID_53044
atggggcccgcatgcgacctcctcggtccacgccgcgcgtcggggttcgccagcctcctggccgcgctcgccgtcgcagccaccacgtcatcgcccgcggggttcgtcgcgctgtgcttcgtggcgggcctctcccttgccaacttcgtcgccaaccagcactggatgtcgggcatcttcgtgccctccgccgtggggctcgccaacgccgtcacggccagctgggccaacgtcggcagcaccgcggcgcagctcgtcatgccgctcgtgtacgagctcgtcctccgcctcgacgttcccatcaccgtcgcctggcgcgtcacatacctcctcccctgcgtgctcctcatcaccacgggcctcgccgtcatcaccttcccctacgacctcccgtgcggcgccggcgtcggtggcggagccaagaccgaccaccagtgcggcactatgcgtgttggttggcaggatgggcgcagcgaaagcgccgtcgctggcggccaccatggcggtcatggtgctgtgcgccgcgtttgtgctggcctcgtcggggttcaccttcggcatccaggtcaactttatgataacatgaacaagaatgaattgttgttgaacggtctcttggatatctcaccttctctgattttgattgaaatggatatgccgccatctgtctcggagagctctaagactgcacggtgtgatggcttaattgaaaaaggccttccagaccttgattcactaaagctgcctcattttagttcatcccaggctgccccacaactgatggtatactcaagaagacaagtacagaaggcaaggtacatggagagcaaaccaacgcattggcaccctgcccacactgtaaatctcaaggacatcttggatgtgaacaagattaacatgtctctctcagtccagcacaccatgaactttcaaaacatccgggagaagaacatcaggaggtctgagcttgttgctatttatgcggagttcagaagggattggccagaagcattgaagttctatgaggaaggtgtttgtgttttgcgtgagatgattggaacttcgacaaggttgcctccaacccaacgcctggttgagataaaagcagttgccgagcaatttcactttaagatatcaaccttgctacttcatgcggggaaagtggtagaagcaatcacatggttccgtaagcatatcaaaagctatgaacgggttgttaagttgcttttcttcactgggaatggtttagcaggcagttccttgtctttgttagcggcaacttacatgagggagaagaggtatgccatcgaatgctcgtcatcaatggctaaccttacaacagaagttaatggagtacctgagtcagtaatgccttctgtatatgttggccaatatgtgcgcttgtttgagcaaggagatacagttagtctactacccctttctgatactgaatacaccagctatgctttgtcagaagctgaaaggtttcaagattcttatgagataatagcattgttcagaaaagcttatgaatcatttcagagcctaggtgctacaagaatggcttctgcctgtagcagtggaatggccatagaatattacgcagctggtgattttagcaacgcaaaacagctttttgatagtgttgctggtctataccgtcaagagggttggaccagtttgctctgggagaacctaggatacttgagagagtgctcaatgaaacttaattctcccaaggattttatcagctattccctagagatggctgcattaccattattttctggtagtggagaggaaaatcgagaaaacaaaattaagagtgggcctgcaggttcccctaccatttccaggagagagaatatacagcaggaagttattaatgttttggaaagaaaacagtcatcagaaggaacatatgatgggtttaataatgcgatagaagaagttactcaccttgatattgatcagataagtccgctaagaatggtgcttactgcatctgttgcttttcatgatcaatctgtaaaacctggttcacctctgcttgtcagcgtgtcactcttatctcatcttccttctccagttgtggttgatcagttggagccttggaggttctgttcaatcaatctgactgtaactttgtga

SEQ ID NO: 9670 - DNA, 489 bp, Zea mays
  Peptide Sequence Number=SeqID_53045
atgaacccaaggttgctggggttcaatgtcggctgggctggggatggtgggggcggccaggtgacggaagccatactcgctttcggcctcctccagcatcgctgcgaagacaaggtgctcgaggtggcccagcgggaccacgaattggtgacggaacctgctcaacaaccacgcacacttgacctagaccccaccggagacccttgctgtggcctcctgagccggatcacgcctcaccttgaactgcatcgacgcctcgacctgccggggcaaggtcacgtgccttgcgaaggctataagaatgctagggggttgtacaactccatagcctcctcccgcagaaggcctaccagcttgttcgccatggacctcaaccacagcaggctcgatcttctactgactgctggtgtgcatcagcaccgtcaacgttcatgcatcccccagttcgtgtaccggtactttggtcgcagcagagtcaacatctggtga

SEQ ID NO: 9671 - DNA, 393 bp, Zea mays
  Peptide Sequence Number=SeqID_53046
atggggatccgcaagaagccggaatatgtctggaaagaataccacgaaaacggagttgagaagtgctctatggcagtctacctgggagaaagccgaagttacccaaaccaccctcccttccaagtcaccttcatcgggcaccgcttcccagacacttgccaaaatgttgcccgaaaagcccttaaacagctatgcctaaactacagcagagaggccctgtcagggagagatcctactgaggatgaccccaccatcgtctacatggccagatacctccacactctcgataaccactacgacgacctttcctcccactgcacccacctaaactcccgggtggaaagcttagagcagcaggtcaaggaacttaaaaaggagaaggcatccctctaa

SEQ ID NO: 9672 - DNA, 333 bp, Zea mays
  Peptide Sequence Number=SeqID_53047
atggattatgataagaagctaaagaagctcgcccccatgaagaaagtccaaaagaagaccaagagccaaggatgccagacggagcaaaagaagaaagcccctccagcaccacctccccccaggatagagaacttgtccgacatcgaggatatgtccctagctagccttgatgaccttctcaaggaatttggggacactttagaaaaggagttcggaaataaaaccacgcctaccgcctccgggattggagcagggtttcccctaagagctaaaagagaagccggtggagaagggagtgagaccacctccccgcacctccggagctacctttag

SEQ ID NO: 9673 - DNA, 138 bp, Zea mays
  Peptide Sequence Number=SeqID_53048
atgccgtggagctcggtgtatgcggctcgctctaccgagggtggattgccccttggggaggagtgcggtaaagaagaagaagaaggcatcgaggcggatcttcaggagttccaggacttcgacgagttcgaggattag

SEQ ID NO: 9674 - DNA, 877 bp, Zea mays
  Peptide Sequence Number=SeqID_53049
ggtttcctcccgcctcgctggcgtgccgcctcccctcgccattgccgcggggcgttccgccgctcgtgggacccgcatcgagactcgagagctgttcgtgctgattcccgcggagccttgtggctgcgactctgcggcgtcgggtggagaggttttgacgcccgtgggggtttggatcgagggcccggagctgtgtctccgcaatgccgggctgggcgaaggggctgtcgggcggttcgagattgcaaggagtcggtggctcggcccaatgtccggggcaagcgcgagggggcggctgtcgccagcgtccggcggcgccggggactccgaaccgcggtccgcggggggcaggacgcgctcggtgtccgctacccgcggccggaagccctcgccgaggcccgggagggatgccgccgcggcggcaggggcgacagaggagaggaaacccgccgccgtgcccacattgctgccctcgctcagcgcgcccgcggggatgcgtcggcaggagctgctgctgcgctcgggtctgtctctcgacgcgtcctgctcctcggacgcgtccacggactcgttctgcagccgagcatccacaggccggattgggaggccggcgtttggggctaggaagaagaagaccctctctcagactgattacaagcctgtttccatgctggaaagggagggtggattggcttatcagaccgatgctgctggtgtcaagaggaggtgcgcatgggtgacagcaaatactggtgcgtgcttctggttttgcttgcatgttttagcatttgatgtaggggaattagaaagtttgcctaaaaacacccaaaatggaaggcgagaatgttatgcaccaaggatccttgctaacctgtag

SEQ ID NO: 9675 - DNA, 948 bp, Zea mays
  Peptide Sequence Number=SeqID_53050
atggaccaaaggtccatgacacctggtatcagctccaggttatcctcaccaccaccagccgcccatccctcaccaccaccagccgtcgtgccatctgccgccgcaacgccctcccacccaccctctccaactccagatgcattcactcggctcgaagagaagtgggatcaattcgttgtgatgttccaccgctacaaggagaagacagaaaaggaactccaagcagcggtacggcttcaggcggcagcgcgagggttcctggcacgccgccaggtacagtcccttcgtggggagaagcaccttgttgtggcctccagggccaccccatggccatcatcacatgagcaggccgtggtgcgcctgcaagccgcagtgcgcgccttcattgttaggcgggcggtgcggaagctgcacttgctgatcagctcatcgctgcaccaactcgcagcctgcgcgtccaaccaccaggtctcgtctatactttttgaacccctacagaagtcgagatctgggtatgcagccccctgcacggccaaagagggtcgtctccctcattcgggcaactgccttggtgctggacagacccaagggctggttcctccttcacctttcatccaacgtgaagtccgcatttcagctcttttcttgggatccaggaggacaggaggacatagccgcagttcaaatttatattgtattttcgtcttaaataataaagatagatgggacttctcggcggcttctggctacctcggttttcggttttacacttttacgtcattcgccgtttgtctcggtcgcacggtccacactgtgcaagccctcaatcaatcgaatctgttgagcacgactccagacgaggtcgcgatggcagtggaagtgagccgtggcagagacatcgatgcatggttcaaagagagctacaagcagcaagttcagaaggagtag

SEQ ID NO: 9676 - DNA, 780 bp, Zea mays
  Peptide Sequence Number=SeqID_53051
atggaaggcgagaatgttatgcaccaaggatccttgctaacctgtagtttgataatgaaaaccactgaaattgagtctgctgttgagggttacaaatttagtcaagatccttgttattctgcatttcacgatgaagagtggggagttcctgttcacgatgacaggaagttatttgagctgctagtactgtcaggggcattagctgaactgacatggccagcaattctgaataagagagacatattcagggaagttttcatggattttgacccagtatcagtctcaaaattaagtgagaagaagattatcgcacctggaagccctagcagttccttgttatccgaacagaaactgcgcggtgttattgaaaacgcacgccaaatactcaagatcatagaggaatttggatcgtttgataaatactgttggagcttcgtgaatcacaaacctatattgagccggttcaggtactcccgtcaagtgcctgtcaaaacatcgaaagcagacgccataagcaaagacctggtccgaaggggtttccgcagcgtcggcccaacggtcgtttataccttcatgcaagtctctggcatgactaacgaccaccttatctcctgctaccgttttgctgaatgcgtggcctcctctgctggtgccgctaaacttaccgatggaagcctagcagatgcaagtgatagcaaccacgccacggcggagcagaaggtgaacgggacgaatgacattgaactgtccagggctatagacgagctcagcatttcatag

SEQ ID NO: 9677 - DNA, 906 bp, Zea mays
  Peptide Sequence Number=SeqID_53052
atggcatctggctcgcgtcagtgcccgtcggcgcagggcacaccaggccgggacaaacgaccgttgctgtgtgatcctgcccgcgacagtgcctcggtcgctgcccttgagacgacacatgttggtcttgctactggtcacagcactcagtcggctgcaggcctcgaggggggtgttaatgccatgttcggcgccatgaacatcacgggcagcgacgctgcgcaggatgggcgtcttcgcgtgcagagcccggtaggcgctccattcctggacgctactggagtctggagtggagcagaaatgccagacctgctcacggggcccgctccctttggtatggctcctatcccggcacctccggcgagtgtggcgcggcagatgcctctggttcggattgaaggcccttctcaggatcacctgcataccaatgacaccgtgatactaccaacagctgataatggggtctctatgtctacacccagttcagaggtccaggatgaagatagtgacatccaggcttttctaaaggagcacttcgtcccaagatcggcgccattacttctgataaataatgaggacagtatttcggctccttcccctgttctgtgccgcgatgtcgaggaacgtggtggcctcgttgctgatcgaggagccgccgccggcgaggtcggagagggagcggatggtgatgaagggggcgtcgtgctggtgagcgaagagggccacgacgtcgctcttcatctccacgaggtgccttcaggctgcgtgttgcaagatatccccaatggctgcaagaacattgaagacaagagttgtgtccagattaatgtatgctttactacccataccttcctaaggtatttgcaagctccttggcgtacccttgagaaagaaaacatcggatga

SEQ ID NO: 9678 - DNA, 444 bp, Zea mays
  Peptide Sequence Number=SeqID_53053
atggctctattaaaagagaggcttgaagagatgatattgctgaaggcgggggagctcgtcggcggcgaggagtccggcctatctagggcgaaattgaccaatcaaacgggtcagagagcttcaccagggatcaaggaaggcgagcgaccgaagtcaggcgagggtgatctcgggcttccggtgaagttctatcgggtccgagggcttggggagcttcacgggcctatggcggaactaaccgaagcaccggcgcgacttaggggcgactggagtgggctggccacggtggccgaagctctggcggcaatggcgagcggaaaagagctcgccggagctaaggaggggtggctggccggtgatgggcgacaagcgctcggggcgtgcgcggcgaacgccagtgcgcgctctggcacctggcacagcgtcgagcacgaggcagcgtag

SEQ ID NO: 9679 - DNA, 324 bp, Zea mays
  Peptide Sequence Number=SeqID_53054
atgggttatcctaaactagagtgtggggcttaccccactatgccgaaggaccaacttgcggcctttcctgggcttacaaatagcatgaagggacttattctaagtaaagctttcaaggagcaaaaagataatgatgatgatagcacttggatagcctttagaaacttacagtctaaggttattgagctttggcacaaggttgaagataaggtggaaatgctaaataccttggcaaatgatctgattgtggatcgccatgagtttcagaaaatctccaagcagcaaaataataaaatttcgaagctacaagccaataatacttag

SEQ ID NO: 9680 - DNA, 961 bp, Zea mays
  Peptide Sequence Number=SeqID_53055
aggatctggggcgcttcaggtggtatcagagctgttaggttggccgcaggacatggaggtccgttgccaaaccagcttttgccagaatgaagatggtttccccatgttgttgagagcatgcacagtccgcctcggaatcaggagccagccagagtatgatggtcattcaaagacacctgccaagtcatcgctcaaggcattgaggaccctgtgtcaactttatgaagaagaggtggccgacaccccgctcagattctttccgccctttcagagagaccgtcccgtttggatggccaggatgtgtgcattggaagggaagcagattcttgaggatgaccccacagtcacgtacctcactgcatacctgcttaccctggatgcccagtatgatttcttggctcggcaccaccgtcagatgattgcccaagcagaagatgcagagaagctcaaccccctgaagcaagccaaggatgagcatgtccagaagctgatggatgcctacttggtaacccacaaccaacgtagagccctgcggatccaagagcccgctccatccaacccagttcaacccaggagagctgaagactctcagattcttgaaggtcacccggtctctatcagaggagagaagaaggcttgggaactaccagaaggagccatagtcttggaaggaattccagtcttccctcaggctatggataagcaagagcaccccgagtcctcccaagatcccctgccagagttgtttgaacccctcaccatgaagaagattccagcaccatcccttgaagtcaaggaagaagctacaagcaccccgccagcaccgctgccctctaaggagctacaagagccagtcccacttgaagaagagttcgacctcgtcttgccatctcagtcgccgcaagaagaagccgtcaacatcagctccctgttgacccatccaggagatgtctcagactaa

SEQ ID NO: 9681 - DNA, 147 bp, Zea mays
  Peptide Sequence Number=SeqID_53056
atgccgaagcttccttacgcacagcttcggctctgttccatccttcgttctctttgtgtttcttcatacaacgattttgactcgtccgaagagtccatgttcgaagattttgataataatagacaagccgacatgtatgttgtatag

SEQ ID NO: 9682 - DNA, 351 bp, Zea mays
  Peptide Sequence Number=SeqID_53057
atggctttgttcagccaaagtctgcgcagtctgggtgcaccggactgtccggtgcgccaggctggctctggcgaacttgctgctcttgggacttcgacggcggtgtacggcgaagtcgttggtcacgtgaagccatcaacgacgtacggctataattcaccggactgtccgatgaggcaccggactgtccgtgtccggtgcgccaacggctctggatctgcaacggtcggcttcgccaaagaaggaaagaaatcagcaccggacagtgtccggtggtgcaccggactgtccggtgcgccagtcgacagaaggcaagaattgccttcctacaatgctctcaacggcttctag

SEQ ID NO: 9683 - DNA, 492 bp, Zea mays
  Peptide Sequence Number=SeqID_53058
atgccccctgcaccaccacagggcatcccggctgctggaggagaccccaacggagacaaggatggcgacgacgccggtggcagtttgagccacggcacggagcattcgaaggagccagagccggagggatggatcgcgagacccatcactcgtgacgctgctcgcgggtgtcacttccacgacgctctcgataccttgttgcgttgggctttcgaccggcacacttggtctatcaacggggctgatggccttgacctgaagtactaccctcgtcgtttgatcggcagtgctggaggtgtgattgtctcgccagtcgatgagggcaatcccaggctaagtagcatggtcaacttggccgtcgtgctccacacagagttggaccacgcccttgacgagttaggcaaggttcgggcagaggttgcggaattgcgtgctgaatgcgcggcatgccactatcttgatggtggttctcccgcccctatagggatttag

SEQ ID NO: 9684 - DNA, 309 bp, Zea mays
  Peptide Sequence Number=SeqID_53059
atggctcaccggagttacatcgacccgcccgagaccttctcaccaccgttcacccttctctgtccgtggattcatggcctcttccccgccattgagttcgccgtggtgccctctccctctctgctcaactccggcgacctcaccgccatggagaggaccggcgccgcccgcagccgtcagtttccccctgacaacgagcagctcatggttcgtgagtgtgttgccgaagatccctctgagcaacaacctggaggtgaagttggcaacatggatgacttcgaggagttccaggaatacgacgagttctag

SEQ ID NO: 9685 - DNA, 909 bp, Zea mays
  Peptide Sequence Number=SeqID_53060
atgctgccctcggtgggcaatgagcatgacgtctacgatgagttgttaacagtacaaccactcgagactgtgtgggcagtcactcaatccgaactcgtacgatccgaccccagggttatgaaggctggggagcaccgggaggataaggagggggaatgttttgtccggtttgggcatggcgatggcctgacagcttccggtataaccgttaagattaggacgtgcgaggaaagaaagagattcggcattcgggtctcgcgacgttgtgcgcttcgcatgggaatccgcaagaagccagaatatgtctggaaggaatatctcgagaatggaatggagaagtgctctatggtagtctacctgggagaaagtcgaaactacccgaaccatccttctttccaagtcactttcatcggataccgcttcccagatacctgccaaaatgttgcccgaaaagccctccgacaactatgccagaactacagcagagtaatctttgaaaccccccttcgctactttccacccagcaacaaaaatacccccgcctggaggaaaagacttcaggccctgtcagggagagaccctaccgaggatgaccccaccatcgtctacatggttggatacctccacactctcgataaccaatatgatgaccttgcctcccactgtactcacctaaactcccgggtggaaagcctggagcaacaagtcagggaacttacaatggaaaaggcgtcccttcaagagagcctcgagatagcggaaggcgaggaaaccaacacccgtgaggcctaccgcactctgaagatggattacgacaagaagctaaagaagctcgccccgcaagaaaaatccgcaagaagaccagaagccaaggatgtcagattgagcagaaggaagaagcccctctag

SEQ ID NO: 9686 - DNA, 297 bp, Zea mays
  Peptide Sequence Number=SeqID_53061
atgcaggcggcatgcaaccgcgccaagtggacacgcttctccgactcccaacgcgccagcatggaggcccaggcccacgcgtcgcgcaaccggcacgccggatgttgcatgcaggcaactgcaccgccacttgcgccaccatcgcgcctcttcggttgcgggaccaatgccgcgactcgaggcgacccggcgcacgacccagcggcgccagcctggcgcgacgggaccgggaaagggggatacccccgaaaaggatccttccctgtgaaggaaccgggctccgagcccccctactga

SEQ ID NO: 9687 - DNA, 249 bp, Zea mays
  Peptide Sequence Number=SeqID_53062
atggtgggcggtttcctgaggaggaggagggggaggaggagtaggacggcggacgatgcagagcaggcagcgcagcagcacgaggcagagcaggcagcgcagcagcacgaggcagagcaggcagcgcagcagcaggcggcgcctcaggacgacgacgaccagcagcagggccaatctggggcggcatccaacaaccctccggaagggttcagcccaacgcagccccggccaaaccgcccacctccatga

SEQ ID NO: 9688 - DNA, 447 bp, Zea mays
  Peptide Sequence Number=SeqID_53063
atggcggtggcaggcgggcaggagcagcggccccgtcgtcagccaagctcacgtcccatccgggggcagcaagagaaccctctctcacggcggtgcctctggcaggagaagcgggcgacgcttcgccttcgccataatgaccgcgtcaaaaaagcagggaccgggaaaggggataccccgaaaaggatccttccccgtgaaggaaccaggctccgagcctccctactgatcagaggttcgaaggctggcccctcggaagggttcgacagccgcctcagatcgcgtgggctctacacccactactggtcagaggttcgaaggccggcgcctcggaagggttccacggccgcctcaggctactcgggctccgcacccactactgatcaggggttcgaaggctggccctcgaagggttcacaaccgcctcagacacagagcgagggatga

SEQ ID NO: 9689 - DNA, 663 bp, Zea mays
  Peptide Sequence Number=SeqID_53064
atgggcgcgattaaggtcaaggctcagtccactcaagggacacggtctcgcctcgcccgagcccagcctcgggcaaaggcagccgaccccagaggattcacgtctcgcccgagggccccctcaagcaacggacacaccttcggctcgcccgaggcccagtcttcgcagagaagcaaccttggccagatcgccacgccgaccgaccggctcggactcaaccacgacttagaagacgacgaactccgcctcgcccgaccccagggctcgggctcaacctcgacgctggacgacggactccgcctcacccgaccccaaggctcggatacagcctcggcctcggaagacgatctccgcctcgcccgaccccagggctcgggctcaacctcgacactggatgacggactccgcctcgcccgaccccagggctcggacacagcctcggcctcggaagacggtctccgcctcgcccgacccagggctcggactcgacctcgacctcggaggagcctccacctcgcccgacctagggctcgaaccgaccacgtcacagggggctctcagccccttacggaagcaaggagacttcagcaaggattcgacggccccgacaactgtccttccgcagggctccagctctcctccgatggccacgacatcacatga

SEQ ID NO: 9690 - DNA, 489 bp, Zea mays
  Peptide Sequence Number=SeqID_53065
atggttgccccgcctcctcctccgtcggcgggggaggtgacgggacaaacccggatgttgttcttccaccacgtggggaagacgtcgttgattccgccgccggcgggcgggctgatggccgccattgtcgccgtcgcgccgcggaggaaggagtatcatgtcgtagctgccgtcgagggacatgaactcaagactcccgaaacggagcatcatcccgggttggaaaggttgctggagactacccatctggagcttgacgggaagctattcgtcaacacgcagcagacccctacctggcgcgccaactgtcggcgtttcgaccccggggggtccctggaccgacgagtgaattgtcgtcgcgtgtcccagcccagatgggtcggcgcgagacggagcatgaagggggggaagaaacaggcaaaggggatacccgcagccttcgtgttgccctgcgcccaggtcgggtgcctttgcagtagggggttataa

SEQ ID NO: 9691 - DNA, 1245 bp, Zea mays
  Peptide Sequence Number=SeqID_53066
atggaggcccaggcccacatgtcatgtaaccggcgcgccggttactacgtgcgagaaactacaccaccactcgcgctagtaccgcgcctcctcgactgcgaaaccggtgccgcgactcgaggcgaccctgcccatgacccgatagtgccaaccgagcacatcggtcatgggtcagtcagccgcgggagaaggcgcaacggtcgatacggcaagaaatgggccggcagtaatggcggtggcaggcgggacaggcggcacctttggcaggcgaagcaggcgacgcttcacctccgccataatgaccgcgtcaaaaaagggaccgggaaaggggatactccgaaagggatccttctccgcgaaggaagcgggccccgagcccccctactgatcagaggttcgaaggctggcccctcggaagggttcaacagccgcctcagagcactcgggctctgcgcccactactggctggcccccgaagggttcgacagccgcctcagagcatgcagagcgagggatgaccctgggtacgttcgagacataaccaaggctcgggctatgctcccgaggtcaaggctcagtccactcaagggacacggtctcgcctcgcccgagcccagcctcgggcaaaggcagccgaccccggaggattcacgtctcgcccgagggccccctcaaagcaacggacacaccttcggctcgcccgaggcccagtcttcgcagagaagcaaccttggccagatcgccacgccgaccgacccctcgggcgccatagaaactccgcctcgcccgaccccagggctcggactcaaccacgacttagaagacgacgaactccgcctcgcccgaccccagggctcgggctcaacctcgacgctggacgacggactccgcctcgcccgaccccaagctcggagacagccttggcctcggaagacggtctccacctcgcccgaccccagggctcgggctcaacctcgacactggacgacggactccgcctcgcccgaccccagggctcggacacagcctcggcctcggaagacggtctccgcctcgcccgacccagggctcggactcgacctcgacctcggaggagcctccgcctcgcccgacctagggctcggaccgaccacgtcacaggggccccttacggaagcaaggagacgtcagcaaggattcgacagctccgacagctgtccttccgcagggctccagctctcctccgacggccacgacatcacatga

SEQ ID NO: 9692 - DNA, 1359 bp, Zea mays
  Peptide Sequence Number=SeqID_53067
atgattgccacgacccgcggcagctcggcgaaggcggcggcggcggtgggcggcaaggcggcgcgcgcctgtgacgggtgcctgcggcggcgggcgaggtggtactgcgcggcggacgacgcgttcctgtgccaagggtgcgacacgtcggtgcactcggcgaacccgctcgcgcggcggcacgagcggctgcgcctgtgcccggcgtctccgctgcagacgccgccagatcgctcggcggcggcggcagcgacggcgactaataagcgcgagcgtcacgacgaggtggcggtgcccgcgtggttcgggcgcaaggcgcgaaccccgcgcggcgggcacgccaaaagcgtcggccaggtggcgttgtcgcggcgcctcgtcgtaccgcatgcggctggcggggactcagactcacccgatgagcgaaacggcggcgaggaggagcagctgctctaccgcgtgcccatccttgaccccgccctagccgagttctgctcgcccccgcctctcgaggacgcggccggtctcgctctcgacgcgtcggtgtgcaacgaagacggcgccatcgaggaccccgcgaagccggatcctgcggcgccgctggcccagttctgccccgtcagcggccatttcaacttcggcccgaccgacgccgagctcagggagttcgccgcggacatggaagccctcctcgggcacggcctggacgacggaaacgaggaggactcgtcgttttacatggagacgctgggcctcctcgacccaatggaagtgggcgacgatgccacgcaagtcaaggtggagaccgacggcagcagtgcgtgctgcgaagccagtggcacgctggcctgtggcctggagctggacttagaggcatctgacgagatgctggacatcgacttcgactacgcatcgcctcaggacacggcgacggacgagagagccgccagcagcgacacgggagccgacgcccagttcttgcagacgagcctctcgctcaccctcaactacgaggccatcatccagagctgggggagctcgccgtggaccggtggcggtgagcgaccacacgtcaagctcgacaccaggtggccccacgactacacgaacatgtgggttgtgggaggagtggtcggccacggcggcgaggacctgccgggcacgcctaggctggggatggacggcggccgggaggcccgggtgtcgcggtaccgggagaagcggaggacgcggctcttctccaagaagatacggtacgaggtgcgcaagctcaacgccgagaagcggccacggatgaagggccgattcgtcaagcgtgctaccgccggtggcagcctcgccatcgctggcctcgcttaa

SEQ ID NO: 9693 - DNA, 513 bp, Zea mays
  Peptide Sequence Number=SeqID_53068
atggaggaaggcattcttgacgtcgagctgatggatcacctagtcccgggagagggcgagggagaggacgacacgaacggtggcgaacttgacgatgtggctgaaggtctcatcgtagtccactctggggcactaggtgaagccccgatgcacccaataggccttgtagcggtcgagggagccatccgaggtcagcttgtggcgaaagagccacttgccggtgaccacgttggtgcctggtggacacgacacctggtcccagagcctctgtccaataggtggcagggagagacgcctagaagagaaggcaacatattatattggggtggtgcaaatcatgtgttcggcccgattgttcttggcaaaggtgtaggggcacgagagacacaactggacgccattggtgagaaagaaagaacgagaggcacgactgtcgaactcacgaccattgtcacactgcagggcacggaccgagtgacgaaattgggtgggtacatgtggtctggtggttag

SEQ ID NO: 9694 - DNA, 1326 bp, Zea mays
  Peptide Sequence Number=SeqID_53069
atggatttttcgtggcaggcgaccgccttcgctgaccatgtcgcgtcgggcgctctgacttcggagttcgttgccgagaggcaacgactcgagggcaagatcgagcgcctccgggcacagcatgcggatgctgcttgggacaagtcagctgtggagaacaagagccgcaggctgacggagaggttggcggccacggaggccgagaaggaggatctcaggcgtgagttggcggcggagaggaaggacacaaacagagcctatgctgaggtgcaggctgcacaagtcgaggccaaacttgcgcgggcggaggccagtctcgcccgccaacacgccgaggagatggagacgaggctcggtggcctgcgcgaccgcctagacaaagcggaggcttctacgcacgcagaggtcgaccggacacacgcacaactcgtggacgcataccgggagcttggtgcgcggaccgctccctttgaagcgtccggtcaggaggtgggcctccgcttccttgagtggttgcaggaggagctggaagtgctcccgacgattgtgacaggcctcatgtccttcgcttcccttatcacctgcgaaggggtcgtgcatgccgtgtcccgcgagggatacaggcacttcgaagtattcgaccgattggacgaagacttcgagcgcgaaatcttccaggttgaagacccaatgctgaagcggtcggtcggggcactttacgataggatgtggggccgtcacgattgtgagactgtccaggagaggtctgaccgggcgatggatcagatggcgcatgatgaagaggttccgacgtttgggcctgcgcaagcaaccgctactggcaatactaattttgtggcggccgcaaccgttgtgcccgccgatgataatttatctggttctggatctgagtgttttgagtctgatggtgggtctggtagttcgttttcctggactgaagagtcctcggatgaaggcttggattattttgctgcattagatgtggccgcgacggagtcctcgccgtgtgtggaggttggcgaggtggccgatcttcctagtgcgaggaccaagtgccggcggcgaagggcgatgtcgaagcatagtgtgggcaatttttcacgaagtggtaggcgccgccgtatggggatagagcgggaccgtcttcgaggagaccggaatggtaaacgagaattattgacttcgacgattaggacgagcattggtgagggggatctgcggaatctttttgagggtgaggaattgagaataatattgttcaattatagggagatgggcatcatcccgaaggttgagctgatgtag

SEQ ID NO: 9695 - DNA, 255 bp, Zea mays
  Peptide Sequence Number=SeqID_53070
atgccgatgacttcgccgtcctctgctgcgtcttcgccctctggtggagcgaagtctgggggtggtgcttatggtagtcctccggagctgcaggtacccgagtgcccaccgtcctcaggcaaggacgtttatgccctcgggaacacagagtatcctcagaatattccccctaggggaggttacagaccgtcattacagaaaaggctattacaggtgaggcctgtaacacgcttatccctgcgcggcccgttatag

SEQ ID NO: 9696 - DNA, 915 bp, Zea mays
  Peptide Sequence Number=SeqID_53071
atgtcgtcgattccgccgccggcgggcgggttgtcggccgccattgtcgttgtcgcgcggcggtggaaggagtatcatgtcgtagctgccgtcgagggacatgaactcaagactcccgaaacggagcaccgtcccgggttggagaggttgttggagactgcccatctggagcttgacgggaaactgctcgtcaacacgcagcaggcccctacctggcacgccaactgtcggcgtctcgagaccggggggtccctcaggccgacgagtgagtgtgccgcgtgccccagcccagatgggtcgagcgcgtgggcgagcgcgaaggggggaagcgaggtggccggagacgggcgtgagagaggtgaaaatcccgcggccttcgtgttcgtcccgcgcccaggtcgggtcgggcgacgtggaggctcctccgaagccgaggttgaatctgtcttccatggccgaggccgagcccgagctcctgggtcgggcgaggcggaggttgttcggcagaggccagggcggagtccgagccctggggtcgggcgaagcggagttcgtcgtcttctggggctgagcccgagtccgagccctgggtcgggcggagcggagttcgccgtcttccggggccttagcctgagtccgagccctgggtcgggcagagcggagttcgccgtcttccggggccttagcccgagtccgagccctgggtcgggcggagcggagttcgccgtcttccggggccttagcccgtgtccgagccctgggtcgggcggagcggagttcgccgtcttccggggccttagcccgagtccgagccctaggtcgggcggagcggagttcgccgtcttccggggctttagcccgagtccgagccctgggtcgggcggagcggagtttcctatggcgcctttgcgttaa

SEQ ID NO: 9697 - DNA, 1581 bp, Zea mays
  Peptide Sequence Number=SeqID_53072
atggaggcccaggcccacacgtcatgtaaccggcgcaccggttactacgtgcaagaaactgcaccgccacttgcgccaatgtcgcgccttctcgactgcggaaccagtgccgcgactcgaggcaaccctgcgcatggcccaacagtgccaatcgagcacatcgatcacagggaccgggaaaggggatatttcgaaagggatccttctccgcgaaggaagcgggccccgagccctcctactgatcaggggtttgaaggctggcccccccagaggggttcaacagccgccccagagcacttgggcttcaggctcattactgatcaggggttcgaaggctggcccctcggaagggttcaacagccgcctcagagcactcaggctccgcgcccactactgatcaggggttcgaaggctggcccctctcgctttgcccttccactgaccgacctgacaggaaaacagtgccgctcgccccgttctaactgctgtgccacccgccagagtgaggctggcaatagccaagttcagcctcaggcgcaacaggaagctccgcctcgcccaaccttgggcctcggcctcaggaggaggtctccgcctcgcccgaccccagggctcggcccccacctcgacctcggaaggtggtctccgcctcgcccgaccccagggctcggcctcaaccccggcctcggaaggtggtctccgcctcgcctgaccctagggctcggcctcaaccccggcctcggaaggtggtctccgccttgcccgaccccagggctcggcctcaacctcggcctcgggaggaatcgcgtcctcgccctaccccgacctcggcctcaggaggagtctccgcctcgtccgaccttgggctcggaccgaccgtgccacggaggatgcatcattatcctacccctagctagctcaggctacgggggaacaagaccggcgtcctatccagactcgccccgccccgacagctgtgcttctacagggctcaagcgctcctccgacgaccacgataccgcggccctcatgcgggagggtcgcgcgggaggacgggctgacgagcaggctcactctctctccctcgcgaacgcttgtaacccctactgcaagcgcatccccctggcgcagaataacacgagccgtgttttcccccttgaacccccggggtcgaaacgcttagtatttcagtgctttggaccggtggcacgccaggacaggagggttgggccaccacgtaggggagattttgaggatgaagaaaacaagtaccaccggccatggtggtgccctgatggtctcagtcatacccaaaaacatagagtacagcgactacgaaacctagaagaagccgaggccaaataccttgaagtacataggaaggcgcacccaaatttgctagtaaaagtatggtgccccaggagggcagagcagcgctctcagaagaaggaatggtgtcccaaacaacaggaagctgatgcggaggtcgatgaggaggccgatgagacaccattggctagtataaacatgggtgatgagaagctagggtacgagttcgcttcagctgacgagctagaatag

SEQ ID NO: 9698 - DNA, 987 bp, Zea mays
  Peptide Sequence Number=SeqID_53073
atgtcctcgcactttcctcatgcatcgcgtccttccaccttccgagcccccgaatggggagcgctcgtgtcgctttcgtcttgtcgtcgttggaggaacacaacttcgcggaagttggtacctttcagccatcgctcggcttcaaggattttcatcgggcagcccggctgcatcccctcgccggtggtcacccaagacggtgaccaccagtttgatggtggggagaagcgagccgggctgcgacctctgcccctccctcagtttcaaggatgttcatcatcagtgctggggaggggagtgcgccgagttggggcctgtctccgcgcgggcagcggcctgctccttccctcagtgatcggggggaagggcgttcgccgttcgtggcgctggcagctgccgcgtgtctggctctccggcctgagcggctccggcgctgcttccggtgccacctcccaccgaggcagccagaaggggtttctccgtcgacgagatagtcggtgcctcccgcggactgacctccggctccacggccttggtagcttgtcctcgcccctcgagtggggtcgtgggcgagggccttgtcacaacagcgtttgccctgaggtcatcgctgctgctgtttggccgcccggagcggaggtcgttgtcgctgctgccggagcgggcggcgacaagccacctggggttttgtcgccccgcaggccctccaatgtggggggttgttcatacctgcgggggcggaaccggagttccatttgtaatggcaccttgagtgccggtgtctgttcattgtggctgtcggggcctgaacatgagtccctcggctcggtcggccttaccgcccgaggcttctcttgcttagttaaagaaaccctcggccgctctgcgatgagccggagccggaggcagcgacgccagcacggacagaggcagagttggcttgaaaagaagcttcgtcgaccggagtctggccgggccgtccactag

SEQ ID NO: 9699 - DNA, 1530 bp, Zea mays
  Peptide Sequence Number=SeqID_53074
atgtggaactggtccttcaactacttccatgttcagatcgaatctatgcatagcgaggtataccatgcaaaggctgacaggaacatggttgagtgggcccaagcaatgggaggtatgaatgctctggtgctcaacaatacaacaggtaggggcaactatgttgttaagcgtgtcctgccaatgtacagtgtgggacatggtcgagtgggcccaagcaatgtgagagacgtgggcgcgggtggtgcaaccgacagcctggtccagtcggtgcgctgggtgaaccaggtattgcattctggggctggaaacaaaaatgccttcaaggcacttattgctgcagaatacagtggggtcaaggttgagttgaccaaggattttgagatgggtgtctccaacaagacccctgagtttctaaagatgaacccccttgggaaggttcctgttctggagactcctgatggccctgtttttgagagtaatgctattgcgcgctatgttgctcgcttgaaggatgacaaccctcttttcgggtcttcccgtattgaacaagcccacgttgagcagtggatggactttgctgcaacagaagttgatcctggtgttggatggtacttgtatccaaggcttgggtacatcccttatgctcacacgactgaggaaacagctattgcttcattgaagagatcccttggtgctctgaacacacatcttgccttgaacacataccttgttggacattctgttactctagctgacattgtattgacatgcaacctctaccatggaattgcacggatcttgaccaaaagcttcacttctgatttccctcatgttgagaggtatttctggaccatggttaaccaacctaatttcaagaaggtcattggtgaggtcaagcaggcagagtctgtacctcctgttcttaaaaagggtgttcctcctaaggagtcaaaggcaaaggatgtgaagaaagaaactccaaaggaggcccccaagccaaaggtggttgaggtaccagcagaagaggaagcaccaaagccaaagccaaagaatcctcttgacttgctgccaccaagcaagatggtccttgatgactggaagaggctatactcaaacacaaagaccaacttccgggaggttgccatcaaaggtttctgggacatgtatgacccagagggctactctctgtggttctgtgactacaagtacaatgacgagaacaccgtctcctttgtgaccctgaacaaggttggtggattcctgcagcggatggacctgtgccgcaagtacgcctttggcaagatgctcgtggtaggttctgagccacccttcaagctgaagggcctttggctcttccgtggccaggaggttcccaagtttgtaatggatgaggtctatgacatggagctctacgagtggaccaaggtggacatctctgatgaggcccagaaggagcgtgtcaatgccatgatcgaggaccaggaacccttcgagggcgaggccttgcttgacgcgaaatgcttcaagtga

SEQ ID NO: 9700 - DNA, 657 bp, Zea mays
  Peptide Sequence Number=SeqID_53075
atggactgccctatttatgcacctaggggatacatgacattgttaccggggactgccctgctacggaggaagggcttcggtatggggaaaatcctatttacaggatgcgtcagtgcttctgtgttggatgacgtcgggatgtcctttgctgcagatgtcaagaaacggtgtccgaggtcgagctcagcgtcgggcgaggctgagtttgcgctcgagggccagtctgtcgtattagatgtcctgtctgggggtgatgacgagtacatgcctaaagcatcaaatgttgaggatcaagctcaagatggtgatcatgagagtcttcgtcttgaggggctagacgaggctgaagatagcttcgtacccgcggcagaggaaagggcggaggggcttactggtggcgagattgctccggtgaaggggccgagggcgggggagctcgtcggcgacgagggctctggcctatccagggcgggcctcgattctcgcttggagaagcttcacgtctcctcggggaagctgtccaaaggcttggttgaggctgaaggcctctggaaatggctggacgtggtggccggcgctcgggtggctcgggtaggtggcacagaactcgccggagctaagggtggtgtctggccagcgaatgtgagtgtggagtga

SEQ ID NO: 9701 - DNA, 978 bp, Zea mays
  Peptide Sequence Number=SeqID_53076
atggcgatgtctggccacgacgcgaggcgggtctgtggctcctttgcgacttcgacgagcaattggcagggcgtcggtgaacaacttcacccgaggaggatatgttatgactatcattttttgaaattcaaccaccagttcaaatgcacagataaaaaacccaactcgacaaccatgatgaacaaagacactggcattcaaagtgccattaccaacggaacttcagttccatccccgcgggtacgaataaccccacaagaccggggaacccgcggagcgatcgcgaaccgacgggcggcccgccgccgcccgatccggcaacagcggcaaccaccctcaccccgggcggcgaagcagcttcggcagcggcttcggggcaggtgttacgacaggagggctctcacccgcagaggacgagaaccagccattcaggccgggagacggagacccagggctactggcggaattggcaatctcatcggtagagaagccatcttcggctgccgacgcctcgaagcgcgccggcaggtcttcgccctggtcagaaccggccagagcgtgggtgccgccctcgcgggacgcagcgcaaccgtcgtccggacggagggcgtagtgctgcgccctagccgagtgatagcggcccacctatcccggcatggctgggggaagtctccgcgaaactggaggatgccattctcccccagacgctgggggaagaaaagggcagccgacccacgcgggggcagccccccgactcgcctcatcctccatcttggcctggatgacgaaaatcctcgaggccgagggaggggcagaggccgcgacccgactcgctttcccccaccatcaagccggaggtcaccatcttgggtgaccgccggtggaggggtgcagccgggctgcatgatgaaaatccttgaagccgaacgatggctgaaaggtaccaactcccccggagttgcgttcctccaacgatga

SEQ ID NO: 9702 - DNA, 1245 bp, Zea mays
  Peptide Sequence Number=SeqID_53077
atggcggtcccgaggcctcgaatccgcgctctacgtcgaggcacgctgctcctcttcctcctcgtcccgctcatctactccggtacggatctctcctttctctcgtccagttcccctcgtaatgaggacgcccccctgacgatccaatccgcgccagtgtccaggctgcaaccctgggcgccggagaagggcgtgtgcctgccacccccaaccgcgccgaagcgacctgaccatctcgtgctcggtcccgccgctggacagggccgccccgaccgcctccagtgccgaggacttagagctctgaacaagattggcctatcaagtgaagagaactattctggagaacatgtttcttttgttactgtatttacaacctacaattctgtttcagccggagatggcaatgttccacctgattctgtaactgttggaaatagttcttatagcaaaatagaaagatccatgaccattctgaacactttcatcagtttcataaaggtatcaatgccaagaagtgacgtgatcatattgactgatcctggttcaaaattttcagtaaatcaagggagtgctacactattgcctattgaaggaaactattctcgcggaaatttgatgcttcagagaataaagacatacattgcatttctggagcaaaagcttgtggaatttgataggacggagaggttgaatcattttgttttaactgattccgatatagcagtggttgatgatcttggacatatatttgaaaaatatccccattttcatctggctgttacttttcgtaataacaaagggcaaccattgaattctgggtttgttgcggtaagaggaaccagggatggcatcactaaagctgcggaattcttgaaacaagtccttaaagcttacagcttaagatatattaaggctgcccgtatgcttggtgaccaattagcacttgcatgggttgtcaagtctcatctaccatcggctttgggaaaattttctaagcatgaagcatttactggtgaagttaatggaacatctgttctcttcttgccttgtgctgtttataattggaccccgcctgagggtgctggacagtttcatggtatacccttggatgttaaggttgtccatttcaaaggttcaagaaagcgattgatgcttgaggcatggaatttctacaactcaacctctaagatgtctgatatgctatgcctaatcttgagaagtggccggacgaaatacgacttctga

SEQ ID NO: 9703 - DNA, 90 bp, Zea mays
  Peptide Sequence Number=SeqID_53078
atggccgatgcttcccaacccggccctggtgaaccatctccgcccaaagcgttgtccggcggtttcgtggcgctggtacaaggcagatga

SEQ ID NO: 9704 - DNA, 885 bp, Zea mays
  Peptide Sequence Number=SeqID_53079
atgccttcgcactcccctcatgcattacgcccttccaccttccgagcccccggatggggggcgcccgtgttgctttcgtcttgctgtcgttggaggagcgcaacttcacggatgttggtacctttcagccatcgctcagcttcaaggattttcatcaggcagcccggctgcatcccctcgccgatggtcacccaagacggtgaccaccagtttgatggtggggagaagcaagccgggctgcggcctctgccccgccctcagcttcaaggatcttcatcatccttgctggggaggagggcgaggcgagccggggcctgccttcgcgtgggctggcgtcccgcttcttcctccggcttctgggggtggaaaccatcctccagctctgcggaggaggcgccctccagccgtgccagggaaggcgaactgctgctgcccagtccagggtgcagaatttcatcctttgtccgggcgacggtggccagccgcaccgaggggtctcacaacacgtcgtacgccgcgagggcggacgggagtgaggacctgtcggtgcgctttggggcgcccggcgcccgctggtgcggtgttggtgggcaggtggacgtcactgtcagtgctgaggtggtggcagctggagaaagcttctccaccgacgagaccgtcagcgccacccgcggaccgaccttaggctctttggctttaatgtctggttcttgtccctcgagtggggacgcgaacgagagccttctagcggtagcgtccgtcctgggaccatcgctgctgctgcagaggtcactggcgagtcacccggagtttgtcgtcccgcaggccctccaatgtggggggtttttcgtacctgcgggagtggaaccggagttccgtttgtaa

SEQ ID NO: 9705 - DNA, 249 bp, Zea mays
  Peptide Sequence Number=SeqID_53080
atggggctcggtgtatgcggctcactttgccaaggtggtgatgagaatgatggttttggtattgactatggtaatgctagtccactacagccaaacaggacatttgttgagtatgttgatgtgtactcacccttgctctacacaccaaaccccccttccccaggatgttcgtgttgcaaccactgctcaggagaagatgaagccgtggaggaagacttccaggagatccaagagtatgacgagttttag

SEQ ID NO: 9706 - DNA, 318 bp, Zea mays
  Peptide Sequence Number=SeqID_53081
atggttatcaacggccaagttgagctctgctactcgagcttgagctgtttcctccttggcccatgcaagcgaacgagattgaacaacccagtcgagtgccaaatctcggtccgcgagctgatctcgcagatggcggacgtctcttctcaattcatttattcggttgccatctgcgacccatatatccatcctgcagtggagttccgcttggagccgacttatttctgcttcgagatcccctatcggatcgttgcttccactactactattatcatgtcttggggccagcaaggtgacatggcacaccaatcggtctag

SEQ ID NO: 9707 - DNA, 141 bp, Zea mays
  Peptide Sequence Number=SeqID_53082
atggccatgatgggttcaacattggaaaagatgtacctctgccaggtgatgaagcaacaaatttttgttgcttctgttccaaggtggtgcccaaagaagaaaaccaagactgaagctgtgggaggaagtgtcctcctataa

SEQ ID NO: 9708 - DNA, 141 bp, Zea mays
  Peptide Sequence Number=SeqID_53083
atggctatgatgggtttaacatcggaaaagatgtacctctgccaggtgatgaagcagcaaatttttgttgcttctgttccaaggtggtgcccaaagaagaaaaccaagactgaagctgtgggaggaagtgtcgtcctataa

SEQ ID NO: 9709 - DNA, 273 bp, Zea mays
  Peptide Sequence Number=SeqID_53084
atgtaccaccataagatggtcaataccaggaagggtggtggaattgatctacctcccaatcgacacactcggaggatatttagacaacaacaacaacaacctgagatggatcctccacaacctccaccaaccggagctgatcccgcagttgtagcccagatgtggataatgcaacacatggcagacaccatggcggatatgcacgcgcagatgcagcaggaacaccaggagatgcgccaagagcgagagtatatatgccaggagatgcgctaa

SEQ ID NO: 9710 - DNA, 450 bp, Zea mays
  Peptide Sequence Number=SeqID_53085
atggagaggccgagccttgatccctttttattttataattctttttctttttcactcacgcttaaccatacacagatgacttctcatggatcctcggacggagggaatgcacagtcccacacggatggacttgcgcgagagggttttccccatatcttgtgggagctgttcgagaagcaccgagtgcctcgatgtagggtgaggatgaccctggagcctcatcccttacagctaggctggcattcgttggactccaagtcttttggataccgggctgaggaaactatcgaggccattgctctccacgggctgactactttctgtggttttcaccccttggagctgtctactcatcccattggcttgttccccgctgataatgaggacgacccaatgcggaaagaccgagtggagcatgccaaggacatatgggctctttacccagggtag

SEQ ID NO: 9711 - DNA, 615 bp, Zea mays
  Peptide Sequence Number=SeqID_53086
atggcgcgggcgcgcccgctccgtccctcgcccggcatgcttccccgccctgccccctgcccagcgcggcccggcgcggcgcgtctcggcacgccggcgcgcggccatggcgcccgtcccacgcggttcgcggcggcccccggctcgcccccgtcgcgcgcccgccccggctcgacgtcccgcccttcccctgtgcgcgcgcgctcgcgcggcggcgctcgcctcgtggcctcgcctgcggccatggcggccacggcgcctgcgctcggccccggccatggcggtgtcccgacgcggcccggcctcgccccgcccggcgcgctcccctccccacgccccggcggcgctcggttccggcgtggctcggcctcccccgcctgcggcgctcggccccggcgtggcgccctccccggcgtggccagccggcgcggcggcccggcgtggcttgcctgcgcggcggccagcgcggccccggcatggctcacggcgccctcgcgcgaccagcgcggctcgagcagcctcggcacagccactcgcaccattgcgcgtcgtgcaggactggttcgtggtgagatggattgtggccacacgggataccatcgtattgaatcgtga

SEQ ID NO: 9712 - DNA, 180 bp, Zea mays
  Peptide Sequence Number=SeqID_53087
atggggctcggtgtatgcggctcgctctgccaagtttgggttcgccccttggggaggagtgcgagacattgtggtacaggtggctatgagattgatggttttggttatgattatggtattggcgaagatgaagctgtggaaggagacttccaggagttccaagattacgacgagttctag

SEQ ID NO: 9713 - DNA, 354 bp, Zea mays
  Peptide Sequence Number=SeqID_53088
atgggcagcccgggcagcggtggtgtagacggccagccagcctcccaggtcctgcttaggctcatacttatcgaagttggagaccttgaagttaggggggcattgaatggccctaagacgtggagtgagcgccgatactccacacctgtcctcttgccgacgatgatgatgtcggtcccagggagggggagttgtcgacgtggtgcttcaaccgtccccgggtcgtgccgccagttgaagccgtcgccgactcaactctggtggtttgactttgcgcagggacgccatgatcccggtcatactcttctcggcgccgaatctcgttctcgtgctgtcgcaagcacgaagcattga

SEQ ID NO: 9714 - DNA, 300 bp, Zea mays
  Peptide Sequence Number=SeqID_53089
atggccacgatgaagcgcgccaccgcggcggcggaaaaacatcgacgagaaatcgagggagccacggggctcaatcccaaccagggcgactatgaacagcttcctggcaaccacccgaagctccatggcccgattccgaggtgccagcaccagcgcacgggacttgcccccgcggcggcagcgacagggcaggctcttttatgctcgaggcatgtagctcctggatgtgcggcagcgaccaacgtgaactccgtagaggcggtttccaccggtgatgagtggaccgagccgcagacctag

SEQ ID NO: 9715 - DNA, 447 bp, Zea mays
  Peptide Sequence Number=SeqID_53090
atgggcaagagcaagaagggcggaagttcgtcgcaccactctggcgacaagcggaagcgcgagccgacccctccctcggaggatttcggcgattctgagtactcggaggaggagttctccgagtccaaagggttgccggtccacacctctcccccggtatcgttcgatgactcggacgattcccaggggatcaccgccgaggtgtggacatatatccgggtcgtcaagcgctccaggctcgagggctcagatgagtcggaggtctcctcggacgaggaggattcctctgactcgtccgaggaggggagcggcggcgacgacgacgacgagggcgacagcaagggtggaggcgacggtaacggcaacggtgatggcgatggcggcaagggcgacggcaagggtggcagcgacagcggcaaggccagtggcaaagcgccactggcttaa

SEQ ID NO: 9716 - DNA, 147 bp, Zea mays
  Peptide Sequence Number=SeqID_53091
atgggggcggttccaggaagaagctctatggcaaactcaactttccgctctggtggcatacccggcgggactaactcggtcaccacttcctctcctagtggggacaccaacttgattgtcctcttatcacaactgataactgcctga

SEQ ID NO: 9717 - DNA, 591 bp, Zea mays
  Peptide Sequence Number=SeqID_53092
atggctttaagctttatcaaatggacaagaaaagtgcattcctcaatggatgaatcaaggaagaggtctatgttgagcaacctctcggctttgaagatactcggacagagccaacttcacaccacaatatctctcaaccccgaccatatctttgcttggaactcacatggaaaagataggacatggcgcagagaagagaccgtacatgggatttttgctgagatctacacgctaaggcgaacaaacatgcctttgaacaccgacagaagtaaaccaccacgtgttcgacgtgggcaggcactcgggagcgtgcccagagcacgcccacacgcgcgccccctcgcgccctcggccgcccccatgcccatgcccgtgtcgtgcccacgagtggctataaagcctgccttcatgcacgaccaccttccctgtcaccccctctgcaccgcgcctagcttgcccgagccggcccgcagctccggcaacctccccgcgacccgccagagccgcccgagggcgcccaccgtgaccaaaccactcccgcccacctccgctcgatccgagccctcggatagcttcctcaagaggccatga

SEQ ID NO: 9718 - DNA, 918 bp, Zea mays
  Peptide Sequence Number=SeqID_53093
atgttgcagcccttcctcgacgtcgttcgctccgtcgacgccgacgccaccatcacctccgtctcgcgctactacagctcgtccctcggctgcctcacttctgtgttgccttcgcgaggaaggagaggaggccgttggatctcgctggattcgattgggctaggacgggatcaccgcgggcagaagctgtcgctcgactcgcagcccaagccggcggacgcaacacagcctgctgctgccaccgccaaaaagggtgccgcagcgagccagccgctgagcgtggcgatcccgccggagccgtccatcacgccggtgatccaagactttacggatcccaacctgttttatctaccagcgtattactatggaggctacggcagttccatgagcgagtgggatgattatccgaggtatctaaattcagatggagtggagattgccccaaaaatacagtttgtattcagtgctgatgggattgattttatcatggaatatatttcagaaccactttggggccaacattgtcgtaacaagagggcccctattgtgccctttgatggaagctatcttccatattatgctgctaatataacatctagatatttttttactaaacacaaaggcatagcaagtcagatcgagattgagaatccaaacctggtgaaaactaagaatgtaaaggtcaaggatattgatactgcttattgctcttctcaagttcatggaaccatatcccagaggcggctgtttgattttgttcctctttggtttgttgttgttttgaattggatcatgtgcgtgctattgaactggatgtctggatttacccacaatttgcagttgcaggagcagtttttcacgaatacgaccagtgagcaccgcacttcaaaaacagaaacaccttctacaacactctga

SEQ ID NO: 9719 - DNA, 363 bp, Zea mays
  Peptide Sequence Number=SeqID_53094
atggagcgccggcgctacgaggaagatgaagatgtgagacgaagaaatggcggcggtgcctatgttaccttcgctggaggaatgaaaatgttagggagtaacaggacacgttatacgtatttttttgggtgtgccttcctttccagtgatacaattaagacttctaaacaggacacaattagaattgagagtgcaaatggaaggttcgagtataatgtaggaccttcattcaacaccataagcttcttgagagactaccaaagaatagcagatgcaataaacatagtagaagacaaagagaacaatggaaacgaacaaaatactcctaaagaaatgaaattcgactacaacattgaactttag

SEQ ID NO: 9720 - DNA, 430 bp, Zea mays
  Peptide Sequence Number=SeqID_53095
atggcagacttgtgccacgtcagccagcccgtggacataactgacataaaaaagcagttggtgcaaggctttactcaagaaatacggcagcgccgcatcgtagcaaacctcactggatccaaagtatttacctctttcctgcggagggacgatgctcaagacactaagacaaccgatcaagccaaggatggagacaagaagagcttcgaggtaccgagtgcacgggagaaggtcaaggagaccaggaacccaaagccagaggtgaagaagaagacctacaaagtcaaggttgatcgagttaagagttatgagtccaacatcgacctcaaacatgccaaattgggtaaaacgatgaaaaaggtcaaagaaagtaccattctgagctctgctggaggagaaacagaaaagctaggagaagaacaagaaagat

SEQ ID NO: 9721 - DNA, 2757 bp, Zea mays
  Peptide Sequence Number=SeqID_53096
atggcggcggcggcgtacttgggcggccgcggccagggagcagacggcgggtggttcgtgccaggcgccggcgacgggtgggcgcccccgtgggggaggcgcggtgggggaggagcggcggcggcggcagctgcagcagcaggcgagagggagacgctggcggtggtgatggcgaggagggcgcctccgccgtcggcgatccgccgggacgcggtgcgcgttgcggaggcggccgccggcgaggtgctgctgcgcgtccaccccaccagggaggcggagcgccgccgccaggacgtcatcgcctacctcacacgactcatcggatcctccctcggctgcgaggtctttgcgtttgggtcagtgccgctgaggacgtatctccccgacggcgacgttgatataactgtactggggaacacatggttaaacagtacactcattgacgatgttcgcagcatgctccagtcggaacaggaaaactgtgacgctgagttgaaactaacaggcctgcacttcatcgacgctgaggttaagctcataaaatgtgtgattgagaatattatcgtggatgtctctttcaaccagattggcggtgtgtccacgttctgcttccttgagctggttgaccgtcaggttgggaaaaaccatttgttcaaaaggagcattatgttaaccaaggcttggtgctaccacgaaagtcgcatattaggagcccatcatggactgatatctacttatgccttggaaacacttgttctttacatattcaatatgttccacaagtctctgcatggacctctggaggtcctttataagtttttggaatattttagcaagtttgactgggatcgatatggcattagcttaaatggtcctgttgatttgtcatcattgccgagcttaactgtggaacccacagaagtacaaggtgagttattgcttggcaaggacttccatcaaggctctctggatagactcgttgtaattccaaatgagtttgacggatgcgacacacaatttcgccagaagtttttaaatatagtcgatccactcaaggcgaataataatctcggcagaagtgtcagcaaagcaaacttttatcgtattcggagtgctttctcattcggagcacaaaagcttggtcaaattctcttgttaccatccgagtacatttgtgatgaaatttacggatttttctcaaatacactgaagagacacggaaagggtgaaagactagacattgacgctagtagtgcattccaacccttgcttggtcccgagagtacacttagtgaagatggatcgatgtttaaatcttcttgcataaatgagggtgaaaacggaagttcatgtcattcatcagaactgcctgacatgggctcgagtgtgacagatgtgcataagaattcaggtaagtatttgcctggtctttttcaggatcttccttggaataaaatctggttcatggaatatgcatctgatttgaaagaaaatccacaaacttcagcaagttcaaggagccactcatccttttctcaagataatggtaatggcaacagtaaagagtgcttcgagaattatgcagcagaggaaggtttacaccagatcagtagattaaatgtgccgcaacagatttatgcagggcatccatcgcatagattggctaactcgactagtgcaaatatcttggatttctccagttcttgttttgttgatgagtcagattggactgctccccttgcaggaaaaaagctactcccacccttgttgctgtcaaatatgctggatctctcaggtgatctggagttgtacttgggatgccttcgcaaagttcagtaccacctggagtcattgtttgatgaactcctacaggctgttgaagaagcatgttttgctgatgtgctagatgaggattccttcaatatgccagacatgatcttgaagttaaaaactagcactagatcctcaagcctgccattagattcatctactgatagcgagagaaggaaattatctcctgtgtattgttctcatagcataggagatgattcacaacaatcacatggcgaggcacaagtggatatgttttggcagcagaacgtgccattgtcccccaatggatcaacatttccttcatctccttcaaccaattcagataattatcctgtttcttggttttgtttctctcctaagacgcatggaaccggcacatacattcccaatgtgagttatcaaacatacagggagcgtatcatgcttgaaagagataccatacgagcaagaaaacaaagacagaggttacctggtcgccggtattactcagccgagcaaggattttccggttcacaaaccgaagaagacaccatagctcaaagtgcaacgaaccaatcgcccaagaagcaaaacagtgtgcagcagagtggctattcaggcaagagcacagttccggatgcagatttcgtttgtttcagggagcatgtggcaacagaaggtggaaccaaacagctggcagtaggaagagagacaatgcctccatcatcgtcatcagggatagcacttgctcaaaacggccaaggaaatcgtatctgcgagccttcctcacccgccacagcagatttgttacatgcggcagaaagtttggagtttggatccttggggcctttctcgttgggacttgtctcaacttcaacacagtttgaggaagcattcccagcgctccccactagaaagagagctgaaggagccgagaaccactaa

SEQ ID NO: 9722 - DNA, 402 bp, Zea mays
  Peptide Sequence Number=SeqID_53097
atgggtacgttcgatacacaaccaaggctcgggttgcgctcccaaggtaccctaggacatttccgagaccagcgggaacgatcttgtaacggaatcccatcagagggaggcatcgagccctcggaccccgtcgacaggggaccgggtccggcagatcacccgcagagccaaagtgaccacagtcacttcgccgctccactgaccggcctgacagaaggacagcgccgcctgcgccgctccgactgctgtgccactcgacagagcgaggctgacaggcagccaggcccggcctcaggcaccataggaaactccacttcgctcgacccagggctcggactcgggctaagccccggaagacggcgaactccgctccgcccgacccagggctcggactcgggctaa

SEQ ID NO: 9723 - DNA, 366 bp, Zea mays
  Peptide Sequence Number=SeqID_53098
atgccccagcccgctgcttttgtctccgtgcagccgtccgatggtcaacccacgccgagcaacgtctcgaacaagaatatgaagcacggtggcaaggtgttgttcttggatggcgccggggaggtcgccatcaccatcagtcgcaactcgcaacagcctctctccacagtccctgcacccgagcgaaagactttgaagggcacagagtcttcagctccttctgttcctcctgatggaggagtcagcaaggaacctaaaaaagggggagattacccaatgggtgaatttctatccgcttattggaaccactcatcaggaggacaactggtccagcacgccgctcatccaagggcaactggactctag

SEQ ID NO: 9724 - DNA, 1329 bp, Zea mays
  Peptide Sequence Number=SeqID_53099
atggctggcaagtcacagaaagaaacgaccaaattagcaagcaggcagttacagacgcggccgcgacggcacatcgccgccgtagtccttgaccttgctccacaaccccggcccgactcggcgtcctccgccaccctcctcctgggcagcgccgacggggggatatggcatcggaggacgtggggcgacacggccgtcaccaccatcgtcaacctggcggaggaggccaagctcgcgcgcgagggggtcaaggcgcccggccaccagatcctcaccatctgcaagtcgctcgtcgccggcggctcagcaggcggagtgctcctggtacagggaattgggggtttccgtgatgcttggcacggggggaggggcactagcggacagctcggcaacggtgaaatagtcgacagacggttctgcctgcaagaagctggagtcatccacgacagccccgttcgcaggtctggcgtccacaatttgcatggcgcacggttctgccatctccctctgcgctgcatcaacgaccgcgggttctgcctctccctcacactgagccgcctgcccccgctgcacccctccacctcgccccttccccagccgtggatccaccgtaccccccgccctggcgccgcggttccccgccatagacgccctggatccacctcctcctcctctccccatcactacgccgcacacctccaccgcgcccccgtccccgtctccggcggcggttacggggcccacgccggcggcagtgaggtccgggagcgagacccccacggcgtccccgtccccatccgcgcccgggacgcccacggccgctgcagcggctccctcgaatcccgcccgcggatcccgatccggacgcggaggatgacctcgatcccgcgcccggccggggacgcggcagacgcccgcgtcgatgcatcgacctccgcggcgagctccagatcccgccgggccttggccggcagtgaggtccgggagcgagacccccacagcgacagagaggcccgcggcggcagtaaggtctgggagggagacccccacggcgtccccgtcctcgtccccatccgcgcccgggacgcccacggccgcggcagcggctccctcgaatcccgcccgcggatcccgatccggacgcggaggatgacctcgatcccgcgcccggccgcgtacttggagcactcgtccaagttttgctatatgttccgcaaagtggtgttcaccgaaattgcaatccccattgtgccaacagtgagggtggttatcactttcaccaagtttgtccccctcatcgagcctgaggagttcttcactattgactaa

SEQ ID NO: 9725 - DNA, 453 bp, Zea mays
  Peptide Sequence Number=SeqID_53100
atggagctattaaagaaacatggcctcgtcgtagatggcaggcgccacctgcagcggcgtgtccccaccgtcgttgaacgctcagttagcagtgcggcgaccagcgactcaaacagtgtcaccgtatctggagatccaaaacaatcaaatcacatcaggagccacgcatcggaggaagagggggagagaagaggatctccatacctattggagctcaacgcgctactggcccgcggggctggctcaatgcggcaggtgtggggcgagggagcctgggttgatggcgtggtggctgtgcgcggggatcagcgagagaggaggtatggcgtgagagaggctagggttttgcgtgcggttgagataaggagggaggcgtgggatgagggactgcgggttaacccgagaaaaactgagggtgatttttgtaaaaaaatgacgcacgacaaccgttga

SEQ ID NO: 9726 - DNA, 774 bp, Zea mays
  Peptide Sequence Number=SeqID_53101
atgcccagatttgggacaccgccggccaggaacgagagatgtttagatgactggagttcacattcatcttctgctggcaacccagacataccatatgtggttgtctccaagtcatcaattgtgactgttgtatgcaaggagattcttggctactacaggaagttacttggcattcctgatctgttgaatcaaccaaacatgtcaattctaaagcaacttttgcagactttacagccaactgaaaattttgatgatgttctttttgagttccaatcatctcttggtccttgcaatgttgattacctatattatggagcatgtaaaatgttggaggatattatggattcagtgtcctcattttcataccttttgtcttctgatgtgttaattactatacaatcaattgtaaattctgttgttgtgttgttggacaaatccggggaaccaaatggggaaaatatacacatgggatgctccaaagcaatcatttcctttctgcgaaagcgtcttggatactcagctcataagctgctcagtgctgatttccctagcgaagatgttggaaaggatggcagaggtgattttatacagaagatattgcaaatatacctcaggaatagtgactctacttcatatctacttgctgagataggtcgtgaattgcctaaggtgggccatctcttcttctcgagtgatgctctcgagttatgcatatgccaccactctgccttaaaaagaacatctggcatcattctgaatccagccgaggagtga

SEQ ID NO: 9727 - DNA, 657 bp, Zea mays
  Peptide Sequence Number=SeqID_53102
atgctcacttccatccttctccccaccagcacagccacaccccctctcccccctcgcctccttcccagaccccgacacgtcctcctcggccgcaatgaccgctccccgaccgtggtccccgctggcaaacccaagctcgtcggggagaagagcaagggggcgcagaggcttgcctacctagctcgtcggggccctatggagatccagcaccatcggggctgggcaactccaaggtggagaaggtgcagagcgaggaggcgtgggatctattcaccgatcaagcgagcaatgaaggctgggccagggagtgtctgttgttgcgctgctaaggcatttcgggtgcccatgctggacacaaaggagagatttgattctgctggagtaaaactgattgctattggtgttggcactctagctaaagcccgtattcttgccgaggagcgtttgccctttccgttggaatacctctatgctgatcccgatcggaagatcccctctccccattaccgcgattcatttggtacttcgggcaggagggtcctgatcggcgactccggcgtcggcaagtccaacttgctctcacgcttcacgcgcaacgagtttagcctcgagtccaagtccaccatcggcgacgagttcgccaaccactctctctag

SEQ ID NO: 9728 - DNA, 2913 bp, Zea mays
  Peptide Sequence Number=SeqID_53103
atggagaaagatgcaaaagctgctgcgtttcaggtagtgaggtacgagaaggtgcaggggcacatcaaggttggcgggcctctggctggccaagggctcggccacggccacgcgctgtggctgtacctcgccgtcgtgatgctcctcatcgtcttcctcctcggcctcatcgcgttcgggttcgtcgtcactgcgggcggcggcggcgcgcaggtgtactgtcgcccgtatcgggagtacctcaccgtcgactactccccgtggctgcagagcctacctgcccggcggcggttgctcggcggccaccgtacccgcgaaatgcgagcattcaacggccgccgcctccacgatccgaagcccccctcattcctccccctccccttagccccacgcaccacaacgccgccaccgccgcccccctcctcgccgccgcacgccatcccgccgctcaacttccgctacctcaccccctgtccgcgctggtctgcctgggtcgccaccgcactcagcgaccccgttttcgctcccatcctcgcctcgtccgccatctccggcgccgtcgccgcctccaccgccgtcgtctcccccgaccgtgcggccctctccgctctgctctcgctctgggacccggatacccacgcgttccgtctcccagcgggccccgccaccttcacactcgaggatgcgctcgtcctcgctggtctaccgcccgcaggcgcgccgctggaccggaccctcacgccagaggaggatgacctccgcgttcgcctcgttgtcgagagggagaagatcaaggagctccacccctgtgcccgcgccgcgcgccgcgtgtctgcggaggtgtggctcgagtggttcgacggcggtggcatacgccccggcgaggacgacgaactgcggtggcttgggttcctcgcttactggctcgctttttttgttacgccaaggctccggtcaaggggtggcgagctgccggagcgcgtcttcgcacatgctgcgaggcttagtcttggcgagcgcattgcccttggccaggggatggtggcaaatctatatgcggaaatggataagattgttacttgcactgtggccgatggtgtgtgtggccgtctagatgtctgcgtgccagtctggatgctgcaggtgtggatgtgggagcgctacaagaggctgtgcccgccggagctgaaggcaccgcagttccctgtctccaatgtcagggtattgtattggagccggaggaagaagaagagcacatctgaagaggctctaaagattttgctggacgaagtatgctttgagtggaggccctatcggcacaactccctcaactggatggaacccaagtggttcaacaaggacaccattttggtgacctgtcatggtaaagataagccagagtggttgttggattacattgctgttatcagtcaaacaatgttgaccgggtttcatagtgatgacaccgacaattcagtactgtacaatccacagcttgttgcgagacagtttggttatgatcaggctgctcctgtgtccattgtcagggaaatccactttgagggaatcgagttgtggataccaagtatcggtagatatgggatgcctggtgaagattatgttgcatggtgtagcagcagtgggcagttctacaagcatcaaaatgatgtccaatatggttgctcggtattacgaaatcatgaaaatggggctatttcgtcgcaactgaatgtaaatgagaaatgtgttgtagtgccaacacttgatcaatttatcacccaagtcactaggagagaccacatcaattacattgtagaagggcagccggagaaaatggataatggaagtcatgaggatgaaacagaggtgattgtctgtggccttgaagcttgtgtcaaggatagcagaactacttcagtgaaacagaatgtgcagaaacaaagagataaatttgctgaagatggaggtgatagtaagaagaaaagaaaagtagaaagtaacacgaaaaggagttcgttgcaattggaaggtcagaagtattcttcactccagaaagctctaaattctgattctaagaaatgtgaggagttggctcaagttgacagtgatgatgaatgcattgttctcgaacagcccaagaataaatgtgaagtaataaacctggatgatgatgaggaacagagtgtttctaatcgagaacatcataacatgcaacttgtcctagaactggaagagtttgtccgctctggtcttctctcgcaatgggaggaaagctcagatgaagatgatgtaagtggaagcaagcaagaaacccagaagaaaagcaacaatgacccctatgctgaagcagccatgagggagtaccctctgttctttgagttcattcctcagaaaccacattacagaggcttcgtgaactatgatgaaactttaggagatctaccttacagtggattatggtttttgctaattggcttggctaaggaggtgctcaagacgtcatgtgacacagatgcttctgaaattgcatatctgatgaaaaaagcccagcatttagagcaactgggtttcaacgtgacacatctcattgcccgcttaaaggagccacaaattaggcttaagaagcttcaagattctagagcaaggcttgatcatgcccgtgagaaagaggagggcaacgtagtcgagtctctttcaagccatctgaataaactgaagggcaacataaggatgatggatagtcatctggatggaacgaagcaagcttttatttcaaatatacaagataaattgaatgaaggaattaatcttgccagtttggaaaaggaagtagaaactgctgaaaaatgttgtcaggcaatgaaggatgaagtagctgcaatgagaatgaggtactcggaccgtggaatttag

SEQ ID NO: 9729 - DNA, 636 bp, Zea mays
  Peptide Sequence Number=SeqID_53104
atggatccaatgaaggcgccgccagcgaggtccccggcggagcggaggaagcatacgacaggggctacggggtatgagtttgtgtcaatttctctacccattagtttgttaatgggttcaaatggaaacccaacggacgtattttttcttcacgggtatgggtttgggcaagtaatacccaacgggtttttacccattgccatctctagctctgtccgtgctgggcagcgggtacgagcggttggggtagtagccgctgagatcctatatgacgtgtttgattactttgaggacgtcagggagcaggacggccgcgtgtttgtgcattgctgccagaggatgtggcgctccacgtcgttggtcatcgcctacttaatgtggagggaaggccagagcttagatgacgctttccagtttgtcaaggctgtccgggggattgcgaaggctttgtgttgccgcttttttggagcgccaaacactcaacaagaaccgtggtggtgccctctggtcaggcgcggacggtccgcggccttgggccggacgatctcgtcccctggggggaaagatcttaaggtgctccgggtcgataggtcacccggggcgtccccagacaacgtggagtcgcctaggaattaa

SEQ ID NO: 9730 - DNA, 1083 bp, Zea mays
  Peptide Sequence Number=SeqID_53105
atggatgtggtgcggcagatcgcctacaacaaacaaggggtggtcgtgaagacggaggacgggtcgtcgtaccgtgcggactacgtggtcgtctccaccagcttgggcgtcctgcagaccgatctcatacagttcaagccacagctgcccttctggaagatcgcggcgatctacagtttcgacatgggggtgtacaccaagatcttcctcaagtttcccgagcggttctggcccgtgggcgaggggaagcagttcttcatgtacgcgagcagccggcgcggctactacgcgctgtggcagtcgttcgagcgggagtacccgggcgccaacgtgctcctggccaccgtcaccgacgacgagtcgcggcggatcgagcgccagagcgacgaccagacgaaggcggaggtggcggaggtgctgcgggacatgttccccggcgccgacgtgccgggccccgaccagatcgacatctacgtgccgcgctggtggtccgaccgcttcttcaagggatcctactccaactggcccgtcggcgtcagtcgctacgagtacgaccagctcagggcgccggttgggagggtctacttcactggtgagcacaccagcgagcgctacaacggctatgtccatggagcataccttgcagtgtggggttctgctgcccatacactagctaatacatcttcaacaggtatcgactccgcaaacatcctcatcaactacatcttcaagaacgaggagtacaaggtccgtggcaagtacgacgtggaggacgacctaatcgcacagtccggtagtcgccaccgcgatcgatcccggcccatcattaatgggctgggcctgggcaccaccaccccgtgcgtcatgggccgaatgggggcacccaaacaagatccggagggtggtgaaaatgaattcctggggcaggcgcacgaggcgtcatcgctaggcgctatggataaaactggacggggaaacccaccctatctgacgtttctgtttctacattcttttttacgagaacgagatcgccttcatctaataatagtccatgtgaagataaaaatggcaacaccagaatga

SEQ ID NO: 9731 - DNA, 540 bp, Zea mays
  Peptide Sequence Number=SeqID_53106
atggagggccggatcccgtcttgcgctgggaaaaatatccggcttcgcggcggtctcaacccagccctcggcctgcgcggggccagcagcgacctgaagcagccgaaactgcaagaatccggcggtctccacccagcccgtggcctgcgcgcggctagcagcgagccgaggcagcggaacgggcagaagcctacgcccctgcacctgcacgtgcaggggtgtcaaaggttcatctacaactatactaaatcgactgtccggaataccgtagattattccggacaggagaagctttttggaaaaacaggccaagcgcggaccgtccgggcccttgcggcggaccgtccgcaccaccaggatgaccctcggacagaaccaatgcaaaaatctgagtttgcactatggaccgtccggaggaaaagagcggaccgtctgagacctcgcgcggaccgtccggcctctggcgcggaccgtccggcgcggaccgtccggaccaggcgggcggaccgtccgcggtgggcagaatggagcaacgactag

SEQ ID NO: 9732 - DNA, 450 bp, Zea mays
  Peptide Sequence Number=SeqID_53107
atgccactttgttcaggattccttgatggtttccaaggcttggttaacaagctcttgaggaatgatgaaacaatgggatgttgtactgaatcgacatcaacgtttttccctcatgctggaatggcacttggaaatccacgtagttatgttataagaggtttggtaaaattacaagcacacataaaggaagcacttcccctttctatatttctattgtataaattggctatggatccgttgtgtgtggcgtcgacacggaagcaggacttgtgccccagtgtgatgcttatagttgacagaagctctcacttcttcacttctagatggagtccttttgatatttggggtgtttggttcaaagtcatgctggcaaagatcaaggtcaagatcgagaggggtggtgctatcaggcaagagctcgccaagttgaagaaggcatacatggcttaa

SEQ ID NO: 9733 - DNA, 1701 bp, Zea mays
  Peptide Sequence Number=SeqID_53108
atgcagactgctgatgaggacgatgactttataccattatcgaagaagcgtaactttgatgacagtcctccaaaagtcttgaagaagatagttacaaagtggaggaaagtagtggatccccccgacaggttagaattgatgcagaggcttaatgtgagatgcaatccccaagacatattagtaagcatccagatattaaatgacagacagcgccaagctattgcacggagggggttctccagtattcttgatatgagagttgacgcacttggcagtagatctcatttagcttggctgatggaaaagcttgaccataatgacatgacaattcgagccggcccagggaaggagctcaaaattacaaaggagacagtgcaccttattttggggttaccaaatgctggtggagtaacgacattaggcattgatgaagctgttgctgcaaacattttaagggctgaacttggtttatcaaaagaagaatttggggttgcagctcttcaagatcgtctgaggaaagggtctgacgatgatctaagcatcagatcattcttcctgatactgttcaataggttgttgttccctactgccagctggggaataactaaccatgaggttcttttaactaaggaaatggatcgtttccacgagatggactggtgccagctaattttcaatgatttatgtcaagctgccaagaagtggcatactagtagcgttacaaatgtttctacaaccatttacggatgttccatcgtcattcttctgtattatttggatcatcttcatgactcagctgcacctcagaataaacgtggaacaccacgcatcaaatattttgataggaatattattcaagcattgacaagagctgacaagggcaagatacgccaaggacaagaaccatttggacattgtttgcataataccagggcaaacacttttgatgtaccgcgtcctgacccatctggacagcacacaattcacatcgaactcccgctcatcagggatttgatattcttccccagtcgacagggtaaacatggtgacgttggcaagaacatgccgaccaacacaaacgtcactcctcaagcaacaccacatacggaatcttgctcgccgatatttgatgcgacgccgcaaataaaggtttctgttgaaaccgatccagctacaaacactcctcaggttgaccaggtttcacttgattcggagatgcaaactgtgttagatctacgcgaatatttgtgtggtacgcaatctgacaccagcaggaccataatagattatggtgaatattgttcgacatgttctgatatatatgaatcttgtgccgatgggaagtgtctcgacaatgtgttcatgcagtgcttcatccaatgtgttgatgatgatgccaaaaatcagcagccttccatgagtttgaacagattaattattgatgttaatgttgggtcactactcaattttgaggaacaggaacgacacagtcggaaccctcagccttttgatgaatctgtactgcacacacttctagacaatgcattgcccaagacagatgaaatggataaatgcaaagcgatcatggttcccatgggcaacactagtgagatacggtctcttgcgctgcattatatcacattccatccgaagaacaaagcattatcgctgcttgaagacatccaaagtttcaaggcctaa

SEQ ID NO: 9734 - DNA, 525 bp, Zea mays
  Peptide Sequence Number=SeqID_53109
atgcgcataaagaagcaaagatatgcttcattatgtacgaaaagaagggaaggtgtttttcgccttcggctcaaaaaatacaagtttcgttcacatcaaagcaattcatacacggatgaaaagagcttttttcagcagcttcatcagtatccgtcaagcttcggatcattgaccttcggcttcgtcatcctgtgcataacaaagcggtataaggccaagctggggatgtcagttaaatctgctggtgatagcctgaagttcggcctgtttacaatttttccatgcgtgcaaccagccttcataaaagctacagttgtgccgcgagaagctagcagggcacagaagtcaccatgcccagctataacttcgtcaagcgcctcaacttcgcccctcaatatgtttgaaggtgctcgggcaggtcttttgaaatggaaatggtgccccttgggccatttctataatgttttggtgattaagtgtccacacatagcttgtaccgtgcacttaagtgtaggagttgcctga

SEQ ID NO: 9735 - DNA, 726 bp, Zea mays
  Peptide Sequence Number=SeqID_53110
atgacttcccacggatcctccgatgaaggaaatgcactgacccacactgacggacttgcacaagagggctttccccgcattttgtgggaggtgcttcagggggctggatacaagacaccccctcagtacgcggtgcagcagttcgagaagcaccgggtgccccgctgtaggctggctacccatcccattggcttgttccccgctgagaaggaggacgacccaatgtggaaggatcgggtggaacatgccaaggatatctgggccatctacccaggtcagactgcgcacttgacagtacggtgcatgaatgctctgtaccgtctgcaggtgatgcgcggcgaggcaatgtcccacctgatggcactgctggaggcaacaaagatcacgctggataacagagaggagctcgtggttgacctatctcaggaaatggtggagaaggacttgcaggtggagcagctatccactgacattcaggagttggaggagctggtgggcaccagggagaacaccatcgaggttctcgaggatcagctccttaacactcagcagcagcttgctgaggctaacgagcacctggacatgcaccaccaggagatccaggaccaggaggccaacgaggacgtcgacattgagggaggagatgagcctgcctccagtgtggacactgctggctcgggaagaccaccttcccccgagtcaagtgttgcctcgttcgctcactag

SEQ ID NO: 9736 - DNA, 330 bp, Zea mays
  Peptide Sequence Number=SeqID_53111
atggaattcccgagagtggctggtttgaagttgtacgacctggtgcaccagacactgtccaatggcacatcggacaatccggatacttctacttggtctgggaaagagtcgctattttcacgcgttgatgaaattcgagtcctggagaaaaccgccgattccgcccgcattcatgttcgttttacgctgaccaatggcaacaacgaagagcaagaactggttttacagcggcgcgaaggcaagtgggaaatcgctgattttatccgcccgaacagcggcagcctacttaagcagattgaggcaaaaactgccgccagattaaagcaatga

SEQ ID NO: 9737 - DNA, 252 bp, Zea mays
  Peptide Sequence Number=SeqID_53112
atggggaatacatcctcgtgccggagcaaggagtggctcaggaggataccttttgatatggatactagtatgctaggtcgagtagctgctttactaattagggatctcggtagaagtcgagtgatttttctagcactcgtgcgaggttctctagagtacatggttgctggagtgacttggccgtccatcttgccaccaggttggacagtcgagtgggatcctacctcggctgaggaggaggatgaggagtga

SEQ ID NO: 9738 - DNA, 285 bp, Zea mays
  Peptide Sequence Number=SeqID_53113
atggcgtcggctggccgttggcgcgacgcggggcgcgcgcaggcgtgctcgggcgcacacagagcgcgtcaaacacgtggagcttttcgtctgcccgtgttccacagctcacacaagtcgcaaacgtgcgaatcttggcaaaaatccggcgcgagtcttttcctggcacttagggctgtctctcatcccataaacaggaatatcattgaattacaagtgtaccttcaactggaaggagatgatagtacaagcgtgacgcaaaaagcgaatgccaagtcagcgtga

SEQ ID NO: 9739 - DNA, 846 bp, Zea mays
  Peptide Sequence Number=SeqID_53114
atggaggaccaagccatccctctcgccagagttcctgcccgtattggacaggatcaaggtcttggctacgtgcgaccggacatcaatgcacgtggtcggcgatctcctgaagcgccaaatcgtgccactgcagaggaggccacgcctgtcctgctggacatccctgcgctctgcgatgacccaggcctgaggatggtgatcttggccgcgctgccgaccctcgatgacagcggcatggcggttcaccagaccggtggccgggaccccctccgcgggatccggatctccgatgcaccggctggaggtcctccgccggccggtgtggcttccagtgctaatcccgccgtggcccccagccccttggacaagggcaaaggggctgcaagcagtgcctccaccccaggtagctctggggggtcggaggatctgtgcccaatcccgacactgggggtgacacaggaggcgcgtccagctccaacccccgcctgctccggaggagatggaggtggtgtttgggcgatgactccggtcgggtgccgagcaagaagctacgctagtcccctccctcgcatgctgtcccatgcccaccaggtcctcagtgacactgaggcagcaatcttgcggaagtgggaggcgcttgaggctgagcaccagcgcctcagtgactggcgcacccaactagaggagtgcaccaagacggtgtcccgacagttcacctccgagcggtcccaacttgagcgggaccgcatggagtacaagagagacctccagagggtgtgcgccaaggagctggaggcgtcccggagggagaagaaagtggccaggagggaggagtccgtgacctag

SEQ ID NO: 9740 - DNA, 1394 bp, Zea mays
  Peptide Sequence Number=SeqID_53115
atgtcctggccgagctctggaacatctgtctccccatccctttgcttaaatattgctgttctcctcggcgcgacggctgcattgccccctcccttcgttgctggttgctgcgggggtcgaggaggcacaggaactgaggcgcacattgggagaatgctggcggtcgacacaggaaccgaggcgcactttgggggaatgctggcggtcagcacaggagccgaggcgtacactgggagcatggtggtcgttcctgccagggatgtgttggctgtccagatggaactcacggcagcagacatgggcacaggtcccgggacagactgctcgaaggttggccctgtgggatgtgctgttgatgcttcagttgtgcaacagccgcagatggatgggcacggggggcccatgtggacaaggttggctggatcgctgaaatcgcttgggtcggactcttcccgacagaggtttgtcgggttgcagaggctcaccaagaccgtttcgccccgcaacagtttcaatgtcgggattgagttggtcccccggctgacctcaactcaatctttggttgggacgtcggaggcggacaaaaactctcccgctggaatgtcacttgatgctcaggtccttgagagccccagactgaagttggaggaggcgacccccattatgaagctggtggcttatatcaccagggacattgactgcttgcttccgcaacctccaattcaaaaaagaagaactaaacagcttccgccagattttgtcccacgtcgcagtagtcgcttgtcaaagaaaagggaaggcttaaattcaacagtcagacaagtccaggcggagctcatgttgaagttgaacgtcacaaactcacaggtggctgttactgatgaaatgctagaggaatttggacagctgtttgacaaacccctttccaactctcacatcaaggccctggcagctttgtttggatggccggtcccagataatgtgcaagaatgcttggatgttcctttgcttagggagttaagcattgaaacggaatttaccctcaatttgggagtcttccaccgaccagccagcaatcttgaagtgctggatcatggatttagtgaagaagagggggactcttccaagttttatctccttaactcggcttatgtgactctcttaccaaaaaaggctgaggctgtggagcctaacagaaatgagctgagtgtggtcaaggagctgttgagggtgtttggcaaggcatcagggctgatcacaaacataaataaatgcacctatgtttccccggagttaatcccctcccaatatcttggtccatctgcccagagcttggtgtaccagtccctaggtggtgaccatcgtcggctgttagtccacctcgccgtgaccag

SEQ ID NO: 9741 - DNA, 78 bp, Zea mays
  Peptide Sequence Number=SeqID_53116
atggcagtcggggtcagtgaggcattgtacgccaaggcgctaatgagactgcttgatccatgctgctacattgagtaa

SEQ ID NO: 9742 - DNA, 795 bp, Zea mays
  Peptide Sequence Number=SeqID_53117
atgacttcccacggatcctcagaggacggaaatgcactgtcccacactgacgggcttgcacgagagggctttccccgcattttgtgggaggtacttcagggggccggatacacgacaccccctcagtacacggtgcagcagttcgagaagcaccgagtgcctcgctgtagggtgaggatgaccttggagcctcatcccctgcagccaggctggcgctctttggactccgagtcttttggataccgagctgaggacacgatcgaggcgatcgctctgcacgggttgaccactttctgcggattccatcctttggagctggccacccaccccattggcttgttccccgccgaaagggaggacgacccaatgtggaaggatcgggtggagcatgccaaggatatctgggccatctacccaggacagactgcgcacttgaccgtacggtgcatgaatgctctgtaccgtctgcaagtaatgcgcggtgaggcaatgtcccatctgatggcactattggaggcgacaaagattactatggacaacagggaggagcttgtggttgacttgtccactgaaatggttgaaaaggacttgcaggtggagcagctatccactgatatccaagagttggaggaactagtgggcaccagggagaacaccatcgaggagatccaggacatggaggccaatgaggacgttgacatcgagggaggagatgagcctgcctctagtgtggacactgctggctcagggagaccaccttcccccgagtcgagtgttgcctcgttcgctcactag

SEQ ID NO: 9743 - DNA, 1380 bp, Zea mays
  Peptide Sequence Number=SeqID_53118
atgggggctcaggcccacgcgtcatgcaacaggcgcgccaaatgcttcgtgcatgcaactgcaccgccacttgcaccactaccgcgcctcctcgactgtggaaccaataccgcgactcgaggcgacccagcgcgcgacccagcagcgccagcctggcgcgacgaagggttcgacagccgcctcagatcgcgtgggccctacacccactactggtcagaggttcgaaggctggcccctcggaagggttccacggccgcctcaggctactcgggctccgcgcccattactgatcagggctcaccggagacaccatgttcggcgcccatcgagggcaacatggcgctttcccccccctcctccttgcggaaaggcgacgcaggggccgtcaacataccaggccgagaacttgggacccgaccgtacacccgggctacgaccagctcgcatgagggaacgaccagaccagccgaagcattacgcgaggcattaagacctcgaaggagtgaaaccactcctccgaggcctcgagggctacacccggcgggtgcgctcgcgcgcacccaccggaacaaaacgcaaccgagaaaggctgatccccttgcaaaaaagtgcgacgaaagcctccaagcgagtgctaacactcccttcgaggctcgggggctactgtcggggaccataattaggggtaccctcaaggctcctaattctcagctggcagtcaggcccggccgaaggcaccataggaaactccgctccgcccgacctagggctcggactcgggctaagtcccggaagacggcgaactccgctccgcccaccccagggctcggactcgggctaagtcccggaagacggcgaactccgctccgcccgacccagggctcggacttgggctcagccccagaagacggcgaactccgctccacccgaccccagggctcggactccgccctgggcctcagccggcggcctccgcctcgcccgacccagggggctcggaactcgacctcggccacggaagacagactcgacctcggcttcggaggagcttccacatcgcccaacctagggcgcagaccagccacgtcaacaggaggtgccatcatcaccctaccccgagctgactcgggccgcagggaacaagaccggtgtcccatctggctcgctccgccagataggcaacgatggcgccccgcatactctgtgacgacgacggctctcagcccccttacagaagcaagaggacgtcagcaaggactcaaccgctccgacagctgtccctccgccaggctccatcgctcctccgacggccatgacatcacaccagctgggcgccaaaatctctccggctgccacaacggcatgtacttagggcgctag

SEQ ID NO: 9744 - DNA, 519 bp, Zea mays
  Peptide Sequence Number=SeqID_53119
atggagcctggcggagggatagctgtcggagcggttgagtccttgctgacgtcctcttgcttccgtaagggggctgagagccaccgtcgtcacagagtatgcggggcgccatcattgcctatctggcggagcgagccagatgggacgccggtcttgttccttgcggcccgagtcagctcggggttgggcgatgtggaagctcctccgaagccgaggtcgagtctgtcttccgtggccgaggtcgagtccgagcccctgggtcgggcgaggcggaggccgccggctgaggccagggcggagtccgagccctggggtcgggcggagcggagttcgccgtcttctggggctgagcccaagtccgagccctgggtcgggcggagcggagttcgccgtcttccgggacttagcccgagtccgagccctggggcgggtggagcggagttcaccgtcttccgggacttagcccgagtccgagccctgggtcgggcggagcggagttcgccgtcttctgggacttag

SEQ ID NO: 9745 - DNA, 453 bp, Zea mays
  Peptide Sequence Number=SeqID_53120
atggagcagaggattacccggtctacgctcacaggcggtcgggtggagtccggcgaccgtggactggcttctccagcgaagcaaaatccgattcctcgctcggggagcttcaccgaggcgtgcacagtcttctccgagggttggacggggttgggaagggctcggttggccggtctacggtggcaggggctcgggtggccgcgggcacgccgtgcatggggcaaacgccgatggtttcgggctccggtgaggtcgagcgtgcgcggagggaacgcgtcgaacacgtggaggtgttcatctgcccgtgttcaaaagcttgctgagatcgcaaacgtgcgaatcttggcaaaaatccggcgcagacctcttcctggcacctacggctatctcttaaatggtctccaccagaaatccaagaatgtgacctttggcaagaaaacatatgtggggtga

SEQ ID NO: 9746 - DNA, 708 bp, Zea mays
  Peptide Sequence Number=SeqID_53121
atgacccgcgcccgcgcctataaagcgcactcaggcgtcgaccacactcttccgcgcacgctcaaacctcaccggagctcaactcaccgtcgtttgcccgtgcacggcgtgtccgcggccacccgagcccctgccgcccgaggaatcgaagtctgcttcgccggagaggccagtccacagtcgccggagttcacaaccccgccggagtgcatggaccggatcaccgtgatttggccggcacacccgccgccgacgaggacacccgcctgtgcacgtggaccaagcgattccggccatccccgtcgtcgagccgtacatcgctgtgaccgccagagcctccccgagccaaccctgtacctcaccggacctccctcgccgccggaggtagccccggatccagcacccgagtctgcaccagaggatctgcctgccacagccttggaaggcaagccccgttatggtgggtacaagtgcggtcactgcaagacggcagtcggggtcagtgaggcattgtacgccaaggcggtgagccctgatctgctgacggggaatcgatggggacggttgatgtgcgtggggacggagtgtctcgccacgtcgtgttctctggaggacatggttgctggagtgacttggccgtccatcttgccaccgggttggactgtcgagtgggaccctacctcggctgaggaggagcatgaggagtga

SEQ ID NO: 9747 - DNA, 726 bp, Zea mays
  Peptide Sequence Number=SeqID_53122
atggcttcccacggatcctcatacgacagaaatgcactgtcccacactaacgggcttgcacgagagggctttccctgcattttgtgggaggtacttcagggggccggatacacgacgcctcctcagtacgcggtgcagcagttcgagaagcatcgagtgccccgctgtaggctgtctacccaccccattggcttgttccccgcagaaagggaggacgacccaatgtggaaggatcgggtggagcacgccaaggacatctgggctatctacccgggacagatggctcacttgacagtgcggtgcatgaatgccctgtattgtctgcaagtgatgcgtggtgaggcgatgtcccatctgttggcattgttggaggcaacaaagatcaccttggacaacagagaggagcttgtggttgacttgtccactgagatggtggaaaaggatttgcaggtggagcagctatccaatgagatccaagagttggaggagttagtggggaccagggagaacaccatcgaggttctcgaggatcagcttattaacactcagcagcagcttgctgaggctaatgagcacctggatatgcatcaccaggagatccaggacatggaggccaacgaggacgtcgacattgagggaggagaggagcctgcctccagcgcggacactgctggctccgagagaccaccttcccccgagtcgagtgttgccttgttcgctcactag

SEQ ID NO: 9748 - DNA, 180 bp, Zea mays
  Peptide Sequence Number=SeqID_53123
atggctacgacactgtttggaggtcgaggaccaccgcacggtagcagcgaagcaacggaacctagttttatagtctggactccgaatcctacccaacgcgagaagatctcaacccccccgctgattcctccaggtttcaattatcaaaaagtctacatgaagtatacttccatgatgtaa

SEQ ID NO: 9749 - DNA, 435 bp, Zea mays
  Peptide Sequence Number=SeqID_53124
atgggcaagaacaacaagcgcaagcgtgagccaactcctccatcggaggattttggtgactcggagtactcagaggaggagttctcctctgagtctgaggggtctccggctcccatccccctgcatgagtcgtctgacgactcagacgactcccaggggctcgcggcggaggtctggacgtacatccgggccgtcgagcgctccgggctcgagggctcggatgagtcggagtactcctcggatgaggaggactcagacggcggcggcgaggacaaggacggcgacgacgacgatgacgacgacgaaggcagtggcgatggtgacggcagcggcaggggcagcggcagtggcagcaaggacggtgacggcggcggcagcaggggcggtagcggcggtggcggcagcagcagaggcagcaacagggccagtggctag

SEQ ID NO: 9750 - DNA, 357 bp, Zea mays
  Peptide Sequence Number=SeqID_53125
atgacgaaggtaaagaagaagaagaagatgtcgaggcggatctctaggagttctaggacttcgacgagttcaaagatgaggctagtgacctcccaaagtcagttgcctgtgcaactggcacaacaagcgggcgacccgatgccaacatatgggatgttgcctctggaccttgcactgccatcgccaatgttgtcgcctccacctcctccacaattccctgtgtgctttaagacacctcccacttcagttaccgcacctggagatgtgtctggtcaagatgacgcctcgacttctcaggtgaacaaccttttcaacacccagagtgcaaccggaggaattggctacaactccaactag

SEQ ID NO: 9751 - DNA, 354 bp, Zea mays
  Peptide Sequence Number=SeqID_53126
atggctgatgttggggcgaaggcgaagacgctacccttcgctccagccatcgtctttctcgttgtgccaacggaagcagaagaaccggcgaggaatattccggggatagttcagcaggagagcaagttccaacatttggtgcccaccgttcgtgctacgaaaaatccacccgcgatggcacccaagagagctagctcgaaggcagccccatccgttgacgaagcagcgaaggcagcgctactggctgagaaaaagggcaaggcccttgcagacaccacccaccaagaagcctgcgaagacgacgcactcagcaagaggcagctgaaagggaaacaggcctacaccttttcctaa

SEQ ID NO: 9752 - DNA, 573 bp, Zea mays
  Peptide Sequence Number=SeqID_53127
atgtcgaaagtgacttgctcacttcgtgcattgggtgctacgctgaaggagaggggggagctctattttgccgacaggaaagcctgccacgctgcagttgataaccatggcatcgatgtggggggcactgcacaggttgacgtctctggcgtcgaaggtcagtggcacatgggaccactttgtctacacgactggaccggtgacggcgacatggttgatgctgcggtagtggtctctcttctgtcgcttcgtgtcaaagtcgacgctggaccccccagtgatcatgtgaatgactccgcgatacggctgatcagcgaagtcttcttgttttggtgcttgggggtggtggatatttggctgttgctggtgtggcggtgggagtgggggagtcttcgtcgtggaacaagcaataaaatctgcgcggctgctgcgtccgtccttggccccgaccacgagttccgttgctgcggccctggggggataatcttggcggcgaggggcctcaccagcggggtgctggttggcgatgttgtgtacctgctgctggctgcggccgtcccgaccggagtctga

SEQ ID NO: 9753 - DNA, 366 bp, Zea mays
  Peptide Sequence Number=SeqID_53128
atgaagactctgacgactttctgtggctaccatcccctggagatggtgatgcaccccttgggactcttccctgctgagaagaaggatgatcccatgtggtgtaaccgcgtgagccatgtgaaggatgtgtgggcgatgtatcctgacttggttgggagggcccttcagagcgatgctatggcactccttactaacaccgctcagactgccaagctcactctcgacagccgagaagattttgtggtcgatctatccaccgagttggtagagaaggatctgcaggtggagaggctgagccagcgcattgccaccctggagcagcaggtggagatccgagacaacactattgatgtcttggagaactag

SEQ ID NO: 9754 - DNA, 702 bp, Zea mays
  Peptide Sequence Number=SeqID_53129
gttccccactcgcacgcaaacaaggttttggctaaaccgcaagcttgtaaggcgacgacgacgcggagcaatgcgagccgcgcacgaaggcgaggtcacggcgacggtgacttcgctgctgttcatgacatagagcttcactcgggcattacatcgaacacccgcgaagcgccaatgttgcggggctgtgggggaaaatctcggctgcgaggagctgcgctgtatagggttgggcatgctttagccaaagtggagggagggggtggtgctgtccactggactgtgcaaaacagggagccgacagagcacggagttgccgcagctgctgctcaaggggaaggtgccgagggaggagccgctgttttgttggggaagagaggaggatgggctgcttcatccatggacagggaggaagggcgccatgggaagctcggctgcaggggttgcttgccatggagagagggcgcaggggaaggtggagtcggctgctccctggaagcttctgcgcgctgggcagagagggtcgcggcaggggagagcattggcgaggggggcgccagggaggaacccgagcttgcaggggagaagttagggcgtcgagctgctgctgagccaaggatagctgctccctgcgccatgctccatgggggagacagcagggacgccgatccacatcatggagagctcctgctcgatttctag

SEQ ID NO: 9755 - DNA, 165 bp, Zea mays
  Peptide Sequence Number=SeqID_53130
atgagcatccccgcctgcgcgcgtggaccgaccgactccgaccatctccgacggcgacccgcacaccgttgtgatccccgagacctcccctacgtcctcgaccacttcaccggagccatctcgccaccgagtttaaaattaaaaacagaaacttaccaaacctag

SEQ ID NO: 9756 - DNA, 1056 bp, Zea mays
  Peptide Sequence Number=SeqID_53131
atgcccgatggagaggcgggcctttgcttccttgaatggttgcaggaggagctgctggtgctcctgaccattgtggagggttttatgtccttcgcctccctcatcacctgcgagggggccatgaatgcattgtccagcgagggctgtagacactatgaggtcttcgaccaatcagacgagaacttagggcatgacatttttaaggccgaagaccccgtggtgaagcagtcagcgggggcactgttcgataggatgtggggtccgcatggtcgggaggcggtcagggagcaatccgaccgggcgagagaacagatggagcgtgccaaggatgtcgaagaccttggaggtctggtcggcgcgccacctgaggctgaggtcaaccttgtgccgccttcgagtgccggtgaaggctcctcgactgcacccgtgcctaccgtggccggtgaaggccctttgccagcccctgcaccgacgaccgaagaacccccgaaggtggtggctgagccggcgaccgaagaccccatggccgcggccgagccttcgcaggttcaagattttgggcctgcgcacgcaatcgctactgtcaatgctaattttgtggcggcttcgaccgtggttgctgaggatgattctgatgattctgtgtctaagtgttttgagtctgatgattctgggagtttgattgtgtggacagaagagtcttcggatgaggatttggattattttgcggcattggatgtggctgcggcggaggcctcaccacgtgtaatgggtgatgacgatcctccgggtgcgagtgttgggcataggcggcgaagggcggtggcgaagcggagggtgagtgagttgtcgcaaagtgataggcgtcattgtggtgaggtggaaggtggtctccttcgtgtgggcgggactggcaagtgggaattgttgtcctcgccggctggggcgagtgtgggtgagggagagctgcgaagcctgtttgtgggtgaggaattgaggataatgttgttcaactatagggagatgggtatcaccccgaaggttgagccaatgtaa

SEQ ID NO: 9757 - DNA, 483 bp, Zea mays
  Peptide Sequence Number=SeqID_53132
atggacacgggttcaatgcccccggccgccaggatcgcgactgcgcccgcggaattcggcagagttgttgaagacgggcctaacatgttggccccactcactagtgagttgcgcagcgcgtggatgatgaccagcggggtccacccagtcagttgcagtggggaggcggtcacacctgtgcgtgtggagttgggctgcccggagggagccggatatacgacgcctccccagtacgcagtgcagctgttcgagaagcaccgggactccgagtctttcggataccgggctgaggatactatcgaggccattgctctccacgggctgacgactttctgtggctttcaccccttggagctgtcgactcaccccattggcttgtctgataatgaggacgacccaatgtggaaagatcaagtggagcatgccaaggacatatgggctctttacccagggagactgctcacctcacggtacgatgcatga

SEQ ID NO: 9758 - DNA, 564 bp, Zea mays
  Peptide Sequence Number=SeqID_53133
atgtcgcacggcggaggtccgatcaccggcgagggatcaacggcggtggccgggaatttccatggggacgcgcggcggtcggaggaggaagaagagtactggcgcagtggcttggtgtccagcgccgtggcaattgctctggcgatcaacggggagctagacgcgccgaagggccccttcgtctccattatcctctgccacctcaaactgtggggaaccaactccacgacttccatcgaagtcttcccgatcctcgggacaataatgctttgcgaagacctccacagagggctgaccaccatacgaagtcatcgcccagacatacttcgccagggccagcacggcattcggcgtaagctggtgaacctagacctcgaacctccgcagtacctccaccacgaatcgatgtgcaggcagacgaaggccagcggtgaaaaaagcttcaaacatgaccagctcgccctccggctcggggacctcctccacccccggaacacgccccactctgctgccaaaatacccaagttgctgcatatcctaaatgcggaccgaggagatccgtga

SEQ ID NO: 9759 - DNA, 333 bp, Zea mays
  Peptide Sequence Number=SeqID_53134
atgcgccaatggtggaaccgggacctgttcagaaaaatcatccaaaaaatcaagattagtgggaagagccgagctcggaggggtctcgacgaagggaaaggaggattcgtcgaacacaacatggcgggagatgatgatacgattagtggagagatcaagacaacggtagcctttgtgttcggacgagtaaccaaggaagacacacatggtggagcggggagcgagtttatgggcggcagtggcagagatgttgggatagcacttaaagccaaagacattgagatggtcgtaagatgggggcggccaaagagtgcaaggtggggagtggagtaa

SEQ ID NO: 9760 - DNA, 516 bp, Zea mays
  Peptide Sequence Number=SeqID_53135
atgaccagccgcagtctaggcttgggtctccatcttcctccgggcctcacgtgcctaggccgccaacttccccagggccgtcgtctggacctctcgtgcctggactgtcgtcttcaaccgggacgcgtgcccgaccagctgcatcctgagggcaccagcgacaacctcccttggcgttggggcacaaccagtaggcaacgatctactcgtcatctggttgctacatcgtcctctacacctatgggctccgttccagctcttcccgtggtcaactgccacggcatgcacactcgtgcgaaaagcgggtttcaccagccgtgcctcaacctacaggctatgactgctgctatctcccctataccatcgacataccgtcatgccctcgacgatcccctctacgtcgtgcgatggaggacgagttccatgccctcatcaccaacaacacttggactctcgttccgcacccgcctcatgccaacgtcgtctcaggcaagtggatatttaaaagtcgcctag

SEQ ID NO: 9761 - DNA, 438 bp, Zea mays
  Peptide Sequence Number=SeqID_53136
atgtggttcccgaggatcatgcatgtggaggcacacctactgaacaacgtaggtgatatcgggacgagtgaaagtcaagtactgaagagcaccaaccagattgcggtagagggtgggatcagacacaagttcactagaagaagacaactttgtttgtgtatccgctggggtggcgcaggtcttgtagctagtcatgccggcgcgctccaatatcttaagcgtgtactggcgctgagagagcaacatgccggtggcggaacgagtcacgtcctggtgaagagccaagctaaggacggtgcggatggtggcaggcttcacaacagggttgaaagtctcgtcgaaatcgatgccagggcgccgagtaaatccgcgaaggaccaaacacgctttgtagcgctcaagggaaccatcggagtgaagcttgtgtttgaatattga

SEQ ID NO: 9762 - DNA, 399 bp, Zea mays
  Peptide Sequence Number=SeqID_53137
atgggcaagaacaacaagcgcaagcgtgagccaactcctccatcggaggattttggtgactcggagtactcagaggaggagttctcctctgagtctgaggggtctccggctcccgtccccctgcgtgagtcgtctcaggggctcgcggcggaggtctggacgtacatccgggccgtcgagcgctccgggctcgagggctcggatgagttggagtactcctcggacgaggaggactcatccgaggaggacggcggcggcggggacggtgacggcagcggcagcagcggtggcaagggtgacgacggcggcagcagcaggggcggcagcggtggcggcggcagcagtaggggcagcaataggggcggcagcggcagaggcagcaacagggccagtggctag

SEQ ID NO: 9763 - DNA, 306 bp, Zea mays
  Peptide Sequence Number=SeqID_53138
atgacccccgctctgggtggccggactgcagcagcgcaggcctcagggtgggcgctgctgcaatcttgccctcgcccacgccgacgctcgaggggcgaggacaagtacaaagagccggaggcccgaagcgcggatggtggcggtgatcccgtcggcgacggggacttctcgagccgcctccgcctcggcaccgacggcaggggccatcagccctccggcagatccccactcaaatcctcccggacgagtggggcaccgacctccgcgtggagtcgccataccggtgcaaaggcaggaccaccctga

SEQ ID NO: 9764 - DNA, 306 bp, Zea mays
  Peptide Sequence Number=SeqID_53139
atgccggagtctgccatacaggggcaaagtcgcggcgcgtgtgtcgtgggacggtgcttccagggaaccttggtatctattgatagcgcagctcgctgcagtggtaaggtggacgcaccgacagtgatgaaggtgaggtggctgatggactgggtgcgatcagcaacctcctggcgtcttcctctgttagcttccttttactgccttcttttctctgatgatggctgggaatgctctctgatgatggctgggaatatgtgttgctgcgcgtggatgacttctctgactgaacggcgtgaatgctag

SEQ ID NO: 9765 - DNA, 351 bp, Zea mays
  Peptide Sequence Number=SeqID_53140
atgaaggcttacggctcgggtcaaagtcaaagcttcgtctaccaagagacgcggtctcacctcgccgagcccggcctcgggcggaacagtggtcccggacgagtccacgcctcgcccgagggtctcttcggacatcggcaaggtcgaagtgaccgcagtcacttcgccctttcactgaccgatctgacaggaaaacagcgccgcccgccctgctccggctgctgtgccaaccacccgggcgaaaccgacaacgatcgagttcagcctcgggcgcaacaagaagctccgcctcgcctgaccccagggctcggccttggcctcggcctcgggaggaagctctgccttgcctga

SEQ ID NO: 9766 - DNA, 342 bp, Zea mays
  Peptide Sequence Number=SeqID_53141
atgcggcagagcctcgaagcgagcatcaccactcccctcgaggctcaggggctactgtcgggtaccgagattaggggtacccccaacactcctaatcacggctgtttagcctcgggcgcaacaagaagctccgcctcgcctgaccccagggctcggcctcgggaggaagctccacctcgcccgacctcagggctcggcctcggcctcgggaggaaatctccgcctcgcccgaccctgggtctcggccccagcttcggcctcggaggagtcgccgcctcgcccgacctcaggctcggatcaaccacgccacgagggatgcatcattaccctactcctagctag

SEQ ID NO: 9767 - DNA, 696 bp, Zea mays
  Peptide Sequence Number=SeqID_53142
atgatggtttttggtaatgactatggtaccggtgaagatgaagtcgtggaggaggacttccaggagtttcaagaagcgttcgcttcgccgtccagtgactggtcagtccagccacttggagaggctacaccaccgcctgcacgaggagcaggagcgtcgacgacaggagctggagcagaagggctcttcgttctcgctttagcagaagatagagtctgtgaggagctgttcccctgtgctcccgctggaggcgcccctgcaccaccactgagtgccccagccactgcagtagctgctagaggagacctagacgacggaggcagcgacagcagctcgagccacaacaccgacctttctgaggagcaggagttggaaggatgggttgcccgacccatcacccgtgacgccgctcagaattattctatctcggagcgggactcagctgaggcggccatgcaagatgccgcacggcgtgcgctttcgcactactgctcagtgctcggcggggtagccgatggtctcaacctgaagtattacccccgccgcccatctggcagcacaggaggcatggttgtctcacctgttggtgaggacaatcctaggttgagcagcacagtcaacctagccgccgtgctaaacacggagctggaccatgcattagacgagctgagtagggctcgtgctgagatcgcctag

SEQ ID NO: 9768 - DNA, 804 bp, Zea mays
  Peptide Sequence Number=SeqID_53143
atgacctacacattgcattcctatgcatacattgaagtgatatttgcagataaaactggatttttaaggatccactttagtaagcatttctgcaaaacagagtctttgattattgagaagccttaccttgactcccttaaccagcatacccttgagagtcttttctttagtcgggtgaggaagcgacaaacttttgttgcttctgttcaaaggtggtaccaaaggaagaacgcaaggaatgaagtgcgggaggaaaggatcctccatttagaacttttatgtaataacttatcgggaggagtttttgcctccctggaaagtagcagtggtagcaacgatcctatcggggatctggaagcacaagtcgaactgcttcaatcagaacaccatcacaggaatgatctatgggtcgcggatgcagccatccgctacttgcaagaccaactcgcgaaacgagatctagcgctcgattgggcggttaactctcgtccattcgcgtgggctaaggaagccaaagctcgagcccgcgtggaggagcttagctcaaccatggataacttgcaggtctattataatactctacatgaagaagttcatgtgttgtattcacaactgcacccgaacgtccctgcggatcctgtcaggatggaagccggaccttctcgtgtagcgggagaagcactttatggtgaactggaccttttcaggccccctccctctatgaagttggttgacgaatggtcttctccgcccgacagtaaagctaccaaaagtgaaaagaagtggcttatcaagtgcctgtaa

SEQ ID NO: 9769 - DNA, 477 bp, Zea mays
  Peptide Sequence Number=SeqID_53144
atggaggcctgggcccacaggtcatgtaaccggcgcaccggttactacgtgcaaggaaaccgcaccaccacttgcgccaatgtcgcgtcttctcgactgcagaaccagtgtcgcgactcgaggcaaccctgcgcggaccgggaaaggggatattccgaaagggatccttctcagcgaaggaaacgggccccgagccctcctactgatcaggggggttcgaaggctggcccctcagaagggttcgacagccgccctagagcacgcagagtcagggataaccctgggtacgtccgttacatggctgaggcttgggctacgctcccgagcctcggcctcgggagaaggtctccgcctcgcccgatcccaggcctcggcctcggcctcgggaggagtcacatcctcgcccgacctcggcctcaggagaagtctccgcctcgcccgacctcagcctcggaccgactacgctacaggggatag

SEQ ID NO: 9770 - DNA, 285 bp, Zea mays
  Peptide Sequence Number=SeqID_53145
atgtccggtgcaccagaggactccaactccaaactcgccaccttcgggatcttccagaggcactcgcgctataattcaccggactgtccggtgtacaccggacagtgtccggtcttcgtcaaagtgtcgagtcctgcgaagggtgtccctgcccgctttgcctccgtcggaccagcggctgcagcgaaggcctggagcgaagggtggcgtctttgccttcgccccaacatttgccctccgagggaccagttcgacaaagtcacctggtgccgaagacgtcgctag

SEQ ID NO: 9771 - DNA, 153 bp, Zea mays
  Peptide Sequence Number=SeqID_53146
atggcggggagcgttagagaggagacaggagcggagaaccacttgcgcgtggagaagaaaagtagaaataatatcaaattacaaatgtaccttcggcttgaaagaaggcgaaagtacaagcgtgaggcaaaagcaaatgtcaaatcagcgtga

SEQ ID NO: 9772 - DNA, 471 bp, Zea mays
  Peptide Sequence Number=SeqID_53147
atgaaagcatttggtgcaggttttcgaatacgtccttctgaggacgacttcagtagctggggcatcggcacggggcgtcgaggtagagggcagctagggggtgtcgaggcagagggtggcgctgggcaggaaattggcccatttagaccaacgttgcttagaagaggctggcctgaggtgcgcatgccgctcttgctggtcgccgcctctgcctccgcggtggctgccgaagctgttggactggttgacgggggagagaggttcgacagggctggaagcttgggagttcctgcatggctaggggaacaggagagcaagcgaggaggacaccgaggggagcggcagtcgcagttcgaggccggtgggagcggggggatgggggcgctgaggatcccgagcgggctaggagggcgtcatggcagggagctgtcgggcgagggcgcggcagtccggtcacgacgtgcgaggtga

SEQ ID NO: 9773 - DNA, 1899 bp, Zea mays
  Peptide Sequence Number=SeqID_53148
atgcctggatcttctattgtgaattcgcagttctttcatgggtggattgtcaggatcccaaactggaagcagcctcacaacttcagcgtctactttgggaggcggcttgctgaagagaggttccagaggcaggacgattacttctcgtttgagaggctactgcctactgctggttggattgtaaaggcgtactggctttgggtgcactgctctgctttatatgtcataacaatctcagcctgcattcttcttttccacgaatacaagtatatttcgaggaagagactagcacatgttactggatatcctccaaatcctgggctttttaccgtgcttgtccgttcgattccgaggtttgacaatgagctgcttgatgacacaatcagaaatttctttgttaactatcacggatcaagttatctgtcgcatcaaatgatctttcgcaagggacattttcagaagtttgtggatagagcagagagggcttacaggagatttgtaaggctttaccgcaacaagttcatcgaggccaagaagtcagacctcactaatccggaagtagtggaagctcaaaagactcgctacgcagccgtcgtcgcctcacgggtattccagtcatcaaaccctatgctatgggtgacagatctggctcctgagccacgcgatgtgtattggtcaaacctctggatcccctacagacagatctggctccggaagctagcgacactcgcagctagtatcgttttcatgttcgtgttcatcgtccccgtcgcgtttgtccagagcatgatgcagctggagcagctcaaaaggatgttcccgagcttgacaggtctcctaaataagtccttcttcgccagagtgataacgggataccttcctagcgtcaccttgctgctgtccctgtacaccgttcccccgctgatgatgctcttctcctctatagaagggtccatctctcgcagcgggaggaagaggagcgggtgcttgaaaatcctcttcttcaacatctggaacgtcttctttgtgaacgtcctgtcgggatccgtgctcaaccagctcaacgtcttctccagacccaaggacatgccgacgatgctagctgaactagtgccgaagcaggcaacctttttcatcacgtacgtgctcacctcaggctgggcgagtctgtgctcggagatactgcaggttttcaacttggtctacaacttcttcagcaggttcgtctgctgctgccatcgccagaataaggaatacgtttactctttcccgtaccacaccgaagtgcccaaagtcctcctgttcaacctgctcggcttcacgttctcgatcatggcgcccctcatactcccctttctgctcgtgtacttctgcctcggctacttggtgtatcggaaccagattctgaacgtgtactacccaaagtacgaaatggggggcaagctgtggccggtcatgcacaacgccatcgtgttctcgctggtcctgacgcaggtgatcgcgctcggcgtcttcaccatcaagcgctcccccgtgacggcgggcttcaccatcctgctgctcgtcggcacggtcctcttcaacgagtactgccggcaccgcttctcccgcatcttcgaggcctactccgcccaggacgtgatcgagctggacagggacgacgagcagtccgggaggatgcaggagatccaccagcatctgctggacgcctacagccagaccccgccgggggagggatcctccaggggcggcagccaggtgcccatcgagctcatcatggaggaccccgcgcaggaggcgtcggagtccagccaggagctctgcgacaccgtgcaggaggtgtccggggccatccacgaccacgaccacgtcgtcgaggacaaggcgcattccgtgtag

SEQ ID NO: 9774 - DNA, 980 bp, Zea mays
  Peptide Sequence Number=SeqID_53149
atggcgtacgacgtgctgagcgaccccccagtgcagctgacgcaattcgccttcccccgcatggctggaggacgcctccgcagggctgaaggatgcccttctcccccaaacgctaggggaagaaaagggtcaccgacccacgcggaggcgaccccccactcggttcgctcctccgcctcagcccggatgacgaagatccttgaagctgagggcggggcggaggtcgcagcccggcttgcttctccccaccaccaggctgggttctccccctacgacacgggggttgggccccacacgtcgtgcgagctgacccgaaacgcgaaggaggcaaactgccgcacgaaaggcatgaaaccgccctgcggttataagggttccctcatcctcgctggaaccagcggacgaaagggcgagccgccacgcagggagcgtgcaaccgcaccacggttatgcaccctttcgacttcgtcacttccggtggaccagcacgaaggcccggtcccacctaccatgcaaccggcgcgacggtcactatgtgcgaggaaactgcaccgccacctgcgccaatgtcgcgacttctcgactgcagaaccagtgccacgactcgaggcagccccgcgcgtgacccaacagtgtcaattgggtgcagcggtcacgggtcagtcagtcgcgggggtaggcacgacagttgatgtggccaaaagcggaccgacaatagctgctacaacagacgggcggaagcagcggtcagatcaccccccagactcgcgtcttttcctgaagcagcgggggagccctctcccacgacccagcgacaccgttggcaggcgaagcgagcgacgtttcacctccgccataatggtcgcgtcaaaaaaggctggcccctcgaaggggttcgacagccgccccagaacacgcagagtgagggatgaccctgggtacgtccgatacatagccgaggctcaggctacgctcccgag

SEQ ID NO: 9775 - DNA, 489 bp, Zea mays
  Peptide Sequence Number=SeqID_53150
atgtcagctcagatagctctgcgagcgcaccggcttttagatctccctgctttgctgctagcagccgagtttgatgtggttgatttccttatctatgagatcgaggacatcatgttagatggtcttcatgctcaccgacagctaccgtatgctcattatctctgctacatctttgcgcagctgatccggcctcctcagttccagggcaccctcgaggcctcacacctccattttggctcctatcgtccagcccctgaggacctattgcctatacctgatccagtgccaaacactcatgcagaggatgcggcattccatcagttcgagactcagggcacaaccgttcctaatgatgatgatgatgatgattttgggatcccgcctctgcctcctgtgcctccacgctcacatgatcatgaggacaggagttccagtgctgcccctactgcccctcctgccattgaccctgctctggctgcgatcctctag

SEQ ID NO: 9776 - DNA, 390 bp, Zea mays
  Peptide Sequence Number=SeqID_53151
atggccatgatgggttcaacatcggaaaagatgtacctctgccaggtaagtttatgtaatcacttccgcattttcgtatctccgatgatctataatgtctgcgtgacgggtgaaacgctcttgggaaagttatacatgcatcatgctaagaactatgataataaaatttcccccttagaaaaatgccgtcgcgcacaaggaaaactgcgtgcaagcatactggcccaattggtgtgccacgtcatcaacttgcccaaagacacgaggatagcagtagtgggagtaatgatccgatcagggatcttgaagcgaaagttaatcagcttcaaacagaactccgacgcaggactaacatatgggtcgtggatggcgacagaatcaatgaattga

SEQ ID NO: 9777 - DNA, 114 bp, Zea mays
  Peptide Sequence Number=SeqID_53152
atggaactcctccacatggatctcttcggccccgttgcctatctcagcatcggggaagataaatccgaaacccaaggaaccctaaaatgcttcttaaggagagctcaaaattaa

SEQ ID NO: 9778 - DNA, 294 bp, Zea mays
  Peptide Sequence Number=SeqID_53153
atgcaggcggcatgcaaccgtgccaagtgggcgcgccccttcgactccaacgcgcccagcatggaggtccaggcccatgcgtcatgcaaccggcacgccggttgctacgtgcgagcaactgcaccgccactcgcgccactaccacgcctcctcgactgcggagtcaataccgcgattcgaggcaaccctgcagtgccagccaagcgcgacggtcaaatgcgggaccgggaaagggggatacctcgaaaaggacccttctccgtgaaggaaataggctccgagcctccctactga

SEQ ID NO: 9779 - DNA, 636 bp, Zea mays
  Peptide Sequence Number=SeqID_53154
atggctggcccctcggaagggttcgacagccgccccagagcatgcagagttagggatgaccctgggtacgtccgttacatggtcgaggctcgagctatgctcccgaggtaccctaggacatttccgagaccagcgggaacgatttgtaacggaatcccaccggagggaggaatcgagccctcggaccctatcgaatgggtccaggaaaacaacgttgttcacctcgctccggcgactgtgctagctatcagggaagggccgacaacagcaagtcacgacctcccccgagttcggcctcgggcgcaacagggagctccgcctcgcccgaccctaggcctcggcctcagcttcagcctcgggagaaggtctccgcctcgcccgaccctaggcctcgggagaaggtctctgcctcgcccgaccctgggcctcggcctcgggagaaggtctccgcctcgcccaaccctgggcctcggcctcggaggagtcgccgcctcgcctgacctcggcctcggctcaaggcactcctccgacggccacgtcggtacatctacagggctcaaggataatataagcctcatcccatcgcttgtgttccaccttgcatcaacccatctggacagtggcacgcggcactaa

SEQ ID NO: 9780 - DNA, 129 bp, Zea mays
  Peptide Sequence Number=SeqID_53155
atggccatgatgggttcaacatcggaaaagatgtacctctgccaggtaagtttatgtaatcacttccgcattttcgtatctccgatgatctgtaatgtctgtgtgacgggtgaaacgctcttgggaaag

SEQ ID NO: 9781 - DNA, 783 bp, Zea mays
  Peptide Sequence Number=SeqID_53156
atggcgtggctcatgcattgccgccacctcgagctcccgcgccagtcgaggctcaatcatcaagacgtcgtacgccgtatttttgtgtgcgcctcaagagttctctcaaagcgtcgccgccgccgtcaacgtgccattgtgggctcctcggcttcgacaaatgcacgtgaggttgtcttggcgcccatgcatctggagccggtagcgccagtcatcatcctctccgacgatgaagatgggaagattgattggacggcactgatggacgacgacgactcaatgagttctgtaaacaaggaccaagagttaatgcccgaccacatgaacaagggtgtttctcaagaacattcaagtgatgaaggatatgaaacgcctaccgacccttgtcctagcatagatcgggtcgctcggcgtcaattgcatcatgacccaaattatgatccacaagagtgtgagcccctagctccagaagaggcactccctaggttccggaatgcacttgggttcttagttagggataatcttggcatcacaattcgacattggaaagatgtgtcagatgatgtcaaggatcaaatatggaataagctattaacgagggcgcatttaatgtcgagagggcttgtctcctgtctgcgcggtggcaggcggcgcgtcctctccgcaataaatgcagaggctgcacggctgtatgggccttacgtcgggctcggcccaatggcttatgttacgggccacaagccattcggcagccgcgggactccgcctgagcgggaagcatag

SEQ ID NO: 9782 - DNA, 600 bp, Zea mays
  Peptide Sequence Number=SeqID_53157
atggtcggtatcgccgagcatcgtggcgagacctctgaaggcttctccatggaggaaaaggctgcatcttctacgccacaaggctctggccatccgacgcctggtgctgcagccgtgcgccccgcacgacggcgcacgccaggatgggtgtcccggactccgtcaggggatacccccgccggggcactctccgcggccagagagttgttgcgccacttgccaagccccacggcctcgccaggggctatgaggcagtggcgcgacgacatggaccacctccttgacatggtgcacactggctcgatcaggcccaggcctcagtcgccctggcgccggcacgaagcatctgccttggagcgcacaccctcggtgaggactgccccgattggagatctgcgaacggagctcaaccgcagacgtgtagaaggagacacgcaagttcctctagagggaccaggagacctgcgggataaactcaaccacagacgtgcgggcagagatgcatgtatctcttcggagaagacgcttgagcactgtggcggcctcgggcaagattccgctgaggtcgcaccacgggccccaggggatgctcgattctag

SEQ ID NO: 9783 - DNA, 441 bp, Zea mays
  Peptide Sequence Number=SeqID_53158
atggccctcggcgactctggcgcacttgtcagccagagcaaagagtgtggtgacgtcgtccacatcatgcatgaccaacttctccagcatcttctcatcacgtaccccctggcggaaagcagtgatgatggatgcatccgaaatacgggggattgtcccacgtaccttggtgaagcgggaaatgaacgctcggagggtctccccggatccctgtctcactgtgtggaggtgtgcctccactccgtgccactggtaagcactggcgaagttcgctacgaaccgcgcacagagctcttcccaggagtagatggatcatggggcttggttcatgagccaagtccgggctggtccagacagggctacatggaagtaggttgccaatacggcggtgtctccacctgctgctgtaatggcagtaacataaacctgcaggaattctga

SEQ ID NO: 9784 - DNA, 798 bp, Zea mays
  Peptide Sequence Number=SeqID_53159
atgcccgccggcgggtctggttcccatcaacatacatctgctgggaatgtcactggtgatccgtcagcggctaccgcagccccatcagcgtcgacgccaagcccaccatcggcggcggccgaggaggttcctgttgcgtttgcccccaccatgcaggatgacgctggcgctgaggcaacgccttcgggttcccaagttccagctgggggtccagaagtggcagcgtcaccaacagctattgcagacccaacagcggcgataccgtcggatgcaccgtcggtggtaggcgtggggggcgcgtatggctctgtccctccgccaactccggagggtccggaggttattcttgggcgcccactccggtctggtgtcgagcctggagcgacactgactcccctccctcaggtgctgacttgcgctcaccaggccctccaagaaaccgaggcggctatccggcgagagtgggaggcgctcgaaaccgagcaccagcgccttggcgactggtgttcccaactggagaggcgcactaaggaggcgtccttccaattcgcatcggagcgggccgagcttgagcaggagcgtgaggacttcaaggaggagatccggaaggtgtctgaccgagaggaggaggaggaagacctcgccttcagggaggagatgtgggcaaggcggaacaagctgttggatgatcttgagctcgaggcagaggagaaagggaagcatctggaggggaaagtgcggacactggaggagcagttccaggcagcgcaggcgacgcagatggccccgagctcctag

SEQ ID NO: 9785 - DNA, 291 bp, Zea mays
  Peptide Sequence Number=SeqID_53160
atggtcgttggggaactctgttgtcaacgggcgtaccggacagtccgggagaaaatgcttgagaggcgggataagctgctggtcgattatgagctcgaggaggaggagaaggagcgggcgctagaggagaaggagcagacgctaggggagcgggtccaccagttcgaggcggcgcaggcagcccaggcggcgcaggtggccccaggctcccaggttgtggaggcgatgaggaagacacttgaagatctccgggcggagcatcgcgccggggtccaacatatcggcgcctag

SEQ ID NO: 9786 - DNA, 453 bp, Zea mays
  Peptide Sequence Number=SeqID_53161
atgaacaaactcaccggcattcgagatgccattacaaacggaactccggttccccctccgcaggtacgaacaaccccactccgagggggaaggcctgcggagcaacggaaggccgacgaacggcgcgccgtcacctgctccagcagcggcgacgacgacgacttctgctccggggggtcgaacagcggcagcactgaccctagggcggatgctgctgccaggaggcccccgcccacgacaaaactcgtgaggcaaggacggacagaaggccgtagagttggaggtcagtccgtggccggccccggctatcgcgccggcggaagaacctcttccagctgccgtggcggacgccggcgccacgagcggctccgaagctactcgcgtctgaagaccgggcacgctgcagctgccagcgccacggacaacaaccgccccccccccatcactgagtga

SEQ ID NO: 9787 - DNA, 87 bp, Zea mays
  Peptide Sequence Number=SeqID_53162
atgccgaaggagactgtcactaagactggcgaaggagagctagttcgattaaagtacaccttcagatatgaagggcctcattcttag

SEQ ID NO: 9788 - DNA, 579 bp, Zea mays
  Peptide Sequence Number=SeqID_53163
atggtggcgctgtgtcggagtggtggagaaagggagagcgaaggtataggtccggggtcatcacgtgtctcggagggggagacacctgggagcttcgtccgcagggctggtcatgtcggactcggacccgcgcaggggtgccaaaggttcatctacaactatactgaatcgactgtctggaataccgtagattattccggacaggagaagctttttggaaaaactggccaagcgcggatcgtccgggcccttgcggcggaccgtccgcaacaccaggatgaccctcggacagaaccaatgcacaaatacaagtctacactacggaccgtccggaggaaaaagaaggaccgtccgagaccttgcgcggaccatccggcctcaggcgcggaccgtccggtagtgaagcgccccaatcctctgggactcaaatgtgatacaattactagtcccaggaggctagtaaacacatttatacatcagatgattacagatctgcttaaacgagacaaacctataaaggtggcgatcaactttaagagttggtccacaactcgggacatatcatcagagtggggctga

SEQ ID NO: 9789 - DNA, 249 bp, Zea mays
  Peptide Sequence Number=SeqID_53164
atggcggcgatggaatggtcggatggtggcgatttggtcacggggctcgcgcaaggaggatgggctttcgggtacgggaccaggctaagcggccacacaggctccgaccaacaggtcgggcttatgagggcagacctcaccaggctggcgtacacagcccttcttggtttggtacttgtcgtaggactaggtcccgaccctgggttcccatctgcgtttgatgatggagtcctcgtcctcgtgatgtag

SEQ ID NO: 9790 - DNA, 201 bp, Zea mays
  Peptide Sequence Number=SeqID_53165
atgacgatggagggagagggtgcactcgctcttggcagcgggggggggggggggcatgccgatgggacgagggtgcctgacgaccgcaccgacgaacgtggcgagtctcgtgtgggagtccgcgcccacgggaagttgactctttgtatttctgaggcttatttacaatgcaatcaccctattggcgagccaattctctaa

SEQ ID NO: 9791 - DNA, 144 bp, Zea mays
  Peptide Sequence Number=SeqID_53166
atggcggtgggtgcgctgcaaaagggggcgttgggcggtggtaaagtgcatgggggcgggcacgcgtgcaggggggcacggcttattccaggcttcaagggtaagcttctcggtatcttcttgggtaaagcacttttctcttga

SEQ ID NO: 9792 - DNA, 116 bp, Zea mays
  Peptide Sequence Number=SeqID_53167
agacattgtggtacaggggttatgagatagatggttttggttatgactatggtgctggcgaagatgaagctgtggaaggagacttccaggagttccaagattacgacgagttctag

SEQ ID NO: 9793 - DNA, 213 bp, Zea mays
  Peptide Sequence Number=SeqID_53168
atggcgaagccgaccgttacagatgcgagagcagttggcgcaccggacatgtccggtgcacaccggacagtccggtgcccccttccgaccgttggctcggccacgtgtcccgcgctgatcgcgcggccgaccgttggccctagccgaccgttggctcaccggacagtccggtgcacaccggacagtccgttcacagttatcttaggcgtctaa

SEQ ID NO: 9794 - DNA, 429 bp, Zea mays
  Peptide Sequence Number=SeqID_53169
atgaacgtatgtgagctcactcttgctgtctcacatacaccacaggtcaagaccagaactcctgtgatatataatgttgtgacattcgatcctgtgccactatacatcatatgtgtgagacttggtcccagcatacctggtgtttatgttaaccccgggttttggacccctaaaatccggaaaatgaatcctccaaatcctccacctgttgaaatcaatcaagtggttgctacccaaagactggtaatacaacaattaacagacctggtgaccgagatgcaaaatcagataagacaacaacgcgaggaaatacgtcaggcccgccaagaaataaagcaagcacgggtggagagacaacaacaacaacctccaccaccaccaccaccagcttcaccaagctacataaatatagattatgatgatttgtaa

SEQ ID NO: 9795 - DNA, 345 bp, Zea mays
  Peptide Sequence Number=SeqID_53170
atgaccgggaaaaagaccacggcttcctctgacggcgacactccaaagaaagccaaggtggtggtggaggatgaggaagaggcgactgtgacactatccgtggagaaggacgcgctggagtgcgacatctgctgcctacccttccagtccgaagttttcatggcaatgcaagaacgagcattctggatgtgcaaagtgctgcatccgcacggacggaaaaactacatgcttcggtttgtcggtgctttgcttctcattgttagaaatgatctgttcagcatagaagacctgtgcagcacgattagcaaggatccatgggtcatctttgtaacctaccttacttag

SEQ ID NO: 9796 - DNA, 417 bp, Zea mays
  Peptide Sequence Number=SeqID_53171
atgtcgtcgattccgccgccggcgggcggactgtcggccgccattgccgctgtcgcccggcagtggaatgagtgtcatgtcgtagccgccgtcgagggacatgaactcaaggctcccgaaacggagcaccgtcccgggtcggagaggttgctggagactgcccatctggagcttgacgggaagctgttcgtcaacacgcagcatgcccctacctggcgcgccaactgtcgacgtttcgataccggggggtccctaagccgacgagtgaaatgtcgccgcatgccccagcccagatgggtcggcgcgaggccgagcgcaaaggggggaagtgaggtggccggagatgggcgtgagaaaggtggaaatcccgcggccttcgtgttcgtcccgtgcccaggtcgggtgcgcttgcagtag

SEQ ID NO: 9797 - DNA, 429 bp, Zea mays
  Peptide Sequence Number=SeqID_53172
atggcgcctcctgttgacgcggctggtctgcgccctaggttgggtgatgtggaagctcctccgaagccgaggtcgagtctgtcttccgtggccgaggttgagtccgagcccctggatcgggcgaggcggagaccatcggctgaggccagggcggagtccgagccctggggtcgggcgaagcggagaccgtcggctgaggccagggcggagttcgagccctggggtcgggcgaagcggagtttgtcgtcttctggggctgagcccgagtccgagcccctggtcgggcggagcggagttcgccgtcttccgggacttagcccgagtccgagccctgggtcgggcggagcggagttcgccgtcttccggggcttagcccgagtccgagccctgggtcgggcggagcggagttcgccgtcttccgggacttag

SEQ ID NO: 9798 - DNA, 2115 bp, Zea mays
  Peptide Sequence Number=SeqID_53173
atgccgcgcacgaagaatgcgtcggcatcagggggtggcgacgatgaggaccctcgtcgccccttcaggcaggtgaagggcaagactgtgtatctggagcagcaggaaggccgcaagaagcggcgttcggacagagaggctcgtgcagcagcagcagctgccgcagccgctgcacaggcaacacttggagatcagccggatgttccatcagatcagattgctttccgtgctcgtcgtctcgcctcccggtctcgctcctccactcacacctccgcttccactccgccacccactctgcctgctccagtcactcctattgctccatccacctccaccgccatacccactaccagcactacgccagcttccactgctacccctgcacccgctcccgcttctgctccacctgtccctccacctcgcttccgggagcgtgatgagactgaggttcgtcctctggcttcggatcctcgtctgtttgatcttcagtgtgctactgcagcctgggtacgtcggttcaggtacgtacccgtggagtcttggctgccagctcagagagacccagcagcaggagttcttttcagcacacagattcaggagtcattcttcagggctcagatgtctgctcagattgcgctgcgagtgcaccgcctattggatcttccagctttcttgctagcagccggtgctgagtctgaggcacatctcacctatttgccaggccttctgtcctttttgactatcagcggcagatatgtcgaggagtgggtccgcgtcttctatgcctctgtttggattgacccggatcatcagtggatgaggtttcgctttgagcgcgaggatgtcacgatcactgctagtcagatccgacagctttttggattccctgattcgtcgactcgtcttcacagtctctgctacggcacttcagatcctccacgtcgccctcacggcggtgtggctccagggacagctcacatcgcggctctgttccgcccgcctttcacagatgggtcgcgacgttctccagcagacttcactactgcagcgaagtacttatatgagctcgtcaggcggacactcctccctaggatgggatacagggaggctaccactcatattcagctttggctccttggtgccctagtatcccactctgagtttgatgttgtggactttctgatctgtgagattgaggacaccgttctggatgggattcgtgcgcgacggcagctaccgtatgctcactacttatgtcacatctttgcgcagctgattcagccacctcgatttcagagcattcttgaggcctcacgccttgtgtttggatcttaccgtcctgctcctgagattccagtgccagcttatgctcctgtgtttgacactcaggccgaggatgcagcacttcgacagtttgacacccagggtacagcagctgatgatgatgatgatgattttgggatacctcctccgcctccgcctcctatgcctccacgctcccatgatcatgaggctgggagttctcgtgctgcccctgctcctcctccggctatggaccctgctcttgcggcgattctggccaacctggccgccgagcaggcccggttatccgagacgatgctctcgatgtttcagagcatgcaggacaggcaggatgcacttcagcagcagcttattcaggatagggcagagaatagggcattcatggccctcatgcttcagcattctggtatctcagcacctccggttcagtctgccccgccttcttcgcttcacgctccagtggtgccttcgatcttgtctgcaccccctgctgttacctctccgctccggccggtcaccttggcgttcacttctccggttctcagctctgtctgcccgcagccgccagtgccaccagcatctgctgttaccactaccgctgtggcagtatctgtgactgcttctgttccggtagctcctgcagcgctgcctgcgtccgagtcagtaccagctccagcttctaccgcagatcctggatccgagactgactctgaccctccgtcggcgttcgctctgctacctcgacctcgaccggatgcgcccccgccgcctcctcctgcttcagatgattag

SEQ ID NO: 9799 - DNA, 180 bp, Zea mays
  Peptide Sequence Number=SeqID_53174
atggcggctggcagtccacccctcaccaccaaaagtggccgttggaaggctgtctgttcgatggcgcaccggacagtccggtgcacaccggacagtccggtgccccctgccacgtcatcactgccgttggattctgacttgtgggcccgcctggatgtccggtgcacaccggacaggtaa

SEQ ID NO: 9800 - DNA, 336 bp, Zea mays
  Peptide Sequence Number=SeqID_53175
atgcctatgttgttcgacgaccaccgtgatgaagatttttatgggctacctcggaaatacagtattgtcgctcgggtagaagttaaattcccgattgaaccacgttatcgtgatagacaacattttattttatctgacatcaatagttcctcgagtcttcggatcataccgcaatacacttcaatccgttccatcacaacgcccactattttggaccaattcaaaaagctttggtggcgcggaacaaccgtcagtttgctgttacatttcttgaagagcaaaggcgtagatagattctacaatttcacaaagagcaataattggaactatgtttag

SEQ ID NO: 9801 - DNA, 261 bp, Zea mays
  Peptide Sequence Number=SeqID_53176
atggctaaacggattgctcggtccacgcgcggccgcgggcgaccgaagtccggcgaagatgatctcgggtctccggtgaggttctgttgggtccgaggacttggggagcttcacgggccactggcaaagctaaccgaggggcaggcacaacttggacgcgactggagcgggctggcctcggtggccgaggcttgggcagtggtggttggcggaggaaaagctcgctggagcaaagaaggggcgtctggccagcgagggtga

SEQ ID NO: 9802 - DNA, 177 bp, Zea mays
  Peptide Sequence Number=SeqID_53177
atggacggactcgtccaaattgctcgtcggtcggatgctgcggccacggatcctccatgcggcatggtcaaccacgtcgtcgactccatagccgaagagcacgtgactgaggatcctggtgagcagcaggttgaagtagctgagcaggagctcattgaaggcaagttgtgcccttga

SEQ ID NO: 9803 - DNA, 324 bp, Zea mays
  Peptide Sequence Number=SeqID_53178
atggctgaggcttggggcggctttataggcacggcgcggtgcacaggcggccgtggaccggcgagcgcacgcgggcatgcactgggaggcgcgggtgcgcgaacgggcgtgaaccggaggctagggacagggagttgtagcgtcaccaaggtgccagtgtcagaatgtctagtcccgaggtcaaactgcgccaaaaccgtgtcaaatgaatttggtttgagttcaaacttttccagggcgtgttcaagggaatttggcacaactttgatatttggatctcctggttttgagtttcgaaaaacagagaacgtagttgatccttga

SEQ ID NO: 9804 - DNA, 339 bp, Zea mays
  Peptide Sequence Number=SeqID_53179
atgcctataaatccaccccaagcctcggccattcctccccgcgcgctctcaagacttgcccaagtcagagatcaccggaaattgccccgagcacggcgcgccaccgcccgccaagctttcagagcctcggccgtcgtggccagctctctccagtcgcgtccaagtcgcgccaacacttcgataggccggactcctcgccgccgccgagctcccccgcctgcgcacgtggaccggccgactctgaccatccccgacggcgacccgcacatcgccgtgaccctcaggacctcccctacaccctcgaccacctcaccacagcagtctcgctgccgagtttaa

SEQ ID NO: 9805 - DNA, 174 bp, Zea mays
  Peptide Sequence Number=SeqID_53180
atggagagtcatgatctccgggcagagtgggaatcacggcttgtgggtggttatgagattgatggttttggttatgactatgatgctggttgtcagcattgcaaccactgctcaggcgaagctgaagctgtggaaggagacttccaggagttccaagattacgacgagttctag

SEQ ID NO: 9806 - DNA, 240 bp, Zea mays
  Peptide Sequence Number=SeqID_53181
atgaagtctgtcaggacttgtgatttgatcgatgttctgggttcaaaggtgatgtgcgactcgaaggccgtcgcctgctctggtccccaagcgaagtcttttgcaccaagcaatgtcttgaggaagggcggccaatctgcctgtcagtcattggacatccctggtggactgagggggtgtcatgttgatgatcgcttggatcttagttgggttggcctcgatacctcggtgcgacactag

SEQ ID NO: 9807 - DNA, 375 bp, Zea mays
  Peptide Sequence Number=SeqID_53182
atgttgggccgtcggggatggtcggagtcggccggtccacgtgcgcaggtgggggagctcgtcggcggcgaggagtccggcctaaccagggcacgattggtcaatcaaatgggtcagcgagcttcaccagagatcaaggaaggcgggcgaccgaagtccggcgaggacgatcttgggcctccggtgaagttctgtcgggtccgaggacttggaaagcttcacgagataatggtgaagctaaccgagtggctggcgcggcttggaagcgactggaaggagctggccacggtggccgaggctcgggtggtgatggcgggcggtggcgcggcgtgctcgaggcaaagtcaggcgaacttgggctcggacaagacttga

SEQ ID NO: 9808 - DNA, 399 bp, Zea mays
  Peptide Sequence Number=SeqID_53183
atggccggagctcccaaacccccgatatcgcatctaaactccgatccaaaggtagcaaccgacggcggtaatgacgaggaattactatggaaggtgctcatcgtcgatcgaagtcgtggaaatcctgtccacggaatgtcgcggactcgcagcgacgtcgacgaattgggggctcccagatcgttcccgcaccacgattccaccgcgaaagagttccgggtgaccaggcggagcaccacgactccaccccggcgccgaggcgattcacgggtgtcaaaaagcgaaaaggaagaggagaggagagaggagaggcgctacgattcggcctatatgggcgcaaggtcgtgcgtgaagctgagcgatgaagccccgggtcttcgggcgtaccagccgccatag

SEQ ID NO: 9809 - DNA, 951 bp, Zea mays
  Peptide Sequence Number=SeqID_53184
atgggccggatcgcgcgtgggcctctgagctgggcgaggctgcactgtgggatgacgccgttgcaagccttcgcccggtgtcgaatagagcgaaggaccagcgactgcagcgaaggcctcgagcgaagggtggcgtctttgccttcgccccaacactcacaccggggagccggttatgctatgcctccccaatatgcggtgcagttgttcgaggagcaccgggtaccccgctgtagggtgaggatgaccttggagcctcatcccctacagccaggttggcgttcgttggactttgagtccttcggtttcagggctgaggatactatcgagtccaccgctctccacgtgctgatgaccttctgtggctttcaccccttggaggtatcaactcatcccattggcatgttccccactgagaaggaggacaacccaatgtggaaggatcgtgtggagcatgccaaagatgtgtgggctctttactcaggacagactgctcacctgacagttcgatgcatgaatgccctgtatcggctgcaggcagtgcgaggtgaggcaatgtcccaactaattggaatagtggagtctaccaagatcaccctggataacagggaggaccttgtggtagacctgtccactgagctggtggaaaaggacctccaggtggagcagatggccactcaaaaccaagagcttgaggatcaggtaggggctagggagaacaccatcgaggttctggaagatcagctcttgaccacgcagcaacagcttgaggaagccaaccagcatttggatctgcaccatcaggaaattcaagacatggaggcagaaggggccaatgaggatgtcgacatcgagggaggagaggagccggagcctgcatccagcttggacactgctagctcaaggagaccaccttcccccgagtctagcgttgcctcctttgtccattag

SEQ ID NO: 9810 - DNA, 376 bp, Zea mays
  Peptide Sequence Number=SeqID_53185
gagccgccgccgaccctcgccgcctgtgctcgtggccagggtagctctgaccacctccgacgctgacccgcacaccgacgtgaccgtcgcgacctcccggacgtcactgaccaccccgccggagctctactgccgccggagaaatcaagtcagagaaaagttggctgtgtacagccaaaaggctgttcggtctggagcaccggactgtccggtggtgcgccggacagtgtccgactgtaatcttgctgacggagagcacatcctcgtgccggagcaaggagctgctcaggaggtagccccagatccagcacccgagcctgcaccagaggacctgcctgccactgctttggaaggcaagccccggttttatgcataa

SEQ ID NO: 9811 - DNA, 486 bp, Zea mays
  Peptide Sequence Number=SeqID_53186
atggctcacctaatgacaaatgggcaggtggagcgcgccaatgtttggcaagcggtggataaaagaactaccctcggtggtttggagtctgaggacgacgccgagccgagccacgggtttctcgccgttctttctagtctacgaggccgaggccatcttacccacagacttggaatacggttccccgaggacaaaggcttacgacgaccaaagcaaccagaccagccgagaggattcattggaccagctggaagaggcttgggacgtggccttactacactcggcgcggtatcagcagtctctgcgacgctaccacgcccaaagggttcggccccgaggcttctaagtgggagacttggtacttcggctgtgacaagacgcccgagggcgccacaagcttactcctccctaggaagggccctttatcattgccaagattttgcagcccgggactatggcggaaccacccgaattattccagcttaa

SEQ ID NO: 9812 - DNA, 426 bp, Zea mays
  Peptide Sequence Number=SeqID_53187
atgaacaaaaacagaaacttgcataatagagttgggattcagatgagtcagattcagatggtaaaagtcaaggagactgcgaaagaagggagaaataggaagagcaaggccacggataagaaaagggatgtaaacaacggactcgtgggtatcctctatcgggacagtaaccccacgatagatccgccaagagcaaagctccttcagaggaagaactccgacagagacaagatggagaaggtccaactcggaaacaataaacatatgattacctgcgaaaggcaattggctgttgggatcgatgggaggaacaaccgcagcggcaaaattctgactcttccgcttgggcgccatctcaatctcgtcggtgaactgagcggtagtgagatcaaagggaaacagaggaggtctggaggcagaaagtaa

SEQ ID NO: 9813 - DNA, 459 bp, Zea mays
  Peptide Sequence Number=SeqID_53188
atgggcaagagcaagaagggcggaagttcgtcgcaccattctggtgacaagcggaagcacgagccgactcctccctcggaggacttcagcgattccgagtactcggaggaggagttctccttcgagtccgaggggtcgccagtccacacctctcccccggcatcgtctgacgactcagacgattcccgggggatcgctgttgaggtgtggacatacatccgggcccttgagcgtgctgggctcgagggctcggatgagtcagaggtctcctcggacgaggagaactcctcagactcatccgaggaggggagcggcggtgatggcgatgacgagggcgacgacgacgtcagaggcgacggcgatggcgatggcgacggcgatagcggcaaaggcgacggcaagggcgatggcaagggcgacgccaagggcggcagtggcagcagtaaggccagtggctag

SEQ ID NO: 9814 - DNA, 162 bp, Zea mays
  Peptide Sequence Number=SeqID_53189
atggagggtacaagtgcggtcactgcacgacggcagtcgaggtcagtgaggcattgttctctggaggacatggttgctggagtgacttggccgtccgtcttgccaccgggttggacagtcgagtgggaccctacctcggcagaggaggagcatgaggagtga

SEQ ID NO: 9815 - DNA, 1068 bp, Zea mays
  Peptide Sequence Number=SeqID_53190
atgaggcgaaaagacggcgggttccccccatccgggggcttggaagctggaaagacacgaccaacgggcgaaaggggcgggcagccatgcaggcggcaagaaaccgcgccaagtggacgcacttctccaactcccgacacaccagcatggaggcccaggcccacgcgtcgcgcaactggcgcgccggatgctgcatgcaagcaattgcaccgcctgcgccaccaccgcgcctcctcgactgcgaaaccaataccgcgactcgaggcgacccagcgcgcgacccagcagcgccagcctgacgcggcggccaacgcggccaaaggtgggccggcagtaatgacggtggcaggcgcgcgggagcagcggtcacgtcgtcagccaagctcacgtcccatccgggggcagcaagagaaccccctctcacggcgtgaagacaacgcgcccgtgatccgttcctcgaacggctcgcgcacgtgcaacggctgccccgccaactactcgccccgtcgcattaactccgcggctggacaggcggcgcttctggcaggagcggcgggcgacgcttcaccttcgccgaaacaaccgcgccaaaagaaggctccgagcctccttactgatcaggggttcgaaggctggtcccccgaagggttcaacagccgcctcagatcgcgtgggccctacacccactactggctggcccccgaagggttcacagtcgcctcagacgccgagcgagggatgaccaggggggaccgggtccggcagatcacccgcagctcaccggagacaccatgttcggtgcccatcgagggtaacatggcgctctcccccctcctccttgcggaaaggcgacgtaggggcgtatgtaaaaaagccgagtctgtccctgatcgccctctcgccctgtgcggaggctcgggggctgctctcgcaaacccggctccggccgaaccgttgacagcgtcaacataccagcccgagaacttgggccccgaccgtgcacccgggctacggcctgctcgcatgagggaacaaccagaccagccgaagcattacgcaaggcattaa

SEQ ID NO: 9816 - DNA, 150 bp, Zea mays
  Peptide Sequence Number=SeqID_53191
atggacagggtcgcaagacgagacgacctcgtcacaggtcttcgtccggtggtgtatgaggcgaaggcgaggacggcgaaggcctcgagcgaatggtggcgtcttcgccttcgccccaacatttgccctccgagggaccagttcgactaa

SEQ ID NO: 9817 - DNA, 216 bp, Zea mays
  Peptide Sequence Number=SeqID_53192
atggctagccccctccacgctctcagcactggtgaggttgatacttttgttctactacttaattgggttggtatttacttatacttagtaattgctaataaaattttgaccaacattaaaagcaatgctcagcttcaaccatcctctttgtgctcaagaggagatgttggtaacatggaggactttgaggagttccaggactacgacgagttctaa

SEQ ID NO: 9818 - DNA, 465 bp, Zea mays
  Peptide Sequence Number=SeqID_53193
atggctagaacaaaccgtgtgaccattagtgaaattatgttgggggaaatggtcggggtggatccaatttcgtgtccgccgctcggtagcgccggtcatggccccgttcggccggtgggtggggtgttttcgaaaataaaacttgatgctggatctgtcaaaggccttgatgggttcaacatcggaaaagatgtacctctgccaggcttgatgaccgaggaccctttaactggtcacatgcctcgtcatgggatccactttagtaagcatttctgcaaaatagagtctttgattattgaaaagccttaccttgactcccttaaccagcatacccttgagagtcttttctttagtcgggtgaggaagcgacaaatttttgttgcttttgctctaaggtggtaccaaaggaagagtgcaaggaatgaagtgcgggaggaaaggatcctccatatagaacttttatga

SEQ ID NO: 9819 - DNA, 159 bp, Zea mays
  Peptide Sequence Number=SeqID_53194
atgagggtggaatgggacgcccttagctggttaattagaggaaccagaggagtagttggcttcgccgtagggccgtcaatggggtccgggcacagtaaagaagaaggcgtcgaggcggacctccaggagttccaggacttcgatgagttcgaggattag

SEQ ID NO: 9820 - DNA, 399 bp, Zea mays
  Peptide Sequence Number=SeqID_53195
atggagctttccaagcgctcggactcgacagaacctcaccggagacccaagatcatcctcaccggacttcggtcgcccgcggccgcgtgtagactgagcaatccgactcctcgccgccgacgagctcccccgcttgcgcacgtggaccggctgactccgaccattcccgacggtgacccgcacatcgccgtgaccctcaggacctcccctacatcctcgaccacctcaccggagcagtctcgctgccgacaagattgcaatctcgctgacggagagtacgtgctcatccctgagaaaggagctgtccacgagcaagaccaggagcaagctcccgagactgccatcgagcatctccccgcagccccagctattgaaggcaagccccggttctatgcataa

SEQ ID NO: 9821 - DNA, 429 bp, Zea mays
  Peptide Sequence Number=SeqID_53196
atggcccacgcccgcgcctataaagcccgctcgggcgtcgacttcactcttccgcgcaccctcaagcctcaccggagctcagttcaccgccgtttgcccgtgcgcggcgtgtccgcggccacccgagccactgccgccgtagaccggctagcccagctttccccaaccccgtccaaccctcggagacgagcgtgcacaactcagggaagctccccgagcgaggaatcgaagcctgcttcgccggagaggccagtccacggtcgccggagttcacaaccccgccggaactgtaaccttgctgacggagagtacgtcctcgtgccggagcaaggagctgctcaggaggtagccccggatccagccccagagtctgcatcagaggatctgcttgccactgctttggaaggcaagcccccgttttatgcataa

SEQ ID NO: 9822 - DNA, 615 bp, Zea mays
  Peptide Sequence Number=SeqID_53197
atgcaggtggcgtgcaaccgcaccacggagacgcaccccttcgacttcgacgcgtccagtatggaggcccaggcccacacatcatgtaaccggcgcgccggttactacgtgcgaaaaactgcaccgccacttgcgctaatgtcgtgccttctcaactgcggaaccggtgccgcaactcgaggcaaccctgcgcatggcccaacagtgccaaccgagcacatcggtcacgggtcagtcagccgcgggaggaggcgcgacggtcgatatggccaaaagtgggccagtagtaatggcggcagcaggcgagcggaagcagcagtcaagtcgtctacaggctcacgtcccctcctggagcagcaggggagccctctcccacggcgtgaagacgacgcgcccgtgttccgtccctcgaacggctcacgcaacggctgccccacgaaccacccgtcccgtcgcattaacttcgtggcagggcaagcgacacctttggtgggcgaagcgggcgaacgtttcacctccgccatgatgaccgcgtcaaaaaagggactgggaaaggggatatttcgaaagggatccttctccatgaaggaagcgggccccgagccctcctactga

SEQ ID NO: 9823 - DNA, 471 bp, Zea mays
  Peptide Sequence Number=SeqID_53198
atgcttgaggttttttttgcaagccctaaatttgttttcccctcgtggctttgtgcctttgtcgtcctctacacgacttttctccccatctcccacagccaagtccccaacccacctccacctccgcgccgaggaatccacacttgcaattgcaactacgagcccaccaaatcgagccgagccccgacggcaccaaatcgtgcggcctcggagatccagcagggtctagaagaaccaggagagacaccgtcagaagaggagggtcagcagcagccagaagaggagggccaacagcaggcaggcggtggcggcgaaatcgtcagcggctgccggggtatctgcgatgataacccggtcgaagctggtggagcagctgcgcgactaccagatccgatcccagcacaagtaaatctcccgcccacctccgttcccctgaaaccccgaccggaaactctgcctagtccgtgctaa

SEQ ID NO: 9824 - DNA, 152 bp, Zea mays
  Peptide Sequence Number=SeqID_53199
atggcgaccaaattgggggaaaagctaaattcaggcgctatggtggctaatcggaggcgagggttgttgttctggtttcgtaataagcaagaggagcagaccgcacactcaatttatatcgttcatgagcggtggctccgaattcgggaaag

SEQ ID NO: 9825 - DNA, 174 bp, Zea mays
  Peptide Sequence Number=SeqID_53200
atggggaagcctgccccatcactcctcatgctcctcctcagccgagtgaccgcacttatacccaccataaccggaatgggagaccacgtctcaggtcgcgtgaggggtaaagtatactgccaggttcaatcaggatttaataacattatgctaagagaagaaaaactaagttaa

SEQ ID NO: 9826 - DNA, 90 bp, Zea mays
  Peptide Sequence Number=SeqID_53201
atggccatgatgggttcaacatcagaaaagatgtacctctgccagcagataatcgatgtcgtcgatagcgaggaaatgggcaaggcctag

SEQ ID NO: 9827 - DNA, 702 bp, Zea mays
  Peptide Sequence Number=SeqID_53202
atggcccttggcgcgtggttgggacttgggcgagattgcccccaccgaatgccaaccttgagtggccaattagtgcaaagtccggcattcgtcgtggagctacgagggcaagatgcgactgcattcgtgcctgaagtggaggtcgaagccgtcaaaattgtcgataagtatgcgctagggatggcaattttacccgcgggttcagccagccaccaccagccgccagaaaccaagcgccagcctccaaggctccaatccctccatgtctccatctccatagtttctctgcggctgtttctccaatctccaacactgccggccgcggcagtctgcaatctccttggcaccatgccaagtgtaattatacccacgggtatccgatacctgcccgatacccgatgggtacgggcacgggtacaaaatcctacccgcgggtatagtcgcggttcccagggaattgatgtcttcgcccaagctccaggaaacctcttcgcgaatgctaaagagaacgaagaggaagtagaggttgaagaagccagaactacaccaccaccaccacctgaagaacctcaggcaggaaactgcttttattttgatatctacggagcagagcctgattcacctgtaaaacaaggcaagccccggtgcatctgccacctccttgttacttttaaaatctttctcacttgcttgatgcattag

SEQ ID NO: 9828 - DNA, 489 bp, Zea mays
  Peptide Sequence Number=SeqID_53203
atggcagaagcaagcctccacgtgttcgacacgagctggcatccgggggcgcgctcagagcacgcccggacccgcatcaccggaatagcccaatcgcgctcaccggagttcaagaacccgccggcgcacgtggaccggagcaggagccgccgacgacccccgccgcctgtgctcgtggccagggtagctccgaccacctccgacaccgacccgcacatcggcgtgaccgttgtgacctcctggacgtcactgaccaccccgccggagctctactgccgccgactttacccctcacgcgacctgagacgaggtctcccattccggttatggtgggtacaagtgcggtcactgcacgacggccagtcggggtcagtggggcattgttctctggaggagatggttgctggagtgacttggccgtccaccttgccaccgggttggactgttgagtgggaccctgcctcggctgaggaggagcgtgaggagtga

SEQ ID NO: 9829 - DNA, 411 bp, Zea mays
  Peptide Sequence Number=SeqID_53204
atggctcagcagcaggcggcccccaatgccccaacaaggcagaatgtacctcagcaaggagcaggcaatcatgttcatatgcactacaaccatgggaggctaaaccatttggaggccaaagcagtccaggaaacaccaggcatgatagtagaagcgcataatctcccaataaccaccatgtcaacaccaattcaaattgactcagccggtggaaaagtccgagccgatagtgtatgcttgaatgcgactttcaattatggcccgtggtggtcggagttgctcggcctgcatgcgcaggcgatggtggtcgacgacggctttgattaccgatcaacgacggcgatagcgttcaattccaccagcaaggaagcttcatgggaggacgagggtgataccagtgcaaggaattag

SEQ ID NO: 9830 - DNA, 264 bp, Zea mays
  Peptide Sequence Number=SeqID_53205
atggccgcagcggggcgcggcactccggcgacggggacgcagagagcgggggcgaggcgaggctccggcggcggatcggcgaggcgaagcagcaatggcgagaactgcgcaggggggtcgtgggcgttcgtggcgagaaaactggacaacgggtggaagaaatcgtgcgcaactagcgaagaaaacagcgcgcgggcggttttcttctctggaaattcgcacaggcgttccgatttggaagaagcacagcgcgcaagcttctga

SEQ ID NO: 9831 - DNA, 1422 bp, Zea mays
  Peptide Sequence Number=SeqID_53206
atggcggcggacggccactggcggcgggcgacgcagagaagatccgcgcacaggaagaagacggcggatccgcgcgcaggaagaagacggcggactccaggcggggcccctggctgcgggcgacgcagacaagatccgcgcaggactcctggcgggcagacggcacagtggcagctcgatccgcgatggcagatcgaggaagaagctgcagacggggcgcagaccgagatccacccctggcggcggacgttgcaggcaaggggaaggccacgcgacggagagagacagcgcgacggccagagggctgaccggagagctggccgcgatggcagcacagtgacggcgcgacggcgccaaaaatttggaacagggtcgggggcagatgatgatgatgagacacccatggatgttgatattaaaattaatcttgatgttgatttggaaagacagataactgcagcaattgatccaaagctacttcaacatttggtgaatgctctcttcagaggtacattaagcataaatgattctgatctgtctgaaccatcagatgctgaagtggatgctgtaggatgtatttgtgcttttcttcatgtcacattcaatacattccctctagagcgaattatgactgtactggcctaccggactgaaattgttcctgcactgtggaacttcataaagcggtgccatgcaaaccgaagatggccatttttttcgaagtttgcatcttcattacctgctgatgctcctggttggctccttcccatgtctgtattctgtcccatatacaagcacatgttgaagatcattgataatggggagttttatgagcaagagaaacccctttcccttaaagatttgaagtccttggttcttattttaaagcaggcattatggcaacttttgtggattattccatcctcttctactcagaaagtgtcatccaacccttcaggccttaagaagttgtcagtggagaatgtcaagatcagagctagggttgggttgtctgaattgctcacacagttgcaagactggaacaaccgacttccattcacttctgcaagtgatttctattcccaagaagcaacaagcgaaaattttgtgtctcaggcaatacttggtaatactcgagcatcagagatcataaagcttgctccttttttggctccatttaccagtcgagtcaaaatattcactattcgagtttcatttattaatgaacatggcgaggaagaggctggaatcgatggtggtggaattttcaaggatttcatggaaaatattactcgagccgcttttgatgtgcagtacggtctcttcaaggagacggctgatcatcttttgtacccaaacccaggatcaggattggttcatgaactacatctgcaatatttcaatttcttggaagtctactga

SEQ ID NO: 9832 - DNA, 387 bp, Zea mays
  Peptide Sequence Number=SeqID_53207
atgcaggagctgatggctcagcagaatgagattctacgacagctcgctcagcgtcagccaccgcctcagcaccatgagggtggtgatcatcaccagcgtgtcccggcagcagccacctatcaggagtttctcagtaccagccgttgttgttcactcgggcagaagatcccctcaatgcggatgtttggcttagggtggtggaatccaaattcccactacttaatggagattgttcagatgtggccaaggaggattgcattacagcccatcaggcagaaaagaagagaaaggcccctatggcaggaccatcagctcagccttagcgcttcaggattgtgtccgacactcagagtagaggaccttagcagcagcaaggacgatgggtga

SEQ ID NO: 9833 - DNA, 390 bp, Zea mays
  Peptide Sequence Number=SeqID_53208
atggttctgcgacggtgccgggtcatcggcgagaaatcgcctgaaacccacaaccacccgggcctcactacttttgtgttcgagctctacaccacccggcaaaccacccagattggtttttcaacaccaaacaacggcgatgctgaggataaagttattggagctattctgacacaagaggctgaaggaaaggagcatgtggtaacctacctaagttggaggctggtggacactgaaacaaggttgttggcgccgatccgggcgccaatcactacggtgagaaacagcggcggtgctctctacggaggcgcggaggggggcggcggagttcgccggcagcccctggatctcgctcccgagagggaccccgctggggaggagaggtcctag

SEQ ID NO: 9834 - DNA, 177 bp, Zea mays
  Peptide Sequence Number=SeqID_53209
atgggcgaggccgagggcgggcgctccggcgggcgccgcggccgggggcgggcgagagctacggtgggtcaggcgggcggggccggaggcttgcgctccggtgatccgaaggatgacccatacccgcatgggtatgggtatgagggtaaattcatatccatcagtggatatggttga

SEQ ID NO: 9835 - DNA, 549 bp, Zea mays
  Peptide Sequence Number=SeqID_53210
atggcgggcggaaatgagctcgccggagctaaggaacggtggctggccggtgagggattcgagttagggatcaaggtgaacatccctgatctttggctcaaggtgcataaaagttcaacacaaaccaataaaagatcaaagttagggttcaaaacaaaggagcaaaagaaccaaagtgtgctctggtttggcgcaccggactgtccggtgtgccaccggactgtgtccggtgcaccaagaccatacaactgcgaactcctcaccttcgggtttcttcagcgccactacgctataattcaccggactgtctggtgtgccaccggactgtctggtgtgccaagcggagcaacggctaccagcgcaatcgtcgactgcaacggacacctgcaatgctacagtgcacggacagttcgcgcagaagtcagagcagccgccagaggcgcaccggacagtgaacagttcctgtctggtgcggcaccggactattcggtgccacatgaagacaaagctccaacgatcgaaaccgctagaaccctaacggttgggtga

SEQ ID NO: 9836 - DNA, 504 bp, Zea mays
  Peptide Sequence Number=SeqID_53211
atgaggaaaaaacatggcttcacgccaaaaatacatacatgttcaggccccgacagccacaatgaacagacaccggcactcaaggtgccattacaaatggaactccggttccacccccgcaggtacgaacaaccccccacgttggagggcctgcagggcgacgaaaccccagggtggctcgccgacgctcgctccggcagcagcgacaacgacctccgctccgggtggccaaacagcagcagcgatgacctcagggcagacgctgctgcgacaaggccctcgcccacgaccgcactcgaggggcgaggacaagctaccaaggccatggagtcggaggtcagtccgcgggtggcatcgactatctcgtcggcggagaaacctcttccgactacctcggtgggaggtggcaccggaagcagcgtcgaagccgctcaggccggagagctagacacgcggcagctgccagcgccacgaacggcgaacgcccttccccccgatcactga

SEQ ID NO: 9837 - DNA, 174 bp, Zea mays
  Peptide Sequence Number=SeqID_53212
atggaggcaagaagagcttcgaggtaccaagtgcacgggagaaagtcaaagaggctgaggaacccaaagccaagggtgaagaagaagacttgcaaagtcaaggatctgagcaaatggaggaaggagttgaaacagactccaagcccaggcgtggctaactccaatgaggactag

SEQ ID NO: 9838 - DNA, 174 bp, Zea mays
  Peptide Sequence Number=SeqID_53213
atgacaaacagcaagcgtcatgtcaggttgagcgacgcttctgctacaagtgtggtgtgcagggtcatctatccaaggagacccaaatcatacccttgtgctagatcaatcatgagatcacctaggactagcacaaatgctatctgggtaccaaaggctctcttggatgattga

SEQ ID NO: 9839 - DNA, 171 bp, Zea mays
  Peptide Sequence Number=SeqID_53214
atggaggcaagaagagcttcgaggtaccaagtgcacgggagaaagacaaagaggctgaggaaccgaaatccaagggatgttggggctcagaaacgtcaatctagatcaagtcaagctgacttgatgatttatgagtccaacatcaaagctcaagcatgtcaaatgctatag

SEQ ID NO: 9840 - DNA, 414 bp, Zea mays
  Peptide Sequence Number=SeqID_53215
atgggcaagaacaacaagcgcaagcgtgaaccgactcctccatcggaggagtttggtgactcggaatactcggaggaggagttctcctctgagcccgaggggtctccggctcccgtctctcccccggcgtcgtctgatgactcggacgactcccaggggatagccgcggaggtctggacatacatccgagccgtcgagcgcgccgggctcgaaggctcggatgagtcggagtgctcctcggatgaggaggactcggacggcggcgacgagggtgaagacgacgacgacgacgacgacggcggcgacgacagtggcaggggcggcggcgacggcggcagggacagcaccaagggcgacagcagcaggggcagcaccaagggcggcggcggtggcaggggcagggccagtggctag

SEQ ID NO: 9841 - DNA, 501 bp, Zea mays
  Peptide Sequence Number=SeqID_53216
atggaccgaacacctggtatcagctccaggttatcctcaccaccaccagccgcccatccctcaccaccaccagccgccgcgccatcagccgccgcaacgccctcccacccgccctctccaactccagatgcattcactcggcttgaagagagttttggtcgtctcgcagagaagtgggatcagttcgttgtgatgttccaccgctacaaggagaagacagagaaggaactccaagcagcggccgtggtgcgcctgcaagccgcagtgcgcggcttccttgttaggcgggcggtgcggaagctgcacttgctgatcagctcatcgctgcaccaactcgcagcctgcgcgcccaaccaccaggtctcgtctatactttttgaaccccctacagaagtcgagatctggctcgaggacgagctggtcctcaagggagggggagatgtcatgggcatcatagggagcgagaggcaacagccaggctgggataaggctagagaataa

SEQ ID NO: 9842 - DNA, 741 bp, Zea mays
  Peptide Sequence Number=SeqID_53217
atgtgccttggtagattagatgacgattttgattctcatatatccaaaattggagaacaaataagtctgtctgatatcatcagtgaactaggatgtggatgtacttgtaatactactcattgtaaagaaatgttatcactccttgagcctcttgatgatatgggaatctctaagttactaggagcggttgtttgcactcgtattggtgttggagaagctcaaaatacatattcaatatttcttttgacttttgggaacaaccaaacaattgactcatctcagttgacttcatggaatattgatgttcttgtggattcaatcaatgaaattgatccattcccacttcatgccatctgtgggttactatggaataatataaaaggacagttgtcattcttgaaacatgcagtggctttgccaaatgatacattcacattcgcacattgtacaaggaagatggtttttccagacttgggaaattgtaaccagggcaatcaggcttggtactgccttgtccttcttgaggtgttatgtcagcttgctgaacttggctattcaaagccagtgcgagcaattcagccaattcttggttatcctctgatcaattatcctgaagtgttacttcttggtgttagccatatcaatactgcatataatctcatccagcatgaagtactgtcctgtgtttttcctgctgtggtgaagaacaccatgcacagcagtcttatgaactatctatga

SEQ ID NO: 9843 - DNA, 513 bp, Zea mays
  Peptide Sequence Number=SeqID_53218
atgcagcccggttgcacccctccgccggcggtcacccaagatggtgacctccagtttgatggcgggggaaagcgaaccgggctgcggcctctgcgcctccctcagcctcaaggattttcatcaccagggctggggagctgccgcgtgcctggctctcgaacccgagtggctttggagccgctcttggtgccggcttccgccacggcagctggaagaggttcttccgccgacgagatggccagggccgcccacggaccgacctccaactctacggccttctgcccgtccttgcctcacgagtttgggcacgggcgggggcctcctggcagcggcatccgccctaaggtcatcgctgccgctgttcgcccccccggagcagaagtcgtcgtcgtcgtcgctgccggagcaggcgacggcgcgccgttcgtcggtcttccgatgctccgcaggccccctcccgtcgagtggggttgttcgtgcctgcggaggtggaaccggagttctgttttgtaa

SEQ ID NO: 9844 - DNA, 474 bp, Zea mays
  Peptide Sequence Number=SeqID_53219
atgggcacggaccccaacgcccagctcacgtcgctgacgcaccggacactgtccggtgcgtcagccacgtcagctggccgttggggttcgaccgttggagctctgacaggtggggcctctgggttgtccggtggtgcaccggacaagtcctgtagactgtccggtgcgccaactgcgcgtgctctgtcctctgccgcgcaggcgcgcattaaatgtgttgtagtcgaccgttgcgcgcgaagtaaccgttgctccgctggcacaccggacactgtccggtgtgacaccggacactgtccggtgaattatagcagagcggcctcccattttcccgaaggtggcaagttcagcgttgagtgccctggtgcaccggacactgtccggtggcacaccggacagtccggtggcacaccggacagtccggtgtgccagaccagagtgccttttgggatgtctttagctctctttgtttga

SEQ ID NO: 9845 - DNA, 264 bp, Zea mays
  Peptide Sequence Number=SeqID_53220
atggtgccttcgaccgggcctgactgcctgtcagtctcactctatcaagtggcaccgcagtcggagtggcgtaggcggtgctgtccttctgtcaggccgaacttatatgtcgtcgtcgccatcagcgactactcgaacaggcaattgaaaaagagaattgatcttttttatgggcgaagtgttgaagatggctttggtgaaggaaatgtcttgttagcatcaagtaagtggcgacatcacaactcctacaagcttgtgccttaa

SEQ ID NO: 9846 - DNA, 261 bp, Zea mays
  Peptide Sequence Number=SeqID_53221
atggccatgaccagcaagttcgttctgccgctgctgctagcggtgctgatgctgttggccgtttcaggctcggcgcgccgagtggaaggcgacaggtgggccggcggcgaaaccgccgcctccgtcgttggccgtcccaccatacagttcctcaaacggctctacttgcaacagctggcagctccatctgctgctgttggcgacgctgacgctgttggttgtgtcagtgtcagggtcggcgcgccaattggaaggcgataa

SEQ ID NO: 9847 - DNA, 204 bp, Zea mays
  Peptide Sequence Number=SeqID_53222
atggggacgtattcttgtctaaggtacctcacccagggggccaccaccatcgtctttagaaaccttagcgggttgcttcgtattaagagggtgatgctggagactttgatggagtttttgacgacgaggaattctaagtctaacgatacgccggtcaacttcctgtgggacattgcccagttgtttatttctgctttactttaa

SEQ ID NO: 9848 - DNA, 351 bp, Zea mays
  Peptide Sequence Number=SeqID_53223
atgactggcgagttggaggccatcaggatggactgctcgaagtcctctatggcaatgagaaagaatatgggtggtggaggcggagacgagaaaagagagatggccatgaccagcaagttcgttctgccgctgctgctggcggtgctgatgctgttggtcgtgtcaggctcggcgcgcccattgcaagacgatgagtgggccggcggcgaaacctcctccgcctccgcctccgtcgttggccatcctaccatacagttcctcaaacggctctacctgcaacaactggcaagtccatgtccctccaacatgacctacgacccaaacagcaacccgcattgccatcgtcggtga

SEQ ID NO: 9849 - DNA, 231 bp, Zea mays
  Peptide Sequence Number=SeqID_53224
atggagctaggactccgcttgaaggcggacgtaatacttttgctttttgtaagatcaacaggccgggcttatgagggcgggcctcaccgggttggcatacacccatttctgcatggatttgtcagaagcctggacccgtggggagtccagaagggtttccgggggaaggtgccaaaggttcacaataagccaataaaaataccaagaatgggttcaaacaaagagagctaa

SEQ ID NO: 9850 - DNA, 345 bp, Zea mays
  Peptide Sequence Number=SeqID_53225
atggtctacaaactcaacaagttcgtctatgacctaaagcaggccccaagagctcggtacagcagtgacaccgtgtacctcctcctgtatgttgatgacattatgcacattgcctcttcttcaaacacgcaggcaaagctctctggtgatggtacctctgtcagcaaccctattgcctaccgaagtcttgctaacgctcttcagtatctcacctccatcaagcccgacattgcgtatgggtccaacaggtttgtccctacatgcacaatccctgggaaccgcacctgggcgcggttaagtggatcatcagatacctttaagatattgtcggctatgatggaataa

SEQ ID NO: 9851 - DNA, 1434 bp, Zea mays
  Peptide Sequence Number=SeqID_53226
atgcagcacaacagttcagccgcacaacaaaccgaggtccgagggacatcgtcaatattagcgcgcggcgcggggatggttacgccggcggtgtcccgctaccggcttcgcccgcggttggtgcgtgtggcggtgtcagagatcccgctcgccacgaggcggacgaggcagcagcccgtggccgcgacggagccggcgattccgagcaacttcctgtgcccgatctcgctggagatgatgaaggaccccgtgacggcgctgacgggaatcacgtacgaccgggacagcgtggaggggtggctgcagcgcggccactccacgtgccccgtcaccgcgcgcccgctgcgcgcggaggacctgatcccaaaccacgccacgcggcggatgatccaggactggtgcgtcgccaaccgcgccctcggggtggagcgcgtgccgacgccccgcgtcccgctctccgccgccgacgcggccgagctcctggcggcggtgtccgccgccgcgcggcgaggggacgcgatggtgtgccgccagctggcggccaaggccagggcgctagggaaggagagcgaccgcaaccgccggtgcctcgcggcggggggagccgcccgcgcgctctcctcggcgttccttcggctcgttgaccagccggcgtcgttcggcggcgcgctgggcgagatcctggccacgctggtcgtgttcttcccgctcgacgaggagtgcaggagccacattgcctccccggcgtcgctggacgccatcgtctcgatcctgtcccacgacggcgaggcgacctcgaagtccagcgccgccgtcgtgctccgcgagatcgcgtcgtcgtccgactccgaccccgagtgcctcgacgccctgtccgagaccaacggagtacacgacgcgctcatcaagctcctgcagaagcccgtgtcggcgcaggccaccaaggccgcgctggtcaccgcctactacctcgtcaggggcagcgacctagcggccaggcgcctggtcgacctcggcatggtcgagctcctggtcgagatgctagtcgacgccgacaagggcacgacggagaaggcgctcgcggtgctcgacagcctgttgctcacggaggaagggcgcgggaaggcgtgcgcgcacgcgttggccgtgccggtgctggtcaagaagatgcagcacgtgtccgagatggcaaccgagttcgccgtgtcggcgctgtggcggctgtgcaagagcttctcgggcgagggtccgtgcaaggccgaggcgctgcagctgggcgcgttccaaaagctcctcctcctgctgcaggtcggctgcatgggcgtgaccaaggagagggccagcgagctgctcaggctcctgaatgggtcgagagacggcgttgagtgcattgagacggtagatttcaaggggctcaagagacccttctcatga

SEQ ID NO: 9852 - DNA, 378 bp, Zea mays
  Peptide Sequence Number=SeqID_53227
atggcatcagagcatttcttcttcccctctcctcccctagctgccgctgctagggagtacagattggtggccgtcaggggcaaaggggtgggccatgaggatggtggcccaggggacgctccatgtggcccggcctggggtggaccttcacctgcccaccccagccccagccgtgagccggctcacctaaagatgcccgacctagggtcttcggttgggtttccactcagtttggtcacaccattaagaccgtccaatgtgacaatggtcaggagttcgataactctcggtcgttctcctcctcctatggtgtacagctctggatgtcctgccctcacacttcctcctagaatggtttctgttcttgcttgctactag

SEQ ID NO: 9853 - DNA, 324 bp, Zea mays
  Peptide Sequence Number=SeqID_53228
atggcaggaatgtactgcaacgcccgcgactgcctcaacaagagaatgcagccgccggcccgcaccgctgcacggatcctcctctccctcgtcgacaagggaccgggaaagggggataccccgaaaaggacccttctccgcgaaggaaccgggctccgagcccccctactgatcaggggttcgaagactggccctccgaagggttcaacagtcgcctcagatcgcgtgggcccgacacccactactggtcaggggttcgaaggccagccccccgaagcgttccatggccgcctcaggctactcgggctccgcgcccattactga

SEQ ID NO: 9854 - DNA, 554 bp, Zea mays
  Peptide Sequence Number=SeqID_53229
gacgacgtcagcagggactcgaccgctccaacagctgtccctccgccaggctccgtcgcacctccgacagccacgacatcacgccagcaaggtgccaagacctctccggctgccacatcggcatggccttcttagaggaggttggccgcgcgggaccgaggacgggacaggcgctctcttggggccgctcgcttccctcacccgcgtggacgcttgtaacccccctactgcaagcgcacctgacctgggcgcgggacgaacacgaaggccgcgggacttccacctctctcacgctcgactccggccacctcgcctctccccccttcgcgctcgcccacgcgctcgacccatctgggctggggcacgcagcacactcactcgtcggcttagggacccccctgtctcgaaacgccgacaacaacgtcacaagaaacttcaacttgcccagtggacttgttaaagactctatatgcccttgcggtgttgaccgcctcggcccaaaaccgatccgaagtcttgtactcatcaagcatggtccttgccatgtgcaatag

SEQ ID NO: 9855 - DNA, 1596 bp, Zea mays
  Peptide Sequence Number=SeqID_53230
atggtcgcctttcaagggggtcaccctccttttaaaggcgactctccccgcttgcgtccccagccgtcgtgggctgagtcttctccaacacgcttcaaggtcctccccctacggcgcgggggctgggtcccacgcgtcatgcaaactggcccagggcagaagaagccaaaccgccgcgcgcagtgcatgcaaccgcccagcggttacaagcattcctccactttcgcccagaccagcgggcccacgcgtcatgcaaccggcgcgccggttgctatgtgcgagcaactgcaccgccactcgcaccactaccacgcctcctcgactgcggagccagtgccgcgactcgaggcaaccctgcgtacgacccagcagtgccagttaggcgcgacggtcaacacggccaaaaatgggccggcagtaatggcggtggtaggcgggcaggagccgcggtcacgtcgtcagccaagctcacgtcccatccaggggcagcgagagaactctctctcacggcgtgaagacggcgcgcccgtgttccgttcctcgaacggctcgcgcacgcgcaacggccacctcgcgaaccgctcgccccgtcgcattaactccgcggcaggacagacgacgcctcaggcaggagaagcgagcgacgcttcgccttcgccgccccgagcctcactactgatcagaggttcgaagactggtccctcggaggggttcaacagccgcctcagagcgcttgggttctgcgcccactactggtcagaggttcgaaggccggcccctcggaagggttcaacggccgcctcaggccactcgggctccgcgcccactactgatcagggcgggaacgatcttgtaacggaatcccatcagagggaggcatcgagccctcggaccccgtcgaaaggggaccgggtccggcagatcacccgcagcgccgcctgcgccgcgccgactgctgtgccactcgacagagtgaggctgacagcggccaagtccggcctcaggcgccataggaaactccgcttcgcccgaccccagggctcggactcgggctcagccccggaagacgacgaactccgcttcgcccgaccccagggctcggactcgggctcagccccggaagacgacgaactccgcttcgcccgaccccagggctcggactcgggctcagccccggaagacgacgaactccgcttcgcccgaccccagggctcggactcgggctcagccccagaagacgacgaactccgcttcgcccgaccccagggctcggactcagccctaacctcagccgacgatctccgcctcgcccgacccgggggctcggactcgacctcggcctcggaagacagactcgacctcgacctcggaggagcctccacatcgcccaacccagggcacggaccgaccacgtcaaccggaggtgccatcattaccctaccccatgctgactcaggctacggggaacaagaccagcgtcccatctggctcgctccgccagacaggctccagcgctcctccgacggccacgacaccacacgaactgggtgccaaaacctctccggctgccacgatggcatgtacttagggcgctag

SEQ ID NO: 9856 - DNA, 1041 bp, Zea mays
  Peptide Sequence Number=SeqID_53231
atggctcgtcttagacacactgcacgtaagtcggtgattcctttcctgccgtctcgacttgcggagcatcctctgcaccgcaccgtgtccggacagtcgagtcacctggagaggctgcaccaccgcctgcgtgaggagcaggaacgccggcgccagcacggagagcagcagggctcttcctcctcaccccagcaggaggtggagaccgtgaggccccgttcctctgttgcccagctgggggcgccccttgttccaccgcgggacgtcccggctgttggaggacccgttggaggagctgttggaggagccgttggaggagctactggaggagaccccgacgacgactcagaccacaacacggagtcttctgagccgcaggaggcggaaggatgggtcgcccgacccatcacccgtgacaccgctcgcggttgtcacttccacgacgcactcgacaccttgctgcgccaggctttcgatcggcacacctggtcgatcgagtatcgttgtgtagtctaccagcacagtcgcgagaggtacccggaccgctgggaggctacctgcctagttcgccgtccggaggatgacctccggggtgcggaggccgtttcggagcactattccatctccgagagggacactgcagaggcggctatgcaggatgcagcacgacgtgcactctctcagtactgttctttgttcggtggcgtggccgacggtcttaaccttcggtactacccccgccgccctactggcaacacagagagtgtggttgtctcacccgttggtgaggctaaccctaggttgagcagcatagtcaacctagtcgcagtgcttaacacggagctggatcactctctcgacgagctaagcagggctcgaacggagattgcggagttgcgtgctgagttggcagagcgccatcaccaggagggtggatctcccgctcctgttgggactcagcacccataccgctcaccgccacgtggtcaccacacttatggttcccctgtctgtaagaccaggatagatctggatccttag

SEQ ID NO: 9857 - DNA, 521 bp, Zea mays
  Peptide Sequence Number=SeqID_53232
gctgtctgttcgatggcgcaccggacagtctggtgtacaccggacatgtccggtgccccagccacgacaccaatgacattggatcacagaccgttggagtttctgacttctgggcccgcctggatgtccggtgcacaccggacatgtactgttcaatgtccggtgcaccagtatgggcgcgcctgccgtctgcgcgcgcagcgcgcgcatttaatgcgttgcaggtagctcttgacgctgatatagccgttgctccgctgttacaccggacagtccggtgtacaccggacagtccggtgaattatagcagagcagctcaagtgaattcccgaggctggcgagttcctgaggccatccttccttggagcaccggacatgtccggtgtacaccggacagtccggtgaattatagtcgagtgcctctggaaattcccgaaggtggcgagtttgagttcgagtcctctggtgcaccggacactgtccggtggtgcaccggacagtccggtgcccccagaccagag

SEQ ID NO: 9858 - DNA, 2756 bp, Zea mays
  Peptide Sequence Number=SeqID_53233
aggtgttgcagaggtttgaggtgaagattcatcaattgacacctaacgccgtggtagccctggcgaagtatgtctgggtagtaacttcgtatggcggtcagccctccgtagaggtcttcaccaaaaattattgtttgcactggcagaagaggaaagttggaatcaagattgcacagtttgggtcatgcacctttacgccgaggaccgacaagacttcggcggaggttgtggagctggttccttgcgcccgcaacaagtggggcaattggtatgattattggttttatgtggcgggaggcgaagtcgaagacctcccgggactcccggcggccatgatgtgctcgcactgctatgtggcgttcccgccgtttgacgtggcggaggatgatatcgtgcgtgaggcggaagacggagctgtgcagattgtggggcgttatgtgccgaggatggaggccctgcggagtagggatatccatggatccaacgttcgcctgaatagggtcttcgagctgaatcgcctgccatacgatggttatcccgggaatgatgctgccacgaccgttgaccgccgcgggaagaggtcggtggccgtgactgaggaaggcccttcgcaggaggctgccccagccgctaagaagagaaaaataggtactgcagttgggggactgggggtctctgaaagttttgctgtagagttgatggggacgtgcgcagccctcgggggggggggggggatgtcttcgctcgagctccgggagtcttcggcgcgaatgctgaaggttaccgggggtcgatggccaaagaatgttccggtcccccgcgcggctggcgaagacttttttacgtctcgtatggctcgcaacttgaagatttttccttacgggcggaatattgctactgttgtatcggcagtgatggagaaggatcgtcaagacgctgcccagaagcgccgggcagtcgtgaggctcggggatcctttccgcgaggcaaagaaggcgcgggtagccgcgaagtctgccgccccgggcggtagcaagccattgtcgtatgcgaagccggccgcccccaggcccagtaaggcttcggctggtgcgaaggctgctgcttctggcgtgggcaagccaccctctggcgggcccacgaagggacgaaggctgccttcgccggcgcgaacggaggggtcggatggggggcaactggctgttgtcccacctccggtggcggccacttcgccgatggcgatggttggggcgaaggcaactgaggcggccgacttcgccgaccacatcgcgtcgggtgccttgactgtggactttgctgccgaggtcgagagtctctgcgtgcagcatgtgtatgctgtgcgggagaagtcggctgtggaaagcagaagccgcagactatcggagaaggtggccaccatggaggccgagagagcggatctccggcgccagctagtggaggagaggagggaggcgaacaaggccattgctgatgcgcaggctgcgccagacgaggccaagtttgcgcggacggagggtagtctcgctcgccaacttgccgaggagctgcaggcgaggctcgacgccctgcgtagccgcgtggacaaagcagagacctcgatgcatgtggaggtagagcggacgcttgcgcagttcgtggacgcgtaccgggagctgggtgcgcggaccgctgccttcgaggcgcccgaccaagaagcgggcctccacttccttgaatggatgcaggaagagctgggggtgctcccaacgatcgtgacgggtctcatgtcatttgcctccctcatcacctgcgaggttgccatgaatgctttgtcccgcgaggggtgcaggcattttgaggtcttcgaccaaaatgacgaaaactttgaacgtgagatcttcaaggtcgaggaccccgtgcttaagcagtcggcgggggcgctcttcgacaggatgtggggcccgcacgaccgagaaacggtccgggagcggtccgattgggcaatagaacagatgacgcatgccgaaggcgtcgaggaccttggtggtctagacggcgcgctacccgaggctgcagaggtggatccggcaccgccgtatgatgtcggtgagggcccctcatcgacccctgaaccgacagtgccaactggagccagcgaataccccgagccgacgggcgaggacgccttgaaggcggtggccgagccagctgccgaagaccccacgaccttggctgggccttcgcaggttctgaggtttgggcctgcgcacgcaaccgctactgacaatactatttttgtggcggcttcgaccgtggctgctgatgatgattcgtttggctctgtgtctaagtgttttgagtctgatgattctgggagttcgattgcttggacggaggagtctttagatgaggacttggattattttgcagcgttagatgtggctgcagcggagccttcgccgcgcgtggagggttcggaggcgctcccgggtgcgagtactgggtataggcagcgtagggcggtggtgaaacggagagtgagtgaattgtcgcgaagtggtaggcgtcatcgtagtgagatggagagtggtcgtcttcgcgtggacgggactggtaagcgagaatttttgtcctcaccgattgggacgagtgtaggtgaaggggagctgcgaaatctttttgagggtgaggaattgaggataatgttgttcaactacagggagatgggtatcatcccgaaggttgagccaatataa

SEQ ID NO: 9859 - DNA, 714 bp, Zea mays
  Peptide Sequence Number=SeqID_53234
atgggtgtagcccccgaccttcaaatggatttttttaaggataatccattcgaaggtcttcctttcacttgtggaaactggcatgaggctattttgcattatgctttggaggtcagcattatgtcatcaatattttgctgcccagtgaccgcggttagaagtgagcggttgcctttcccttctataaataacccctttgcttctctggtttcttcacatctcttcgctgcttcttactgcctcttccctttcttctctcccaaagcttcaatcatgggcaagaacaacaagcgcaagcgtgaaccgactcctccatcggaggagtttggtgactcggaatactcggaggaggagttctcctccgagcccgaggggtctccggctcccgtctctcccccggcgtcgtctgatgactcggacgactcccaggggatagccacggaggtctggacatacatccgagccgtcgagcgcgccgggctcgaaggctcggatgagtcggagtactcctcggatgaggaggactcggacggcggcgacgagggtgaagacgacgacgacgacgatgacgacggcggcggcgacgacagtggcaggggcggcggcgacggcggcagggacagcaccaagggcagcagcaggggcagcaccaagggcggcggcggcggcagcgccaagggcggcggcggcggcaggggcagggccagtggctag

SEQ ID NO: 9860 - DNA, 615 bp, Zea mays
  Peptide Sequence Number=SeqID_53235
atgagcgatctggcggcggagctgcacccgggccacatggttgagtttggcgtttcgcggatctcctcggttcgcgagcaagacatgcaacagctgagcacgcccgcgcgcgcccccgcgtgccccgcgttgcgccaaagccaagccggcgccgttgctcacgcccgcgcctataaagcctccttagacgtcgaccgtactcccccgcgcacgctcgacctcatcggagccagagaccaccggcgtttgccctgcaaacggcgtgcccgcggccacccgatcccccgccaccgtagaccggccagcagagcccttcccagccacgcccgaccctcggaagagaccgtgcatgccacggtgaagctccccgagcaaggaatcgttctttgcttcaccggtgaagccagtccacggtcgccggacttcacccgaccgccggtgaacgtagaccggatcgctgtggttaagccggagcacccgccgccgacgagttcacccgcctgcgcacgtggatcggccgattccggccaccaccgccgtcgagccgtacctcgctgtgaccgccacgacctcccgaagccagccccgcccctcgccggacctttctcgccgccg

SEQ ID NO: 9861 - DNA, 336 bp, Zea mays
  Peptide Sequence Number=SeqID_53236
atggcacagccgacaccagtctacgtcgtggccgtggccttcccctggaagcaagcctccatggctggacccgtggcgcgcgcgcttgggcttgtcattgggtacttcgcctcatcactggggaagcgcctgtggccgagtcaaggaggtacggtcgtcgcggcaacccaatcgctcgccggagctctgcagacatcgctggattgcgttatgccgtggttgggtctcctcgttgttcaagccatcggtaagattgtccctgtcacgctcgttttgacccctgctatgattgttactcatcggatcagagttcgggacattgatgcggttgattga

SEQ ID NO: 9862 - DNA, 270 bp, Zea mays
  Peptide Sequence Number=SeqID_53237
atggccggaatcgcttggtccacgcgcgcaggcgggtgttctcgtcggcggcgtgtgtaccggccaaaccacggcgatctggttcaatccaagggcacggcttctattccttgctcggggagcttcactgagttgtgcacactcgtctctgagggttggatggggctggggcaagctggactggccggtctacggcggcagtggctcgggtggccgcggtcacgctgcgcacgggcaaacggcggtgaactgggctccggtgaggcttga

SEQ ID NO: 9863 - DNA, 141 bp, Zea mays
  Peptide Sequence Number=SeqID_53238
atgggagaaatgagtgctttgtctcaagttaggaaccccgcagaaaatcggttgaaccgccccctgacaggtcagcagactgtctaccagtctgactggcagactgactggcagactgacctgcaggctggtcagacatga

SEQ ID NO: 9864 - DNA, 273 bp, Zea mays
  Peptide Sequence Number=SeqID_53239
atgacgaatgcacgaacgtggagagggcgacacatgaaaccgctgccagagatcgacatcatcggttgggagaagactctgagcgtccctagcgatgcgggtgggccacaggcggaggtggttgcggctggggagcaaggattgcgtgtgattgatttagagctcgaaggttactgggcggtggttcagaatagcatgaatgaaggtttacaaggggctgcattctttgatatgaaaaagcaaacacatacatcaaatgaaggtaaagctaag

SEQ ID NO: 9865 - DNA, 540 bp, Zea mays
  Peptide Sequence Number=SeqID_53240
atggatgaggctactttccgtgatccccaggaacataggttggaaatttattacaccatagttaggccgcaaaaaattgtctacatattcagagaagtgcaacagtgcacactcctttcaaagactgagtgcagcgaagaatgttcctatgccctcagtcatcaagatacaacattggatcgaacgctcaaaaatgatggagcagcaaaaaaagggtactgttattgtctgggagatgatgatgaaaaggttctaattacctttgccagttacaatgggaactacaacaacaagtcaccagttgcagttgttgccatcgcttctgtgacaactgcctatgctgtaattactaccacagatgagaaacctagagatattgttgtgacagatgattttgatatcaagagaactcaacctgcaagtaattccaaaaagatcgttgctgaaattgatgtacttactggacagaatgtacttactggacagatgattttgatatcaagagaactcaacctagagataaagctttctttatgttag

SEQ ID NO: 9866 - DNA, 375 bp, Zea mays
  Peptide Sequence Number=SeqID_53241
atgggcatctcgacctcgacacgggagggtaaatccgtcgatcaaaagggatccacttttgatttgattggttattcggatgccgattgggcggggtgtgccaaaggttcacacttagccaataaaaagaccaagtattgggttcaacaaaagagcaaaggggcaaccgaaggcacctctgggtctggcgcaccggactgtccggtgtgccaccggacagtgtccggtgcaccagaggactccaagtcaaactcgtcaccttcgggaaaatccagagcgctccgctataattcaccggactgtccggtgtacacggacagtgtcggtgctcaggagagcggcccaggactcacagcttcggattcgcacggctag

SEQ ID NO: 9867 - DNA, 492 bp, Zea mays
  Peptide Sequence Number=SeqID_53242
atggttggagtggaggtggttgggggtatttatagcccccaaccaccaattcaaccgttggggcaggctgctgtcgatgggcgcaccggacactccggtgtgccaccggacagtgtccggcctgatgaccttcatagaccatttggaaaatttggccccgttaaagacatatatctgccaaaggattactacactcgggaacctaaaggatttgggttcatccaatactttgatcctgaggatgcttctaatgcaaagtaccatatggatgggaagatgctgcttggaagggaaattgatgttgtttttgcagaggaaaacaggaagaagccttctgacatgagggccaggaaaaaaaagattatttttgttagcaccctcatgtgtactctaggatatctggacgtgtactatgtattgggtattccaaaatctctaatgagtgaagtgggttgtgaaccaatgaaccttgatgttggacgtgctgactag

SEQ ID NO: 9868 - DNA, 228 bp, Zea mays
  Peptide Sequence Number=SeqID_53243
atgaacgtacgtgagctcactcttgctgtctcacaccccccacaggtcaagaacagcaaatggcggacactatggcagacatgcacgctcagatgcgacaggagcatcaagagatgcgccaagaaagagaggatatacgccgggagatgcgccaagagcgggaggagatacgtcaagagagaagggcgcaacagcaacaagcacccctgcctcccccaccaccactag

SEQ ID NO: 9869 - DNA, 528 bp, Zea mays
  Peptide Sequence Number=SeqID_53244
atggaagcaggcaggcacccttccccaccgccctgccctacctccgccgccccgctacggatctcgccccccgcggatctcgcgctagccacaaccgtgcacccttccacgcgcgatggaagcagcccgccatgcccctcccaccacaaccacacaacaccgtcccccgcggagctggagacgagcgaattggcggtggaggcgatgccactgggcgacagcgcggaggcggcggacttagtgctgccggacaagctcctggcggcgctgccgcgggacccctacgagcagctggatctggcacgccgcatcaccgcgctggcggtgtccggcctggagcgggaggcggggcgcctgcgggcggaggccacggggaaggaccgcgagaacgccgagctccgggagcgagtggtgctgcttgatatcgcgctgcacgagaccaacgccaggctccgctcccccatgctcacgacggcagatctcgtcccttcctgcggtcacgaagccacagctttcgacgactcgtga

SEQ ID NO: 9870 - DNA, 459 bp, Zea mays
  Peptide Sequence Number=SeqID_53245
atgggcaagaacaacaagcgcaagcgtgagccaactcctccatcggaggagtttggtgactcagagtactcagaggaggagttctcctctgagtctgaggggtctccggctcctgtccccctgcgtgcagacgactcccaggggcttgcggcggaggtctggacgtacatccgggccgtcaagcgctccgggctcgagggctcggatgagtcggagtactcctcggatgaggaggactcggacggcggcggcgaggacgaggacgacgacgacgacggcggcgacgacgacgacgatggcgacggtgacggtgacggcagcggcagcggcagcggcaggggcagcggcggcggcagcaaggacggtgatggcggcggcagcaggggcagcaaccggggcggcagcagcaggggtagcaccaggggcggcggcggcggcagcaacagggccagtggctag

SEQ ID NO: 9871 - DNA, 520 bp, Zea mays
  Peptide Sequence Number=SeqID_53246
atggaggcccgagcccacatgtcatgtaaccggcgcaccggttaccatgtgcaaagaaaccgcaccgccacttgcgccaatgccgcgtcttctcgggactacagaaccagtgcagtgactcgaggcagccccgcgcgtgacccaatagtgccaattaagtgcaacggtcacgggccagtcagccgtggggatagacgcgatggctggtatgaccataggcggaccgacggtaattgccacaacaggcggaggcagcggtccaaccaccaaccaggccctggtcccacctacaggctcgcatcctcccatgaagcggcgggggagccctctcctacagcgggttcgaaggctggccctttgaagggattcgacagccgccccagaacatgcagagtcagggatgaccctgcctcaggcgcaacagggatctccgcctcgcccgaccccggccttagcctcggcctcgggagaaggtctctgcctcgcccgaccccggcctcagccttggcctcgggagaag

SEQ ID NO: 9872 - DNA, 753 bp, Zea mays
  Peptide Sequence Number=SeqID_53247
atgaagggtagctcacgctcggataagaatgaactaccaccacaccgaaagagctgcgagataacgaactccaagcggctcaccggtgaccactgcaccagcagcgacaacgacctccgcctcgggcggctagatagcagcagcgatttccccagggcaaacgccactgtgaaaagtccctcgcccatgtccccacacggggggcgagaacaatccattaaagccaacgagccagaggtccgcccgctggtgacactaacggtctcgtcggcagaggcaaccacccctgcggtgggaagcctcacctatggtagccaccaccacctcagcactgatgacagcggccacctgcgcaccgacgccgcactggtgaatggcggtcgccccagcgcgcacaaggaggtcctcgctcccgtcctcgctatgggagtgaggacaaggccatccagggacgtggacgccgcccccgcggcgtacgacgtcttcaggtggcagttcgcctcctccgcaaggctggtgaacgcccttctcccccaaatgctggaggaagaagtgggtcgccagcccatgcggaaggcagggccccaactcggctcgccctcgcccccagcacggatgatgaacatccttgaagctgagggcagggggaggccacagcacggctcgctcttctccgccacaaggccggtggtcatcattctgggtgaccactggcggggaacggcagccgggctgcatgatgaaaatccttga

SEQ ID NO: 9873 - DNA, 489 bp, Zea mays
  Peptide Sequence Number=SeqID_53248
atgggtatgggtatgggggtaaatccatacccgccagtgtatatgggtgacccggtggggttatttttgtgtcgtgggtccagatgtacggcagttgacagtcgccggccagcctacctcaggatcccgctccagacctccatcccccattacgagggggagtggttttatgtcaagaacatagattggagcgcaccaccgtttactgaccataagatggaatcccacgccgagtggacccgcgacgtcgagtctaggtataagaagaaggtggactatataactgggaaaatcgttgtgctgaagggacagggactctcaggcgagaggttgatatgcaccttcatgcaacggtggctacagtcgctcatggcccgccagaatctgatgtggaagtacgccggcgagagcgatcctgacaggcactctaatgaggtcctctcgcagagcgaggtcgaggctcgcatcaatgacattaccgcggggtga

SEQ ID NO: 9874 - DNA, 267 bp, Zea mays
  Peptide Sequence Number=SeqID_53249
atgcccgccaccatccagggatcaatcctcaccacgaggaccaggggtgatgccaacaaggtgtacgtgaacctttcctggggtgttgataatttagctctcgcaaacctgttcactgagcaaggaccatctatgacagacttggatgatagatccgtgttacgataccagcatcaaagccgcctagaagcaatactgaactttcacttgagatgtaccttcggactcagaattacgaacatgaagtgcggtcaggacgaagcctga

SEQ ID NO: 9875 - DNA, 1491 bp, Zea mays
  Peptide Sequence Number=SeqID_53250
atggacaaggatcgtcaggaggctgcgcagaagcgtcgggcggtcatcaggctgcccgaggctaggccgaagagggcgtgggggactgcgaagtctgccgcccccggcggtagccaatcgatgctggcggcgaagtcggccgcccctgggtccagcaaggtgccggaggccgtgaaggcagccggaaccggcggaaccaagttcgcctcggccgtagccgcgaaggcccgagaattgccttcgccggggaggcgcgtcgccgacttcgccaccaatattagatcgggcgaggggcaacttgtcgttgttccgcctgcggtggcgcccgcggtgtctgccgcggtgcctgcggcgaagggtagcgctctcagcgctggtggtgagattccggcgctcactgccgtcaaggacgaggcgggcgctgtgtcccgccgactgaaggaggcgtcgcagcggctaagtcaggcggctgacttcactgaccgcgtggcgtcgggggccctgacggcagttatgtctgccgaagtcgagagacttcgcacgcagcatgctgacgccgtccgggaaaagtcagccgccgatagcaagtgccgcaagctggcggagaaggtggccgcgctggagggcgagaggactgacatccggcgccagctggcggaggagaggagggaggctaatcagtccctcgtcaaggcgcagtctgcgcaggcggaggccaatttggcgtgggtggagggtagcctcgccagccagcgcgccgaggaatgggaggagcggttcaacgctctgcaggcccgcatggagagggtcgaggcttcgacacgctcggaagttgagcgaacgcgcaaacagcttatggactcataccacgagctgggcgcgcggaccgctgacttcgaagtgcctaaccgagagtcgggccttcgctgcctcgagtggctgcaagaggagttgctggcgctcccgaccattgtggagggctttatgtcttttgcctccctcgtcacctgcgagggggagatgaacgcgctgtcccgcgaagggtgccgccactatgaggtcttcgaccgatctgatgaagattttgagcgtgagatttacaaggtcgaggacccggtggtgaaggaatccgcgggggccctctttgaccggatgtggggccctcacagtcgggaggtggttagggagtggttcaaccgagcgaggggtcaggcggcgcgtgctgagaccgtggaggactttggatctttgaacagcgcgcggcccgaagccgagacggacccggtggcggccgaggctgaggtcgtcccggcgccgccccggaaaccggcgaaggctccctcactgcccctgcggctactgcgtccggcggtggctcgtcgccaaccgctgtgccgagggctgaggatcccccaaagacggcgacggagccggcagcgaaggatcccacgacggctgggccttcgtaggtggcttagtgggtgtgggtag

SEQ ID NO: 9876 - DNA, 783 bp, Zea mays
  Peptide Sequence Number=SeqID_53251
atgccgtcctcttcctcttctgctgccgctacaccgccggccggcgcgtcgtctgaggagacgctgagcaatgtggcggcggaggagttgcgcgccggcgacacagtggagttcggcgtgtcgcggatgtcctcggtccgcgtgcaagacatgcaacagcttggttattttggcagcggagtggcacgcgtcccgggggcggaggaggtccccgagccagaaggcgagttggttgtcttcgaggctttcttcgccgatggccttcgtctgcccgcgcatcgattcgtgggagaagttctgcgtagattcaacgtccagaaaaggatgatcggaaataagattgctcaatttgggtcctgtacatttacgccgaataccgggaagactttgatggaagtcgttgagttggttccttgcgcccgcaataaatggggcaactggtgggagttttggttctacgttgccaagggcacaatcgaagaccatccggggctccccgtggccgagatgtgctcgcattattactcggcgtacccgcagtttgaagtggcggaggaggatgcagacgaaggggccctacggtgcgcagccggcatgagtagcgagcgcgatctggttgaggagtttgtcgcgtatggggtgtggcccttggcgcatggctgggcgctgggcgaagtatgccctcgccagatgccctcccgtggcgggatgcaggtgcggagtcccaccttcgcactggatttgcatggccgagatctcaccacattcgtgcgtgaggtgtag

SEQ ID NO: 9877 - DNA, 426 bp, Zea mays
  Peptide Sequence Number=SeqID_53252
atgggcaagaacaacaagcgcaagcgtgagccaactcctccatcggaggagtttggtgactcggagtactcagaggaggagttctcctctgagtctgaggggtccccggctcccatccccctgcgtgagtcgtctgacgactcagacgactcccaggggctcgcggcggaggtctggacgtacatccgggccgtcgagcgctcctcggatgaatcggagtactcctcggatgaggaggactcggacggcggcgacgaggacgaggacgacgacgacgacggcggcggcggtggtgacggcagcggcaagggcagcggcggcggcagcaagggcggtgacggcggcgacagcagggacagcaaccggggcggcagcagcaagggcagcaccaggggcggcggcgacagcagcagagccagtggctag

SEQ ID NO: 9878 - DNA, 471 bp, Zea mays
  Peptide Sequence Number=SeqID_53253
atgatgctggtagactacacaacggtacttgatagaccatgtgtgtcggtcgaaagcccgacgcaacagggtatcgagagcgtcgtggaagtgacacccggtctcctccagcagctaggatgccctaaggtggtgcaggggacatctcttgctgaggtgcaggtgaaggcggcctcccagactccacctctcgctgaggcgagggggaagagtcctgctgctcctggtcctgctcctgcttctggcatcggcgctcctgctcctcgtgcaggcgacgatgcagtctctccagctggctggactgacctgacactatgcgatgcaggggatgctccaccaggcgagaaaggcaaaaaggggatcacagacttacgtgcagtgcacctgagacgagccatctacaaaacacatcgtaagcacaagagtaagaatagaactatgagaccagaaagtaaacagaaaggaaagtga

SEQ ID NO: 9879 - DNA, 420 bp, Zea mays
  Peptide Sequence Number=SeqID_53254
atgaagcaagaagaattcatgaaactcaaacaaggtggagatacttttacacagtacctcaacaagttcaatcatttgtcccagtacacaattgaccaggtcaatactgacttgaaaaagaggaattgttttatgagaggccttaatgaccgactacaacggaagatggccacttgcctcgacctctcatacagtagggatgtcagcacgacactggaagttgaagctaagtatgcaggcccagggaagtcaaaggactatggaggtgataggtccaaccagggcctaaaaagcgacaaagactacccatatccgaagcggaacaactccaataatcagcagaacccggagagttccagccaaggcaagggaaacacggaaaataatgcaacgggcaagaatatgaacaaaaatgggtga

SEQ ID NO: 9880 - DNA, 558 bp, Zea mays
  Peptide Sequence Number=SeqID_53255
atggccgtgatgggttcaacatcggaaaagatgtacctctgccagctgtctccaaggcatgaggatagcagcagcgacaacaatgatcccattggagatttagaagctcaggtggagcaacttcgaacggagctgcgtcacagaaacattgtgtgggtcgaggatggtcagcgcataaatgagttaagaactaacatccaacatctgcaagacaagcttgccgaacgagatttggcactcgattgtgccgtcaactcgcgttccattgcttgggaccgagaggccaaagctcgagcccgtgtggaggagcttagcacggccgttgataacttgcaggtgtactgcaatacattgcatgaggaagttcatgaattgtattcacgacaacaccctgacatacctgtagaccctgtcggaatgggagctggaccttctggaacaacaggtgaagcgttgggtggggaactggatcttttcaagccccctccttcaatgaacctggctgatgaatggactcctacacccgacaacaaagttgctaaggataataaatactag

SEQ ID NO: 9881 - DNA, 339 bp, Zea mays
  Peptide Sequence Number=SeqID_53256
atgggctacaagtttgctgcagacagattggcatgttctggcacaaaaatccgagatctaggcgttgcaagttactctgtcaggcgctttgttgaatgtttccattggtacagtgaatggatagggtcaggttcagagaacctcgccgctgaaatcgaagaagagatagaagttgaagaagcaaggactacaccaccaccaccacctgaagaaccacaggccgggaactgcttttattttgacatctgtggagcagagtctgactcacctataacacaaggcaagccccggtgcattggacacctccttgctattttaaaatctttctcacttgcttga

SEQ ID NO: 9882 - DNA, 309 bp, Zea mays
  Peptide Sequence Number=SeqID_53257
atggctgcaggtggcgctgctcctctctgcggcgatgaggtcaccggagttgaggcaggcgcgggcttcggtggctccagggttgtcggagttgggcagaggggaagagggtgccacggcgaactcgatggcggggaatgggccatgaatccacgagcaaagaggggagagcggcgagacagggatgacacaggaaactactccagtgaactagaccgggctaaatcggtcggccaccacgcgagcacgacggaccaccgtggtcgagcaccggcgaaggcgaaattggatgaacacaaggcgcaataa

SEQ ID NO: 9883 - DNA, 1038 bp, Zea mays
  Peptide Sequence Number=SeqID_53258
atgcaggcggcatgcaaccgcaccaagggtgagcaccctttcgactccgacgcgtccagcatgggggctcaggcccacacgtcatgtaaccggcgcgccggttactacgtgcgagaagctgcaccgccacttgcgccagtaccgcgccttctctactgcggaaccagtgccgcgactcgaggcgatcctacacatggcccaacagtgccaaccgagcacatcgatcacaggtcagtcagccgcgggagaaggcgcggcggtcaatatggccaaaagtgggccgggagtaatggcggcgacaggcgggcggaagtagcggtcgagtcgtctgcaggctcacgtcccctcctgggacagcaagagagccctctcccatggcgtgaagacgacgcgcccgtgttccgttcctcgaacggctcgcacacgcacaacggctgccccgcgaaccacacgtcccatcgcattaactctgcggcagggcaggcggcacctttggcaggcgaagcaggcgacgcttacctccgccataatgaccgcgtcaaaagagggaccgggaaagggtatactccgaaagggatccttctccacgaaggaagcgggccccgagcccccctactgattagaggttcgaaggctggcccctcggaagggtttgacagctgcctcagagcactcgggctccgcgcccaccactggtcagaggttcgaatgctggcccctcggatgggttcgacagccgcctcaggccactcgggctccgcgcccactactgatcaggggttcgtaagctggcccccgaagggttcgacagccgccttagagcacgtagagcgagggatgactctgggtacgtccgatacatggccgaggcttgggctatgctcccgaggtaccctagaacatttccgagaccagcaggagcgattctgtaacggaatcccatcagagggaggcatcgagccctcggaccctatcaaatgggaccgggtccggcaaatcacctgctggtacttttggagcgcgcctctaggccactag

SEQ ID NO: 9884 - DNA, 342 bp, Zea mays
  Peptide Sequence Number=SeqID_53259
gcgggggagctcgtcggcggtgaggagtacggcctatccagagcacaattgaccaatcaattgggtcagagagcttcaccagggatcaaggagggcgggcgtccgaagtccgatgaggacgatcttggctttttggtgaagttctgtcgggtccgagagcttgggaagcttcgcaagctcttggcgaagctatccgagcggctggcgcggcttggaagcgactggaatgggctggccgcggtggccgaggctcgggtggcaatggcaggtggaagggagctcgtcggagctaaggagggacgtctggctggcgaaggttttgctgactggatcaagagatag

SEQ ID NO: 9885 - DNA, 711 bp, Zea mays
  Peptide Sequence Number=SeqID_53260
atgaaaagcattcagacctcagaggattcaaaccactcctccgaggcctcgggggctacacccggcaggaagctccgcctcgcccgacctcaggctccggcctcgggaggaggtctccgcctcacccgacccccggactcggcctcgacctcggcctcgggaggaatcgcgtcctcacctgaccccggcctcggcctcaaaagaagtctccgcctcgcccgaccttgggctcggaccgaccgcgccaataggggacacatcattaccctatccctagccagctcaggctataaggaacaagaccggcgccccatctggcttaccccggcgacgggtaatgatggtgccgcgtgtgcaaccatgacgccggtggctctcagccccttacggcagcaaggagacgtcagcaggatccttgccgcactaccagttgtgctcctacaggactcaggcgctcctccgacagccacgctatcacgtgtacagggctcaagctctccgccgacagccacgttggcatgtacacaaggcttaggcacttctctgccggacacgttagcgtatagctacaccccccattgtacatctggaccctctccttacatctataaaagggaggtccagggccatcctggaggggggttcgcgcagggaaggagtggacgaacgggctccctctctatctctctccctcttgcgacgttcttgtaa

SEQ ID NO: 9886 - DNA, 264 bp, Zea mays
  Peptide Sequence Number=SeqID_53261
atgacgcgcggcggtcggagaagggggaattcactggcgcgcgtgattggtggcaaacctcgtggcatctactccggtgatcaacggagagctaaagcaggacacggtgatgcggtggaaatgcctagaaacacggcacaaggccggaaggcggcagtcaccggcgtgcttatcaggttccaccgcgacgagctttgtacggtggccggaatactttactggccggaacttatccacggcggtgtaactccgagcgttatctga

SEQ ID NO: 9887 - DNA, 591 bp, Zea mays
  Peptide Sequence Number=SeqID_53262
atgggacatgggtgcgtcgtcttcacgccgtgggagagggctctcttatcgcttcaggaggggacgcgagcctgcaggcgatttgaccgctgcttccgctcgtctgccgctgcaattactgccagcccacttttggccatgccaaccgtcgtgcctatccccgcggctgactgtcccgtggccgtcgccttcaattggcactgttgggtcacgcgcagggccgcctcgagtcgtggtactggttctgcagccgagaaggcatggcattggcgcagcccgcccgtccgcgaggacttgagtggggatctgccggtgcaggctggggcgtcctccattcgtcggcgtggcgctggcgcgcaggtggccgctgtcgtcggtgctgaggtggtggtggccagagatggtttctccgccgacgagaccgtcggcgccatctacggccggacccccggctctttggctttgatggcttgtcctcgcccctcgagtggagacgtgggcgagggcctcgtcacagcagcgtctgccctaaggtcatcgctgctgttgtttagccactcgaagcgggggtcgttgtcactgctggtgtag

SEQ ID NO: 9888 - DNA, 411 bp, Zea mays
  Peptide Sequence Number=SeqID_53263
atggcgggcggaattgagctcgccggagctaaggaaaggtggctggccggtgaggagatatggagccaggaaatctggtctgtctccctgcccaaacccaaggcaaatccaaggttcaggcatcggaagggggagcagcagcgccctcggcgttgtttccagcctcggcggaacctggcccggcctcagatggtgaccccggcgaaaggacctccacccaagggaggacgccagcaccgcgccagcggatgtctcggccaagcttcagctgctgctaccacatcttcctcggtctgggaagccgccagctcccgggccgatgaagtctcttttcgagctgactccgcctctatccgcgccaacaccgctgcctccggctccggctcatcgcagagcagccgagggtcctaa

SEQ ID NO: 9889 - DNA, 468 bp, Zea mays
  Peptide Sequence Number=SeqID_53264
atggattacgataagaagctaaagaagctcgcccccacgaagaaaatccgaaagaagaccaagagccaaggatgccaggctgagcggaagaaggaagcccctccagcactacctccctccaggattgagaatttatccgacgtcgaggatatgtccctagctagccttgatgaccttctcaaggaatttggggacactttagaaaaggagttcggaaggtttcccctaggagccgaaggagaagccggtggagaagggagtgagacccatctccccgcacctccggagctgccattagatttagcccaagttctagccaaccaaacccgactcattaaagtcctcactagaagtctggagaatcagcgcccgaatggtggaagaccacaggacaggatgggatattttctaaggctcaagcctcccactttcgctggatccagcaatcccctcgatgctgatgactag

SEQ ID NO: 9890 - DNA, 603 bp, Zea mays
  Peptide Sequence Number=SeqID_53265
atgtggatgggaaaagggcatgtttttactaaacgatgttttcaaaaagtgtatgatgaagggtattcaccctcatcaccttgtgagtgggatgatcagggactccttggtttaggggagggcctaagggttatgaaggctggggagcaccgggaggataaggagggggaatgttttgtccggtttgggcatggtgatggcctgactcctttcggtataaccgttaagacccttcttttcctctaccagatggaaggctctttggtcattaggacatcctactactcagaggtggaaagattccctcatctcttgcggagttgcgcgcttcgcatggggatccgcaagaagccggagtacgtctggaaagaataccacgagaatggaactgagaagtgctctatggcagtctacctaggagaaagccgaaactacccaaaccaccctcctttccaagtcaccttcaccaaacaccgcttcccagacacttgccaaaatgttgcccaaaaagcccttcgacagctatgccaaaactacagcagggaggtctttgaaaccccccttcgttacttcccacctagcaacaaaaatacccctgcctag

SEQ ID NO: 9891 - DNA, 2829 bp, Zea mays
  Peptide Sequence Number=SeqID_53266
atgccagtagtggagttggtcccgtgcgcccgcaacaagtggggcaattggaatgaattttggttttatgttgctgaggctactgtcgaaggccataaagggctccccgtgtccgaaatgtgctctcactattactctgcgtatccgccttatgaagtagcagaagatgatgcagacgaaggggcccttcggtgcgccgccggtcagagcagcggtcgagatttagttgaagagttcgtggcgtacggggtctggcccttggcgcacggctgggcgctgggcgaagtatgccctcgccagatgccctttcacgaaggaagggtggtgcgaagtcctgccttcgcactgaatttgcgaaaccgtgacccggccgcctttgtgcgtgatgcggaggacttggcggtgcggctcgtggggcgttatgtgccgaggacggaaggccagcgcagctttgacatccgcgggtcaaatgaacgtttgaacagggtcttcgaattaaatcaactgccgtacgacggctaccctggtcaagacgaagcggaccgccgtgggaaggaaccggcggtggagactggaggcgaccctacgctggtggccgccgcctcctcgaaaaagagaaaattaggtactgcgatgggaagacttggggtgtctgatagtttcgctagagagttaatgaggacgtgtgcggccccgggggagaggatgtcttcgcccgagctccgggagtcttcggctcggatgctgagggttaccgggggttgttggcctaaagacattcctatcccctgcgcggctgaggaggactgttttacatctcgtatggttcatcggtggagagtttttccttatgggcgaaatatcggtcatgttgtgtgggcagtgatggacaaggatcgccaaggggcggcgcgtaaacgccaggcgactgtgagggttcacgaagctcggccgaagaggcagcggggaacggcgaaggcggaggtctccggcggaggcaagccgccgctgccggcgaaggtgggcgcctctgcgcctggcaaggcgccggaggtgacggtgggcgccggaggccccacgctgacgaaggtggtgccgtctgtcagcggagtggcggaggctgcgaaggcggcccgaacgttaccgccgcccggcaaacgcgttgccgacttcggcaccgagattaatgtggaggattatcttggggggtcggacgagggcccgcttgctctggttatgcctggcgcggcgatcgcgacggctgcgccagcgccgaaggcggggggagagacccttggcgccggaggcgaggtgtctgccctcgcgctagtcagggacgaggcgggcgtggcgacccgccggctgaggggagcgacggaggcgttgagtcgagcgacggaggcgctgagtcaggtggctgacttcaccagccgcaccgcgtcgggggcccttacggcagctttgtctgccgaggtcgagagacttcggacgcaacatggtgacgctgtggccgccctggagaaggagaaggctgacctccggcgccagctggcgggggagaggagggaggccaacgaagccatcgccaaagagcaggctgctcaggcggaggccaggctggcgcgggcggaaggcaatatcgccaaggagctcgccggagagctgcagcggcggcttactgccctggagagccgcgtggagggggccgaggccgcgatgcgagcggaggccgaacggacgcgcacgcagctcatgactgcataccgcgagctaggtgtgcggacgggtgacttcgaggtgccggagcgagaggccggacttcgctgtctggaatgggtgcaggaggaactgcaggagctccccactgtcttggcggggttgatggcgttcacctccctggtcacctgcgaggcagcaatgaacgcgctctctcgcgaaggctgccgacactttgaggccctcgaccaggcagatgaggattttgggcgagatatctttgatgtcgaagaccccgtggtgaaggaatccgccggggccctctatgaccggatgtggagttcatacggttgtgaggtggtccgggcgcgggccgaggctgcgagggctcaggcggagcgcggcaagcgggtggacgacttcggggcgctgaacagcgcgccgcctgacccggagacgacccctgcggaggccgcgactggagtcgccccgggaccgaccccggagaccgcggaagatgcaccaggcgcccctgcacctgctgcagccggcgaagaccttcccccaaaggtggccgaaggcgcgcccgatgcccccgcagctgctgtgccgagcgctgaagatccagcggaggtgggggcggaggcagcggcggaggcctcggcggaggctcccgcagcggcagggccttcgcaggttcgagattttgggcctgcgcacgcaaccgctactactgagtttttggcggcttcgaccgcggaagatggaaatgaatatggtgggtctgtttctgagttttgtgattttactgactctgggagctcggttgagtggactgaggagtcttcggaggggacttggattattttgcagccttggacgtggctgcggcggaggctgcgccacacactgcggacgcgccagacgtgcccggtcctagcaccgggcaccgacgacgaagggcggttgcaaagcgtaggattagtgcggaggaaggggcccggctccgcgttagcagggctggtcggcaggagctgctgtctttgccggccgccgctggtgcaggggaaggggagctgcgaagcctttttgcgggtgaggagcttaggataa

SEQ ID NO: 9892 - DNA, 609 bp, Zea mays
  Peptide Sequence Number=SeqID_53267
atgaacaaagataggaacttgcataacggaattgggattcagatgggtcagattcaagcgatagaaatcaaggagaccgcggaaaaaaggagaaatgggaagagcaagaccgcggaggagaaaaggaacgtagatgacggattcgtgagtgccttctgttggaacagtgaccccacgacagatccgccaggaacagaggtcctttggaggaagaactccgatggatacaagatggagaaggtcggattcagagacaacggacatatggttacctgtgaaaggcaactgactgttgggatcgatgggggaatgactgcgacggacgaactcgaagctttctgcttgggcgccatctcaaccttgctggcaaacggagccgaagaagtgttgcaagagaatagagaaggcctggatgcagaaaagcaagaactagggcatggaatgcggaggcgtacgacagtgcggtacatatggggttttcctgaaccaggcgccacttccaaaatgtgggcatgccatgtcatcacccggccgttatttctaaaacacgggtgtgccacatcatcactcggccgttatttccaaaacggccgatgcggtccattttaa

SEQ ID NO: 9893 - DNA, 402 bp, Zea mays
  Peptide Sequence Number=SeqID_53268
atgccaaatcagcgtgaacagtacaggatcactgttcatctatttataggcacgggacgcaacccatgtaaaattacattaatgcccctcacatttatcaataactctatgataattcttcgaggggaccttcggaagccgaaggcccccaacaacgctaatgtcgtgccttctcgactgcggaaccggtgccgcgactcgaggcaacgctgcgcatggaccaacagtgccaaccaagcacatcggtcacagggaccgggaaaggggatactccgaaagggatccttctctgcgaaggaagcgggccccgagcccccactactgatcagaggttcgaaggctagcccctcggaagggttcgacagccgcctcagagcactcgggctccaggctcattactaa

SEQ ID NO: 9894 - DNA, 429 bp, Zea mays
  Peptide Sequence Number=SeqID_53269
atgacgccaccagatgtgaagcataaggcgataacaaaggatctatgtgttgaatatggtgatcccagatacaggagagaatgtgtacctgtgaccggaggcggaatcagggtggtcatcaccccaaatccatcattccgagaactagaaacaaagaactctcgtggatccctcacacgcccagtttcagttcgccatcggcagccgagcaccatgagctccacaggcggcggcgacgatggcgccaagaagtcttggccggaagtggtcgggctcagcctggaagaagccaagagggtgatcctgtgcgacaagcccgacgccgacatcgtcgtgctgcccgtcggcacgccggtgaccatggatttccgccccaaccgcgtccgcatcttcgtcgacaccgtcgcggaggcaccccacatcggctga

SEQ ID NO: 9895 - DNA, 1170 bp, Zea mays
  Peptide Sequence Number=SeqID_53270
atgcactgcgcccttccaccttccgagcccccggatggggagcgcccgcgttgctttcgtcttgctgatgttggaggagcgcaacttcgtggaggttggcacctttcagccattgctcagcttcaaggattttcatcaggcagcccggctgcatcctctcaccgatggtcacgcaggagggtgaccaccggttcgatggtggggagaagcaagccgggctgcagcctctgccccgccctcagcttcaaggatcttcatcatccttgctggggcggagggcgaggcgagccggggcctgccttcgtggtggctggcgtcctgcctcttcctccggcatctaggggtggaaaccatcatccagctctgcggaggaggcatcctccagccatgccggggaaggcgaactgctgttgcccggccagggtgcagcattccgtcctctgcacgggcgactgcggccggccgcaccggagggtctcacaacacgtcgtacgccgcgagggcggtactcgtgttctgggacggtcccgttctcgttttcgtggcgaggacgggggtgaggacctcccggtgcgctttggggcggccggcgctcgctggtgcggtgttggtgggcaggtggacgccgccgtcggtgctgaggtggtggcagccggagaaggtttctccaccaacgagatcgtcagcgccatctgcgctccgggcctccggctctttggctttaatatctggttctcgtcctccgcgaggggacacgaacgagagccttccaacggtagcgtccgccctgggaccatcgctgctgctgcagaggtcgccggcgagtcacccggagagtccctcggctcggtcggccttgccacccaaggcttctcttgctcagttaaagaaaccctcggccgctctgcgatgagccggagctggaggcagcggtgtcagcgtggacagaggcagagtcagctcgagaagaagcttcatcggcccaggagcaggggacttcccaggccaaggaggcatagcagcggcggctggaacctggccaggcacggtgctgacgtcatccttcgaggtggagatccttcgcctgtgtcgctgtccgaggccgggtcaggttccgctgaaggtggagtggacgccgagggtgctgctgctccctctgttgatgtctaa

SEQ ID NO: 9896 - DNA, 297 bp, Zea mays
  Peptide Sequence Number=SeqID_53271
atgaccaaggacgaaggcctcaacatagagagcttcgccaagaaagcccaaccaacgatgatggatggtatgatgacttttaccatggagtgtagctcagacgtggtattcttcccttcgcccgagaacgatcacgtcatgacaaaagctgaaggacatgctggtaacttgcttccagggtttccaaatgaagccagtgactgcccaagcattgtttcaaagtatggaagaccaagaagagtacttgcaggcatacgtcgtgaagattcttgcgactcagagcctaggcgccaatag

SEQ ID NO: 9897 - DNA, 888 bp, Zea mays
  Peptide Sequence Number=SeqID_53272
atgaagtcagcaactacagcttcagtagttagacctctatccttcagcgagcagatctcggcaagcaacactttggcctctgttatctctgaagaggttggagactctatccagctaggtgtgcaaacatctggctgcctcccttaccaaggggggagagatttgcagtggttctccataataaaccactcaaggcgccaccccttgatgatgtccttgagaggaatgtcaagatactctgtttttctccccgatgaagctcaagaattgcgccgccaacaagttggtgctgcccccagccatcctgactcgacaatgataaagacatttctagagaccgaagtgggggagaatcccaagaaaggcctcgcacagatgtacgaaaatggaaatttgcagaatggaattagggttcagatgcgtcaagttcaactcgtagaaatcaaggagaccgcagaaaaagggggagatgggaagagcaagaccacgaataagaaaaggaacataaacgacagattaatgggtatcctctgttggaacggagacgccgcgacaaattcgccaagagcagagctcttttggaagcaaaaccccaatctcaacgagatgaaggaggtcagattcagaaatgatagacatatggttactagcgaatggcagctggctattggggtcgataggcgagatgattgtagcaacggtgctctgcctcttccgctttggcgccatcgcaatctttccagcgaaacgagcaggatcaaaatctcagggaagcaaaggagtggttcgaaggtaaaaggtgaagttagggctcagaaatcaaaaaagcacgtcggccacatcggcgtgagtataaatggggtttcccgggtcgagcactatttctaa

SEQ ID NO: 9898 - DNA, 216 bp, Zea mays
  Peptide Sequence Number=SeqID_53273
atggcgcagtgggttcgtgtcctcagtcgtggcgagctcactggcgacgatttgatggctgtaaagagtcatggcgacgtgacagaggtgtttggatacgtggcacaaggccatgcgatgggagtcaccggcgttcttatctgtttccaccgcggtgaacacggtgtgtcaaacatatgcaatgccaatgcttatgatgttatgctcaagttttag

SEQ ID NO: 9899 - DNA, 166 bp, Zea mays
  Peptide Sequence Number=SeqID_53274
atgatgtggaaaaagtgggtgggatgttttcgaaaataaaacttgatggtggatccatcatggccgtgatgggttcaacatcggaaaagatgtacctctgccaggaccgtctcgatgtaggcttgatgaccgaggaccctttaactggtcacatgcctcgtcatgg

SEQ ID NO: 9900 - DNA, 243 bp, Zea mays
  Peptide Sequence Number=SeqID_53275
atggcgcacagttgcgacgggatgactcgggcagaggggagtgacgggatagctcgaggcaggcgcaagggacagggtcgcaaggcgccaaggctcgctggggaggaagtttcacttctgagttgcgggtctttcggactgctgagtgaagaatctttattggcttttctcggtactgaagatccttctaaatctggattgcctcttcttcgatgtgactttctggtcccactcttccaatga

SEQ ID NO: 9901 - DNA, 654 bp, Zea mays
  Peptide Sequence Number=SeqID_53276
atggggtgcgccggtgttctctggaggaatccgcatcaaggttgtctcttccagcgacttcaccgacggagagcgtgcgcttgtggtggtgtcgtcgatcttgtcttcttctttgctactgttggaggggtgcaaccccatgggagttggcatccttccaccaccatttggcttcaaggattttcatcatgcagcccggctgcagtcccccgccggtggtcacccagaaggatgaccaccaaccttgtggtggggagaagcaagtcgggctgcaacctctctcccaccctcagcctcaaggatgttcatcatcctcgctggggtggaaggcgggttgagccggggtcctacctcccgtatgggtcggtaacccgcttattcctccagcatccggagggtgttcaccaatcctgcgggaggggcggaccttggccacacggggccggccgattgcaggctgtcagttgcagcgtgactggccctttggggctagatggctctgatgccgcctccgacgctgcctcccgccgtctgggcgcactggggccgcccgaggcggaggtcgttgttgctgctggtgtagaggtggttgacgtcgttggtggggctgtccggagccagcttctggcgtggctcttgctggtgcggaggtag

SEQ ID NO: 9902 - DNA, 354 bp, Zea mays
  Peptide Sequence Number=SeqID_53277
atgcagatgatagccctttgtgtcgataatgtcgagatagccgtagaggaagtagctgatgccgaggacgatgcagtcaacccgccgtggacgagccgtttccaggtgcatcgcaggtcgacgggtgtgccgacgcagctcgcaggtgttgaacagctcgcagaccgtgcgcatgagacacgcaccgacgaagtcgacgacgatgtagatgcaacgaatttggatcacaaactcaacacgacagagatcgacgtgccggccaagaggcgcaaaaacagcatgcgggcgtcccctggcacgccgctagccacgccatgcagcagagtcagagaagatggagctggtgttgtctag

SEQ ID NO: 9903 - DNA, 159 bp, Zea mays
  Peptide Sequence Number=SeqID_53278
atggggaagcctatcccatcactcctcatgctcctcctcggccgagtgaccgcacttgtacccaccataaccggaatgggagaccacgtctcaggtcgcgtgaggagggcaatctgcgggcaggttcactcaggatgtggtaaacattatgctaagtaa

SEQ ID NO: 9904 - DNA, 657 bp, Zea mays
  Peptide Sequence Number=SeqID_53279
atgcaaagcttagataccaccgaaatagaaggtgaagaagctccaaagtcgttcctaagcttcattcagcaacctatcgactacttcgtcgacgatggaattagcgacacttattacatccagcgcctctttcatgacaggatcggccagggggttgtatggctcgggcagcatggccaattctcggccatcgttcacccaaacatcggagtaaaactttctgcccaccaaagtagcttcgaccgaagggtctttcgtgtcgtctgtggagaaggcggcttcggtttgggccacagctttaacatggtcgtaaccagccttctccagaattgccgcaacccctcaagcgccggagaaggcacaaatgtccccacgatcactgagtatctcttcaaaagctttggcttctccgcttatccaatcaagaacaccctcggggtcacctcggatgaattctcttcggaagagtatgcacccaccttggcaaagatggttttcaatttccttacgcaatccaaggatttttcaaagcatctctccttggattcacaaagctcctcaacatttttctccagcctagtgtttgaccattcacttatttcttgcttcacctttgcaagttcaaaattttcattagcttcggcaagctttttctga

SEQ ID NO: 9905 - DNA, 285 bp, Zea mays
  Peptide Sequence Number=SeqID_53280
atggcgagagtagcgtgtaccctccgtggcaagaggctggacagtggtgtatctgtgctctcacttggcgtgaacccgatctgtggtttatccggtgtccttgggacactcggacggatcttgttaagttatttggtgcacatgcataaccgtctgaggtctttgagacaaggacaggtgcatgtgggccaaataacttgggaggttctgccacaccccactcgtggaacctctgactggagggactgtgaggtcggcacctccccaaacccacgcagcgggtga

SEQ ID NO: 9906 - DNA, 732 bp, Zea mays
  Peptide Sequence Number=SeqID_53281
atgacttctcatagatccttggaaggagggaacacacagtcccacacggatggacttgcacgagagggttttccccgtattttgtgggaggtgcttcagggagctggttacacgacgcctccccagtacgcggtgcagctatttaagaagcaccgagtgccccgctgtaggctgtctacccatcccattggcttgttccctgctgaaaaggaggatggcccaatgtggaaagacagagtggagcatgccaaggatatatgggctctttacctagggcagactgcgcacttgacggttcgatgcatggatgctctgtatcgtctgcaggtgaagagaggagaggcaatgtctcacctgatggcattgttggaggctaccaagattaccttggataatagagaagaacttgtggtagacctgtccactgagatggtggagaaggacctacaggtggaacagatgtccaacgagatccaggagcttgaggtgctagtgggaaccaaggagaacaccattgaggttctcaaggatcagctcatcaacactcagcagcaactcgtggaggctaaccaacatttggacatgcaccaccaggagatccaggacatggaggccaacgaggatgtcgacatcgagggaggagaggagccggagcctgcctccagtttggacactgctggctcagggagaccatcttcccctgagtcgagcgttgcctcgtttgctcactag

SEQ ID NO: 9907 - DNA, 492 bp, Zea mays
  Peptide Sequence Number=SeqID_53282
atggcgctccacaagctctatgacgacgggtggccccccagctctcttacggaagcagggcgacgtcagcaaggactcgaccgctccaacagctgtccctccgccaggctccgtcgcacctccgacagccacgatatcacgccagcaaggtgccaagacctctccggctgccacattggcatggaggaccagggccttcttagaggaggttggccgcgcgggaccgaggacgggacaggcgctctcttggggccgctcgcttccctcacccgcgtggacgcttgtaaccccctactgcaagcgcacccgacctgggcgcgggacgaacacgaaggccgcgggacttccacctctctcacgctcggctccggccacctcgcctctccccccttcgcgctcgcccacgcgctcgacccatctgggctggggcacgcagcacactcactcgtcggcttagggacccccctgtctcgaaacgccgacaatatttaa

SEQ ID NO: 9908 - DNA, 639 bp, Zea mays
  Peptide Sequence Number=SeqID_53283
atggggccgacgtcggggctgggcgcgacaagtagtgcgggggcgcggcgaccatggaaagccagggaccgtggagggagccacttggctagggggaagaagctgcgcgagagggagaaggagaagaaagacagcggtaggatttttctcttctgccaggaacaggggttgacgaccctggagtctcaccctctgcagccgggacggcgttcccttgactccaagactatcgggttcagggcggacgacaccaccaaggccgcaacactaaaagccctgacaatcttctgcggatatcatcccctggagatgatgatgcacccaatgggactcttccccaccgagaagagggatgaccccatgtggtgcaaccgacacatcgcgaccctagagcagcaggtggagatctgggataacactatcgatatcctagagatccagctccatgatgtgcagaaggaacttgaggaagccaacaaccacctggagatgcaccaccaatacatggaggcaaacgaggcttgcagcgagggagaggaggatcccgaagaattagagccagctcccggtccgaatgcgactccctccagagtgcccccttcacctgcatccagcgttgcctctacaactcagggttga

SEQ ID NO: 9909 - DNA, 777 bp, Zea mays
  Peptide Sequence Number=SeqID_53284
atggagactatccatctggagcttgacgagaagctgttcgtcaacacgcaacaggcccctacctggcgcgccaactgtcggcgtttcgaccctgggggtccctggaccgacgaggcggatgcgcttgcagtagggggttacaagcgttcgcgagggagagagagagcctgttcgtcagctcgtcctcccgcgcggccgcccctttcgtacgagggccctggaccttccttttatagatgtaaggagagggtccagggtaatgatgatccccctgtggcgcggtcggtccgagcccaaggacgggcgaggcggagaccaccttccgaggtcgaggtcgaggccgagcctcggggtcgggcgaggcggagtccaccttccgaggtcgaggtcgaggccgagccctggggtcgggcgaggcggagtccaccttctgaggccgaggcgggggtcgagcccctggggtcgggcgaggcggagcttcctgtggcgcctgaggcgggacttagttgttgtcagcctcaccctggcgggtggcacaacagtcggagcagggcaggcggcgctgttttcttgtcaggtcagtcagtgaagaggcgaagtgactgcggtcacttcggtcgactgaggaacgcgcgtcaggataaggtgtcaggcgatccttgctttgaatgctcctgcgatacggtcggttggctaggcgatctagccaaggttgcttcactgcgaaacctgtccgagctgggcctcgggcgagtcgaaggtgcgcccgttgcttga

SEQ ID NO: 9910 - DNA, 1116 bp, Zea mays
  Peptide Sequence Number=SeqID_53285
atgaagctgtcgccgtcgaagaaggcaagaagaagaacaagtccttgctgcgagctcgaaacccacatcggcgtcggcgacaaggtgctggccgagttcatcaccgagctcggccgcgactccaaaaccgtccccgagttcgacgccaagctcaaggagaagggcgccgacttccccgactacttcgtccgtacgctcctcaccatcatccacgccatcctccagcctactgcttccaaccctagctctgccaccgtcgccgagggctctactggcgcggagtcggccaaattccccgggctcgcccgccccgacgaccccgaccatgcccgcaacctccgccttgagctcgagcgggatgctgatgcggcccctcctgctccgatgagggacgaccgcgaccgccgctgggatgggagagttctgttttctttatcagaaggtattcattacgcactacaattcctttgtatttatctaccgggaaatgcaatcagtcgtgtagagaatggggctcccattcttaaaaggaagtcagtggagggtggttctggaagtaagaggttaaagggtcttggtattggttctcctgatggtcctgtttcactagatgatgtccgaagactagaaaaatctaatgttgatctcagggaacaacttgaggcacatgttgtgacaattgagactttgagggctgaaataaaaacagcccaagtgcagcatggaaagagattgcaggaagttgggaaatatatcaccttagacaaatttgataaaacggctcgcccatttgcaatactagctgaagattttcctccaactgctcctcaacccttgcatgttcgcttctgcaaagatattgaattacaaggaggaaaactgcctggcagaggtggtggcgacggggagcaaccactgtcgaggatcgccatggagagggtcgtcgatgacgcagcacatcaaggtcccatccctctccctatctcacactcatgcttctactcgacccctcgatgccccaacgatccctctctgccccttcgcccaagcggccagctgcggctcctcaccgaacgccaacagcccccaacggttgtattttcatcccagcagtag

SEQ ID NO: 9911 - DNA, 717 bp, Zea mays
  Peptide Sequence Number=SeqID_53286
atggacaaaaggctagtttttggcatgattgttggctttctgggaaagcaccgatcggacttggctccaggtctatatcctctagcttggcgaaagaacaaatcagtgcctgagcaattaactaatctcagctggactagagggctgtggaggtatggaggatggaaaacacacaacagtttactgaattcatctatctctggaaccttcttgagggcgttcaactcaatgatcaactggacgatatccagtggatttggactgacaatggcgcctactcctccaaatcagcttatcttgcgcagtttaaagggtctttctgtaccttcagagcaaagtcaaggctccgtccactcaagtgacacgatctcgcctcgcccgagcccagcctcgggcaggaacagtagacccaggcggattcacgcctcgcccgagggcctcctcaagcaacgggcgcaccttcgactcgcccgaggcccagctcggacaggtttcgcagtgaagcaaccttggctagatcgcctagccaaccgaccgtatcgcaggagcattcaaagcaaggatcgcctgacaccttatcctgacgcgcgttcctcagtcgaccgaagtgaccgcagtcacttcgcctcttcactgactgacctgacaagaaaacagcgccgcctgccctgctccgactgttgtgccacccgccagggtgaggctgacaacaactaa

SEQ ID NO: 9912 - DNA, 564 bp, Zea mays
  Peptide Sequence Number=SeqID_53287
aggattgggatgcttcatgtcggctatctgaaccgcttcaccaagcgtgagtcgcctcgtgcaaaggtgacgagtgagagcctggccgggtcgttcactggcaggaccgacgccggagttgagttgccgaggccacaagctgggccgatgccctcgggggacagctggctgaggcttcgggatcctccgaccgcgtcgccgtccgaggctaggccggacctcgccgaaggtgtagttgacgccgagggtgctgctgctcccttcaactgtcaagatccgagcctgcagggtcggggttctgtcaccgacgcagtcgagaaggcccaaaaaattgtttcggcagaggagctttcgagcgtgaagacctgttcggtccgcggaatcacctatccgagcgcgagttacttatcgcagaaggtgatgagtgagccgaagcaccaggtcgcccacctggaggtctcaggaccgaacccctcgagcgtggtagcgtcgcagggactgctggccctcgtcctcggggaaccgtattctaagtctgtgggcaagatggcctcggccccatag

SEQ ID NO: 9913 - DNA, 678 bp, Zea mays
  Peptide Sequence Number=SeqID_53288
atgggcaccgaacatggtgtctccggtgagctgcaagcgggtaatccgagtggacgtccgtgccccgttcgttgggggtcggctaggggcgcagaggcacgccccaaaaagtacctgcggcaactggcgcgctggttgcgtgacgcgtgggcctgggcctccaagctggcgtgtcagaagtcggagaagcgcgtccacctggcgcggttgcatgccgcctgcatggctgcccgccccttccgcccgttggtctgggcaaaagtggggggtcgcttgggagggccttggagcgtgttggagaagactcagcccgtggcgtttgggggcgcacgtagggagagttgccttcaaaaaggagggagacccctttcggaaggcgaccatgtcttcttcctcccttatgcgccgtgtctttccatcttccaagcccccggatggggggtatccgccgtcttcccacctcctcgttggaggaacgcaactccgtgggagttggtacctttcagccatcgttcggcttcaaggattttcatcacgcagcctggccgcacccctcgaccggtggtcacccaagatggtgacctccagttcgacggtggggagagcgagccaggctgcggcctctacctgtccctcggcctcaaggattttcgtcatccaggccaagatggaggatga

SEQ ID NO: 9914 - DNA, 198 bp, Zea mays
  Peptide Sequence Number=SeqID_53289
atgatctactatgatcagtatgatagctcctacatagaggtcaactgtcgagtattttttttcagtgaatttgtacgggtgattgtaagagtgaacggaacagagcgtgactgtgagagcgggatgggaacagagcggctccgtcccgttgattttttggagcggaatggttccggatctgaggagaatattccctaa

SEQ ID NO: 9915 - DNA, 987 bp, Zea mays
  Peptide Sequence Number=SeqID_53290
atggcgcttcctgttgacgtggcgggcctgtgccctaggcagggcgacatgggggctcctccgaagccgaggtcgagtctgtcttccgttgccgaggccgagcccgagcccccgggtcgggcgaggcggagatcgtttggccgaggccagggcggagtccgagccctggggtcgggcgaggcggagtttcgtcgtcttccgggtcttagcccgagtccgagccctggggtcgggcggagcggagttcgccgtcttccgggtcttagcccgagtccgagccctggggtcgggcggagcggagttcgccgtcttccgggtcttagcccgagtccgagccctgggtcgggcggagcggagtccgccgtcttccgggtcttagcccgagtccgagccctggggtcgggcggagcggagttcgccgtcttccgggtcttagcccgagtccgagccctggggtcgggtggagcggagttcgccgtcttccgggtcttagcccgagtccgagccctggggtcgggcggagcggagttcgccgtcttccgggtcttagcccgagtccgagccctggggtcgggcggagcggagttcgccgtcttccgggcggcgctatccttctgtcagactggtcagtggagcggtggagtgacggcggtcacttcggctctgccggggggcgcgtgtcaggataaagggttgcttctgagcgaagccaaggcctcgggcgagccggagctttatgctgatgggggttaccagctgagaattaggcgtcttgaggatgacaactcaattaaaggactaacaagtatgctaagtgttgaacaggtgcttaatgcaaagctaacaaagttcaacacaaagacaaccgatcaagccaaggatggaggcaagaagagcttcgaggtaccgagtgcacgggagaaggtcaaggagaccaggaatccaaaagccaggggtgaagaagaagacttgcaaagtcaaggttaa

SEQ ID NO: 9916 - DNA, 1275 bp, Zea mays
  Peptide Sequence Number=SeqID_53291
atgattaccacccacctctccccagccctcaagcaccgctccccgtccccgctccactccacctaccactcccaccaccacctccccgtgcacctcccgctccccctcccccgccgccactgccacctcgctaagcccgccgccgccgcctcgccagaccttctcgcgagcatcgagtccgtggcctccgcggcctccgtgctggccgccatcgtgctggtccacgagtcgggccacttcctcgccgcggcgtcccggggcatccacgtctcccagttctccatcggcttcggcccggcgctggcccgcttccgcctcggcgccgtcgagtgcacgctccgcgccatcccgctcggcggctacgtgggcttccccgacgacgacccggagtccggcttcgcgcccgacgaccccgacctcctccgcaaccgccccgtcccggaccgcctgctcgtcgtctccgctggcgtcgccgccaacctcgccttcgccttcctcgtcgtgtacgcgcaggcgctcaccgtcggcgtgcccgtccaggcgcggctccccggggtgctggtgcccgaggtcctcccgggctccgccgccgcgcgcgcgggcctcctccccggggacgtcatcctcgccgcccccggcgccgcgccggacccgtccgtgcccgtcctcgtcgacctcatgaaggcgagccccggcaggaaggtgcccctcaccgtcttcagagccgcgcccgggaagctggagccggacccgcggcccgtcgagctcaccgtcgtgccggacaccagtgccgacggcacgggccgcatcggcgtgcagctctcccccaacgtccgggtcacgcgcgtgcgccccgagaacctggccgacgccaccgtcctagccgcgcgcgagttcgcgctcctgaccgtcaccgtgttcgacgggctcaggcagacactgctcaacttctctcagtcggccgacaaggtgtccggccctgtcgccatcatcgcggtgggagcggaggttgccaggtccagcgctgacggcctgtttcagtttgcggcggtgatcaacctcaaccttgcggccataaacttgttacccttaccagcgttggacggtggcacgctggcattgatccttctcgaggcagctcgtggtggccgcaagattccgcgagaagttgaacaggggatcatgtcatcagggatattggtggtgctcatggttggcatgttcctcatcgtgcgtgacacactcaaccttgatttcatcaaggagatgttgtga

SEQ ID NO: 9917 - DNA, 606 bp, Zea mays
  Peptide Sequence Number=SeqID_53292
atggcgtgcatgatgaggtggtcgccaccgctggggaggctgcccggcgcagaggtggttgccaccggtggcaagccgacggtgcagaggtggtcgcctccgctgatgtggccgccgctgctggcgagccgttggtgcagaggtggtcgcctccgctggcaagccactcgaagcagaggtggtcgacgccgctggcgagccgtcggtgcagaggtggccgtcgctgctggcgagccgcttggagctagctacccatgcgaccctactggtgtggaggtagttcatacctatagagtagacatggagctagggctccgcttgaaggcggatgtaatacttttgctttttgtaaggacttatagctccaagtactacggtacccgtcatggagtggtggagtgtgcaggcttttgggtacgggaccaggctaagcggccatacaggctccggaccaccccatggaacgggctcccattctttagaaccggcccccaggctgtcgggccctcctgctttcgcagagaggtcctaaactgcaaacctggctgttcaattcggatgtcatcatgtctgatgggatgggaactgcttggatgggttagataa

SEQ ID NO: 9918 - DNA, 333 bp, Zea mays
  Peptide Sequence Number=SeqID_53293
atggctacaacacgaggacgaggactccgtcatcaaacgcagatgggaaaccagggtcgggacctagtcctatggcaagtaccaaaccaagaagggctccacaactctcccccagctacgaaggacccttcaagcacgctccttgtgaaacacgtcagcgagcggcgcgagcagtcttccaaggatggctcccaacctcatcgccgaccaggcaaggaaagggtcgacgacggcgaggtggccgcagctgaacgggacattgggtatcagtcacccgagggggacctgaaggatgtcttcgccgaagactcctactccggtggcgacaactag

SEQ ID NO: 9919 - DNA, 615 bp, Zea mays
  Peptide Sequence Number=SeqID_53294
atgaagggtccttgcaccccaacatgctgcactcttctctgtgcttccttcttctgcttcttgttggctggctctaaacttggaccgcccgtgattgggagcaccagcttcgtagccgaaggtgctacgactttgttgttgaacgaagccatcagctcaacagtggaaatggctcgtcttagacacactgcacgaaagtctgtcatccccttcttgccctctcgtctcgctgagcgttcgcttcgccgtccagtgactggtcagtctagccatttggagaggctacaccaccgcctacacgaggagcaggagcatcgacgacaggagctggagcagcagggctcttctttctcgcttcagcaagagatagagtctgtcaggagctgctcccctgtgcttccgctggaggcgcaccctgcaccaccactgagtgccccagccactggagtagctgttggaggagacccagatgatggaggtggcgatagcagctcgagcttcagcaccgacctttcagccgaccaggagccggaaggatgggtcgctcgacccatcactcacgacaccgctcgcgggtatcacttccacgacgcgctcgacaccctgctgcactag

SEQ ID NO: 9920 - DNA, 897 bp, Zea mays
  Peptide Sequence Number=SeqID_53295
atggggatgatccgcaagattaatctaatgggtgtgcccctgcaggtagaagatcttctctttaacattgacaagaaaaagcaaagaaagagaggatgcttcgcatgcatggagaagggccactttagggacagctgtccaactatggtcgaacccaaaaaggggaggagcaaaggcgaggcgctaaccagtgtcaaaacttgggatgattcttcaagcgaagatgaacctccaaggacgcgcagccaccagtcctcatcacgctcatcacagtcatcacgcaagtgccttatggcaagaggaaaaatggaaattcttagcatacacaataatgagcaaactactaagctagaaagcattggtagcaccctaggggcatctttagttgaaattcctgaaattattaagaaagatgcttctacgttttgctttgatttaattgataattctaacccctgcaatcaagttcttgttaagaatgttgttatagaaacatgttcgaacgagattgcaatggagaatgagcaattaaagcaagaggtggctcgccttgggaaggctttgtatgacaagaaaggcaaagacaaacaaatccaacctccacaggataacaccactgcgggagtgaacaagcctgtggagggcgaaattgtgatttataggttatgccacaaggaaggccataagtctttccaatgcaaggcaaagactggggataagaaaaaccaaaagctcaagcaaaagccaataagcaaaatatccaacgcctacatcagcaaggtggacaaaatggctgctacaccatatcaaaaagaaaaagaatggaaaggtgatagcaatcaagaccaacaagcaagccaacaaaggaaagggggccaaacgcatctgggtgcctaa

SEQ ID NO: 9921 - DNA, 258 bp, Zea mays
  Peptide Sequence Number=SeqID_53296
atggccctagtttctagagaggagcaggtggagagccttgggagtgaaaatctagcgcttgtggcctgccgattcacgtccaacgatggatgctacaactatggcaacctcgaccacttcatcacaagtttccctaagaagcgcaagtcggagaccgacaagtgcgaccaccacataggtcggtgtaaggccaagaaggagtacacctttgacaagcgcaagtctaaggggatgtttgacaagaagacgctcaagtag

SEQ ID NO: 9922 - DNA, 1686 bp, Zea mays
  Peptide Sequence Number=SeqID_53297
atggcaaggtcatgttgtctgcagcaacttccagcttgccgctgcgggcaaggttgcctccaaaagccagatactttagcatttgcctgcccttgctacttgaacaggataattgccacagtttgtatgttcttggctgggaaagttgaagaaacacctagacctttgaaggatgttatcctggtatcttacgagcttattcataagaaggattctacagctggccagagaatcaagcagcagaaggaaatatatgataaacaaaaagaacttattttactcggggagcgaattgtacttgtaacacttgggtttgacctgaatattgaccatgcttacaagcccttggttgaagcaataaggagattcaatgttggtagtaaaagttcgcttcctcaggttgcctggaattttgtaaatgatggactgcgtacttcgctttgcctgcaattcgagcctcatcatattgcagcaggtgctatctttttggctgctaaatttctcaaagtgaagcttccatctgatggtgataaggtttggtggcaggattttgatgtcacaccacggcagcttgaagaagttagcagtcaaatgatggagctgtatgttcagaaccgtacaccacaggcacaacaatcacagggaagcgaagctgaggggagctctgctggtgtgcgtaatcaacattcatctgtaaaatctgaaggaaactccaaggaaccatctgctcatggatatcatccggcattcaaaccgtcgaatttgcatcattcatccttggcaggtgctccaggtgaccatgacagtgggcattcaaattcagacaagcatgtttctggccacaaaatgcttcaaaatgataatggtaaccatgtcggtagcaaagaaaagaacaagagtggaggtaaatcggatgctggtatggatagattttgtcatgagaaatccccacctggacatcattattccaaggtcagccatgagtctcataatccagtggaagaacaaaaaccacatcaatcacatgataaccccaatgaaagaatagatggcattcttggtggcaacgaagttcctggtgtgtcgacctccaggatcgatgcaatgaataaaattgacaagggtaaggtaaaagcagctttggagaagcgaagaaaaacaaaaggtgatattaccacaaaggtagacgtgatggatgatgatgatctacttgagagagagcttgaacatggtgttgaattggctattgaggatgagaagattaagcaggataagatgcagaacttgtcccatattaaggacaagaagattacgcaggataatatgcagaacttgtcccatattaaggacgagcaggataacatgcagaacttgtccgacattaaggatgagaagattaagcaggatgagaggcagaacatgtcccatgctccagtggatcttcaaaccactgaccaagtaatggagaatggtcaccatgtcgagcctagtgtaccaacaactgtggaagacacggggtttccattggacaacaaagaacatcctccatttgataagcaaaatgatgttcctgagcacgagtcccagcagcttgaacacacattgaagcacgacctccctcagctggtaggggggcctgagcaggatgatggaacagactgtaaaaggcctaagctcgaagagtag

SEQ ID NO: 9923 - DNA, 198 bp, Zea mays
  Peptide Sequence Number=SeqID_53298
atgggtgatagcgacaaggacacaaacgatggctccacctccaaggtatcactttccatcaataatctcgccgctgagaggaaagagtacaagaccaagtatgagagcacacttagggagcttgagtctactaaagtttatgtcatggtgtccgatgagactgaatgtgatgagtgtgctcttcacatgtggaactga

SEQ ID NO: 9924 - DNA, 474 bp, Zea mays
  Peptide Sequence Number=SeqID_53299
atggaggccaacgaggatgtcgacattgagggaggagaggagcctacctccagcttggacactgctggctcagggagacccccttcccctgagtcgagtgttgcctcacagaaacctactctgcaggagctactggctcagcagaatgagatcttgaggcagctagctcagcgtcagccaccacctcagcactatggtggtggtgatcatcagcgacaccccgcagcagccacctaccaggagttcctcagtacccagccaccattgttcaccagggtagaggacccacttgatgcggacgtattattgagagtagtggaattcaaattctcgctaattcctggaagttgctcagaggtcactaaagtccgattcaccaccccaacagcttcccggacccgccagggcttggtgggaacattttttcttctatgcagcccgaagaccgaaaggtgggatgggaaagaggtctaa

SEQ ID NO: 9925 - DNA, 588 bp, Zea mays
  Peptide Sequence Number=SeqID_53300
atggcgcaccggacagtccggtgcacaccggacagtccggtgcccctgccacgtcatcactgccgttggattctagccgttggagcttctgacttgtgggcccgcctgagtgtccggtgcacaccggacatgtactgtttgatgtccggtgcaccggaccttcggaagacgaaggcccccaacagttacaagtacgttacacttctcagtattcccgtgtctgtatacccatacacaatcatgtgctgtcacaacccaaccaaattatcggtcccatgtacaccaatccttgcccttaaggcctcagatggatatgtgagcctaatagaagtcaaacgtgtcaagaacctccattgcaacaacatagggaataaaatcctgagtagacaattactcagcaagactgacccgactaaagaaaaaactcttaagggtatgctagccaatatgggaattaagatgacaatacacacagggtcatgccatgctgatcaacatgtcgatgcaagattcaccagagtccaacaaatcaaagtggcaggacacaacaagacaatagagatggaacgagatcagcaaatgggttga

SEQ ID NO: 9926 - DNA, 402 bp, Zea mays
  Peptide Sequence Number=SeqID_53301
atggcgactgcggagaaccgagctccggcgaagtcggctgaggctcctagcacagtagagcttaatccgagagtacgaacagatgcaactgatcccactcaaactacatgtgaagatatagatgagctcagtttctttgtgagacatcttggcgagggtgagctgagtgagaaggaagctttggagctggatcacaagggcgagtccatggtgtacggacctggagctatgctcttcggcggtggagataaaatgcttatgtgcgtgcctaatcctgatgagtcaagaattaagatcttctcctcaaatggtgtgactttgagggcaatctcatacacccccggagacatcgagggagcacctggttggatggagaaggaattggctgaagttgaatactaa

SEQ ID NO: 9927 - DNA, 660 bp, Zea mays
  Peptide Sequence Number=SeqID_53302
atggccgagacattggtgttgtgctgtcggacgcaggcgcttgcgttggttgcattgatcctgctggcgctggtgcaggggtggccacttgaaggcgtggtggtgcacactggtgtcgtggtaacgtcgctgcagcatattgcagaaataccatatgaaaatcaacttatacttcggaccaaaggaattgatcatggcacagtgacatatttagacaaaattgatttcctgaggagtaatttactggctgcccattctgtttggttgaatgtacctgagataggctttttttcaaaggctggtgttaaggtttctcactgtcctgcatctgccatgcgtatgttggggtttgctcctattagagaaatgctggattctggtgtttgtgtctcccttggtacagatggagcaccgagcaataatagaatgagcattgtggatgagatgtacttagcgtccctaattaacaaaggtcgtgaggcatatatcagtggaacaacaaacccaactgctcttcccgctgagacggtgctgaagatggctactattaatggtgcaaaagcagttctgtgggacaatgaaataggttcgctggaggttggcaaaaagaggttgataaatcttattttcttcattgtaaagccattgaaagtagcctag

SEQ ID NO: 9928 - DNA, 69 bp, Zea mays
  Peptide Sequence Number=SeqID_53303
atggcgggtgacgaagctcgaagtcatcttaagccgatgaatattgggacacatgttcaaaaaccataa

SEQ ID NO: 9929 - DNA, 219 bp, Zea mays
  Peptide Sequence Number=SeqID_53304
atgaagctgaaaagaaagaatattgtagcaactatcaagcttcaggtcgtcatacttcagctttgtcatacttcagcttcgtcatacttcagcttcgtcatcctacccagccttcagaaaagcggtagatgtgccccgagaagctaccaggacgcagaagtcggcatggccaccaataacttcgtcaagagcatcaacctcgccttcaatatattctaa

SEQ ID NO: 9930 - DNA, 735 bp, Zea mays
  Peptide Sequence Number=SeqID_53305
atggagtctgacatcagattcgtcgggcgggatttagtggcggccggcgccaccgtcgtgtccgtcattctcgtcaacccctcaaagtcgctaagctacctcccgcgcaccgcgccgctctcccccgctgaccggtcggccccacccgtcagcccgcaccccctcgccctctcgcgatctctctctggcgagcgggccccgcccgtcagcgccttcctcgcgtctgtgaccggggctagcgacacgatcgccgccggccactgcccgccccgtcgcctcgccattatcgcgttcaccagctcagtttggcgccttgcgtctgccagagccatcccatcgcccgtctgcccgatccatcccgtcgtcaccactgcaccctcggccaaattggccctcacatatccctacctcgcccgtgctcgctaccactcccccattgcgactagacccgcggagaccacgtgggctcacgcgtcgagccaggccgccgaaggcaaagaggccaacactcgtgaagcctaccgaaccctgaagatggattacgataagaagctgaagaagctcgcccccacgaaggaaatccaaaagaagaccaagagccaaggatgccagactgagcggaagaagaaagcccctccagctccacctctcttcaggatagagaaattgtccgacgtcgaggatatgtccctgactagcttgatgaccttctcaaggaatttggggacaccttag

SEQ ID NO: 9931 - DNA, 879 bp, Zea mays
  Peptide Sequence Number=SeqID_53306
atggcgggcaccatgtcccagcgactgagggaggcatcgcagcggctgtcgcagcagctgtcgcagcagctaagtcaagaaagtagggaggcgaaccaggccatcgctgaggcgcaggctgtgcaggcggaggccaaggtggcgcgggcggagggaagtctcgccagccaacgcaccgaggagtgggaggcaaggttcaacgccctgcgcggccgcatggacaaggccgaggcctctatgcgctcggaggttgagcggacgctcgcacagttcgtggactcgtaccgcgagttgggtgcgtggactgctgacttcgaggtgcccgaccgggaggcgggcctttgcttccttgaatggttgcaggaggagttgctggtactcccgattatcgtcgagggtttcatgtcctttgcctccctcgtcacctgcgagggggccattaatgcgttgtcccgtgagggctgcagacactatgaggttttcgaccaatcagacgagagctttgaacgcgagatcttcaaggccgaagaccctgttgtgaagcagtcagcgagggcactttttgataggatgtggggggcgcatggtcgggaggctgtcagggagcaatccgaccgggcaagagagcagatggagcgtgccgaggacgtcgaggaccttggaggtctcgtcggcgcaccgcccaaggctgcggaggtcaatccggtgctgccctcagatgccggtgaaggcccctcgaccgtgcccgtgcctgctatggccggcaaagaccctgtgtcgacccctgcaccgacggtcgaaggtgctctgaaggtggcggccgagccgacagttgaagaccccaaggccgcggccgggccttcgcaggtggctaagtag

SEQ ID NO: 9932 - DNA, 102 bp, Zea mays
  Peptide Sequence Number=SeqID_53307
atggggaagcctgtcccatcactcctcatgctcctcctctgtcgaggcctcaccgccttggcatacaatgctccactgaccccggctgccgccgtgcagtga

SEQ ID NO: 9933 - DNA, 713 bp, Zea mays
  Peptide Sequence Number=SeqID_53308
ccacttggagaggctgcaccaccgcctacatgaggagttgctcccctgtgctccccctggaggcgccccctgcaccaccactgagcgccccagcccttggagtagctgctggaggagacccagacgacggaggtggcaacagcagctcgagccacgacaccgacttttctgctgacctggagccgaaaggatgggttgctcgacccatcactcgcgacgctgctcgcgggtgtcacttccacgatgcactcgacaccctgctacgtcgggcacttgactggaagcactattccatctctgagcgggactcagctgaggcggtcatgcaagatgccgcacggcgtgcgctttcgcactactgctcagtgttcggtggggtagccgatggtctcaacctgaagtattacccctgtcgtccatctggtagcacaggaggcatgattgtttcacctgtcggtgaggacaatcctaggttgagcagcacagtcaacctagccgccgtgctaaacatggagctggatcatgcattagacgagctgggtagggctcgtgctgagatcgccctgctgtgggctgagcgcgcggaacgtcatcacctgggtgatggttcccccgctcccgtcgggactcagcacccgtaccgctcacctcggcgtggacaccagtcttatggcaatcccgactgcaagaccaagataaatttagaaccatag

SEQ ID NO: 9934 - DNA, 1389 bp, Zea mays
  Peptide Sequence Number=SeqID_53309
atggggcagtgctacgcgaggaacgtgcacggcgtcgacgcggacgacggtggcatggaggcgaccaccatcatggtctcagcggcaggcgggccggaggatgcggggtcagtagggggagggcaaggaggcgaagggaggcggagcgcgcggccgtcgccggccgggaagccgcgcgggggcagggccggggcgactccggagcggttgtcgacggcgggtagcccctggacggggagcccactcgacctccccgacggcatcgcgccgtcgcccgcgacctcggtgtccacgccgcgccggttcttccgccgccccttcgcgccgccttccccggccaagcacatcaaggcgtccctcgcgcgccggctcgaccatcgctcgccgccctccgcgtcgcaggttcccaggccgcctgtcgaggtcccgatcccggagcaaggggccagcggcgctggggaggtggagcgggagcttgacaagagcttcggctacgaccgccacttcgccgccaagtacgagctggggaaggaggtgggccgcggccatttcggccacacctgcctcgcgtgcccctgcaagggagacatgagaggccaggtcatggctgtcaagggtgatcagtttttttttccgatggtattggcattggcattggcatttccccgcaggatgacaacgacaatatctattgaggatgtgcgcaaagaggtgaaaatttttgaaggcgttatctggacattccaatcttgttcaagttttatgatgcttgtgaggacgccctttaatgtctacataatcatggagctttgtgaaggtggagaactattggatagaatcttgtccagaggtggaagatacaatgaaggggatgcaaaaattattgttgaacagatattaaaagtagttgccttttgccatcttcagggtgttgttcaccgtgatctgaagccagagggtgatcagggggtaaatgccacacagtggctgcataacgaacctgtacttgttactgtaagtggtgatagcagtgttggaatgtgggacgttactttaggtcaaccttgtgtcagacatatcgttgcccatactcgatgtgctaatgcggttgctgtggcccctaatgacaaatacctctgcacaggaggaagcgatcagaaagttgctgtggcccctaatgacaaatacctctgcataggaggaagcgatcagaaagttgtgagttgcttatttgtccttttagtttcttatgtggcttatgttatgtcgtactggaaaaggttttatatcataacagaagtgggcgtacacatcttaattggcgtctttcacatcctctgcaaggaaatgattgatatgctgccagaaatcatagaattgttccgctaa

SEQ ID NO: 9935 - DNA, 222 bp, Zea mays
  Peptide Sequence Number=SeqID_53310
atggcgcgcggcgtccccaggcgcgacttcccttcccctgttctcggccgacggcgagagcttccctgcgcgtccatgcagcgcggcacgcagcgagtgcagccctcggctcgcggccaacgcggcgcgcagtcgcccgagcttgtccttgcccatgcgttcttccggtgcggagcccgctccagcgccccctccctgcacgagctcgcttttgctccatag

SEQ ID NO: 9936 - DNA, 222 bp, Zea mays
  Peptide Sequence Number=SeqID_53311
atggcgcgcggcgtccccaggtgcgacttcccttcccctgttctcggccgacggcgagagcttccctgcgcgtccatgcagcgcggcacgcagcgagtgcagccctcggctcgcggccagcgcggcgcgcagtcgcccgagcttgtccttgcccatgcgttcttccggtgcggagcccgctccagcgccccctccctgcacgagctcgcttttgctccatag

SEQ ID NO: 9937 - DNA, 222 bp, Zea mays
  Peptide Sequence Number=SeqID_53312
atggggaagcctgtcccatcactcctcgtgctcctcctcagccgagtgaccgcacttgttcccaccataaccggaatgggagaccacgtctcaggtcgcgtgaggggtaaagtccactgcccaggttcaatcaggtatccgcacgttaatcctttattccaattccatcctgtagcccacgcatccccatggatccgtgtctaccgaccattatcagtatga

SEQ ID NO: 9938 - DNA, 420 bp, Zea mays
  Peptide Sequence Number=SeqID_53313
atgacgggatctgggagtggcctcctgcaccagcctgtccttggcgagagatccggtggcggcaggggctgcggcaggctcaatgatctcatattagaagctataaggaagcttaaggagccttctaggtccagtaaggcagccattgctgcatacattgaggaccaatactggccacctgctgattttcagcgcctgctatctacaaaattgaaggcattggttaattccggaaaattaatcaagcatcaagtgattgctgagccggagaagatgaaaggcatgaccaaggaagagacagctgcctttgctgccaaggcagttgctgaggtagaagtagcaatagcagaagctgaggaagcagcaagagttgcagaggctgcagaaaatgatgctgaagctgcaaaggctttttcttga

SEQ ID NO: 9939 - DNA, 240 bp, Zea mays
  Peptide Sequence Number=SeqID_53314
atggcgcatggtgctgggcgaactgtggtggcgaggtcgactggggtgctcctcggcactgttggctatgctggcgcgtcgggtcgcgccataatccagcacacggtgaagaagacgactcatctgccatcgatccctaggtgggcggccatgattgacgagcaagtcacagaggattcggaggttcagctggtagagactgttgagcaggagctcgttgaaggcaagttgtgcccttga

SEQ ID NO: 9940 - DNA, 237 bp, Zea mays
  Peptide Sequence Number=SeqID_53315
atgaaaacattcctggaccgtctagagatgagcaggagaacactgaatcggcaccactctactcttctgaatgttggttttcaaaccagtagcatctccaaaaagatccaaaatctgagcaacaatattaaggtcactagtgatggaataagtcttgagcatctagaggacagcctgcttttgactgtcctctgtagtcctttagcatctagaggacagcttgactgtcctctgtag

SEQ ID NO: 9941 - DNA, 612 bp, Zea mays
  Peptide Sequence Number=SeqID_53316
atgggtctcatgtcttttgcctcgctcatcacctgtgaaggcactgcgaatgccttttcctgcgaggggtgcaggcacatcgaagtgttcgaccgatccaacgaggacttcgatcgtgagatcttccaggttgaagacgaggtgttaaagcggtccgctggggcgctttacgacaggatgtggggcccgcacggccgcgatactgttcgggagaggtcagaccgggcgcttgagcagatggcgaatgatgaagaagtcaacgactttggaggcccggagagctcggttacccaggttccgatgtctgggcctgcgcaagcaacccctactgatactaattttgtggtgatcgcaaacgcagtgcctgctaatgatagtttgtctggttttgaatctgggtcttggtcatctgatggtggtgagtttgggagcccgttttcctggactgagtcttcggatgaagatttggattattttcctgtgttagatgtggctgcggtggagtcctcgccgcggccggaggtgtgcgaagcgtttgatcccccggctggtgtgaggaccgaacgtcgacgacaaaaagtagtgtcgaagcatagcgttggcgagatgtag

SEQ ID NO: 9942 - DNA, 1119 bp, Zea mays
  Peptide Sequence Number=SeqID_53317
atggcggcggaaagaacagggtgggcagtttccttttctctggctaaatctctcaggttgcgaaaacctaagaagggagccagaagcgaagcaaagaaccgtcgccagaccctcccccgagtatataaggaccaaggcgagactcgttcaacgttccacccggacctgccgcgggattcaaaaactcaaagcgaaacggccgttcctcgaacggctcgcgcacgcgcaacagccgccccgcgaaccactcgccccgtcgcattaacttcgcggtgggacaggcggcgcctctggcaggggaagcgagcgacgcttcgccttcgccataatgaccgcgtcaaaaaaaagccgcctcagagcgcgtgggctccacacccactactggtcagaggttcgaaggccggcccctcgaaagggttcaacggccgcctcaggccactcgggctccgcgcccactactggtcaggggttcgaaggctggccctcgaagggttcacagccgcctcagacatagagcgagggatgaccctggaaggacggcgccgcctgcgccgctccgactgctgtgccactcgacagagtgaggccgacaggcagtcaggcccgacctcaggcaccataggaagctccgcttcgcccgacccagggctcggacttgggctcggccccggaagacggcgaactccgctctgcccgacccagggctcggacttgggctcggccccggaagacggcgaactccgcttcgcccgacccagggctcggacttgggctcagccccggaagacggcgaactccgctccgcccgacccagggctcggacttgggctcagccccggaagacggcgaactccgctccgcccgacccagggctcggactcgggctcaaccccggaagacgacgaactccgcttcgcccgaccccagggctcggactcgacctcggccacggaagacagactcgacctcgacctcggaggagcctccatatcgcccaacctagggcgcggaccgaccacgtcaacaggaggcgccatcattaccctaccccaagctgactcaggctacggggaacaagaccgacgtcccatctggctcgctccgccagataagcaatga

SEQ ID NO: 9943 - DNA, 417 bp, Zea mays
  Peptide Sequence Number=SeqID_53318
atggtggcatttgttatgactcctatatcctcgctcagggatctaggtacgggcatcatcccatggctttttcctgagggcagaggtaaagaaaaaggtgtcgaggctgatctccaggagttccaagacttcgacgagttcgaggatgaggctagcgacctcccccagtcagctgcttgtggtggctgcgtccgtgggcgggtgagcaggttggggtggaagaacagggcgaaggcagggaagacgaacgagacgtccgacgacggcaaaaacgatgggaggaggcgcctgctcctatgccctctgccgagaatggggtggcggaggcatgaggggagagagaaaaagaaagtagaaatggcgaacgatgtggtggcaactgaggcgaggacccatcattatcatgcggatgtatag

SEQ ID NO: 9944 - DNA, 1401 bp, Zea mays
  Peptide Sequence Number=SeqID_53319
atgttcactctacgccgcgctggagctctgccaagccgctgtcgtgacattttccgtccgttccgagcgctcgcctggctgctcgacgcattcgctagcgccaccttcgaccagattgactccgcctaccgcgaggccggaggggaccctttcgtggctgccactccccctcgcgctttcatcgtcgccgtgaaccgctcgctggcgctgacctctcccaagcgcgacacggtggtgcgggtgccgtacaaggtctccatcccgctgggcagggtcaagacagccacaccgggtgggaacaagggccggccggagcagaagtacgtgcaggcttcgagttcttgttcatgggcttcgttaggtaccaggtgtccctgcacgaactggagaaggccatcgagcaggcaaacgttcggggctggatccaccgactcccacgtcccgttcggcgtcctgctctccggtgggctggactcgtcgctggtggctgccgtcgccgttcgccacctcgctgagacagaggccgccaggcgcgggggcaccaagctccactccttctgcgtgggcctggaggggtcccctaacctcaaggcggccaggacacgcacctgccgcagcccctgccgccaccggatctctcgccaaggacaggctgctccccctcacgctttcgtcgtcgtcgtggaccgctcgctggcgctgacctctcccaagcgtgacacggtggtgcgggtgccgtacaaggtctccatcccgctgggcagggtcaagacagccacgccgggtgggaacaaggaccgaccggagcagaagtacgtgcaggcttcgagttctggttcatgggcttcgtcaggaacaaaatttgaccctgtaccagtcagcatccctggaattctcatcacagatgtcagcaaaacggaggatcttatagactactacaattcttccaccataagagattgggctggaagggctacagccttcaaagcaacagcagattttagctttcaagacgctgatgtccttaaacttaaactagacatacttgctcctagcaatctcatatgggctgcatgggcgcctaatggaacggatgaatcaaactatgctgtgaactgccagaatttcttggtggcaaatgcaattgtattgaaggttgccaaagatctgacaaagagagtcctcaatgacgaggcaaactacgacagacaaattgtgaccatatccagcattgatggaaaaataatacgttatgctaggccagatcacccaactagaaaagggagtgatgcatctaccgagtctggatctgaagtggaagatgtaacatctcctactgcatcaaggaacctgattacacatcctattttgacccctgttcacgaggaggcaagtggctaa

SEQ ID NO: 9945 - DNA, 432 bp, Zea mays
  Peptide Sequence Number=SeqID_53320
atggagcatagagaagaagcgggggatacaatagcgggcgcggaggtgggatggatgacgacaggatcatggagcgcggagcagaagcggaggatacaacagcaggtgcggaggcgagctttgcgaggcatgggtggatcaggttgttggcgaggggaggtgacgacgggggcatcgagcgtggaccgtggagcagaaatggaggttgaggcggcgggtgcagaggcgagcgttgcgaggcacgcgagaggccgggggtgcatatggcggattgatttcaagaaaatgaaaggggacatttgtaaaattttgatacaggacggccgtcaaaactggtgctttaagaatagtagagatatagatataataattctctactactttggtttacaagtatatggtgcgccttctttttgttatttcggcggatag

SEQ ID NO: 9946 - DNA, 687 bp, Zea mays
  Peptide Sequence Number=SeqID_53321
atggcgcgacctcggcatgggtgcggcccagcgtggcgtgcgcttccccccgcgcggcttgctcgggccacggcgcggttcagcctcggcgcagcgccctcgctcgcgcttgtcccgtcctccccggcgtgcccgccctcgcccttcccagcgcgctcgtggcggcccggcgtgcccgcccggcacggctctcccgccccagccccctccctacgcagccccgccctggcgacctcggcctacttgtggcgcggccccgacgtgcccgcgcggcacggccgtggtgccccggcccggaccagcctcacccggcgtggccccgacccctgcccttgcccggcgcaagatgatccaacggggagatgtggtgatgctaacagggtttctgcacgtgatggcaatagctctgttcatctagcctctcaagggcactgtgcgggggtatttacagcggccacgcagggcctgttacaatgggccgtgtggtcgtgggcctgcatgctggacgaggtcgcaagatgggacgacctcgtcataggtcttcgtccggtgacgtatgggacgaagggtgagcttgcccgttgtcttgtctccgttggtccaacgattacggcgaaggcatcgagcgaagggtggcgtcttcgccttcgccccaacatttgccctccgagggaccagttcgactaa

SEQ ID NO: 9947 - DNA, 1416 bp, Zea mays
  Peptide Sequence Number=SeqID_53322
gcagataaaggtagccgcgcttgagggtgagaggactgacctccggcgccaactggcggaggaaaggaaggaggctaatgaggcccttgccaaggcgcagtctgcgcaggcggaagccaatttggcgtgggcggagggcagtcttgccaggcagtgcgccgaggagttggaggggcggctcaacgctctgcaggcccgtgtggagagggtcgaggcttcgacgcgctcggagtctgagcggacacgcaaacagcttgtggattcataccatgagctgggcgtgcggactgctgacttcgaagtgccggaccgagagcccggacttcgctgcttcgagtggatacaagaggagttgctggtgctacccaccattgtggaggggtttatgtcctatgcctccctggtcacctgcgagggggcgatgaacgcgctttctcgcgaagggtgctggcactatgaggtcttcgaccaagctgatgaggatttcgagcgcgatatttacaaggttgaggaccctatggtgaaggaatccgcgggagccttctacgaccggatgtggggcccccacggtcgggaggtggtcagggagcgggctgagacggcgaggggtcaggtaatgtttggcttttgtttggtgtttgttgaatgtgggttaaatgtgggtttgctgaatctgtgtgctgtgtctcaggcggcgcgtggcgagaaggtggatgacttcgaggctttgaacagcgtgcagcctgactcggaggcgaacccgatggtggctgcgtccaagaccgccccggagctacccccggaaaccgtcaaaggcgttctcgatgctcccgcaaccactgcggccggcggaggcccgtcgccaactgccgcgccgagggctgaggatcctgtggagatggcggcggagccggcagcggaggatcccgcgacggctgggtcttcgcaggttcaagattttgggcctgcgcacgcaaccgctactactaatttttggcggcttcgaccgtggatgatggtaataaatcggatgagtctgcatctaagtttttctgattttggtgactctgggggctcggttgagtggaccgaagagtcgtcggatgaggacttggactattttgcggccttggatgtggcagcggcggaggcttcgccgcatgctgcggatgctgaagttgtgcctggttcgagtgctgggcgtaggcggcgaagggcggtcgcgaaacgtagagtgagtgaggtggacggtggtcggcttcgtgtgagtagggctggcaggcaggaactactgtccttgccggccactgtgagtgcaggtgagggggagctgcgaagtctttttgcgggtgaggagctgaggataatgctttttaactatagggagatgggaattattccgaaggttcagccgat

SEQ ID NO: 9948 - DNA, 189 bp, Zea mays
  Peptide Sequence Number=SeqID_53323
atggccgggagcgggaaagaagccaccgtccggcctatgcccgagcctaggagtagagcccaaataaaggatgaccactacccggcaaatacccgagaagtacgggtaggatacgggtacccggttagcgggtacccggttcagttcctgcgtgtgtcagtgcctggaacatctcctgtgcaagcctag

SEQ ID NO: 9949 - DNA, 300 bp, Zea mays
  Peptide Sequence Number=SeqID_53324
atggagagtcatgatctccaggcagaaagggaatcacagcttgtgggtggcaatgagaatgatggttgggcattgactatggtaatgcactgtgtgatgatgtttgtgacggaacctcccaagtcattaggcccacctacagttgtccttgtccaacgaacctccgacaaccctgtaggtgcccctgaatcacttgataagttcggtatctgctttccttacctttcccaagagtgtttcacccgtcatgcagacattacaagtatcggagatacgaaaatgcggaagcagttacattaa

SEQ ID NO: 9950 - DNA, 180 bp, Zea mays
  Peptide Sequence Number=SeqID_53325
atggatgcggcccttgttcaagggagaggcttgagggcaatgaaaaagcaggctgcagtatatttgtttccgaagttctcagttttcaaaggaaaaactatccagtattggagaagctttgcttttggggctttggaagttgaaggcaatggggataagaagggcggttctcaaaactga

SEQ ID NO: 9951 - DNA, 768 bp, Zea mays
  Peptide Sequence Number=SeqID_53326
atggctcgtcttagaccccctgcacgaaagtttgtcatccccttcttaccctctcgcctcggggagcgtccgcttcaccgtccagtgaagggtcagcctagccacttggagaggttgcaccactgcctgcagaaggagcaggagcgtcgacgacagggagcaggagcagcagggctcttctttctcgctccagcaggagatagagtctatgaggagctgctccccgtgcttccgctggaggcgccccctgcaccaccactgagcgccccagcccctggagtagctgctggaggagacccagacgacggaggtggcaacgacagctcgagcttcagcaccgacctttccgccgaccaggagctggaaggatgggttgctcgacccatcactcgcgacgctgctcgaccggtgtcacttccacgatgcgctcgacaccctgctacgtcgggcactcgaccgacgtacttggtccatcgagtatcgctgtgtggtcttccagcacagtcgcaggctgaggcggccatgcaagatgccacatggcgtgcgctttcgcactactgcttagtgctcggcgggatagccaatggtctcaacctgaaggctcgtgctgagatcgcccagatgcgggctgagcgcacggagcatcgtcacctggaggatggctcccccgctcccgtcgggactcagcacccgtaccgctcaccttggcgtggacaccagtcttatggcgaccccgactgcaggaccaagataaatttagaaccatag

SEQ ID NO: 9952 - DNA, 141 bp, Zea mays
  Peptide Sequence Number=SeqID_53327
atggccatgatgggttcaacattcgagaagatgtacctctgtcaggtgaagaagcggcaaacttttgttgcttctgttcaaaggtggtaccaaaggaagagcatcaagactaaagctgctggacgaaaggatcctccgtaa

SEQ ID NO: 9953 - DNA, 384 bp, Zea mays
  Peptide Sequence Number=SeqID_53328
atggcagccctcatcggtgatgatcagatggccaaagtgagccacgacgatgcgatggacgtgccgaggtatgtggcgcaaggccgtgaagtggctgtcaccggcgagttcatccgaagcgaccgtggcaagcttggccgaactatggagcaacttggtacccaaggatttgtgaagttcttcccaaaatttggatacaaactgaggtccacgatccgacactatggtcttcggaacaccgtgcaaactgagaatacgagcaatgtacagttctgcatatgcagttactggatattttactttgactggaaggaagtgggcgatctttgtgagtcggtcaatgataacccaaatggagtcaaagccttttgctgttctgggtaa

SEQ ID NO: 9954 - DNA, 1107 bp, Zea mays
  Peptide Sequence Number=SeqID_53329
atgagagctacgtttcatttcattgagatagaggaaaaacacaaacacaagagggagaggcatgaagtcctccctctccacaccaactatctaagttacatacgtgccacgcgcaaggaaaagaaaacgaccacacaggacagctcaagcagccagccttcacgccctgccaatcagctcatggagagctgtgtttccggccaaaaaaaatttcaggactggagatcagagcagtctgttagttcagagaacatagttgctccacatagagatgatgtttcattattcagttcacttaaagaaaggactgccacggtttttacatttctaggaaatattttgcacacagaaacctcaaataaatcaatgctcgatgaaagaaagtccacaacaggaacacttcatcctcaagggccatttctgcaaaaatggaacaggatatttgtgatatcatgtatatttgcagtttcagtggatccattgttcttgtatatcccagttatcaatgatgaaaaaccttgctggtatttggatagaaagttggaaaaggcagcaagtgtcctgcgttttttcacagatattttctacatactccatatcatatttcagttccggacaggctttattgcatcatctcatacaacctttgggcgaagtgtcttaattgaagatagatatgcaataacaaagcgctacttatcaacatattttttcattgatgtctttgctattctacccatccctcaggttattattttggtcgtgctacctaatcttcatggctcgaaggttatgaaagccaaaaatgtgttaatgcttataattatatgccagtatgtgcctcggctaatccggataaggccactatacctccaaatcacaaggtctgctggtgtaattacagagacagcacgtgctggtgctgctttcaaccttttgctttacatgcttgccagccatggaaatactgttggctacctttcagaagtgcattataaaaaagctcaatacgatggcttcaatctttcaactgtttcaggtccttggagctctttggtacttgctttctattcaacgccaagattcctgctggagacagtattgtag

SEQ ID NO: 9955 - DNA, 762 bp, Zea mays
  Peptide Sequence Number=SeqID_53330
atggtgtgcacgaagaatgtgtcggcaccagggggaggagacgacgaggaccctcctcgccccttcaggcaggtcaaggggaagactgtctatttggagcagcaggaaggccgcaagaagcggcgtttggacagagcagcccgagtagttctagcagaagcagcagtggctgagcaggcagagagaggcgagtttgatgttgttgacttccttatatgtgagatcgaggacacgatattggatggtcttcatgttcggcgacagatgtcatatggtcactatctctaccacatcttcgcacaactgatccgcccaccgcagttccagggcacccttgaggcctcatgcctccactttggctcctaccgtctagcccctaaggacccagtgccggtacctgatccagtgattgacactcaggtagaggatacgacctaccatcagttcgagactcagggcacaacggttcctgatgataatgatgatgatgatgattttgggattccacctccgcctctgtgcctccacgctcccatgaccatgaggctgggagttcctgtgttgcccctgctacccctcctgccattgaacctgctctggctacgatcctccagactcttactcagcagcaggctcatctggcagcagttcagcagcagatgttcgagagaatgctatcgatgtttcagactatttaggacagataggacactctgcagcagcagcttctggcagacagggctgagaaccgggccttcatga

SEQ ID NO: 9956 - DNA, 2211 bp, Zea mays
  Peptide Sequence Number=SeqID_53331
atgtcgaccgccacgggaagaatccggcgacagagactgaagacgacccccgcgccggtggctgccccatccactaagaagaggaagctaggtactgtgatgggaggactgggggtctccgatagttttgctgtggagctgatggggacatgcgcggcccccgggggaaggatgtcttcacccgagctttgggagtctttggcgcggatgctgaaggttaccgggggttggtggcctaagaacgttcctatcccccgtgcgaccggcgaagacttttttacatctcgcatggttcgtgacttgaaagtgtttccttatggacgaaatattgctgctgttgtgtcggtagtgatggacaaggatcgtcaggaagctgcgcaaaagcgccaggcggtcatcaggctgcctgaggctaggccgaagagggcgcgggggactgcgaaggctgccgcctccggcggtagccagccgacgctggcggtgaagtcggccgcccctgggtccagcaagatgtcggatgtcgtgaaggcagccggcgtcggcgtagccaagtctgcctcggccggagccgcaaaggccagagacttgccttcaccggcgaaacgtgttgccgatttcggcacttatattagtgtggaagattatctcattggaaatttgcaggatcgggcgaggggcaacttgttgttccgcctgcggtggcgaccacggtgtctgccacggtgcctggggcgaagggtagcgctctcagcgctggcggcggctgacttcaccgaccgcgtggcgtcgggggcccttacggcagttgtgtctgccgaagtcgagagacttcgagcgcagcatgctgacgctgtccgggaaaagtcggccgccgatagcaagtgccgcaagctgacggagaaggtggccgcgctggagggcgagaggactgaccttcggtgccagctggcggaggaaaggagggaggctaatcaggccctcgtcaagacgcagtcggcgcaggcggaggccaatctggcgcgggtggagggtagtctcgccagccagcgcgccgaggaatgggagacgcggttcaacgctctacaggcccgcatggagagggccgaggcctcgatgcgctcggaagttgagcgaacgcgcaaacagcttatggactcataccgagagctgggcgcgcggaccgctgacttcgaattgcccgaccgagagtcaggccttcgctgcctcgagtggctgcaagaggagttgttggcgctcccgaccattgtggagggatttatgtcctttgcctccctggtcacctgcgaaggggcaatgaacgcgttgtcccgcgaagggtgcagccactatgaggtctttgaccgatctgatgaggatttcgagcgcgaaatttacaaggtcgaggaccctgtggtgaaggaatccgcgggagccctctttgaccggatgtggggcccccacagtcgggaggtggtgagggagcggtccgaccgggcgagggatcaggcggcgcgtgatgagacagtggaggacttcagagctttgaacagcgggcagcctgaagcggagtcgagcccggtggcaccgccctcggaaaccgctgaaggttccctcgctgcccctgcggctactgtgtccggtggtggctcgtcgccaaccgcagtgccgagggctgaggatcccccgaagacggtgacggagccggcagcggaggaccccacggcggctgggccttcgcaggttcaaggttttgggcctgcgcacgcaaccgccactgctaattttttggcggcttcgaccgtggatgctgggaatgaatcggatgagtctgcttctaagttttctgattttggtggctctgggagttcggttgggtggacggaggagtcgtcggatgaggacttggattactttgcggccttggatgtggcagcggtggagtcttcgcctcgtgctgcggatgctgaagttatgcctggtccgagcgctgggcgcaggcggcgaagggcggttgcgaagcgtagagtgagtgaggtggatggcagtcggcttcgtgtggacaaggctggcaagcaggaattgttgtcctcgccggccattgcaagtgtaggtgagggggagttgcgaagtctttttgagggtgaggagcttaggataatgctatttaactatagagagatggggatcattccgaaggttgaaccgatgtaa

SEQ ID NO: 9957 - DNA, 384 bp, Zea mays
  Peptide Sequence Number=SeqID_53332
atgtccggtgtgcaccggactgtccggtgcatcctcggagccgcgccaacggctacctgcaacgcattaaaatgcccacgcagcgcgcgcagaaggcaggcgcgcccataccggcgcatcggacactgcacagttcatgtccggtgcgccacccggacatcgaggcgggcccagaaatcagaactccaacggtcagattccaacggcactggtgacgtggctggggcaccggacatgtccggtatgcaccggactgtccggtgcgccatcgacagacagcctccaccaacggtcaagtttggtggttggggctataaataccccaaccaacccccattcattgcatccaagtttttcagcttccaaccactatacaagagctag

SEQ ID NO: 9958 - DNA, 3171 bp, Zea mays
  Peptide Sequence Number=SeqID_53333
atgccgtcctcttcttcttcctccgacaccacgccgccggccgccgcctcgtctgaggagacgttgagtagcgtgatggtggaggagttgcgcgccggcgactctgttgattttggtgtgtcacggatgacgtcagcccgcgttgaagatatgcagcggttgggctactttggcggcggagttgctcgtgctccggggacggaggaagtccccgagccggaggatacatcagctgacaccgaatgccatggtggcgctggcgaaaagaggatggttggggacggagttgcccagttcgggtcatgcacattcacgccgaagaccggcaagaccacaatgccagtagtggagttggttccgtgcgcccgcaacaagtggggcaattggaatgaattttggttttatgttgcggagggtaccgtcgaaggccataaaggactccccgtgtctaagatgtgctctcattattattctgcgtatccgccttttgaagtggcagaagaggatgcagacgaaggggccctccgatgcgctgccggtcagagcagtgggcgtgatttagttgaagagttcgtggcgtacggggtctggcccttggcgcacggctgggcgctgggcgaagtgtgccctcgccagatgccttttcacggaggaagggtggtgcgaagtcctgccttcgcactgaacttgcgaaatcgtgacccggccgcctttgggcgtgatgcggaggacttggcggtgcggctcgtgggacgttacgtgccgaggactgaaggccagcgcagctttgatatccgcgggtcaaatgagcgcttgaacagggtcttcgaattaaatcaattgtcgtacgacggctatcctggtcaagacgaagcggaccgccgtgggaagaagccggcggtggagactggaggcgaccctgcgctggcggccgccccctcctcaaaaaagagaaaattaggtactgcgatggggggacttggtgtgtctgatagttttgctagagagttaatgaggacgtgtgcggcccctggggaaaggatgtcttcgcccgagctccgggagtcttcggctcggatgctgagggttaccgggggttgctggccaaaaaatgttcctatcccctgcgcagctgaggaggactgttttacatctcgtatggttcatcggtggagagtttttccttacgggcgaaatatcggtgctgttgtgtggacagtgatggacaaggatcgccaaggggcggcgcaaaaacaccaggcgactgtcaggattcacgaagctcggccgaaaaagcagcggggaactgcgaaggctgcggcctccggcggaggcaagccgccgctggcggtgaaggcgggcgcctctgcgcctagcaaggcgccggaggcgacggcgggcgccggaggctccaagtcaacgaaggtggcgcccccggccagcggagtggcggaggcttcgaaggcggcccgagcgctgccgttggcgggcaaacgtgttgccgacttcggcaccgacattactgtggatgacaatcttggtgggccggacgagggccagcttgctatagttgcgcctggcgcggcgatcgcgacggccgccaaggcgccgaaggcggggggcgaggcgcttggcgccggaggcgaggtgtcggtcctcgcgctggtcagggacgaggcgggcgcggcgacccgccggctgaaggtggtgacggaggcgctgagtcaggcgacggaggcgctgagtcaggtggctaacttcgccagccgtactgcgtcgggggccctcacggcagctgtgtctgccgaagtcgagagacttcggacacaacatgctgacgctgtccggtggccgccctggagaggggacaaggctgacctccggcgccaactggcggcggagaggagggaagctaacgaggccgtcgccaaggggcaggctgcgcaggcggaggccaagctggcgcgggcggagggcaatcttgccaaggagctcgccgaacatctgcaagagcggctcaccaccctggagagccgcgctaaggaggccgaggacgcaacgcatgcggaggccgaacggacgcgcacgcagcttatggatacatatcgtgagctgggtgcgcggaccggtgacttcgaagtgccggaccgagagtccgggcttcgctgtctgcaatgggtgcaggaggagctgctggaacttcccgccgtcgtgggggggttgatgtcgtacgcctccctggtcacctgcgagggggcgatgaacgcgctctcccgcgaagggtgccggcacttcgaggccttcgaccaggcggatgaagattttgatcgagatatctataaggtcgaagaccccgtggtgaaggaatccgccggggccctctatgaccggatgtggggtctgtacggtcgtgaggtggtcagggagcgggcggaggctgcgagggctcaggcggagcgcggcgagcgggtggacgacttcggggccctgaacagcgcgctgccggactcggagctgaccctcgcggaggctgcgactggagtcgccctggaaacaaccctggagactgcggaaggcgcgccgggcgtccccacctctgctgtggccggcgaaggcctgcccccaaaggtggccgaaggcgcgcctgacgcccccgcagctgccgcgccgagcgctgaagattccgcggcggtggtggcggaagcagcggcggaggcgacagcggaggctcccgcagcggcagggccttcacaggttcaagagtttgggcctgcgcacgcaaccgctactactgagttttttggcggcttcgaccgcggaaggagctcggttgagtggagtgaggagtcgtcggaggaggacttggattatttcacggccttggacgtggctgcggcggaggcttcgccacacgctgcggacgcgccagacgtgccgggtcctagcaccgggcgccggcgacgaagggcggttgcaaagcgtagggttagcgcggaggaaggggctcggcttcgcgtgagtagggttggtcggcaggaactgttgtctttgccggctgccgtgagcacaggggaaggggaactgcgaagtctttttgcgggtgaggagcttaggataatgttatttaattatagggagatggggattattcctaaggtggagctgatgtag

SEQ ID NO: 9959 - DNA, 450 bp, Zea mays
  Peptide Sequence Number=SeqID_53334
atgggcaagaacaacaagcgcaagcgtgagccgactcctccatcggaggagtttggtgactcagaatactcggaggaggagttctcctccgagcccgaggggtctccggctcccatctctcccccggcgtcgtccgatgactcggacgactcccaggggatagccgcggaggtctggacatatatccgcgccgtcgagcgcgccgggctcgaaggctcggatgagtcggagtactcctcggatgaggaggactcggacggcggcgacgagggtgaagacgacgacgacgacgacgatgacgacgacgacgacgacgacggcagtggtagaggcggcggcgacgacagcagggacagcaccaagggcggcggcagcagggacagcaccaagggtagcagcaggggcagcaccaagggtggcggcggcggcaggggcagggccagtggttag

SEQ ID NO: 9960 - DNA, 444 bp, Zea mays
  Peptide Sequence Number=SeqID_53335
atgggcaagaacaacaagcgcaagcgtgagccaactcctccatcggaggattttggtgactcggagtactcagaggaggagttctcctctgagtctgaggggtctccggctcccatccccctgcgtgagtcgtctgacgactcagacgactcccaggggctcgcgacggaggtctggacgtacatccgggccgtcgagcgctccgggctcgagggctcggatgagtcggagtactcctcggatgaggaggactcgtccgaggaggacggcgacgacgacggcgaggatgacaacgacgacgatgacgacgatgaaggcggtggcggcggtgacggtgacggtggcggcaggggcggcgacagcggcagcaagggcgacggcggcggcagcaggggcaacaacaaaggcggtagcggcggcggcggcaacagggccagtggctag

SEQ ID NO: 9961 - DNA, 267 bp, Zea mays
  Peptide Sequence Number=SeqID_53336
atgagcaattcgtcgtcaccccggactccacaccctcaacggttgcaacaatcgggttccaggcacgccaacgagccaccaaaaccaggccttgcgggcgcggcggcgctaacggcgtggttcggcagcggcggctacactcgcgagcggaaaacagcggcggcaacgattggtatggaatccacggagcaggggaggtaccctgagacatttcttcagctgagatacatgaaagacatcatgaacatccgcaaggtgatccggtaa

SEQ ID NO: 9962 - DNA, 447 bp, Zea mays
  Peptide Sequence Number=SeqID_53337
atgggctttgtaaaattatcttttgctatcgttcccacgttagctatcaatcggaaacgcctgccagtccacgcctttgactcgcactccgctttcagatctaggcggacgaggaatgatggattagaggtgcacgagtgccaccccgtcgtcggcggcgacgccgtgttagctccacagcgacgacctcatcacccaccaacggctgatggacttcctccacagggtgaacctcaagtacgtcaagctggaataccactacctcatcacccctggcccctggtgacgctgacgctgctgccgttgatggttgtgatcctgctcgaggccatgggcactgaccctgacgacgaccaacccagttctggcattcaggctccacctccactcgtgtccgcgctcatcctctcccttgtgctcgtgttcatcgccactatacatatttaa

SEQ ID NO: 9963 - DNA, 420 bp, Zea mays
  Peptide Sequence Number=SeqID_53338
atgggcaagaacaacaagcgcaagcgtgagccaactcctccatcggaggattttggtgactcggagtactcagaggaggagttctcctctgagtctgaggggtgtccggctcccatccccctgcgtgagtcgtctgacgactcagacgactcccaggggctcgcggcggaggtctggacgtatatccgggccgtcgagcgctccgggctcgagggctcggatgagtcggagtactcctcggatgaggaggactcggacagcggcggcgaggacgaggacgacgacgacgacaacgacgaaggcggtggcgacggtgacggtgacggcagcggcaagggcggcggcagcggcggtggcggcagcagcaggggcagcaacaggggcggcagcggtggcggcagcaacagggccagtggctag

SEQ ID NO: 9964 - DNA, 1110 bp, Zea mays
  Peptide Sequence Number=SeqID_53339
atggattttggttatggcatgcctgaaccagttggaaaaatgaaactttgcttttttagggagcagtgggaattggtgctctggtgggtgctgcacaagtatcggcaaagcgtggatgtagtcttggaagtagaagttctggatgaagttggcaagccagcgggaggcagcgaagcacagcacgaccgccgacacgaccgcgaccctctgaacagtcgacgtgaggaccgttcccttggcgacggcaaggaacctgacgacaccgaccgaggccacctacagggcagcctcgagcgccttcatggccttgagcgccgcgttgcagctcctgtactgcaccacgtgcgaccagtacctgtcatgagcgtccacagttatgtttccgttgcaacgcacgggcacacaccttcacggctccgccctccccaccccgctaatgtcgctgccaccgcgcacgcctctgtcttcgtctcccccgcgctaatctcgccgcggcagtgcgtcctccgccccacaccttcccgaaaatgccgtcgccccaatcaccgcgtgggccgacccccatcaccgcacgatgattgtgcccccatctcacgtctccctccctccctcccattccgcgcaaaccaagcgacgacatggcccgatgccctcttcccggccgccttcttcccggggtggtgcctgatgccctcgccctcttcccgatcgccttcttcccttgctccgccctccactattcctgagcccgccgccggccgctcgagcccatcccgaccatggccttgtgcccccctccgcctcttccacgggtcgctggagcccagcccgcccacggcctggtgtccccccccgcctccaccaggcaccaccatggcaggaagacaaagaccccaacgtcgccgcctgcctccggcagaaatcgtggaggcactgcacagctacggcatcggccccagctccagcctcaccgaggtcctcaccctcttccttgctagcatcgtcggcgacaatcaacatctcgcggggatcacctctaccctcaccagctatggccactccccgacatttagcatctggcatcctaaacaaactcaacgctggatgtag

SEQ ID NO: 9965 - DNA, 354 bp, Zea mays
  Peptide Sequence Number=SeqID_53340
atgtcgtcgcttggtttgcgcggaatgggagggagggagggagacgtgagatgggggcacaatcatcgtgcggtgatgggggtcggcccacgcggtgattggggcgacggcattttcgggaagtacaggagctgcaacgcggcgctcaaggccatgaaggcgctcgaggctgccctcacccaccagagcaccaattcccactgctccctaaaactgcatggactaatcttgaaccctcgcacctcagcagacaacattccgagtaaaaacatggagcccatgagcaaaacgcacgagcagcatacaacatacaagcaaagtttcatttttccaactggttcaggcatgccataa

SEQ ID NO: 9966 - DNA, 531 bp, Zea mays
  Peptide Sequence Number=SeqID_53341
atgaccgacaccgccaccgtgctgccgctgccggacatcgggatcaaggacgccaccaccaaggcggtggggttggcagcgtccgttcatgctctcgtctccaccatgattgggcttggggtttcccctgccaccctattcatgtacaacttcttctctgtcagtgatcctatgcataccgatctattagagctcggtcgttaccgatcaaaaaggctgcaaataagctgtttacaattgaaatcaggaatgaagacgtcgctggcgagtctagaaatcatgaagtctacgattgatcaagagatcgaccttttttatttattcggtaatgacagggtggaaaatccaaagaggtgggggtctgtcagggaacctaaaggatttgggttcatccaatactttgatcctgaggatgcttctgatgcaaagtaccatatggatgggaagatgctgcttggaagggaaattgctgttgtttttgcagaggaaaacaggaagaagccttctgacatgagggccagggaaaaataa

SEQ ID NO: 9967 - DNA, 303 bp, Zea mays
  Peptide Sequence Number=SeqID_53342
atgagcttgacacaactaaaagggaaatgcattgcccaaccttctcaagataaccgtgatctcatggtgaagaagcttgagacgggaacaaccgtggcatgcactacatcccttgaagaaaatgtcaaggatttgaggattgccaagaggaagaaacaaaagaagaaattcaacacctcctccaaaagcctcaatcacgcctccacaaaaggtaacatccaaggaagtgaagagatatcatgtgcaaaaatcaaggcctacaacatggaggaaagccaaaggatagtaacacttatcttttaa

SEQ ID NO: 9968 - DNA, 713 bp, Zea mays
  Peptide Sequence Number=SeqID_53343
atgggggaaaacagcagcgaagctcgacgacgacgcaaggtgaagaacggtgctgctgcaaggaatcaacaacgcctggcttgttgcgcatttcgtcgagcacatagcaagcgtcaacaacgcactgcgcagcagcacgcaagcagggggaatggagctcgagtgccgagcgtccaccatggcagggacgacgagctcggctcggtgaagaggagcaggggctggcggccatggacagggagggggctgcgcagtagagagaagaggagcagggggcgtgcagagttgctgctcgaccacacaccattggagccgaggaggaagggcgccatgcaggggcgccttgagccatggaggggagctcgcagggtcgagctgctgggagatgggagcggctgctccctgcccttggggaagaagggcgccgccgagggaggtgaagccaagggggagagcaggacgccaccgagcaggtccatggggaagacaaccgactgtggggaagaaggcaggaggcaccatggccagccggcggtgtggccgagcagggaggctccccacgccctacagggggagatgtcccaagggaggccgccatgggagagagggcagcggcgatctgctgttgtggggaggcgtgccgagcaccatggcgaggaggaggagccgagctccctgcttgctgtcgtgtggaagaagggaacagcgaaaat

SEQ ID NO: 9969 - DNA, 372 bp, Zea mays
  Peptide Sequence Number=SeqID_53344
atggagcatcgtcccgggttgaagaggttgttggagactatccatctggagcttgacgggaagctattcgtcaacacgcagcaggcccctacctggcgcgccaactgtcggcgtttcgaccccggggggtctctggaccgacgagtaaattgtcgtcgtgtgtcccagcccagatgggtcggtgcaagacggagcacgaaggggggagaaacagcaaaaggggaaacccgcggcctccgtgttgtcctgcgccccggtcggcccgaggtcgggcgaggcggtgactcctccgaggtcgaggttgagctcgagccctggggtcgggcgaggcggagaccgtcttccgaggtcaaggttgagtccgagccctag

SEQ ID NO: 9970 - DNA, 375 bp, Zea mays
  Peptide Sequence Number=SeqID_53345
atgtcggcaccggacctctgcccgagcaaggcctgggtattctctgccctagagtctcaggacccggttgtgggtagtccggactccacacagaggggtccgggacctgacccggaggtccgggttgcactcgtgggggtcctggaccttgcgccggagccacatggcgatcctggggccatccatgtggtggagtcgggtgttgttcaccacgtgactagagatagtcgcatgggcaccgcgtcttcaggttgtaacaacgagcagtccgaggttcctgagtgtgttgttggagacctccctgagcaacaacctggaggtgatgctggcaacatggatgacttcgaggagtttcaggactacgacgagttctag

SEQ ID NO: 9971 - DNA, 468 bp, Zea mays
  Peptide Sequence Number=SeqID_53346
atgctggtagactacacaacggtactcgatggaccaagtgtgtcggtcgaaggcccgacgcaacagggtatcaagagcatcgtggaagtgacacccgcgagcagtgtcacgagtgttgggtctagcgatccatccctctggctccggctcctccgagagctccgtgccatgtggctcgaactgccaccaacgggggcatctctggctgaggtgcaggggaaggtggcctctcagactccacctcccgctgaggtgagggggaagagtcctgctgctcctggtcctgctcctgctcctagcatcggcgctcctgctcctcatacaggcgacgatgcagtctctctaagtgactggactgacctggcaccgtgcgacgtagtggacgctccgtcaggcgggaaggcaaaaggggatcacagacttacgtgcagtgcacctgatataggccatctacaaaagacattgtaa

SEQ ID NO: 9972 - DNA, 345 bp, Zea mays
  Peptide Sequence Number=SeqID_53347
atgcagagtgcacaacagccgctgcaccaggcacagggaaggttggtggcccacggagtggaagaagtgaacctcctcctccagcatgaagtcctcaggcacgaaatcttggtgctcgatgaagtggaccacggtgtcgagcaggaaaacaagcaaaaacctaaagccaaggccccctacctggcgtgccaaatgtcagagaggaaatctccggtcgggtggcggaatgcacccgccctaagtcctaagatgaggaggggcctaggcattttgcctgttacgagattggggggtgaacacaagaacacaccaggatttagagtggttcgggccgccgaggcgtaa

SEQ ID NO: 9973 - DNA, 741 bp, Zea mays
  Peptide Sequence Number=SeqID_53348
atggccgaggctcgggctacgctcctgaggtaccctaggacatttcgagaccagcaggagcgattctgtaatggaatcccatcagagggaggcatcgagccctcggaccctatcaaacgggaccgggaagctctgccttgcccgaccccagggctcgggctcaacctcgacgccggacgacgaacaccgcctcgcccgaccccagggctcggactcagcctcgacctcggaagacggtcttcgccttgcccgaccctagggctcgggctcaacctcgacgccggacgacggacaccgcctcgccagaccccagggctcagactcagcctcgacctcgaaagacggacaccgcctcgcccgacctcagggctcggactcagcctcgacctcggacgacggactcagcctcgcccgaccctagggctcgggctcaacctcaacgccggacgacgaacaccgcctcgcccgaccccagggctcggactcagcctcgacctcggaagacggtctccgcctcgcccgaccccagggctcggactcagcctcgacctcggacgacagactctgcctcgcctgaccctagggctcggactcaaccttgacctcggaagacggtctccgcctcgcccgaccccagggctcaatctcaacctcgacctcggaggagtcaccgcctcgcccgaccccgggctcggaccaaccacgtcacaggggggccatcattaccctacccctagctag

SEQ ID NO: 9974 - DNA, 315 bp, Zea mays
  Peptide Sequence Number=SeqID_53349
atgttgaccagccgaccatgtgcattatgtttgctttgcccctgtgtccccttttttctttgtgcggagactgaagcccctgggtatgggcagactctccggctgagtcagctggaccatctgtttgagcaccagactgtccgcgcacaggtgccagaccgtccgcgatgctcgagtcagggagtcgtgtttggctgctcaattgagtatgcccccctaacgcctccgtacttgttagtcttcttgaccggagccttcttagcaattcctccttgcgatatgttcgacatgcgaggatcactgaaagggaaatag

SEQ ID NO: 9975 - DNA, 828 bp, Zea mays
  Peptide Sequence Number=SeqID_53350
atgcaggaggcgtgcaaccgcaccacggttgtgcaccctttcggcttcatcgcatccggtggggcaagcgacacctttggcaggcgaagcgggcgtcgtttcacctccgccatgatgatcgcgtcaaaaaagccgccccagagcactcgggcttcaagctcattactgatcaggggttcgaaggctggcccctcggaagggttcgacagccgccccagagcacgcagagcgagggatgactctgggtacgtctgttacatggttgaggctcgtgctacgctcccgaggtcgcatgagggaacaaccaggccggccaaggcatcacgaaaggcattaagacctcagagtagtcaaaccactcctctgaggcctcgggggctacacccagcagagactgatgggcacgatttaggtcaaggcttcgtctacccaagggacgcaatctcgcctcgcccgagcccagcctcgggcgggaactgcagtcccggacgaagttatgtctcacccgaggacctcctcaggcagtgggcgcaccctcggcacgaccgaggcccaactcgggcaggcttcgtcgagaagcaaccttggccaaatcgcctctccaaccgaccgtatcgcaggcgcattcaatgcgaggatcgcctgacaccttatcctgacacacgtgcctcagtcggcaaggtcaaaggctcggcctcaaccttggcctcggaaggaatcgcgtcctcgctcgaccccggcctctgcctcaggaggagtctccgcctcgcccgaccttgggctcggaccgaccgcgccacgggagatacatcattaccctacccctag

SEQ ID NO: 9976 - DNA, 105 bp, Zea mays
  Peptide Sequence Number=SeqID_53351
atggcggcggcagaggtgtactcgccgaccgaggcggtggcggcgcagcagcagcgggagaaggcggcatcgcagaaccgtcttttatcatatggtgatgagtaa

SEQ ID NO: 9977 - DNA, 549 bp, Zea mays
  Peptide Sequence Number=SeqID_53352
atgtcgtcgtctttgtcatcatcatcgtcatcgtcgtcgtcaggcgtctccggcgacggctccctcgggagcccgtccctctcctgcctccgacgcgacccttcgcgcggctcggtccaccgcgtcctccaggaccggtggcagggaaggcttgtgacaccccaactcctggagacggacggaaatctcgactgtgagaaccaagggcaatctgacacaagaaagaagaaggagcggacactcaccagggatatgcacccgcgctcgggacgcatcaagggctgggtaagggcgccggtgtccagcctccctaccgtgccagctacccgcctgtggaggtcatcagcggagagggggaccaaggacatctgcgaaccctccaagtcgacccccggcatcatctccgaaagcagcaaccgccgctctagcaagggaagcaccctccggcgatggatggcagcgaccacccccgcgacgggaccgggaaaggggatacttcgaaagggatccttctctgcgaaggaagcgggcctcgagccctcctactga

SEQ ID NO: 9978 - DNA, 1503 bp, Zea mays
  Peptide Sequence Number=SeqID_53353
atggacggggaacacacgctacaagacaatccgatcctgcaggctcggatcctgacacttgaagggagcagcagcaccctcggcatcgacaacactttcggcgagggtcttctccggggatccagcccgatcaggcggctcggccgatcaccccggggcctcggccagctgtcctccaaggacgtcagcccgacccgaggcctcggctggtcaattccggcgtcgatcccgctaacggacgacccggccaggccccggccaactaggttttcttttcgagccaactttgcctctgttcatgctgacaccgctacccctggcctcggctcatcggagagcggccgaggggttcctttaactaagctagagaagcctcggacaacaaggccgaccgagccgagggactcctacgcctccgggatacggatacctcactccaacaacaacgaccccccgctccgggtggccgaactgcagcagcgcaggcctcaggacgggtgctgctgcaatcttgccctcgcccacgctgatgctcgaggggcgaggacaagtacaaagagccggaggcccgaagcgcggatggtggcggtgatcccgtcggcgacggggacttctcgagccgcctccacctcggcaccgacgacaggggctgtcagccctccggcagatccccactcagatcctcccggacgagtggggcacctacctccgcgcggaggcgccataccagtgcaaaggcaggacccgccccagaacacgaacgccgccctagcagcgcgcgacatcttgggcggtcctcccatgcacacggcgcggcagccgtcttccggcaggagggggcaccggggagccaagccggcgagctcgacgcgctgggggctgacgacgcccgccgtcggccagccccgcgttgtcgaagtccgacccgcccgcagggccagcgagcgccctctccctcgaacgccgcaggagagggtgacccacgaacccgcgcgggaggtagagctccggctcagcctggcctccaccccagcgaggatgatgaacatccttgaagctgagggtgggaccaagatcgcagcccggcttgcttctccccacccaggggctggtggtcaccgtcttggaccaacgggcgaaaggggcgggcagccatgcaggcggcatgcaaccgcgccaagtgggcgcgcttctccgactcccaacacgcccagcatggaggcccaggcccacgcgtcatgcgaccggcacgccgaatgcttcgtgcatgcaactgcaccgccacttgcgccaccaccgcgcctcctcgactgcggaaccaataccgcgactcgaggcgacccagcgcacaacccagcagcgccaacctggcgcgacggtcagtgcgaccaaaaatgggccggcagtaatgacggtggcaggcggacaggagcagcggtcacgttgtcagccaagctcacgtcccatccgggggcagcgagagaaccctctctcacggcgtga

SEQ ID NO: 9979 - DNA, 954 bp, Zea mays
  Peptide Sequence Number=SeqID_53354
atggcgccttctgttgacgtggctggtctgcgccctaggttgggcgatgtggaagctcctccgaagccgaggtcgagtctgtcttccgtggctgaggtcgagtccgagcccctgggtcgggcggagcggagttcgtcgtcttctggggctgagcccaagtccgagccctggggtcgggcggagcggagttcgtcgtcttctggggctgagcccaagtccgagccctgggtcgggcggagcggagttcgtcgtcttctggggctgagcccaagtccgagccctggggtcgggcggagcggagttcgtcgtcttctggggctgagcccaagtccgagccctggggtcgggcggagcggagttcgtcgtcttctagggctgagcccaagtccgagccctgggtcgcgcggagcggagttcgtcgtcttccgggacttagcccgagtccgatccatgggtcgggcggagcggagcttcctatggtgcctttggctgggcctgactgcttgtcagtgtcactctatcaagtggcaccgcagtcagagtggcgcaggcggcgctgtccttctgtcaggccggtcagtggagcggcgaagtgacagcggtcacttcggctctgccggctggggggcgcgcgtcaggataaaggtgtcaggccacctttgcattaaatgcccctgcgatttggtcggtcggtgcggcaatttggtcagggttgcttcttggcgaagacagggcctcggcccgggtgtacggtcgggtcccaagttctcgggctggtatgttgacgctgtcaatggttcgaccggagccaggcgggtaatccgagtggacgtccgtgccccattcgttaggggtcggctaggggcccagaggcacgcccaaaagtacctgcgggtgatctgccggacccggtcccctggcgacggggtccgagggctcgatgcctccctctga

SEQ ID NO: 9980 - DNA, 657 bp, Zea mays
  Peptide Sequence Number=SeqID_53355
atgccgcctatccagcaaggatcaggcttcgggggctgtggcgaggtggacgaggatttcattgccgttggcaattggaagggaggaggacgccggagcctaggaagatggcgcgtaggatgcacggagacggggcgtggagcagggcggcgcaggcgtagaggaggcccacggcgaagaagccctccaggcctgctgcggcgctcctccacggtgaagacgctcctccaagcctgctgcggcgccggagaagaatcccgtccagagaggctgccgctccgtggatccgtgggggagcagggatgcagcctacaggagcgtccttctcggcgattcggggaggaagatggggctggcagatttggatcgggagaatggcgatttggatcgggagaagatgagtctggccgatttggatcgggagacgcgccgagcaatatcgacgtggggaggaggcgcgccgagccccgagcagacgacggtggggaggaggcgagcttggcgggggcgtcgggagcgcgtcggtggggaagaagatggtggggaggggggcgccaagccaagtgccgccggcggtggggagatgaagggcgtcgggagcgcgttggtgggaaggggggggcgccaagcccagtgccgccggcggtggggagatga

SEQ ID NO: 9981 - DNA, 111 bp, Zea mays
  Peptide Sequence Number=SeqID_53356
atggcctgcggcatgtactctgctttcggcggtggaaagagcaccgaatttgctttctttgaacccaagacacccaaggatctttcccaagaacttgccaagtccccgatt

SEQ ID NO: 9982 - DNA, 924 bp, Zea mays
  Peptide Sequence Number=SeqID_53357
atggaacctaaggaccaccacacaattcatcccgagttcccgaccaaggctttcaaggcacacaaggtttattacctcaatgagtcacccaactcggcacaggaaggtggaactggcggcggcgatgcgtgtggtgtcggagacggcacgacccgctccatctaccaccacttcccacctcatcgacgatcttatcttgtagcggcgatgcacatggcgagcgagaccatctccgagggtggcaagtttgaccatgcagatcgtttgttccaaagcattgagagcgcttacataaatagattatcaaatacaagtgacgtcaaagagcttattccagaattcttttacatgccagagtttcttgaaaattcaaattcatatcatcttggtgtcaagcaggatggggaacttataggcgatgttgctctccctccatgggcaaaggataataactcaagtgacgagtttgacaaagattctattgagagtggtgatagatctcttgaagagctaagctgggagacactggaacttcttgtggtacctcatatattcagtcacttcgccctttcactgaccgacctgacaggaaaacagcgccgctcgccctgctccgactgctgtgccacccaccagggtgaggctgacaacagccaagttcagcctcaggcgcaacaggaagctccgcctcgcccgaccataggcctcagcctcgggaggaggtctccgcctcgcctgaccccagggctcggcctcaccctcggcctcgggaggaatcgcgtcctcgcccgacccgggcctcggcctcaggaggagtctcagcctcgcccgaccttgggctcggacgaccgcgccacgggagatacatcattacctaccctagctagctcaggctacggggaacaagaccggcgtcccatctag

SEQ ID NO: 9983 - DNA, 267 bp, Zea mays
  Peptide Sequence Number=SeqID_53358
atggccgtcgacgcagctgcgttggagaaggagcagcgaggtgttgaggaagggcggcggcggatcggagaggaagaggactgcgggagaggaagagggcggcggatcggagaggaaggcgctgcctgtgggagcaggtcgaagccagaaatttggggctccggctcctgggatacttttggctcctgctctctgttagaagccgtttccgtggaggacgtttggggaagacttccggcccggggagcggaagcggagagctggtaa

SEQ ID NO: 9984 - DNA, 459 bp, Zea mays
  Peptide Sequence Number=SeqID_53359
atggcccatgcgccgccagttccagcaccaccgggcaaaccgccctttcctctctcctccttctccctccgccgccgctccttcagcttgtggtgctcaaacggcaacgcgcatggaagagacagcgccaccgccaccacgagcggcagggcgacgaggaggaggtggtggtccgaccccggcggcagccgagaagactacggcccctcttctcccggcagacaaagaagttcgattcagtcatggattggaaggaaggcaggcgtaatgaagaagtttgaatggttcaggcagtgtgcctgcagcatcagctctgtacttgctggtgcagctgataatagtgtgtgtttgcataaatcactaaaaaggtggagactggaagagaaatgtgtcatagagccatttctacctgttttggtgattaagtgcacaccacaccacattggactaactacttga

SEQ ID NO: 9985 - DNA, 597 bp, Zea mays
  Peptide Sequence Number=SeqID_53360
atggctgaaaggtaccaactcccgcggagttgcgttcctccaacggcaaggcggaaagactgcgagcatcccccatctgggggcttggaaggcggaaaggcacgatgcataagggagcgcgaagacatggtcgcctttcaagggggtcaccctccttttaaaggcgactctccctacttgcgtccccaatcgtcgtgggctgagtcttctccaacacgctccaaggtcctcccctacggcacgggggctgggtcccacacgtcatgcaagccggctcagagcagaagaagccaaaccgccgtgcgcgggaccgggaaaggggataccccgaaaagggtccttccccgtgaaggaaccaggctccgagcctccctactgatcagaggttcgaaggctggcccctcggaagggttcgacagccgcctcagatcgcgtgggctctacacccactactggtcagaggttcgaaggctggcccctcggaagggttcaacgaccgcctcaggctactcgggctccgcgcccagtactgatcaggggttcgaaggctggcccccgaagggttcacagccgcctcagacacagagcgagggatga

SEQ ID NO: 9986 - DNA, 99 bp, Zea mays
  Peptide Sequence Number=SeqID_53361
atggcgacggtgaggcgacaacagggggtagggactagggagggcaggtggcaatgcggcggtgccggcaagcggcacccgacggctcggtggaaccca

SEQ ID NO: 9987 - DNA, 240 bp, Zea mays
  Peptide Sequence Number=SeqID_53362
atggcagtgcaccgccaccgcgcgcgcgggcagccagagagcccggccgaccacatgcgcaggaagtccagtgtccccccggcggccatgcgctcatcatcgcctcagcggctcagcctcacagcacagatcacacagcagtacagcagagcagcaccggccatcatgcctacagccactcccgtgtcccgtgtcgtgctcgatcgcgcgctctctgtcctcctcgcctcgcgcccgtga

SEQ ID NO: 9988 - DNA, 78 bp, Zea mays
  Peptide Sequence Number=SeqID_53363
atggggagtgaggcggcgttgctcgtcgccgccactaccgagctcttcctgggcggctcacgttgtcaatatttttga

SEQ ID NO: 9989 - DNA, 1446 bp, Zea mays
  Peptide Sequence Number=SeqID_53364
atgaacaaaaacactggcattcaaagtgccattacaaacggaactccggttccacctccacaggtacgaacaacgtcactcgatgggggagggcctgcggagcaacagaagaccgacgaacggcgcgccgtcgcccgctccagcagcagcgacgatgacgacttctgctccagggggccgaacagcggcagcactgacctcagggcggatgttgctgccaagaggcccccgcccatgcccaaactcgtgaggcaaggacgggcagaagaccgtagagttggaggtcggtccgtgagcggccctggctatctcgtcggcggaagaacctcttccagctgtcgtggcagacgccggcgccgcgagcggctccgaagccactcgcgtccgagagccaggcacggtgcagctgccagcgccacggacgacgaccgcccctccctccgatcactgagtgaaggagcgggccaccacccacgcaggggccgaccccaactcggcacactcccctccccagccctggtgatgaaaatccttgaggctgagggaggggcagaggccgcagcccggctcgctttcccccaccatcaagctggaggtcaccatcatggtgatgaggagaaaagatggtgggtatcccccatccgggggcttggaaggtggaaagacacgatgcataagggagcgcgaagacatggtcgctttccaaagggggtcaccctccttttaaaggcgactctccctacttgcgcccccaaccgtcgcgggctgagtcttctccaacacactccaaggtcctcccctgcggcgcgggggctgggtcccacatgtcatgcaaaccggctcagagcagaagaagccaaaccgtcgcgcgcggtgcgcacgaccgcccagcggttacaagtgaccctcaacttttgcccagaccagcgggcgaaaggggcgggcagccatgcaggcggcatgcaaccgcgccaagtggacgcccttctccgactcctaacacgcccagcatggaggcccaggcccacgcgtcatgcaaccggcgcgctgaatgcttcgtgcatgcaactgcaccgccacttgcgccaccaccgcgcctcctcgattgcggaaccaataccgcgactcgaggcgacccagagcacgacccagcagcgccagcctggcatggcggtcagtgcggccaaaaatgggccggcagtaatgacagtgtcaggcgggcgggagcagcggtcatgtcgtcagccaagctcacgtcccatccgggggcagcaagagaaccccctctcacggcgtgaagacaacgcgaccgtgatccgttcctcgaacggctcgcgcacgcgcaacagccgccccgccaaccactcgccccgtcgcattaactccgcggcgggacaggcggcgcctctggcaggagaagcgggcgacgcttcgccttcgccataa

SEQ ID NO: 9990 - DNA, 888 bp, Zea mays
  Peptide Sequence Number=SeqID_53365
atggcggaaatcgcccaattcctgcatgaaaatgatttgagcgttgacaccacagtcgaagtatttattaccgtaacccgcgatgaaaagcttatcgcgtgcggtggaattgccggaaatattattaaatgcgttgctatcagtgaatccgtccgcggtgaaggactggcgctgacattagccactgaattgataaacctcgcctatgagcggcacagcacgcatctgtttatttataccaaaaccgaatacgaggcgctgttccgccagtgcggtttttccacgctgaccagcgtacccggcgtgatggtgctgatggaaaacagcgccacgcgactgaaacgctatgccgaatcgctgaaaaaatttcgtcatccagggaacaagattggctgcattgtgatgaacgccaatccctttacgaatggtcaccgttatctgattcaacaggctgcggcacagtgcgactggttgcatctgtttttagtcaaagaagattcttcacgcttcccctatgaagaccggctggatttggtgttaaaaggcaccgccgatattccacgcctgactgtgcatcgtggctccgaatacatcatctcccgcgctacgttcccttgctacttcattaaagaacagagcgtcattaaccattgttacaccgaaattgatctgaagattttccgtcagtacctcgctcccgcgctgggtgtaactcaccgctttgtcggtactgaacccttttgtcgcgttaccgcccagtacaaccaggatatgcgctactggctggaaacgccgactatctccgcaccgcccatcgaactggtgaatctgtttcttctgcgttaccaggagatgccgatatccgctcccgaacgaattcaagcttga

SEQ ID NO: 9991 - DNA, 580 bp, Zea mays
  Peptide Sequence Number=SeqID_53366
atggcaatgaatcaggcgaaaattattgcctccaatgacagtgtcatctctgcggtgaaaacgcgtgactacaaacggctggcgaccatcgctaacaaattacaaagagataccgattttgattatgtggtgattggggaccggcactcgatccgcctttaccatcctaatccggagaaaattggttatcctatgcagttcaccaaacagggcgcgctggagaaaggggagagctacttcattaccgggaaagggtcaatggggatggcgatgcgcgccaaaacgccaatctttgatgacgatggaaaagtcatcggcgtggtgtcgattggctacctggtgagtaaaatcgatagctggcgggctgagtttttattaccgatggcaggtgtgtttgtcgtgctgttagggattctgatgttgctgtcgtggttcctggccgcgcatatccgtcggcagatgatgggcatggagccaaagcaaatcgcacgcgtggtccgtcagcaagaggcgctgtttagttcggtttatgaagggctgattgcggtggatccgcatggttacattaccgccatcaatc

SEQ ID NO: 9992 - DNA, 606 bp, Zea mays
  Peptide Sequence Number=SeqID_53367
atggccccacttgactttgcacattctgatgaatctaagttggcttctcgatatatgtcaaatcctcttgaacttcaagatcctcggttggcaattgctcttcttgcactcacaaacatttcttcagatgagacacatggaacacatcatgcacggctgacagactctttggctaggggcttctctgcaagaaaccaagggcctgagcgcaagaaacaggattgtgggttctatttccaggaaaccgaggggtcttttaacaagttatgggtattgggtgatctcggccacccgatcacacatcaacgactaagattagatctgagcccgagcgctgacaggcgggccagggggtcagtgactgggaagggaaggcgggttgaccagtcggacctagcaccagcgggcgtaggcgaccgacagatggggcccaggggcagagcgcgctcacgcaaagcggtatccagggatctggaccgctggatcagggaccgacggttcagatctagcacacggcggttaacggctcagtggccgacgccgctcctatccgcggcgggggtggggtcatcagagacagggcagacgcggcctccgggggcctag

SEQ ID NO: 9993 - DNA, 756 bp, Zea mays
  Peptide Sequence Number=SeqID_53368
atggagcccgccttcaccgctagcgccgcatccttcaccgacttatgcaacacatgggcgttgatcaaggagtcacaaagaactggggatgccagagggatgctagaggctacaccatcgtctggagcactgtctgtagtggtacctccgccatgtgatgaccagccaacatcggaggcactagggcccgaggacgcgatgctacccgctctgctcctccctcgctacgcccgaggatggcgacctccacgcgacgcgttgatggcgccacctacgcagcggggtcgtgggcctgttccacccctggccagtggttgtggagctggtctaggcgtctccatggggcatgaagacgtgtaccagtcatgccccggagagaccctattatttcaacgtctcgaccgccgccaagagacggtccacctcactcttgaggaccacgtcactcccggagtggcgctcctccaccgaagtcagctcctgactagtaaactacggggcgctctcgacgacattcctggcataaaaccactcgccttcatatcaaatggaggagggaaggtgcaccttgaagtactcctttttcagccgattcagagttgtattttggctgagccgacatactatttgtcgccgcaacctggggacactcgcacgttgaagaggtattgccatagcccccagtgcgggttgatccccatgaacgcctcacatagcgtgataaagcacactatgtggagaatggtgttgggatga

SEQ ID NO: 9994 - DNA, 258 bp, Zea mays
  Peptide Sequence Number=SeqID_53369
atggccccaggcgcggtgctgacatcttccttcaaggtggagatccttcgctcgtgttgccgtctgaggccgggtcagattccaccgaaggacttgcttgtcggtagcagaatcgtttatccgagcgagagttacttatcgcggaaggtgatgagtgaggatcccactattgaagtagtcgaaaagcgcgaaagatgttctggccgaaagactttttccgaggaaaattttgacgaagagggggttccccccttctag

SEQ ID NO: 9995 - DNA, 906 bp, Zea mays
  Peptide Sequence Number=SeqID_53370
atggaaagagacgaaactcagcacataccccgacggcggggacggggcggctccgctcggagggaccatccactccgactacgggtcaccggagaggagacgaagcaagccatcgacaacaagggcctccaggtcgtccactgtgacggtggagaagggccacgggtcgcgcagcggaacgacggttaccgggtcggccatcaccaagcgaagggggtggcggcggagcagacaagggaccggaaaaggggatactccgaaagggatccttctctgcgaaggaagcgggccccgagccctcctactgatcagaggttcgaaggctggcccctcggaagggtttcgacagccgcctcagagtactcgggctccacgcccactactggtcagaggttcgaaggctggcccctcgaaagggaaaacagcgccgcctgcgctgctccgactgttgtgccacccgccacggtgaggctgacagccgccaagtccggcctcaggcgccataggaagctccgcctcgcccgaccccagggctcggactcaacctcgacctcggacgacggactccgcctcgcccgaccccagggctcggactcaacctcgacctcggacgacggactccgcctcgcccgaccccagggctcgcactcaacctcgatcacggaagacgatctccgcctcgcccgaccccagggctcggactcaacctcgacctcggacgacggtctccgcctcgcccaaccccagggctcggactcaacctcgacttcggacgacggtctccgcctcgcccaaccccagggctcggactcagcatcgacctcggaggagcctccgcctcgcccgaccttgggctcggaccgactacgtcgcaggggggtacatcattaccctacccctagctag

SEQ ID NO: 9996 - DNA, 447 bp, Zea mays
  Peptide Sequence Number=SeqID_53371
atggcgacatcaccgagtgattcctcttcttctttgtctcccattcatctagctctgaaccaaccccagagtgatggatgggactttgaggttgcatcagaatctgacggcgacctcaccgacggggacgacctccagttcctcgttgacggggagctggacttcgacaccagcactgactggtcttggacgtacgatggagaatcgtcggatgtggagtccttcgacaacgatgacgacctgatgtctggacattggatgggcatcgtctcctcggacgacgaagatgacgagaacgacgacggcagcagtgactacgacagcagtgacgaggacaacaacgacagtggcaacgatgacaacgatgatgatggtggggcaagccaatgcgatgagatgcctcccagcaagcgtcgtcggctgctgcatggtagcttattctggtag

SEQ ID NO: 9997 - DNA, 987 bp, Zea mays
  Peptide Sequence Number=SeqID_53372
atgaggcgaaaagacggcgggcatcccccatccgggggcttggaaggtggaaagatgcggcgcatgagggaggaagaagacatgaccggctccgagcagaagaagccaaactgccgcgcgtggtgcacgcaaccgcccagcggttacaagcccacgcgtcgcgcaaccggcgcgccggatgctgcatgcaagcaactgcatcgcctgcgccaccaccgtgcctcgtcgattgcggaaccaataccgcgactcgaggcgacccagcgcgcgacccagcggcgccagcctgacacggcggccaacgcggccaaaggagggccggcagtaatgacggtggcagacgcgcgggagcagcgggcacgtcgacagccaagctcacgtcccatccgggggcagcgagagagccccctctcacggtgtgaagacaacgcgcccgtgatccgttcctcgaacggctcgcgcacgcccaacggctgccccgccaactactcgccccgtcgcattaactctgcggctggacaggtggcgctcctggcaggagcaacgggcgacgcttcgccttcgccgaaacaaccgcaccaaaaaaggggttcgaaggctggcccccgaagggttcacagtcgcctcagacgccgagcgagggatgaccaggggtacgttcgatacataaccgaggctcgggctgcgctcccgagctcaccggagacaccatgttcggtgcccatcgagggtaacatggcgctctcccccctcctccttgcggaaaggcgacgtaggggcgtatgtaaaaaagccgagtctgtccctgatcgccctctcgccctgtgcagaggctcgggggctgctctcgcaaacccggctccggccgaaccgttgacagcgtcaacataccagcccgagaacttgggccccgaccgtacacccgggctacggccagctcgcatgagggaacaaccagaccagccgaagcattacgcaaggcattaa

SEQ ID NO: 9998 - DNA, 1080 bp, Zea mays
  Peptide Sequence Number=SeqID_53373
atgcttgctgaccccttcccgctctctgcgtataccagggggacggtgggtttgctgaagctgaaagaggaggacaacgccgaggagagggatttcgctgtgtgtgacgtgcagattggagggactagctcagttcagatggctctagagcgttcggttgggtattcgggtagagtggaagcggcaagggctacgcttgatcaggtcagagtggaagacatagacactaatgtagttttcctaaagaatttcctattcagcactagggaagagcattctcctatgaagataattgattttggtctctcagattttataagaccagtatttcttgctgctgatcagtgccctataggctatagcttgaagatggttgaactagaactattacgtttcctttgtgagaggattgttaagaaagaaaaagtgaagaaattcctattcagcactagggaagagcattctcctatgaagataattgattttggtctctcagattttataagaccagtagttgggagaggtgatctttgcatgagtccagtagaatttcaaccttctgtaagtgaagatttagtactggagaagaaatctggaaatgggcagcatgatgtcagaggcacacatcatcacagaaccaacatgaaacctgaaaaaccaattgacttgcttaggaaagttgatggcaataatatgtgtgctgactgtggtgcttcagaacctgattgggcatcattaaaccttggcgcacttctatgcatagagtgttctggggtacacagaaatcttggagtgcatatatcaaaggttagatctcttacacttgatgtcagagtttgggagccatctgtaatcaatctctttcagtcattaggcaacatgtttgtcaacagtatttgggaagagacgctgccagatgataattcaagtgctgatggatcagacacatcacagtacctctctgttagcaagcctaaacacaaagatgtattctctgccaaggagaagtttattcatgccaaggattccggctctcatcaagtgactcctccccctcacgctgactttgcggacaaatga

SEQ ID NO: 9999 - DNA, 831 bp, Zea mays
  Peptide Sequence Number=SeqID_53374
atgagtgaggtgccccatctttgggagaaggaatatcattcttacctggaggaagacgacccgtactttcggaatgcgacgagcaaccccgatgcgccatgcatcgttgatccttttcctatggttagcaaccttcgctcatgggagatcggcctaatctcagaatggcgtcaacaagcccctgtaaaaatttcagaatttttttacacccgagcgaaaagttttgcccagtttaaggaaggagaaaaacaaggaagcggcgttgactcggagagaaaaacactcgataaactcatcgatgaacctagaaatctgataccacttgatatagttgaggtgcccgatctttcggagaaaaaaacactcgataaactcaacgatcaacctagaaatctgataccacttgatatagttgaggtgcccgatctttcggtgagtggagataatttcgatttggcgaaagatgacccttacgatccgactacgacgagcaagcccgaggcaccaatgcaattgctgaaccaactacctgtggagaaaaaaacactcgataaactcatcgataaacctggaaatctgataccacttgatatagttgacgtgcccgatctttcggagaaaaaaacactcgataaactcatcgatcaacctggaaatctcataccacttgatatagttgaggtgcccgatctttcggtgagtggagataattccgatttggcggaagatgacccttgcgatccgactacgacgagcaaggccgaggcaccaatgcaatcgcagaaccaactccctgtggttaggaaccttgctgatgcgagatcggcctga

SEQ ID NO: 10000 - DNA, 465 bp, Zea mays
  Peptide Sequence Number=SeqID_53375
atgaagattattgaaagaaagtgcgaggctcaaaagggtgctgggataaggtctaacctgaattttgatgtggttttgtggactgtaggagaaaaaacactcgataaactcaccgatcaacctagaaatctgataccacttgatatagttgaggtgcccgatctttcgattattgaaagaaactgcgaggctcaaaagggtgccgggataaggtctaacctgaattttgatgtggttttgtggactgtaggagaaaaaacacttgataaactcatcgatcaacctggaaatctgataccacttgatatagttgaggtgcccgatctttcggtgagtggagataattcagatttggcggaagatgacccttgcgatccgactacgacgagcaagcccgaggcaccaatgctatcgctgaaccaactccctgtcgttagcaaccttgctgatgcgagattggcctga

SEQ ID NO: 10001 - DNA, 384 bp, Zea mays
  Peptide Sequence Number=SeqID_53376
atgcagattattgaaagaaagtgcgaggctcaaaagggtgctgtgataaggtctaacctgaattttgatgtggttttgtggactgtaggagaaaaaacactcgataaactcatcgatcaacctagaaatctcataccacttgatatagttgaggtgctcgatctttcggagaaaaaaacactcgataaactcatcgatcaacctggaaatctgataccacttgatatagttgaggtgcccgatctttcggtgagtggagataattccgatttggcggaagatgacccttgcgatccgactacgacgagcaagcccgaggcgccaatacaatcactgaaccaactccctgtggttagcaaccttgctgatgcgagatcaccctga

SEQ ID NO: 10002 - DNA, 309 bp, Zea mays
  Peptide Sequence Number=SeqID_53377
atggagaaaaaaacactcaataaactcatcgatcaacctggaaatctaatactaattgatatagttgaggtgcctgatctttcggagaaaaaaacactcgataaactcatcgatcaacctggaaatctgataccacttgatatagttgaggtgcccaatctttcggagaaaaaaacactcgataaactcattgatcaacctggaaatctgataccacttgatatagttgaggtgcccgatctttcgattattgaaagaaagtgtgaggctcaaaagggtgctgggataaagtgtaaccctgaattttga

SEQ ID NO: 10003 - DNA, 963 bp, Zea mays
  Peptide Sequence Number=SeqID_53378
atggggcacctcaactatatcaagtggtatcagatttacaggttgatcgtccacaaaaccacatcaaaattcagtccacaaaaccacatcaaaattcaggagcttgttgacaccattctgagatcaggccgatctcgcatcagcaaggttgctaaccacggggagttggttcagcgattgcattggcgcctcgggcttgctcgtcgtagtccgattgcaagggtcatcttccgccaaatcggaattatctgcactcaccgaaagatcgggcacctcaactatatcaagtggtatcagatttccaggttgatcgatgagtttatcgattgttttatctcttatcgtccacaaaaccacatcaaaattcaggagcttgttgacaccattctgagatcaggccgatctcgcatcagcaaggttgctaaccacagggagttggttcaacgattgcattggcgcctcgggcttgctcgtcgtagtcagatcgcaagggtcatgttccgccaaatcagaattatctccactcaccgaaagatcgggcacctcaactatatcaagtgtccacaaaaccacatcaaaattcaggagcttgttgacaccattctgagatcaggccggtctcgcatcagcaaggttgctaacaacagggagttggttcagcgattgcattggcgcctcgggcttgctcgtcgtagtcggatagcaagggtcatcttctgccaaatcggaattatctccactcaccgaaagattgggcacctcaactatatcaagtgtccacaaaaccacatcaaaattcaggagcttgttgacaccattctgagatcaggccgatctcgcatcagcaaggttgctaataacagggagttggttcagcgattgcattggcgccacgggcttgctcgtcgtagttggatcgcaagggtcatcttccgcaaaatcggaattatctccactcactga

SEQ ID NO: 10004 - DNA, 612 bp, Zea mays
  Peptide Sequence Number=SeqID_53379
atgcagattattgaaagaaagtgtgaggctcaaaagggtgctgggataaggagaaaaaaaacactcgataaacacaccgatcaacctggaaatctgataccacttcatatagttgaggtgcccgatcttttggtgagtggagataatttcgatttggcggaagatgacccttgtgatccaactacgacaagcaagcccgaggcgccaatgcaatcactgaaccaactccctgtggagaaaaaaacactcgataaactcatcgatcaacctggaaatctgataccacttgatatagttcaggtgcccgatctttcgattactgaaagaaagtgtgatgctcaaaagggtgctgggataaggtctaacctgaattttgatgtggttttgtggactgtaggagaaaaaacactcgataaactcaccgatcaacctggaaatctgataccacttgatatagttgaggtgcccgatctttcggtgagtggagataattccgatttggcggaagatgacccttgcgatccgactacgacgagcaagcccgaggcgccaatgctatcgctgaaccaactccctgtggttagcgaccttactgatgcgagatcggcctga

SEQ ID NO: 10005 - DNA, 540 bp, Zea mays
  Peptide Sequence Number=SeqID_53380
atggaagcaaaaacaagaccctatgtaatcatagagggagagttgtacaaacaaggagcctgcttcgtctcaaaggaaacttcgttgtatacgaagatgcttcgtttcaaaggaaactttgttgtatatgagagatgtttcgatgtgaacgaaaagaagggaatgtgtttttgccttcggctcaaaaagctacaagcgttggtttcgcccacaacaaagcagatgatatataaacgaaaggagcttgttgacaccattctgagatcaggccgatctcgcatcatcaaggtcgctaaccgcagggagttggttcagcgattgcattggcgcctcgggcttgctcgtcgtagtcggatcgcaagggtcatcttccgcgaaatcggaattatctccactcaccgaaagatcgggcacctcaactatatcaagtcgtatcagatttccaggttgatcgatgagttcatcgagtgttttttttctcctaaaatccacaaaaccacatcaaaattcaggttagaccttatcccagcacccttttga

SEQ ID NO: 10006 - DNA, 476 bp, Zea mays
  Peptide Sequence Number=SeqID_53381
aggtggtaccctttacccacaagtcatgttacccatctgccaagggatcgcgacttcccatacacctctaccgaggaggcgaggcagggaccgccatcgcagcaaaatcctcccgagggtctccctacactgaccactcccctactgcccttgcccctttcgggtatcaggatgatcttcaggtgacacgtgtcctcactgctaaacgtagcaatacagacaaacatgatttcgccgcccgcagggagtccgttcgccgccgcgtacacaggaggccacagcggatgcaagaagtagagaacgcgcagaagcaagggggcgagcctggcatccccaccatagccagcgccgaagatcatgggcggtcgtcaacaaactccgatctgccactagatcggagctcacgcttgaagcacatcctggccaaagtgccccacatgtcattgagtttggctgacgtcatcgctgaggtcgtg

SEQ ID NO: 10007 - DNA, 315 bp, Zea mays
  Peptide Sequence Number=SeqID_53382
atggagacccgtgcactcttgttttgcttaggaatcagggagaagaccgaaagggaaaaggatttgaacatgctggattcggactgcagaagaacaccaacttgtgacggtcaccacggtcagatgcgggctcggattggaatgttcaagcacaacatggaaagcttatcaagtctactttcatatggatccggaattatagacgagtgccctagtggccagggtgtcacgctccacaagatcgtgacagccataggaggtggtgtatcggttgctaaggcgcagcgtctttggaaggctgtagtcgggccgtga

SEQ ID NO: 10008 - DNA, 321 bp, Zea mays
  Peptide Sequence Number=SeqID_53383
atgcagattattgaaagaaagtgcgaggctcaaaagggtgctgggataaggtctaacctgaattttgatgtggttttgtggactgtaggagaaaaaacacttgataaactcatcgatcaacctggaaatctgataccacttgatatagttgaggtgcccgatctttcggtgagtggagataattccgatttggcggaagatgacccttgcgatccgactacgacgagcaagcccgaggtgccaatgcaatcgcagaaccaactccctgtggttagcaaccttgctgatgcgagaatcgctgaaccatctccctgtggttag

SEQ ID NO: 10009 - DNA, 147 bp, Zea mays
  Peptide Sequence Number=SeqID_53384
atgggaacaaatgggcatctcgacctcgacacggaaggaatttcttttgatgtcttgcatacacagctcataagtatacctttgatcatgtctctttcatatgctatgactaatgtattttcaagtgaatttcataccaagtcatag

SEQ ID NO: 10010 - DNA, 1983 bp, Zea mays
  Peptide Sequence Number=SeqID_53385
atggaccaggatcgccagggagctgcacagaagcgccaggcggttgtcaggcttcatgaagccaggccgaagaggcagcgaggggctgcgaaggctgctgcccccggcggaggcaagccgccgctggcggcgaagtcggccgtccctgcatctagcaaggcgccggaggctgcggctggcgccagtggttccaagtctacgaaggctgtgccggcatccagcagggtgccggaggtcgcgaaggcggcccgagggttgccgtctccgggcaagcacatcgccgactttgccaccgatattagtgtggacgactatcttggtgggtcggacgaagtccagcttgttattgctgcgcctgccgcggcgaccacggcggctgccgtagtgccaaaggcgaagggcggtgctcttagtgccagaggcgagatgtcggcacttgctgctgtcagggacgaggcgggcgctgtgtcccgccggctgaaggagatgaaggaggcactaagtcaggcggctgacttcgcagaccgcgcggcgtcgggggcgctcacggcagttgtgtctgccgaagtcgagagacttcggacgcaacatgctgacgccgtccgggaaaaatcggccgccgaaagtaagtgccgcaagctggcggacaaggtggccgcactggagggggagaagactgacctccgacgccaactggcgggggagaggagggaggccaatgaggccctcgccaaggcgcaggctgcgctggcggaggccaaattggcgcgggcggagggcaatcttgccagggagcgcgccgagcaattggaggagcggctcggcgccctgcagagccatgtggaaagggtcgaggccgcgacgcacacggaggctgagcggacgcgcaaacagcttatggattcataccatgagctgggcgcgcggaccgctgacttcgaagtgccggaccaagagcccggacttcgctgcctgaagtgggtacaggaggagttgcaggcactccccactatcgtggaggggtttatgtcttatgcttccctggtcacctgcgagggggcgatgaacgcgctctctcgcgaagggtgccggcactatgaagtcttcgaccaagctgatgaagatttcgagcgtgatatctacaaggtcgaggactctgtagtgaaggaatccgccggagccctctacgaccggatgtggggcccccacgttcgagaggtggtcagggaacgggccgagacggcgaggggtcaggcggcgcgtggtgagcgggtggatgactttggggctttgaacagcacactgcctgacccggagtcgaacccggcggaggccgccctggagccgctcccggagaccgccgaaggagcccctgaagcccccgcagccgctgcggccggtgaaggcccacccccagagaccgccgaaggcattcctgatgcccccgcagccgctgcagctggcgaaggcccgcctccaactgctgcgccgagggttgaagatcctgcgacggttcaagattttgggcctgcgcacgcaaccgccactactaattttttggcggcttcgaccgtggatgatggtaataaatcggatgggtctacatctaagttttctgattttggtgactctgggagctcgattgagtggactgaggagtcgtcgaatgaggacttggactactttgcggccttggatgtggcagcggcggaggcttcaccgcgcgctacggatgcagaagatgtgcctggtccgagtactgggcgtaggcggcgaagggcggttgcgaagcgtagagtgagtggggcggacggaggtcgacttcgtgtgagtagggccagccggcaggaactgttgtccttgccggccaccgtgagtacaggtgagggggaattgcggagtctttttgcgggtgaggagcttaggataatgttattcaactatagggagatgggaattattctgaaggctgagccgatgtag

SEQ ID NO: 10011 - DNA, 273 bp, Zea mays
  Peptide Sequence Number=SeqID_53386
atgtcggcttcccggaccccttccggcttgcttccatgccttcgcttcggtttgttcgattttttccttctctcggttggatctgccagagtggtcggtccgtcggttcgcgtcgattcaatggggtttggcccatattgctggtacagggcgcaggagaggctacacttcctctatgagtcgaggttggccgtcggcaagagctccgaagggttccaggcgctgcagcaatctacaccagggccagcttcgcgtctacttctgcacagatga

SEQ ID NO: 10012 - DNA, 261 bp, Zea mays
  Peptide Sequence Number=SeqID_53387
atgcagcaggtgcagcaacaaccacccgcacctcaacctcagatcccatggacgccgaagattggttgcgtaccgtggaaacgtgagttgcacactgctcagtgcaacaatcgtgagaaggtgctgtatggaccctgtcagctaagaggagtagcacagtcttggtgggagtcttacctcgccacccatgccgaccctgaagccatcacctataggaattcagggataacttccgtagttaccatgtactcgagggactga

SEQ ID NO: 10013 - DNA, 276 bp, Zea mays
  Peptide Sequence Number=SeqID_53388
atgggatccactttagtaagcatttctgcaaaaacagagtctttgaatattgaaaagccttaccttgactcccatataaccagcatacccttgagagtcttttttttagtcgggtggttccaaaagaagaaaatcaagactgatgtgcgggaggactcggtcctccacctaggatcttttgcttttgtcttctcgggaggagtttgtgcctccctgatgtctgaggacatgtgccgaggtgcaaggcgtgctcagcaggagcagcaagacccctag

SEQ ID NO: 10014 - DNA, 105 bp, Zea mays
  Peptide Sequence Number=SeqID_53389
atggggctcggtgtatgcggctcgctctgccaaggtaaagaaagggaagaaggcgtcaaagtggatctccaggtgttccaggacgtcgatgagttcgaggattag

SEQ ID NO: 10015 - DNA, 456 bp, Zea mays
  Peptide Sequence Number=SeqID_53390
atgggcaagaacaacaagcacaagcgtgagccaactcctccatcggaggagttcggtgactcggagtactcagaggaggagttctccactgagtccgaggggtctccggctcccatccccctgcgtgagtcgtcagacaactcagacgactcccaggggcttgcagcggaggtctggacgtacatccgggccgtcgagcgttccgggctcgagggctcggatgagtcggagtactcctcggatgaggaggactcggacggcggcggcgaggacgaggatgacgacgacgacaacgacgacggtggcgacggtgacggcgacggcagcggcaggggcggtggcggcgacagcaaggatgatgacgacggcggcagcaggggcagcgaccggggcggcagcagcaggggcagcaccagaggcggcagcggcggcggcagcaacagggccagtggctag

SEQ ID NO: 10016 - DNA, 732 bp, Zea mays
  Peptide Sequence Number=SeqID_53391
atgatgaccgcgtcaaaaaaagggaccgggaaaggggacatttcgaaagggatccttctccacgaaggaagcgggccccgagccctcctactgatcagggccgcctcagagcactcgggctccgcgcccactactgatcaggggttcgaaggctggcccctcgaagggttcgacagccgccccaaagcacgcagagcgagggatgactctgggtacgtccgatacatggccgaggctcaggctacgctctcgaggcgcattcaatgcaaggatcgcctggcgccttatcctgacacgcgtgcctcagtcggcaaggtcgaacagctgagtccagcctcaggcgtagcaggaagctccgcctcgcccgaccttgggcctcggcctcaggaggaagtgttcgcctcgcctgaccgcagggctcgccctcaacctcgacttcggaaggtggtctccgcctcgctcgaccccagggctcggcctcaacctcgacctcggaaggtggtctccgcctcgcccgaccccagggcccggcctcaacctcgacctcgagaggaatcgcgtcctcgcccgaccccggcctcggcctcaggaggagtctttgcctcgcccgatcttgggctcggaccgaccacgccgcaggggggaccccccggggtcgaagcaccgacagttgtctacaagacagaaatggaaataaggattaaggtgtggtaccgtgtgtcaagcgtttga

SEQ ID NO: 10017 - DNA, 537 bp, Zea mays
  Peptide Sequence Number=SeqID_53392
atgaaggccaagtcacaccatcaatcaaatcaaggaggaacctacaaaaattatgccacaagcaaggctgagtatactaatactcagctagacttacccgcccaagatcgggcgaggcaaagactcctcctgaggccgaggccggggtcgggcgaggacgcgattcctctcgaggtcgaggttgaggccgggccctggggtcgggcgaggcggagaccaccttccgaggtcgaggttgaggccgagccctggggtcgagcgaggcggagaccaccttccgaagtcgaggttgagggcgagccctgcggtcaggcgaggcgaacacttcctcctgaggccgaggcccaaggtcgggcgaggcggagcttcctgctacgcctgaggctggactcagctgctgtcagcctcaccctggcgggtggcacagcagtcggagaggggcgagcagcgctgttttcctgtcaggtcagtcagtgggagggcgaagtgactgcggtcacttcgaccttgccgactgaggcacgcgtgtcaggataa

SEQ ID NO: 10018 - DNA, 732 bp, Zea mays
  Peptide Sequence Number=SeqID_53393
atggagagtcatgatctttgggcagaaagggaatcacgacttgagggtggcaatgagagtgatggttttggcattgactatggtaatgcaggagatacagtttgtgaggagctgctcccctgtgctttcgctggaggcgccccctgcaccatcactgagcgccccaaccgctggagtagccgctggagcagctcaagccacagcaccgacctttccaccgaccaggagccggaaggatgggttgctcgacccatcactcgtgacgctgctcgtgggtgtcacttccacgacgcgctcgacacccttctacgccaggcacttgaccgacgtacctggtccatcgagtatcgctgtgtggtcttccagcacagtcgtggggtttatccggaccgttgggaggcgacctgcttggtgcgccgtctagagaacagtctctggggtgcggagatctgctcagagcactactctatctctgagcgggactcagctgaggcggcaatgcaagatgtcgcacggcgtgtgctttcgcactactgctcagtgctcggcggggtagccgatggtctcaacctgaagtattacccccgctgcccatctggcagcacaggaggcgtgattgtctcacctgttggtgaggacaatcctaggttgagtagcacagtcaacctagccgccatgctaaacacagagctggaccatgcactagacgagttgagtagggctcgtgcttag

SEQ ID NO: 10019 - DNA, 90 bp, Zea mays
  Peptide Sequence Number=SeqID_53394
atggcggcacggcttaccggcggcgagggtggtccgacgaagggcagggttggctccaagaggtccttgcggtcacaacgagggtattaa

SEQ ID NO: 10020 - DNA, 171 bp, Zea mays
  Peptide Sequence Number=SeqID_53395
atggtccatgggggatgcgttgtctacgagacggaaattggaataaggattaaggtgtggtaccgttctctggaggacatggttgctggagtgacttggtcgtccatcttgccaccgggttggacagtcgagtgggaccctacctcggctgaggaggagcctgaggagtga

SEQ ID NO: 10021 - DNA, 498 bp, Zea mays
  Peptide Sequence Number=SeqID_53396
atgaggaagaaacacggtatcgcacccaagataccaagatgttcaggccccgatagccacaatgaacagacaccggtactcaaggtgccattacaaacggaactccggttccactcccgcgggtatgaacaacctccacatcggagggcctgcgggacgacaacttccaggtggctcgccgccgcccactcctgcagcagcgacaacgacctccgctccgggcggccaaacagcagcagcgatgacctcagggcagacgctgctgcgacaaggccctcgcccacgtccccactcgaggggcgaggacaagctatcagagccaaagagccagaggcccagagcgcagatggcgccgacgatctcgtcggcgacgaggccttctccagctgccacctgcccaccagaagatccccactcaagtcctcccggacgggcgagcaccgacctccgcgcggaggcgtcgtgccagagcgagggcaggacaacccaagaacatga

SEQ ID NO: 10022 - DNA, 618 bp, Zea mays
  Peptide Sequence Number=SeqID_53397
atggcgcccgaggctggacttggctgctgccagcctcaccctggcaggtggcacagcagtcggagcagggcaggcggtgctgttctcctgtcagtcggttggcgcggcgatctggccaaggttgcttcattgcgaagcctgcccgagcttggcctcgggcgagtcgaaggtggcaatgagaatgatggttttggcattgactatggtaatggtaagtggtattctttccgtttggaaaggatgactcatcttagacacactgcacggaagtctgtcatccccttcttaccctctcgtctcacggagcgtccgcttcgtcgtccagtgactggcgcaccctgcaccaccactgagcgcctagcccctggagtagctgctggaggagacccagacaacggaggtggcgacagcagctcgagcttcagcactgacctttccaccaaccaggagttggaaggatgggttgctcgacccatcactcgtgacgctactcgcggttgtcacttccacgacgcgctcgacaccctgctacgtcgggcacttgaccagcgtacttggtctatcgagtatcgctgtgtggtcttccagcacagtcgcgggtctacccggacccgctag

SEQ ID NO: 10023 - DNA, 393 bp, Zea mays
  Peptide Sequence Number=SeqID_53398
atggagaaccacccggaaaaacagtgctgccacaagggtgaggacagcgccgcctacgccgctccgactgctgtgccactcgacagagtgaggctgacagcagccaagtctggccttgggcgccataggaagctccgcctcgcccgaccccagggctcagactcggcctcggccccgaaagacgatgaactccgcctcgcccgaccccagggctcggactcggcctcggccccggaagacgacgaactccgcctcgcccgaccccagggctcgggctcgacctcgaccacgaaagacagactcgacctcgacctcggaggagcctccgcctcgcccgacccagggctcggaccgaccacgtcacaggaggggccatcattaccctacccctag

SEQ ID NO: 10024 - DNA, 450 bp, Zea mays
  Peptide Sequence Number=SeqID_53399
atgggcaagaggatggttcgtacaatccaaaccgcccggaacaacaccaactacatccctctgccacgacaagttcccgtctacctagtggtagtcaaggaaatccctgtggatctccctcgcattcgtgtggagaatggagttattcaggaggacaggtcgaaggagtttcttcctacgcccaccccattggcagaatcactagccttcgcagctgtatcatcatcttcagcaccgccagcaccagcagtccaaagccctgctccaagaggcgacgacccagacgactctggtgacgatgatgaagaagacgaagatggagaagaagaggaggagaacatcaacgaggaagccaacggtgaacaacaggatcacttcgtgtgggtatggcctgtcaccgaacattatatgtggcggaaccacccgaatttttccaacttaagtgcctaa

SEQ ID NO: 10025 - DNA, 453 bp, Zea mays
  Peptide Sequence Number=SeqID_53400
atggatgcaggtgatagagggttttggactatgtcagcacatgagtctctgacgctgctatccacctatgttgcttcgatcagcgatgctactaggcgaactctgtggtccctcagccacacttgccggcagcagctgcacaacacgaagtacatgcatcttcctctgcgtcttcgtggagaaagccagaccaacattgttccaggtggagctgaagaagatcgcctcaacaccttagctggtgtggtggcaggtcttaacaccgacctagacagtgctaccctggacctctctagagtacacttgaagctggaggatgcacacgcaaggattgcagccctggaagttcaactagaaggaagggatcccccggaagctcaagtccctgccatggcgttgtcccctccccgcaagaggatccaagaaccaggatccatcaccaggctgctatag

SEQ ID NO: 10026 - DNA, 582 bp, Zea mays
  Peptide Sequence Number=SeqID_53401
atggatgttttgaggattaggaaccttggagaggaccagcaagaacttgggaaaggcctaggtgttgaggaggagcaacaagggcgtccacaacaggaaggagatcaagttcgagtcagctgtgactcccatctcgggttccaggaccagtctgcactaaaatggacgcccaagatgcatccagactccgattgcgacggactggatatggttggaaagataacgagattatctaaccaacccaactgggataagccttcatggcgaggtcattcgtgtgttacgggtgataaccaatggagccgtggtgtagtgattgcgaggaaccgttcgctcagagccttggatcatcaatgtcgagatctccactcaatcaagttatcgtatctcatggaagatcgggccgcgtctactatcacaagagacacaagatttatcccgaggtttggtcacaccaccaaggtgccctacttcctcgttgaggcgcccacaaagagctgggtctctttcaaccctaatcctccctttgccgaccacaaaggtcaagcccacacaataatctttgctcaaatgagcgggtaa

SEQ ID NO: 10027 - DNA, 573 bp, Zea mays
  Peptide Sequence Number=SeqID_53402
atgcacacgggcgcgagcgcgcgaccgcgactgacaggcggagacggggtgtcagcaaaccagggcgggctgaccagccgagtccagcggcaggggcgcgggcatgggaaaagtgatcacctcgagtgcgaactccgggacgcttggagaacggtaggggtgcgatggagcctcgggtcgacggcggcggggctccggctgcgcaagaaacgctccgatgagcgcggaccgggcaaaccaaagaggggaagggcaaaccagagggtgtcccgagtagctgacggcaaggtggaactcactgaggcaacagacagggtgtgggctcgacgacggtcgcagaacggacgacagtcgacggcgggtggtggcggagttctctggtcttgcgcgcagagcgagggagagggcgagagggttcggctgagggtgcaagtgagcgggggaagggttttcaattcaaattcaaatcaagtttcaaattcaaaccaaatcaaatatgtgcaacaattcaaagaaaaattggaactcaacatgatgcaccatttcatgactcatctgttttgtcaaaaataa

SEQ ID NO: 10028 - DNA, 1071 bp, Zea mays
  Peptide Sequence Number=SeqID_53403
atgggaatcggtcggtacctcttggtcgacgggcggtggcgaagtcgcgtcaggggcggactgcaccattgtctcaggtacaagggcaatgcccagcaagtccttcgcgagcgtgctggcatcgtccgtctgcttggggttggcgtgttgcggggaaacggcgctcgtcttcgtctcagacgcaaggtcgaagcccgacgtgtcccccgctggggcgccagcgtcgtcgacttgctcgacatccgacgaggtgccgcctcctgcttggccatgcctgccccgcatcctcctccgtcggcggggaaggtgacgagacagacccggatgttgctcttccgccacgtggggaagacgtcgtcgattccgccgccggcgggcgggttgacggccgccattgtcgttgtcacacggcagaggaaggagtatcatgtcgtagctgccatcgagggacatgaactcaagactcccgaaacggagcaccgtcccgggttggagtggttgctagagactacccatctggagctttacgggaagctgtgtgtcaacacgcagcaggcccctacctggcgcgccaactgtcggcgtttcgacctcggggggtccctggaccgacgagtcgggcgaggcggtggctcctccgaggtcgaggtcgagtctgacccctggggtcgggcgaggcggagtccttcttctgaggtcgaggtcgagtccgacccctggggtcgggcgaggtggagtccgtcttccaaggtcgaggtcgagtccgagccctggggtcaggtgaggcggaggccgtcttccgaggccgaggctgtgtccgagccctggggtcgggcgaggcggagtttgtcgtccagtgttgaggttgagcccgagccctggggtcgagcgaggcggagcttcctatggcgcccgaggctggtcttagctgctgtcagcctcactctgttgaatggcgcagcagtcggagcgacgcaggtggcgctgttttcttgtcaggtcggtcagtggagcggcgaagtgactgcggtcacttcggctctgtcgactgaagagcgcgcgtcaggataa

SEQ ID NO: 10029 - DNA, 894 bp, Zea mays
  Peptide Sequence Number=SeqID_53404
atggtgaccaccagtttgatggtggggagaagcaagccgggctacgacctctgccccgcccctcagctttcaaggatgttcatcatcctggctggggcggaggccggactgagccggagctctacctcccgcgcggggttcgtgggtcaccttctccctcatcattcaggggagagggcgctcaccggcctagcgggagggtcggacttcgacaacgcggggctggtcggcgacgagcgtcgtcagcttcagcgcgttgggctcgctggctcagctggccctggctcggctcctggtgccccctcctgccgtgagagcggttttcgcgccgcacgcaccggaggaccgcccaagacatcgcgcgctgctagggcgtcgttcgtgttcttgggatgtcctgcctttgctccagtacggcgcctctgcgcggaggcctccggctctttggctttgatagcttgtcctcgccccttgagtggggacgtgggtgaggggctcgttgcagcagcgtccgccctgaggccatcgctgctgctgtttggccacctggagcggaggtcgttgtcgctgctgccggagcgggcggcggtgagccacctggagtctcgtcgccccgcaggccctccaatgaaccctcggccgctctgcggtgagtcggagccggaggcagcggtgtcagcatggacagaggcaaagttggctcaaaaagaagacttcgtcggccggagcctggccgggccgtccactagcgggaccaacgccggagtcggcaggaccgctcatccgaacgcgagttacttctcgcagaaggcgatgagtgagaaccttggcgatgacgaacggcccttcccagggaggcgtgagcttgtgccgccctcgggcgtcttgtcgtag

SEQ ID NO: 10030 - DNA, 111 bp, Zea mays
  Peptide Sequence Number=SeqID_53405
atggggtccaggcacagtgcttgctctgccgaggctgagtgccgaggtaaagaagaaggtgtcgaggcggatctccaggagttccaggacttcgatgagttcgaggattag

SEQ ID NO: 10031 - DNA, 1044 bp, Zea mays
  Peptide Sequence Number=SeqID_53406
atgtcttcgcgctccctcatgcatcgcgtctttccaccttccaagcccccggatgggggatacccgccgtcttcccgcctcatcgttggaggaacgcaactccgtgggagttggtacctttcagccatcgttcggcttcaaggattttcatcatgcagcccggctgcacccctccgccggcggtcacccaagatggtgacctccagcttgatggtgggggaaagcgagccgggctgcggcctctgcccctccctcagcctcaaggattttcatcaccagggctggggaggggactgcaccgtgcctggctctcggacgcgagtggcttcggagccgctcgcggcgccggcgtctgccacggtagctggaagaggttcttccgccgacgagatagccagggccgcccacggaccgacctccaactctacggccttctgcccgtccttgcctcacaagtttgggcatgggcgggggcctcctggcagcagcacccgccctgaggtcagtgctgccgctgttcggccccccggagtagaagtcgtcgtcgttgctgctgctggagcaggtgacggcacgccgttcgtcggtcttctgttgctccgcaggccctcccccatggagtggggttactcgcctgttggttgtctgaaccgcttcaccaagcgtgagtcgccccgtgtcaaggtgacgagtgagccgggtcgtccgttagcgggaccgacgccggagttgaccagccgaggcctcgggttgggctggcgcccttggaagatggttggccgaggccccaggggtgaccggccgagccgcctgctcgggccggattcccggagaagaccctggcggcgatggcccgggcgtggtgatgacgtcgtccttcggagtggagatcttcggaccgcgtcgccgtccgaggctaggtcgaacctcgccgaaggtgtcgtcgatgccgagggagctgctgcccccttccagcgtcaagacccgagcctgcaggatcagattgttttgcagcgtgtgccttctgcggccgccgaggcctga

SEQ ID NO: 10032 - DNA, 1470 bp, Zea mays
  Peptide Sequence Number=SeqID_53407
atggacagggacagcagctcgtcggtctcggcgtcggacgggagctcggaggcgggggagcgcggcgggtgctgctcgtcgccgccgtccacgcggagcctcgtcgacacggcgggcaacaacctcatcagccgcaccgcgtccgacgcgtccacgtccctctcggaccggtgcagcagcgtcgacgtcgaccacagcgggccgttccagcccgccgccgccgtggccaagctcatcggccggtcgtccccgccgtccgccgccgcgtcgctcagacggctcagcatcaagccccgcgccgacgtgctcgaccgccgctccaccgaggacgagatggagctggtgaaggagcgcttctctaagctcctgctgggcgaggacatgtccggcggcggcaagggcgtctgcaccgccgtcgccatctccaacgccatcaccaacctctacgcgacggtgttcgggagctgccacaagttggagccgctgccggcggggaagaaggcgatgtggacaagagagatggactgcctcctctccgtctgcgactacatcgtccagttctacccgtccacgcagaccctgcccgatgggaccaaagttgaggtcatggcgaccagaccaaggtcggacatctacatcaaccttcccgcgctcgagaagctcgacgccatgctcatcgacattctggacagcttccagaaggcggagttctggtacgcggacgccgggacgaggtcgttcggctcggtcacctcgtcctcgtcgtcgaggatgtcgtgttcgtcgtcattcaggaggtcggctcaccggaacgacgataagtggtggctgccggtgccctgcgtcccggacgccggcctcaccgacaaggcgcgcaaggacctgcagcagaggcgcgactgcgccaaccagatccacaaggccgctgtctccatcaacagcggcgtcctcggagacatggaggtgccggagtcgttcatggccgtgctccccaagagcggtcgggcaagcgtgggggactcggtgtaccgcgtcatgcttggcgccgacaagttctcgccggagttcctgctcgacacgcttgacatctcgtcggagcacgacgcgctggcgatggccgaccgggtggaggccgccatgtacgtgtggcggcgcaaggctagcggcagccacggcaagctgccgtggagcaaggtcaaggagctcgcggccgacgacgacgacaagaacgtgacgctggccaacagggccgagagcctcctgctctgcatcaagcaccgcttccctggcctgtcgcagaccaccctggacaccagcaagatccagttcaacaaggatgttgggcaagcgatcctggagagctactcgagggtgttggagagcttggctttcaacattgtttcgtggatcgatgatgtccttttcgtcgacaggtcgataaggaaactgagtgataacctcaagtcctga

SEQ ID NO: 10033 - DNA, 723 bp, Zea mays
  Peptide Sequence Number=SeqID_53408
atgaccaagtattgggttctacaaaagagcaaatggtcaaacgaaggcacctctggtctgaggcactcctctacaattcaccggactgtccggtgtacaccggacagtgtccggtgctccaaggaagagcggcctcaggaactcgccagcctcgggaaatcacagcagcggctccgctataattcaccggacatgtctgaagtcaggcacgcgcgcgcttgcacaccggacattgaacagtacatgtccggtgtgcaccggacatccatgcgggcccagaagtcagaagctccaacggtcgaatcccaacggcctggtgacgtggctgccgcaccggacatgtccggaacaaatgatgatacatatcaaaagctcaaagaagaaaatgagaggctaaagatgggcttgacacaacttaaagggaagggaattcctcaaccttctcaagataaccgtgatcacatggtgaagaagcttgagacgggaacaatcgaggcatgcacaaaatcccttgaagaaaatgtcaaggacttgaggattaccaagaggaagaaacaaaagaagaaaatcaatgcctcttccaaaagcctcaaacatgcctccatacaaggcgggcctagaagtcagaagctccaacggtcgaatcccaacggcctggtgacgtggctgccgcaccggacatgtccggtgcaccattcgacagcagacttcaccaacggctag

SEQ ID NO: 10034 - DNA, 1224 bp, Zea mays
  Peptide Sequence Number=SeqID_53409
atggaatacggcgccgtcctcgccgccgcgccgctcgtcgcacggccgaactggctcctcctctcgccgccgccactggcgccgtctattcagattcagaatcgtctttattcgatctcgtcattcccactaaaggctggacctgtaagggcatgcagagctttagcaagcaactacacgcaaacatctgaaacagttgatttggactgggagaacctgggttttgggattgtgcaaactgattatatgtatattgctaagtgcgggacagacgggaatttttctgagggtgaaatggtgccttttggacctatagcgctgagtccatcttctggagtcctaaattatggacagggattgtttgagggcctaaaggcgtataagaaaactgatggatccatcctattatttcgcccagaggaaaatgctgagaggatgcggacaggtgctgagaggatgtgcatgcctgcaccctctgtcgagcagtttattgatgcagtaaaacaaaccgttcttgcaaataagagatggattcctcctactggtaaaggttctctgtatattaggcccttacttatgggaagtggggctgttcttggtcttgcacctgctcctgagtatacattcattatatttgtctctcctgttggaaactactttaaggaaggtttagcaccaataaatttgatagttgaagacaagttccatcgtgctactcctggtggtactgggggtgtgaagaccataggaaattatgcttcggtgttgatggcacagaaaattgcaaaggaaaagggttattctgatgtcctctacttggacgctgttcacaagaagtaccttgaagaagtttcttcatgcaatgtttttgttgtcaaggacaatgttatttctaccccagcaataaaaggaacaatattacctggtatcacaaggaaaagtataattgacgttgctttgagtaaaggcttccaggttgaggagcggcttgtttcagtggatgaactgcttgatgctgatgagacttatttagcaatgatatcattacatgtaagggagttcactttgcagagtggaatacggccaccaaggtgttggcgttgtgtcccagcagctgtacacttcactgacgagtcttcagatgggtcaaaccgaggattggatgggctggactgtgcaactgaattagttggccgtggttcgtggatcattcccaacagatga

SEQ ID NO: 10035 - DNA, 309 bp, Zea mays
  Peptide Sequence Number=SeqID_53410
atggggctcggtgtatgcggctcgctctgccaaggtggtggcgaggatgatggttttgactatggtaatggtgcccctgaattactcgacaagttcggtatctttccttacctcaccaggaacgtttcacccgtcttgcagacattacagaacatcggagatgaagcaatgcggaagctattacataaacttacatttattgaaaacaagtcttacccgactaaggaaaagactctcaagggtatgctggtcatatgggaatcaaggattccaaggggggtaatcaagatcaaggaagcaagcaagtga

SEQ ID NO: 10036 - DNA, 438 bp, Zea mays
  Peptide Sequence Number=SeqID_53411
atgagcccagcaggggaatgcagtgggaatcaccatttcaaggggctagagcagggatgcgctagggggctcgaccgggaggaatcgagcggagatgggtccgcacctgggcaggggatgagacacccagcaggggcgggctcagggagagaggagatgggtggggcttcacaatggaggcagcgtcggcaatggctactcggagcacgacgatgcgaggatctgcaggggccattcgacaagggaagggctgggcagggggcgtcgtggctacttaagagtggagcacgccagggcgctggccgccggggctggctaggccaccgcagggaagcagggcagggctgtccgacgagactgagggctggccaaggggtcgctcgaccgacggggctggagagagggacgtggggaggacggactcacctgcgcacgtga

SEQ ID NO: 10037 - DNA, 627 bp, Zea mays
  Peptide Sequence Number=SeqID_53412
atgacgcttcccaaaaaccttattcgccctctcccggtgcaggatctagaagacgaagggttccggagacctgctctcctgatcgcagatgcacctctgcggtcgggacgaagagaactaaaaggcggctcagctatgaagagaggcgaaaggattcttgtgagaagttatatgttattggcttctggacctttagtccacaacagtgatagtattacatgcatatacatcgtccctattgtcaaatggccatccactcacgtcttatcattggattatggtctgggctcggactctggctcagccccggaagacgacgaactccgcctcgcccgacccagggctcggactcgggctcagccccagaagacgacgaactccgccttgcccgacccagggctcggactcgggctcagctccggaagacggcgaactccgcctcgcccgacccagggctcggactcgacctcggcctcaaccgacgatctccgtctcgcccgacccaagggctcggactcgacctcggaagatagactcgacctcgacctcggaggagcctccgcctcgccctacccaaggctcggaccgactacgtcacaggaggggccatcattaccctacccctag

SEQ ID NO: 10038 - DNA, 927 bp, Zea mays
  Peptide Sequence Number=SeqID_53413
atgcaggcggcatgcaaccgcactaagtgggcgcaccctttcgactccaacgcgtccagcatggaggcccaggcccacacgtcatggaccgggaaaggggataccccgaaagggatccttctccgcgaaggaaacgggccccgagcccccctactgatcagaggttcgaaggctggcccctcggaggggttcaacagccgcctaagagcgctcgggctccacgcccactactggttagaggttcgaaggccggcccctcggaagggttcaacggccgcctcaggccactcgggctccgcgcccactactgatcaggggttcgtaggctggccctcgaaggccaagtccggcctcaggcgccataggaagctccacctcacccgacccagggctcggactcgggctcagccccgaaagacgacgaactccgcctcgcccgacccagggctcagactcgggctcagccccggaagacgacgaacttcgcctcgcccgacccagggctcggactcgggctcagccccggaagacgacgaactccgcctcgcccggcccagggctcggactcgggctcagccccggaagacggtgaactccgcctcacccgacccagggctcggactcgacctcggcctcagccgacgatctccatctcgcccgacccaagggctcggactcgacctcgacctcggaagacagactcgacctcgacctcggaggagcctccgcctcgccctacccagggctcggaccgactacgtcacaggaggggccatcattaccctacccctagctagctcaggctacggggaacaagactggcgtcccatctggctcgccccgcgctcctccgacggccacgacatcacacgaacagggtgccaaaacctctccggctgccacgacggcatgtacttagggcactag

SEQ ID NO: 10039 - DNA, 441 bp, Zea mays
  Peptide Sequence Number=SeqID_53414
atgaaggaaaaggaggtggacaacaacaaaaagaaggaattggagaagccacaagaaaagaatgagaaatccaccgacttgagtcacaagaagaaggatgtcaaaaagaaaatgatgaagaagtcacttcgccgctccactgaccggtctgacaagaggacagcgccgccctgcgccgctccgactgctgagccactcgacagagtgaggctgacagcagccaagtccggccctaggcgccatgggaaactccgttttgcccgaccccagggctcggactcggtctcagccccggaagacgacgaactctgcttcgcccgaccccagggctcagactcgggctcggccccggaagacgacgaactccgctccgcccgaccccagggctcggacttgggctcaaccctggaagacggcgaactccgctccgcccgaccctag

SEQ ID NO: 10040 - DNA, 687 bp, Zea mays
  Peptide Sequence Number=SeqID_53415
atgggtcaccttctccctcagcattcaagggagagggcgctcaccggcccagcgggagggtcggacttcgacaacgcggggctggtcggcggcgagcgtcgtcagcttcagcgtgttgggctcgctggctcagctggctctggctcgggtcccggtgccccctcccgccgcaagagcggttatcgcgccgcgcgcaccggaggaccgcccaagacgtcgtgcgctgcttgggcggcgttcatgttctggggttgccctgcctttgccccggtacggcgcctttgcgcggaggtcggtgccccgctcgtccgggaggatccgagtggggatctaccggtgggcagatggctcctgtcgtcggtgctgaggtggcggcggctgaagaagtcctcgtcaccgacgggatcaccgccaccatccgcgctccgggcctccggccctttggctttgatagcttgtcctcgcccttcgagcggagacgtgggcgagggcattgttgcagcggcgtccgccctgaggccatcgctgctgcagttcggccacccaaagcggaggtcgttgtcgctgccgccggagcgggcggcggtgggcgacctggagccttgtcgccccacgggccccccaatgtggggggttgttcgtacccgcggaggtggaaccggagttccgtttgtaatggcactttga

SEQ ID NO: 10041 - DNA, 777 bp, Zea mays
  Peptide Sequence Number=SeqID_53416
atggactcataccgcgagctgggcgcgcggaccgctgacttcgaagtgcccgaccgagagtcgggccttcgctgcctcgagtggctgcaagaggagttgctggcgctcccgaccattgtggaggattttgagcgcgagatttacaaggtcgaggaccgtgtggtgaaggagtccgcgggggccctctttgaccggatgtggggccctcacggtcgggaggtggttagggagcggtccgaccgggcgaggggtcaggcggcgcgtgccgagaccgtggaggacttcggatctttgaacaacgcgcggttcgaagccgaggagaacccggtgacagccgaggctgaggtcgtcctggcgccgcccccggaaaccggcgaaggctccctcgctgcccctgcggctactacgtccggcggtggctcgtcgccaaccgctgtgccgagggctgaggatcccccgaagacggcgacggagccagcagcggaggatcccacggctgctgggccttcgcaggttcaagattttgggcctgcgcacgcaaccgctactgctaattttgtggcggcttcgaccgtggatgctgggaatgaatcggatgagtctgactctaagttttctgattttggtgactctgggagttcggttgagtggacggaagagtcatcggatgaagacttggattactttgcggccttggatgtggcagtggcggaggcttcgccgtgtgctgcggatgctgaagttgtgcctggtccgagtgctgggcgtaggcggtga

SEQ ID NO: 10042 - DNA, 289 bp, Zea mays
  Peptide Sequence Number=SeqID_53417
gttccttcgaggtggagatcctccgaccgtgttgccgttcgaggccgggtcggattccgccgaaggtggagtcgacgccgagggtgctgctgctcccccactgatgtctgaccctgcaggaatagtttatcttgtagtcggaatcgcttatccgagcatgagttacttatcgcagaaggtgatgagtgaggatcccactttcgaagtagtcgaaaagcacgaaaggcgttctggcagaaagaccttttccgaggaaaattttgacgcagagggggttcgccccttctag

SEQ ID NO: 10043 - DNA, 354 bp, Zea mays
  Peptide Sequence Number=SeqID_53418
atgggcgcgattaaggtcaaggctcagtccactcaagggacacgatctcgcctcgcccgagcccagcctcgggcaaaggcagccgaccccggaggattcacgtctcgcccgaggaccccctcaagcgacagacacaacttcggctcgtccgaggcccagtctttgcggagaagcaaccttggccagatcgccacgccaaccgaccgtatcgcaggagcatttaatgcaagtcgacagagccgaagtgaccgcaatcacttcgccgctccactgaccgacctgacaggaaaacagcgccgcctgcgccgctccgactgctgtgccactcgacagagtgaggctgacagcagctaa

SEQ ID NO: 10044 - DNA, 1425 bp, Zea mays
  Peptide Sequence Number=SeqID_53419
atgatcctgcgaacgtacgggcgcagatcccgctccttctccgacggcgggggcggggtctcgtcctcgcaggacgcgttcgactgcgacgacgccgccgacttgctggtgtcgtcggcctcgcagccgctcccgctcccgccgtcgcaggagtcctcttcgatgtgggacttcgacgaggacccacctccgtccccgccgcggccccggccggaggggcggcggcgcggggcaagaagaggagggtgggagctcgcggaagcccccgcggtggcgccgacggcaacgctgatggaggcggaggagtacggagagatgatggagagcgtggacgaagtcacgttcgcgctcgacgggctccgacccgcagcgcagaagcggacgcggcgggccagcctgctcgcgctgctcgggatctgcgcctccgccgagcgccgccgcgtgctccggtcccaaggactggtacagcaaattatcgatgctattttggttctggacattgatgatcctccctgcgctattgctgcaggagctcttttatttgttttggcaagtgatgtccaagacaataattcgctggattcagaaacttgtgtccatttccttcttaaattattaaaccctccagtgaatgttgttgatgccaaagcgccatcaataggttccaaacttcttggaatcagtaaatttcagatgcttaacagttccaataaggatgcagattctagttcagaggacatacttttaaaagttgaagaaatcctcttaagctgcaaagagatcaagccactagacagtgatgataagaaaacaacaaggccagaactatgttcaaagtggcttgctttgttgacaatggaaaaggcgtgcttgtctgctgttgcattagaggatacatctgagatggtgttgaaacttggaggaaattttaaagaaacattaaggcagtcgggtggccttgataatatttttaatgtcatggtgaattgccattcagagctggagaaacttgtaaaggatgcctccactacggatgtggagggaaaggaaagagctcctctgcaaagcgctgcactcctcttgaaatgtttgaaaattttggagaatgccacatttctaagtgacaacaacaagccctctctcttcttcagaaaccttccactgtttcaagaaaagcagacccaaaaaatactaaagtttgcaatggggcttgctctggatctatgtaccatctggtgttatgtcaaggacctctggtccgagggtaactggaccgcgactacggagatcgtagttgcgttccgtggtcgccggcggggttattcccccacgccgtcgccctttgctgtctgggttatgcccccaagacgccgagttgagagagttggggaaggggagattagattggtgatatattctgcataa

SEQ ID NO: 10045 - DNA, 900 bp, Zea mays
  Peptide Sequence Number=SeqID_53420
atggggacgctcatccggccggggcccgccgcgtcgcctctccccatcgcttccccctcctcctcatccgcccacggtatcgccgactcgcctctctgccggcctgtctctccggggggaagccacgccacggcgctgatcttatcttatgatttattttggttggtccgtagtggctgtcgttggcggtggcgcgaggagcttgcggcatcgggtgtcggtgtcggtggcggtgttccggtccccgagtacgcaggttctggcgacgagatggcgccgccggagaggcgcgtagaagaatcaatagatgcaggtcagcaattggcttcaagagtcagaggggtttgcttctatttggtgactgcagttgcagcaatctttttgtttgtagctatggttgtggttcatccacttgtgttgctatttgaccggtaccgtaggagagcacagcactacatcgcaaagatttgggctacggtgacaatctccatgttctacaatcttgaggtcgaaggaatggagaatctgcctccaaatagctgtcctggtgtctatgttgctaaccatcagagcttcttggatatttatacccttctaactctagggagggtgggcaatgtatctcttgggtgtgattcctctgcggcgtatggacagcaggagccagttgacactatatttcaatttgcattccatgttctgcataacattggttttggaaatgcaggattgtctcaaacgtgtcgccgcaaagacaggagctcctgtgatagctattactcttatcggaactgggaaattgatgccttctggaatggaaggaattctcaattcagtggacttttcagagcacaagacttgagagttgagacaaagctcgttgcagatgtaatcctgtaa

SEQ ID NO: 10046 - DNA, 2124 bp, Zea mays
  Peptide Sequence Number=SeqID_53421
atggaggcaaccgcggcggtgcagaggctggccgacctagaggtgcagcggcgccgtatcgccgaggtgcgcgccacggatctgcacgaatccaacctcgtctgctcggagcagctcgtcgtcgacactgcggtgttcgcgtgcacaaccaacgacgctgttcagatcaccgacatctccctcgagctcgccgtaccgcttcacctcaccaaggagctcgtccagcgtggccccgcctcggtcacggctgcgcccacatcttcctctgtttccgttcgcgagatgaaccacttccacctggacaccaacggcacaaagctgcagcagcacgtgcaatactatgcggagcccatcttccccaagctcgactcggatggagaggcgcgcgtacaggaccaagtcatgcacgacaccaggggcaacccatgggagttctgccacatctaccgcgtccagcacgaccaacacaaactcctccccatcgggtggagcaggaactacatggcaggagctctggatgagcagatcgacgcgtcagtgaggcagcactgcctgtggaacttgcaagccagctggaggttcgtgttcaactcgtccagagtgttggaggagaggtacctgaagcagcctctcggggacctaggcttcaagcgctcatggccggtggaccctgtggctccggaggcagacgtcgtggtttcatgcggcgggcaggcagccgtcgagctcgccgatctcagaacgtggcttaacatgttcctagaaggttcaattgtctacacgagggccaccatcgtcttcatgcgccgccccaacggtgacctcatcgtcggcctgcgccacgacgaggaggaggcagttcccaacaccttgcccaacaggtgttcgatgatttgcttcatccgcggcctcgacgtcggcagccacctgtgggggaataactctactgctgctgaccacaacacgacaggcctgaggctgctctggtggctcaagaaccagacgtccttccagatgtctggcagctgggaccacttcatcgcgctggggcacatcttcatcgttcttgagcctttaattcacagccagagaacaaccaagcatatcctagcaattatcgctagcatcagcaatgctcaggctctcattttcaccacgagcatgatttgggtgttgtgcaaggcagagaagctaaatgatgctgaggagttgtttgaccagacagagacagctagagttgtgccttgtgcgtacgcatataatacaatactcatggcatttgcaactggagggtacgctgcaatggagaggataacacaatggaaccttgctttcactggtgttggacttgttggcactgtcattatcactagcctcgatctcattggttcagggattgctgctggtgctggctttgttacctctgagatctgcggcgtcttggcatttctgacacttcttggcacaatgcaagtgaaaacagtgcgcgagtccatgaaccggatgatcgaagcatggagggagatcccagacttggatgaggaggtctgctccttcgaagtgccaccatcgtcccagtctacatcttctctcacagacaccgctgattccttaggctccacctccaccccttcaattacaaggaggaactcatggccgactaacaggcagcccccaccggacacatcacacaatgtcaccaacagaaaaggcagcactccttccatcgtaggcaagaaaattttgcctctttcacgctgcagcacagaccaagccaagaaatttgaaggcagggttgatgttaccgtcgcttcagatgcgacgccagccaaaatggtgaccgaggagaagctcctgaatgagggcagcgttagagagaggcttgaagctcggagggtgctgtttcagaaaactggcgacaagggttataagaagctggctggtcccaagtcaggatccaaagtttttccatacagtggggatggtgactttgaagagacagctgagactgaggatgcacctgacgaacttcagtcagctcacagggatgaagctctgttgaagatcaggatgcagcttgttcagattgagaatcagcatgccagtttgcttaatcttctccag

SEQ ID NO: 10047 - DNA, 243 bp, Zea mays
  Peptide Sequence Number=SeqID_53422
atggcgccccgcacgctctatgacgacagcggctctcagccccttacggaagcaagaggacgtcagcaaggacacgacagccccgacagctatccttccgccaggctctggcgctcctccgacggccacgacatcacacgaaccgggtgccaaaacctctctggctgccacgatggcatgaaggaccagggccctcttacgagggttggccgcgcggggaaggacgggacggcgctcgcgtga

SEQ ID NO: 10048 - DNA, 585 bp, Zea mays
  Peptide Sequence Number=SeqID_53423
atggcggcggggtttgacaacatgcgtcgggactacgcagatcgggtcgatgcaagcgacacggagggaatccggggctgctgtgggcttgctgttttgggggagggcagagtgggcgagggctgctggtcatggggacaacgagcaggcagggaaaggcgccatgagcaacatgagctcgccgacgagcaggagtctggcgaggccatgatggcgccctgcaggggatcctcggcgagcagcgccatggcaaggttggtgaggcccctcgctactgctggccgtggagtagggggaggcgctggagggaagggacgccatgggcaggagctcggccagcgtctaaagctgctgctcggccatgggagaaggggtgtccgcgccttggatagcagagggaaggaagggtgccgctggcctctgctggccgtggagcaaggagcagagagcacacagggaggtggaggcgccatgggagagaggcagtgccatgggagcttggagcttggctccctgcttgcagccgtgtgggagaaggaggcaggctgctgctgcgcgagggaggaggaagagagtggcggctag

SEQ ID NO: 10049 - DNA, 378 bp, Zea mays
  Peptide Sequence Number=SeqID_53424
ggtagatttgccgctgctgcatgtggctgtggctactgctcatccgggcctcgacgggaggtgcagggggcagggagaagtggatcccaggctgccggagttgaggaaggcaagctcagggggctaagtgccatggaggctagcggccatgggggctttgcgtctcggcgtccatggagggagaagcagagaggattggagcagggggcgccgaatggaggagctatcccggggctaggggagcgccttgcgctagaaggagaagggggcagagctctgagtgccggactagagattgtggcggaaccgtccgaattattccagcttaagtgtccaagtcgcacccttaagggcagcaacacacttaaacaggaataa

SEQ ID NO: 10050 - DNA, 357 bp, Zea mays
  Peptide Sequence Number=SeqID_53425
atggaggccaagtcacaccatcaaccaaatcaaggaggtacatgcaaaaattatgccacaagcaaggctgagtatactaatactcaactagacttacccggttacaatggatcaaacagtctcattagctgcgagaagcagacgattcaaattttgttttacccttgcaaggtaaacctaaacacacgacatggtagggcactccgtccccacacgtcaaccgtccccatcgatcccccgtttgcggccaggctcactgccttggcgtacaaggctccactgaccccggccgcccgccgtgcagtggccgcacttgtacccaccatatctagaatgggagacccagtctcaggataa

SEQ ID NO: 10051 - DNA, 333 bp, Zea mays
  Peptide Sequence Number=SeqID_53426
atgtacaatgggggtgtagctatgtgctacgtggctagcggagaggtgcctaagccctgtgtacatggtaacctggccattggagaggcgcttgagccttgtagaagcacagttgtcggcgtggcacatatcctgttgacgtttccttgcttccgtagggggctgagaaccaccgacgtcacggacgcacgcaaggaaccatcattacctgttaccgggtcttaccccggtggttggcacaacagtcggagtggggtgagcggcggtgttttcctgtctgatcggtcagtgaaagggcgaagtgactgcggtcacttcgaccttgccgactga

SEQ ID NO: 10052 - DNA, 1428 bp, Zea mays
  Peptide Sequence Number=SeqID_53427
atgcagaagaggctggagcatctcctatttctcgcgtgtggccccccagcgccagttaacgccggcggcggtcaccactcgttgagaaaacgacggaagcctcccgtcatcgttctggagataaaaccaccggcgctgccaccccttgttcgaagacacaaggatggcagggatgtactactgcgtgcgccccggcctcagctggagggtgcagctaccggcccgcaccgccatacggaccttctttgcctccgtcgtcgaggcaaagagctccacagagaagagatgggtccacatatcccagtgggggtcaatccccaaaaaaccctcgcaaaccgccgcgaagatggccgcttgcgcaatggagttggggttgaagttgtgcagctccactccgtagtagtgcaggagcgcccgcatgaaacggctcgctggcactctaaacccccgctcatggaaggggatgaaactaaccacataccctggcggcggagtcgggtcggcctcgctcgcgggggccatccactccggctgcgccccactggagaggggacagagcaaaccatcggcaacaagggcctccagatcctccacagcgacggtggagaaaggccacgggtcgcgcgcgcggaacgacggtcaccttgtcagccatcgttgaacgaaggaggtggaggcgaaggggataaggtgcgtggttttcttttctctggctattctcttaggttgcggaaaccaaagcagaaagcaagcacaaatggcagagtaaagaaccaccgccagcccctcttccggggcaagcgacacctttggcaggcgaagcgggcgtcgtttcacctccgccatgatgaccacgtcaaaaaagccgccccagagcactcgggctccgagcccattactgatcaggggttcgaaggctggcccctcggaagggttcgacagccgccccagagcactcgggctccgagcccattactgatcaggggttcgaaggctggtccctcggaagggttcgacagccgccccagagcactcagggctggcccctcggaagggttcgacagccgccctagagcacgcagagtgagggatgaccctgggtatgtccgttacatggctgaggctcgggctatgcccccgagtcacttcgccctttcactgaccgatcagacaggaaaacaccgccgctcaccccactccgactgttgtgccaaccaccggggtaagactgacaacaaccgaagttcagcctcgggcgtgacagggagctctgcctcgcccgaccccggcctcggtctcagcctcggcctcggaggagtcacgtcctcgcccgaccccggcctcggcctcgggaagagtctccgtctcgcccgaccttgggctcggaccgaccgtgccgcaggggatacatcattaccctactcctag

SEQ ID NO: 10053 - DNA, 195 bp, Zea mays
  Peptide Sequence Number=SeqID_53428
atgaagggatcaacagtggcagcaacaatccaatcggagacttggaagcccaagtggaacagcttcggacggagctacatcaccaaaatagggtgtgggcagaagacgaaagccaatgctcgtgctcgagtgaccgagcttagtgcggcctttgacaacttgcaagtatactcgcatacttctgacatgaaaaag

SEQ ID NO: 10054 - DNA, 2508 bp, Zea mays
  Peptide Sequence Number=SeqID_53429
atgtacgtggtcaagcgggacggccgccaggagacagtgcacttcgacaagatcacggcgcgcctcaagaagctcagctacggccttagccaggaccactgcgacccggtgctcgtcgcgcagaaggtctgcgcgggggtctacaagggcgtcaccaccagccagctcgacgagctcgccgccgagaccgcggcggccatgactgcgtcccaccccgactacgcctcgttggcggcgaggattgctgtgtctaacctgcacaagaacacaaagaagtccttctcggagacggtgaaggctggattagttggattgggttgtgagttggaatgtggccgttgtggatgcaggattaaggacatgtacaggcactttaacgagaggtctgggctgatggcccctctggtcgctgaagatgtttatgaaatcatcatgaataatgctgctcgcttggacagtgaaataatttatgatagggatttcgactatgactactttggcttcaaaactctggagaggtcttacctcttgaagcttggtgggaaggtcgttgaaaggcctcagcacatgctgatgagggtttcagtgggaatacacaaggaagacattgagtctgccattaggacgtaccatctgatgtcccagcgctggtttacacatgcatcaccaacacttttcaacgctggcacaccgaggccccaattaagcagctgttttcttatatgcatgaaagatgacagcattgagggaatctatgaaaccctgaaggagtgtgctgtaataagcaaatcagctggaggaattggtgtctcagttcataatattcgtgctactgggagttacatacgaggaacaaatggaacatcaaatggaattgtgcctatgttacgagtctttaatgatactgctcgttatgttgatcagggtggtgggaaaagaaagggtgcatttgctgtatacttggagccttggcatgctgatattttcgagttccttgatctaagaaagaaccatgggaaggaggaaaatcgtgcaagggatcttttctatgcgctatgggttcctgatctattcatgcaaagagtccagagtaatggagaatggtcattgttttgccctaatgaagctccagggttggctgattgctggggtgaggagtttgataatttgtacaagaaatatgagagccaaggcaaggcaaagaaagttgttcctgcacagaccctctggtttgacattttgaaggcacaaatagagactggtacaccttatatgctttacaaggatacttgcaataggaaaagtaaccagcagaatctgggcacaattaaatcgtcaaacttgtgcactgagataattgagtttacaagccctactgaaactgctgtctgcaacctagcatctattgctttacctcgttttgttcgggaaaagggtgttccattagagtcccatccatctaagcttgtgggtagcagtgattcgaaaaatagatattttgattttgagaagctggctgaggttacctcaactgttacttacaatcttaacaaaattatcgatattaattactatcctgttgagacagcaaagagatcaaatatgcgtcacaggccaattggcataggtgttcaaggcctggccgatactttcatattattgggcatgccatttgattcactagaggctcatcagttgaataaggatatatttgaaactatctactatcatgctctgaaatcttctgctgaacttgctgttaaagaaggtccctatgaaacatatgaagggagccctgttagcaagggcattcttcaacctgacatgtggaatgtagtgccatctaccaggtggaattggccatctctaagggagaccatttctaaagctgggataagaaattctcttcttgttgctccaatgcccactgcttccactagtcagattcttggcaacaatgagtgctttgaaccctacacatctaatatttacagtcgacgggttctaagtggggaatttgttgtggttaacaagcatcttcttcatgatttgactgaaatgggcatttggactcctactctgaaaaaccagataatatatgatgatggttctgtccaaaagatagcagaaatcccagatgatctgaaagcaatctacaagactgtttgggagatcaagcagaaaactttagttgatatggcggttgaccgtggatgctatattgaccagagccagagcctcaacgtccacatggagcaagcaaactttgggaagctaacatcacttcacttccatgcttggtccaagggcctgaaaactggaatgtactatctacgcacacgagctgctgctgatgcaatcaagtttaccgtcgataccacacttctaaaggagaatgggaatgggatgaatgatggaaagcccacagaggaagacgtagaagctaaaatggcacaaatggtctgttcttttaacaaccgggaagagtgcctggcgtgtggaagctag

SEQ ID NO: 10055 - DNA, 204 bp, Zea mays
  Peptide Sequence Number=SeqID_53430
atggagcctggcggagggacagctgtcggagcggttgagtccttgctgatgtcctcttgcttccataagggggctgagagccgccgtcgtcacagagttgggcgatgtggaagctcctccgaagccgaggtcgagtctgtcttccgtggtctaggtcgagtccgagcccctgggtcgggcgaggcggagttcgtcgtcttctag

SEQ ID NO: 10056 - DNA, 204 bp, Zea mays
  Peptide Sequence Number=SeqID_53431
atggcgcccccggagttcggtggttctattggtggagatggaactaaccttagggacccacacgcggaaggcatgaaccagagggggcgtttaaatgggcccagcgggcataatggagaagtgggccgcaagaggaattcagccgaggcacaggtcaagttgtatggccgagttgatctaagtcaccaatttaggcttaagtga

SEQ ID NO: 10057 - DNA, 249 bp, Zea mays
  Peptide Sequence Number=SeqID_53432
atgtcgcagcgctgcggtagcggagttcgtcgcaacaccaacacgggtaaggacccacatgttgtgttcgccatgtcatggacatcgttttgcaacggttccttcatagtttggggcgttggggcttcggtctattgtgcgtcggcggtgtgccgccatgggaccacgcgtgccactgccttgcgcggctgttgggagaagaagacacgtggccgtggatccattgatgggtggcccatattagtttga

SEQ ID NO: 10058 - DNA, 285 bp, Zea mays
  Peptide Sequence Number=SeqID_53433
atgtcagtaccagcactgattgcgcatgaagcagtgaatgctacgcgggagacaggcagccagcacactgagcgggcggcggtcttcactggaaacgtggataggcaggcgggagcagggagtaggcgtgcagtcaacggcgagtggtggcgcggtcgcaacgacgaagataacatggcttggtgcggatggttcgtggagataggtgagaaaggaaaagaaaagaaaaggggaaaaaagaaaaaaagggagatgggacacgtcgggatgggcctaggaggctaa

SEQ ID NO: 10059 - DNA, 225 bp, Zea mays
  Peptide Sequence Number=SeqID_53434
atgcagtggtttgtcggcctggcccgcggcccagccaggcccgtggcacggctcaccccggcccagcccagcctaggcgtgcccctggcgccctcccgcaccatgcgcccccaccccctctctttctcattttcttttcccgtgcaacaacttccctctccctctcttccacctccccttgccccagattatttagtgtgttgtgtcgcacgcttcatcgtgtga

SEQ ID NO: 10060 - DNA, 1368 bp, Zea mays
  Peptide Sequence Number=SeqID_53435
atgggcggctcgctgccgcccgttccaacacgctccaaggccctcccctgcgactcgggggctgggtcccgcatgtcatgcaagccggctcagggcagaagaagccaaaccgccgcgcgtggtgcgcacgaccgtccagcggttacaggcgaccccccatttttcgcccagaccaacgggcagaaggggcgggcagccatgcaggcggcatgcaaccgcgccagggaccgggaaagggggataccccgaaagggatccttctccgcgaaggaaccgggctccgagccccccattactgatcaggggttcgaaggctggcccttcgaagggttcaacagtcgcctcagatcgcgtgggcccgacacccactactggctggcccccgaagggttcacagtcgcctcagacaccgagcgagggatgaccagggtgccactcgacagagtgagtctgacaggcagtcaggccttgccaaaggcgccacggcgaactccgctccgcccgaccccagggctcggactcgggctaagacccggaagacggcgaactccgctccgcccgaccccagggctcgggactcgggctaagacccggaagacggcgaacttcgcttcgcccaaccccagggctcggactcgggctaacacccgggaagacgacgaaactccgcttcacccgaccccagggctcggactccgccctggcctccgaccgaacgacttccgcctcgcccgaaccccttgggctcgggctccgggccacggcaacaaaaggcagactcaacctcggcttcggaaggaacccccacgacgacgtcagcagggactcgaccgctccaacagctgtccctccaccaggctccgccgcacctccgacagccacgacatcacgccagcagggtgcccagatctctccggctgccacattggcatggccttctcagaggaggttggccgcgcgggaccgaggacgggacaggcgctctcttggggccgctcgcttccctcacccgcgtggacgcttgtaacccccctactgcaagcgcacctgacctgggcgcgggacgaacacgaaggccgcgggacttccacctctctcacgctcgactccgaccgcctcgcctctcccccctacgcgctcgcccacgcgctcgacccatctgggctggggcacgcagcacactcactcgtcggcttagggacccccctgtctcgaaacgccgacaaaacaaaagtcttttataatcagagattaaataaatggggcttcggtctattgtgtgccggcggtgcgcctccatgggaccgcgcgtgccgctgcctcgcgcggctgttgggagaagaagacacggggccgtggatccattga

SEQ ID NO: 10061 - DNA, 207 bp, Zea mays
  Peptide Sequence Number=SeqID_53436
atggctggagcacaccttggcactcaagactatgatcacatgtggaagaacttaaggagcaaaaactgtaatcttgcggacggagagtacatcctcgtgccggagcaaggagctgcccaggaggttgcccccgatccagcaccagagccagcaccagaggacctgcctgccactgctttggaaggcaagccccggttttatgcataa

SEQ ID NO: 10062 - DNA, 501 bp, Zea mays
  Peptide Sequence Number=SeqID_53437
atgactctgggtacgtccgatacatggccgaggctcgggctacgctcccgaggtaccctaggacatttccgagaccagcaggagcgattctgtaacggaatcccattagagggaggcatcgagcccttggaccctatcaaacgggaccgggtccggcaaatcacctgcaggtcaaagctccgcctactcaagggacacgatctcgcctcgcccgagcccagcctcgggcaagaacagcagacccaggtggattcacgtctcgcccgagggttccctcaagaaaacagcgccgcctgcactgctccgattgctgtgccatctgctagggtgaggctgacagtagccaagtccagcctcaggcgccataggaagctccgcctcgcccaaccccagggctcggactccacctcgacctcggaagacggactccgccttgcccgaccccagggctcggactcaacctcgacctcggacgacggtctccgcctcgcccgaccctag

SEQ ID NO: 10063 - DNA, 369 bp, Zea mays
  Peptide Sequence Number=SeqID_53438
atgaaggctttgcttaaagtccttgtagactgtgccgaggatgccacaaaatcccttggtggattagtagatcatgcattagaccacatgcatgatgaagagatcgtagctagaaccttgtttgccatgaaagaaaaacttgaattgctacaacaagatgccttagaggcaaaagtgcaagcttttccagaaattgctaagtacgacggggatgccataagtgttgaacctacatctctgtcgacccctccaacagttactgaaccatctgtcgatgaagaggagttctactgccccgatgtcagtgatgagtggtacttcagcgattcagataggtcaactcgtaatagctactggaatatttattag

SEQ ID NO: 10064 - DNA, 492 bp, Zea mays
  Peptide Sequence Number=SeqID_53439
atgtcgattgagaaaacgaagaagaaactgaagtgtcaaaggttcatctacaactatactaaatcgactgtccggaataccgtagattattccggacaggagaagctttttggaaaaacaggccaagcgcggaccgtccgggcccttgcggcggaccgtccgcgacacaaggatgaccctcggacagaaccaatgcaaaaattcgagtctgcactatggaccgtccggaggataagcgcggaccatctgagacctcgctcggaccgtccggcctcaggcgcggaccgtccggggcggaccgtccgcgctcagcagaatggagtaacgactaggaagtggttggtggctataaatacaaccccaaccacctccattcactacacccaagcattccaaccttcaacattcaatacaagagctagcaatccattccaagacacattcaaagcctccatctctccaagcttcacaattgagaaaagagatcattag

SEQ ID NO: 10065 - DNA, 372 bp, Zea mays
  Peptide Sequence Number=SeqID_53440
atgtcggaggctggaaggccccatttgccattgactgttgctattctagcaaagggaagcaaattaatattgcgaggggctactgttgggggccttcggcttccgaaggtcctcaaaaactggggatggatacttgagagaacgaagcaattagctgtggtgttgaagaagccagacctctgggaagacccagtttttgctgggagggttagtcgtgagcagggtgagctcatgggcaagattaagtcagtgaaccaatttgagcaggaattgattgaacacattgagatgttacggcttgcacgtgaagaaaacgataatgaacttgagatggaaagcatgaaggctttagctgatatgagaagtgcatag

SEQ ID NO: 10066 - DNA, 308 bp, Zea mays
  Peptide Sequence Number=SeqID_53441
atgggcgcgattcaggtcaaggctccgtccactcaagggacacgatctcgcctcgcccgagcccagccttgggcaaagacagccgacccaggaggattcacgtctcgcccgagggtctcctcaagcaacgggcgcaccttcgactcgcccgaggcccagctcgggcaggcttcgcggagaagcaactttggccagatcgccacaccaaccgaccgtatcgaaaacagcgccgcctgcgctgctccgactgctgtgccgcccatcagggtgaggctgacagccgccaagacacgaatcaagctgaactc

SEQ ID NO: 10067 - DNA, 141 bp, Zea mays
  Peptide Sequence Number=SeqID_53442
atggcgccgacacgcgggcccctcccgtcagccgcgctgcacctttctctacggctgtttggtggcccccagcgcccagaaatccataactttctaactgtaactccgaatttagtgattcttgttcctacgacctcgtag

SEQ ID NO: 10068 - DNA, 489 bp, Zea mays
  Peptide Sequence Number=SeqID_53443
atggttgccccgtctcctcctacggcgaggagggtggcggggcaaactcggatgctgctcttccgccacggtgggaagacgccgtcgagttcaccgccgccgggcgagctgacgaccgtcgttgttgctgtcgcgctacgggggaaggagtaccatgtcgtagctgtcgtcgagggacatgaactcgagactcccgaagcggagcagcgtccccggctgaagaggttgctgaagactacccatttggaactcaacagggaagagaagtgcctgagccctgtgtacatgccaacgtggctgtcggagaagtgcttgagccctgtgtacgcgataacgtggccgtcggagaagtgcctgagccctgtagaagcacagctggcgggggctgagaaccaccgacgtcatggacgcatgcggggaaccatcattaccggtcagcagggtgagccagatgggacgccggtcttgttccctcgtagcctgagctag

SEQ ID NO: 10069 - DNA, 321 bp, Zea mays
  Peptide Sequence Number=SeqID_53444
atggtgagagaaggaagaacacgaataagcacaatgaacaaggacacaagagacacaagatttatcccgaggttcggtcacaccaccaaggtgccctacttcctcgttgaggcgcccacaaagagccgggtctctttcaaccctaatcctcccttcgccgaccacaaaggtcagactgcaaaaacaggtcctgacaccggttcaaccgcctgggggtcagactggcagtcagtctgccagtcaggaggtcagaccggtcaggtgaccctgacaccggttgaacctcccctaggaccggttcaacccggttttgaccagtga

SEQ ID NO: 10070 - DNA, 579 bp, Zea mays
  Peptide Sequence Number=SeqID_53445
atgactgacaggcggggccagggcgtcagcgagccagggcgggctgaccagccaggcctaggggcagagacgcgggggcgcggggaggttgctcaccttgaggggaaacgctggaggcacggggcaacggcagaggcacagggatgcgacggggcaacggtggcggagctccggctgcgtaagaaccactctggtgagcgcagaccggacagaccaaagagggggaaggcacaccgaagggtgtcccgagtagctgacggcaaggtgaagctcaccgtggcactgaacggggcgcgggcgcaacggcggccacggaacaggcggtggacatcggcggatggtggcggaggttctcggttcgcgtgggcagatcaagagagctgggcacagggcgcaaatggaagaggggaggtgggcgagcagggcgcggggttcaaaaggggtgcgggtgctcggtcgtggccggagaatgcgcggtcgtgggcgcgtccacggcggggagatcatgggcgagaggttagggacgcgcagacaggtggggtcggtggggcagagagagggagcgggtgcgcgcgatag

SEQ ID NO: 10071 - DNA, 120 bp, Zea mays
  Peptide Sequence Number=SeqID_53446
atggacaggccgctcgagctactccacatggacctattcggctcgatcgcttacataagcatcggcggtagaaaaatcacaaacccaagagacattaaaaggaaaacgaattcaagctga

SEQ ID NO: 10072 - DNA, 612 bp, Zea mays
  Peptide Sequence Number=SeqID_53447
atggccggaggtacgactgctaggggcaatggtggtaagggcagcaagggcaagggcgctaagaggaagtgccctctgacccctctgtcgaagtctttcgatgactcagagtaccccgaggagtattccgggttcaacagtgagagcgctctgcctcgttctcctacctcatcgatgatcgactccgatgactccctagggcttaccccagtggagtggtcctttattcgggtggtggagcactccggcctttcctgcatggatgagtcagatgagagcgaggaggaggatttcgaggtagaggagggggaacaggaggacgaggattgtgatgccgatggaagcattgacgtctctgatgaaggcaccaagggcggcaaaggcaagggtagcaaaggtgagggtggtggcaatgacgaagatgacaatggcgctggtggcagcaacggcataggctttagcggcagcgacagtggtagaggtgacaacagcatgggtggctgcgctggtggcgaggcgcccccagcttatatagtgtatacaaggggtcaagcagtctcattagctgcgagaagcagacggttcgaatcgagttttaaccttgcaaggtaa

SEQ ID NO: 10073 - DNA, 411 bp, Zea mays
  Peptide Sequence Number=SeqID_53448
atgtacggagatgaggacaagccagcgcttataacgtacccggatgtagctctgaattacatgtcctgtttccaaggatttttcttctacccggaagtggcgtctttgccgctacaaaacttctgcgtctaccacatcaatccccaggggcacgaggagactcttcggacagagaaggcaccggcagcactaggccctaattctgaggccatcaaagcaaataatcttgtgtttgtttctagagttcttggcttaaatcctgagacaaggaagtttatctatgatgtaagcacacttctacattctaatgacttgctagcatataaagatgtcacaacaaaggttgtctatgatatgattagaatatttgaaaacatcataaaccatgctgcttgcttcataattcactaa

SEQ ID NO: 10074 - DNA, 81 bp, Zea mays
  Peptide Sequence Number=SeqID_53449
atgtggcatggaggttcgtggctaggtgctaaagatgtccatcagcgtgagatcgaatggcttggttggaaggttaaataa

SEQ ID NO: 10075 - DNA, 2817 bp, Zea mays
  Peptide Sequence Number=SeqID_53450
atggcacacattgcatgggctgaagtactgaactatgggcggctgcgtggtcccttggcagttgcatattcttttctttatttcggaagtgactcaagtttttgggaagtgcggtttcctcaatgtctatttgaatcacagcatactgaactgaatcaagtgataattgtgttctggtcatacactaagatatacctgaaacttctgcttcatatgttcacacatcataaatattccaacaaaggtcagatgaacagcgaaaggaatgtgaagatcatatcaggtcgtgatgggcaaaagaagggaaattcacagtatggccaaattgtacacatgccaaaggacatggtcacaacagtcaatggaaacgtagatgcaaaatttgaagatgaagttagagttgtgaagaatgataggttccaaaggcaacgagagtcttggggtggggaatgcaagaagggctcaaaaccatggcctggtcgaaaggcagctactgttgatgaacttgttaaacatatgtcaaatgttccttcatatttacagcgtaaagaaacttctgaccatcttcaagacaaggcactgaatgttggagttcttgagtgggggcttcttgctaactggtctcagcaagaaaagcataagctcactagaagctatggaccatctccacccaatactagcaggtctgtactattcccatctccatcacattcttctccaagccccagcagcagatctcttgagagtaatcaatctaccccaatgagtggccatcatcattcatccatcagagcacagcagaataggctcacagataaacaccatgagagggccagatgtccacctagcccaaattctgcagtactgagcttattgtcaggtcatggcacacatccctgtccagagaacggtcataattatgttgggttgggtctcagcaatgtttctttagcctcagactctctaggttcttcctctagaagttgtggaagacatgaaatggttggagatgaagagactagacggaagactgaagacgttgtccatcattgttctcgtaggctttttgcagacagcgataacattgggaaacatttcttcgcatcaaataccaatgactccatgtgtaatgatcctgaacagagtattggcttgaatggggaaaattttgagtcactaacgtctgatgctgtaatggacacagctagaaatgacagtaagtcgtctgactatttactggaggatattgagccatcccttgaatttcctcgaatcccatattcatgtccacttcccatcatagattcagcagccaaagagattggcatcactagcactgaggctggagatgcaaaagtgagtaaaaattctaaccggaaccaatctgccatgaatgtcactgagaatcctccccaatactcagcaaagtttagtgataagatgccttattgtcatctaggttctgggatgaatcgagggagctgcagctctagcctcaaggagtcaccacatattcgacaacccaatatagttcctcctgtcgataagacaggagacaggtcatcacccaacagcaaaggtaggcgaagcccattgaggaggatgttagatccaatattaaagccaagacattctagtccagtacgtccttcatttgttcctaagtgtcaacttccagtcaataccaccaagcagtctctggacttggggaaatcagtgccacataatgttcagcgaagtgcaagatacatacaaaaaggaaatgattcagcaacaacaaggcaagcacttctgcagctagcatggaagaacggcttgcctttattcatactctcttatggtgattctgacatcctggcagccactgttagaaggaagggcatccctgaaaaggatggtctggaaagcacatatgctgtattcactgttgaagaaccgaagaaaaaaagtggagcttggatcaagacagggggcaagaacaaaaaacatcaccttttatctagcatagttggggaaataaaggttgcgcgtcgaaaatcaagatgccaccatacaaccgatgttcatgtacacagggaatttgtgttggttggttccaaatttctaccatcgtctgaagaatcaggtgattcaaatgttagtggagagcttgcagcttttatcagcacacttcctcagcaagaagcagaaacctcgaagcaatcatcttcacagaataccaggcaaagaaattcaatgccaattggctgtggttgccccccactgggaaatttccatcctagcacgagaagtgctaattctgcttcagccaatgttgttgcagtacttcctgatggcttccatggcacaataacatctggacagccattgcctttgattgagaggtggaggtcaggaggagcttgtgactgtggcggatgggatgaaggttgtatgctaagcgtcctcactgatgcgtccgaagaaaatgatgccattcaggctaaccaggcaaaggatggcagccagagatttgagcttctagatcagggtcgatcacgagaagagaggcatgccttcagtatgacttccttcaaagaggggctttatacagtggaattcagatcatccattgcattacttcaggcttttgcaatgtgtatagtgatgctccatggaaggtacccaagaagaacgcaagttggctcgcaagcagagcaggagcatgatctccttgctggtcatgagctcaaggcaatggcagccagtcaaggaagaaggcctccgacaagctatgtgccccaccggccacctctttctcctgtaggccgagcctag

SEQ ID NO: 10076 - DNA, 519 bp, Zea mays
  Peptide Sequence Number=SeqID_53451
atgggcaggggcaagaggggcaagggatggcctcaccgtgctaacggcaagcgcaagcgccctccaagtccaccctcggaggattttggtgactcagagtgctcgaagaaagcttcctccgagtatgatcggtcgcctgctcctgcaccccccatggcgtcgttcgaggactcggacgactccatggggctgtccaccgtggcccgagtgtactggcgctccatcgagcgcaccgggctcagtgggtcagacgacttggaggatacctcctcagaggaggtggaagactcctccgactccgaggagtggagcagcggcgagggtgatggcggcgaggacgacggtagcagcggcgacgacgacaacaagggcgatggcgatgacgacgacaggggtgtcagcaagggcgacagcgacggtggcggcaaaggtgatggcaagggcgacgatggtgacaacaagggtgatggcgtcggcaagggcgacggcgaggttggcggcataatgctactggtttaa

SEQ ID NO: 10077 - DNA, 1041 bp, Zea mays
  Peptide Sequence Number=SeqID_53452
atgtcttcttcctcccttatgcgtcgtgtctttccatcttccaagcccccggatggggccatcgttcggcttcaaggattctcatcatgcagcccggttgcttccccccgctggtggtcacccaagacggtgaccgccagttcctgggtggggagaagcaagccgggctgcgatcttggtcccaccctcagcttcaaggatgttcatcatcctcgctggggtgggggccaggatgagccggcgctctacctcccacgcaggttcgcgggtcaccccttcccgcagtgttcgagggagagggcgctcactggccctgcaggcggcgcagacttagccaacgtggggctgatcgacggcgggcgtcgtcacctccagcgtgtcggagtcgtcggcttggctcccggcggccccccctgccggagggcggctgccgcgccgtgtgcacgggaggaccacccacgatgccgcgcgctgctagggtggcattcgtgttctggggtggccctgcttttgcaccaggatggcgccctcgcgcagaggccggtgccccactcgtctgggaggattcgagtggggatctgccggggggctggtggtccccgccatcagcgccgaggcggaggcggctcgagaagtctccgttgccgacgggatcaccgccaccatccgcgccccgggcctccggctcttcgtacttgtcctcgcccctcgagcgtcggcgtgggcgagggcaagattgcagcagcgcccaccctgaggcctgcactgctgcggctcggccatccggagcgggagtcgtcgtcgtcgtacgccaagtctcgcctgttgattatccgaaacgcttcaccaagcatgagttgccccgtgtcaaggggtaatcggcggagccgcctgctcgggccggattcccggagaagtccccggaccgcgtcgccgtccgaggctgggtcggatctcgctgaaggcgtcgtcgatgccgagggtgctacagcccccttccagcgtgaagatccgagcctgcaggatcagatggtcttgtag

SEQ ID NO: 10078 - DNA, 141 bp, Zea mays
  Peptide Sequence Number=SeqID_53453
atggccatgatgggttcaacatcggaaaagatgtacctctgcgaggtgaagaagcgacaaacttttgctgcttttgttcaaaggtggtaccaaaagaagagaatcaagactaaagctgcgggaggaaaggccctccgttaa

SEQ ID NO: 10079 - DNA, 1419 bp, Zea mays
  Peptide Sequence Number=SeqID_53454
atgaacgtatgtgagatcaccctcgctgtactcacatccccccaggttacaatgtataagcaacagccagaagaggatcacattgtgtgctcaaggcctgacataacaagttcaggtcccatcaaagtgcaagacatacagggccttccaaagcaaccaaatcaagcttcaaatctgcaggttgttgctggtgtaccagatttacttattggtcagccaaaaccacagactattaaaactgagcctagttctcaggaaaacaaggcagctcactgtgtcgatttagtgagtgatgaccatgaaagcaataagcaaggcctaggggatgctgcagttctttcaatcgtccaaaaagattcatccaatttaaaatatggttcagtatcccatgaacatctgaaatcggaagcacaaaatccgaggcacacagttgctgagaatcctaactcaactttgggttctgcaaaagtttgtacatcgttttctggttctgtctctacaccacctgagttatcacactctctggcatctaaagaaccatcatcagggaatagtgattgttcaaagaaagaggagttgctctcaccaactgtcagcaaacatgatcccgtgaaattttctgaagatagttcccaggaagtgacaagatactctgagaaagttcaactaaaagactcacaaccttctgcaccaaaatcatctcaagctagtagaatacatctgtctacagtcaaacatagattaccggtgtcaaaggagcaatcacagaagatagccctcactggaggcacctcagcaagatcattccatggagaggtgccatcacttcagtctcgtaataaggcagcagcttgtagttcttcccagaaaaaggacaagatctaccagcgcatcattaatgtcacgcaagatagttccaataattcagcaccaaccgagctgcgtgcatctgattcggctgccccattgagtgatgagcaggttataaaaaagagaaacagagaagattcattaaaagatagcgaggacactaagaggacagaaaaaaggcatagagtttctagcacggagcatgctcctgtgaaaaactcgtgcagatcagctgaaaatatagcatcagaacagaaaattcgtggcatatgtccaactggagccaatgctggtttatcaaaggatgatttgatggatactattgtttcacacaatttacctggattgattgatgaaattgtcagtaaagacaggaatataacatatgtggaactctgtgatgctatccatcagcattttagggactcaaggaaatcgaatgggggagattctttgtatcgcagttatgcggatgccatcaaaggttgccttaggaagaggagggagtgggctcacctttttgaccaagcttcaaaaggggaggaatga

SEQ ID NO: 10080 - DNA, 321 bp, Zea mays
  Peptide Sequence Number=SeqID_53455
atggaacgtgaagaagaaattgaagtaactgaagagaagacaccaccacctttggaatctcaggcagagacttggctctacttcgacatctgcgggtccgagcctgactcacctactaacaaaggcaatccccggcgtgctgatcgaggaccgtttaactggtcacatgcctcgtcatggcatacccttgagagtcttttccttagtcgggtgaggaagcgacaaatttttgttgcttttgctccaaggtggtaccaaatgaagaaaaacaagactgaagtgcgggaggacttggtcctccacataggatcttttgcttaa

SEQ ID NO: 10081 - DNA, 411 bp, Zea mays
  Peptide Sequence Number=SeqID_53456
atgccgtcaattgggcttggtgtatgcggctcgctctgccaagatggttatgaggatgatgattttggttatgattatggtactggtaagtggtattctttccatttggaaaggttccctgttggacgtatccacagtcagctgaagcagaggactcaggcaaatggtcatgttggtgccaccatagccgtctactcagctgccatcctgttgtacttgactgccaaggttctggagctggctgggaatgctagcaaggatctgaaggtgaagcgtatcacccctcgccatttgcagctagccattcgtggagacaaggagctggacaccctcatgaagggcaccatcgcaggcggaggtgtcataccgcacattcacaagtccctaatcaacaagtcatccaaggagtga

SEQ ID NO: 10082 - DNA, 567 bp, Zea mays
  Peptide Sequence Number=SeqID_53457
atgcagaatcgcccgcataaaacggcttgccggcactccgaacccccgttcgtgaaaggagataaagctcacaacataccccggtggtggggacggggcagctctgctcggaggggccatccactccggctgcgagtcaccggagagagggcgaagcaaaccctcagcaacaagggcctccaggacaggcggcacctttggcaggcgaagcaggcgacgcttcacctccgccataatgaccgcgtcaaaaaaggggtcggaaaaggggatactccgaaagggatccttctccgcgaaggaagcgggccccaagcccccctactgatcagaggttcaaaagcaggcccctcggaagggttcaacagccacctcatagcgctcaggctccacgcccacaactggtcagaggttcgaaggccggcccctcgaaagggttcaacggccgcctcaggccactcgggctccgcgcccactactgatcaggggttcgaaggctggcccccgaagggttcgacagctgcctcagacgcagagcgagggatgaccctgggtacgttcgatacataa

SEQ ID NO: 10083 - DNA, 384 bp, Zea mays
  Peptide Sequence Number=SeqID_53458
atggatacccataggccaccacacttcgacggcactaacttcccatattatagtgctagaatggcttgttacctagaggtcgttgatctaggtgtttggagagtcactcgtgatgggatgaaaccccccaagaatcccgagaaacccaccacgaatgatgagcttgttagagacatgtattctcgtttgaatctaattatcaatgagctcaattctattggcataaataagctaggtgatgcagacattgtgaggaagattatctccctactaccacaacaaagatatgggagcatcatcaccatccttcacaacgtggaggacttgagtaccatgacctcgaccattgtgattgggaaaatcgcggcttttgagatgtcatga

SEQ ID NO: 10084 - DNA, 741 bp, Zea mays
  Peptide Sequence Number=SeqID_53459
atgcctccaccgccccttccgtacctcctcctcctctggacacacggtcaagcaccaagcgaccaaacgcgagccgccttgaactcgaagcaagcaagcaactcgacgcgctgtgggtggtggctggggctggtgacggcggcgtgggtgcagtgcgtctccggcaacaactacaccttctccaactactcgcacgcgctcaagacgctcatgggcctcacgcaactgcagctcaacgacctctctgtcgccaaggacatcggcaaggcgttcggcctcctcgcggggctggcgtccgaccgcgtccccatctggctcctcctcgccgtcggctccctcgagggcctccttggctacggcgcgcagtggatggtcgtgtccggggccgtcgccccgctcccctactggcagatctgcgtcttcctctgcctcggcgggaacagcaccacgtggatgaacaccgccgtgctcgtcacctgcatccgcaacttccgctggagcaggggccccatctccggcctgctcaagggctacgtcggcctcagcaccgccatcttcaccgacacctgctccgtgctcttcgccaacgacccggcctcgttcctcgtcatgctcgccgtcgtgccggccgccgtctgcgcgctcgccatggtgttcctccgcgagggcaccgccgctgcggacgaggaggacgacgggcgctgcttcgctcacactgctccttcaaggcgggacaggtag

SEQ ID NO: 10085 - DNA, 210 bp, Zea mays
  Peptide Sequence Number=SeqID_53460
atggagacccctcgggcgctccatgaggtcccggcccggcggcgcctagcgatgcatcgcacagacgaccctgtgaggccctacccgcggtccatgcgcagcctctcaggtggtgatgaggatgatgattttggttatgattatggtactggtgaagatgaagttgtggaggaggacttccaggagttccaagattacgatgagttctag

SEQ ID NO: 10086 - DNA, 1671 bp, Zea mays
  Peptide Sequence Number=SeqID_53461
atgcacatggtgtcatttcacgagcgtgctaaagtaaatcatgttgtccaacgtccaggtgctgataggtcaatgcttacggcatattttgaggcaaatagtctacacgaggagactcgtggcatcctttattgtgacttccctgagtggtacactttacagcagggcaaggtgtggcaaaggaggaaacaaaatacggatctaaggacaatatatggtaacacactaccctcttttcatgaggcaacagaaaggagaggactgcttgaagcagacggcataatagatgagtgtctcaacgaagccggtctttaccaaatgccatcagtggtacgaaggttatttgcaacaatactggtttactgcgagccaaacaatgtggcagaattatggcaaagacaccttgatgcaatgtcagaggactatcaccgtaatactcaaagtaaaacccatgtgcaacaaatggtcttaattgacattagaaacattatgcagtcaatgggtaaagacaaaaggacattccctctccctgctatcattgatagatatgacgattcacatggtactgatagagagatttatggcgaggaaagtttcgagccaacgggagaagatgttgctatgaaagaaaccctaaatgaggagcagaggtccacctatgataagatcctatctgtcgttgacaccaataatggtggagtgttctttgtggatgggcctggcgggactagaaagacttatatgtataaggcattgcttgcagcgctacacagtcaggacaagattgcagttgcaatagctacatctggtgttgtagcttccatattgcctggtgggaggactgcccattcgcgcttcaagataccacttactattgatgatggtgctgtatgtagctttatgaaacaaagcgggacaacaaagttgctacaaaaagcttcactcattattggggacgaggcatcaatgactaagagacaagcaattgaggcgctagaaaacaacatgcgtgatataatgggacagactaggctgccctttggtgggaagactgttgtgtttgggggagatttcagacaagtactccctattgtacgcaaggggtcaagggctcagatagttgctgcctcactatggagttcttacctctgggaatccatgtgccacctaaagcttgttcacaacagagagcatagagtgacccatggtttgcaaaatatttgttacacgtcggtggtgcaactgaggaagcgaacaacattggtgatattcgtcttccaagtgagtattgatgctgaaattatccttggccagcacgctggaatgcggattttcttgcctcgtatacccctgtgcccctctgatgatgatatgttccctttccaatttaaaaggaagcagtttctagcaagactaagttttgccatgacggttaacaaggcccagggccaaacgattcctaatgttggtgtgtacttgctagaaccagtgttctctcatggccagctttatgttgttttatcaagggccacctctcgatcgaaagtgaagatacttgtcattccagtcactaatgataagaagaagaagaagggggtggaaaataactcaacgataaatgacgcaacatacacaaagaatatcgtttataaggaggtccttacaccgtaa

SEQ ID NO: 10087 - DNA, 654 bp, Zea mays
  Peptide Sequence Number=SeqID_53462
atggatcgtgaaatggagagcgatggggacaatgaaattgatcacctgactacttttgagatcgacaacaatgatggtgaatctggtgaggatattgagattgatgaaacccaagatgcctttactatcaaccctgacgtacctaacttgtacaacaaggtgtatagtaacatacctgaagaaacacatttgctgagcactgttgctgactgcgattactgcaaagcgaagaagtttcagtatgaaccacctagattttgttgttgtaatggacagattaatctagccgcatttgagacactgccccagcttaagaggctgtgggagtctgcagatgctgatgcgaggcactttcgtgataacattcgattttttaatagccatttctcgttcacctccctgtactgtttctttgacattatgactacaaacatggattgtggtatctacacgtttcgtgcacatggcatgatgtaccacaacgtaacgtcgttcggtagggaagctggggcggaacataaacaccttgaactctacttctacgatgacgatcccagcctcgagcatagatatcataaatgtcgtcaacaacaacttgagaaagacaagacaattattaaacaattggttgaaatacttaagggaaatccataa

SEQ ID NO: 10088 - DNA, 204 bp, Zea mays
  Peptide Sequence Number=SeqID_53463
atggacccacgccaaaataatgatgttcgttctgcattaaaagaactgtccaacaacactgttaaagatgctcaagcacctactgggtctctatttagctctgagcacatggctattcttgaattgaccccaacaccatttgttcctactccatcggtgactgaggatgttgagacaaacaaactgacaaagtctcctagatga

SEQ ID NO: 10089 - DNA, 600 bp, Zea mays
  Peptide Sequence Number=SeqID_53464
atgaagtgcttatggaaaacaatgtacaaccccgttgtgcagccagagccttctatcagaggaactaataaggataagggtaccattttgaaaacattaacagttttggacactcagcttcctgttaaacaagcatttaaaataatgcatgatgagggtcttgctctggttcctctttgggatgaccgccagggaaccataacaggcatgctcactgtatcagattttgttttaatcttgagaaaggggatattgtgcattggtgtgctaaaacgttctaggcagcagaaagcaatatcacgggagcaagcagccaaagatctgcaagagttggagaaatggagagaagaacttgaggcattgttacttgctgaatggtcggagttgaggggggaagagctgcttgcgtactggtggagagaggatcattggttgaaagcgatgtttctacatatgaggtctgtaattaaggttgaggaagagttggttggggttcctgtgaaaggtggactatatgagattagggatatcagtgcgcttgtacgtttaaggccaacgtgggaggatcttcgcagctacttaaggccgcaaacgttttga

SEQ ID NO: 10090 - DNA, 3330 bp, Zea mays
  Peptide Sequence Number=SeqID_53465
atgtacgtccatgcagttggacggcgaggcagcgtcgctctgcggtgggacggcggcggcgagctatgcggggctcagggacggcaaccacagcttcacggcgtgcgcgagcacgacgtcagcttcgaactcgtcgtccagccccagccccacccccacctgcgccacctacgcttgggatacactgtccccccgacggcgtccgtgtcggcggggccggcgttcacgagcgcgtcctccaccgtgtcggcgctcgtctccttctccgagccctgccccggccgcggtggattcgtctgcaacgccacctactgcaatctcatcgtgtacggctccggcagtgtggatccgtcgacgctccaggtgctgagccccggcctgcgctactccgtggccgtcgccatctcgccggacgccgagtacggccgcctcgtcctcgtcatgggcaggggcttctgcacggacgccgccggacacccgttcaccaggacgcccaactccactttcaccctgcgcttcgatcgaaggagcgactccatgaacatcaccgccaccgttgccgagaagatggtgcagatacagggcgtcaccaggctggttcaggccagcaacgaggaagagggcctgaggatatacctggccttcgcccagccggtgctcaactcgtcggagcagatcctgcgcgcgcttacagcgactgacgccgtcgccgtgcacctcacacccaccaacagaagcaccctcggcaaccgccgcttcggctacgttaagatgtctgacgccgccgccattgtgagcgttgcctgcgacacaagctctattatcagcaggcaagggactccggtggttccagcagagccattcacgtttctttatgatacacagagaccttgggttaagctcggcacatcgactcggcggaccagctcacgcgacatcctcgtcctcatcaagtttgcaaagcctgtgttcaacttcagctcctcggcagtgcaggtagctgagaacgcggccatggacgtcgccgggaaccccaacctagcatcagaccgtcttcaagtcaggcactattctgtgcccgcgtcatcttcttggatcgcggcgatcaccaccgtcgtatttctgacaactgctgccgttgccgcgctcctcaccgtctccacgtcgtctctcgtcgctgccggagctgtctcgaggccctcttcctacatgatctcggagccatcaagaaatgtgctgaggatggcgtgccacatccaaatctttgctctgtcaagatggctgtcggccaacctgccgatcgagtactacgagttcgcaaagggggtagagtggagcataccctacatgcgtcttccatgggaaggcccagccgcagatccgtacctggggtactccacgatgcctgccatcgcgtactcggagtcggagctgctcgacaggagcgccgtcggcggcgctgcaaacatctcctcctatcgtcctcgagcacagcaaggtcagccggtgacgccagcgcagatcatcccgtcggatccggtattcccgacggagatccctgaagatgggaaacccacaccgccggtgcaaactccgggaggagacgccacgccgccggtgatgccagtgcagaccccgttgccgttggacgggatgccgctgacggcaatggagtaccgttccttcttcgagaacccggacatgaagcctgaggcacaaatcatcatgaagctacaagatttggatgggtggaagtacttcggcaggaacatgttctggctgggtgtcatcggcggcggcctcatcctcctgcacctcctcaccctcctctacttcaagctgaggtacagagacagggagcggcggcggcatggctacgccgcactgcttctccccaggctggagatcatggtcgtcgtcctggcgatgccgtgcgtcgcccaagcggcggcggcgctcatcaggggcgggaccacgtgcggcctggtggtcgggatcgtgctcaccgccgtcctgacgtcggtcctggtggccctgctgctgttcctgtctctgggcatcaccatgggcaagctgctgcagtacagggaggtgcaccatgaggaggggcaggaggagtaccactggtaccaggatctggcccgccgcacgctgggcgccggcaagcgcgggcagtggacgtggaaggacccgcgccgcgccgcctgcctgcccaggcttggcccgctcttcgaggacctgcgcggcccgcccaagtacacgcgtggcggtggaggcggcaagcgccgcgccgaaggcggcggaccagagcggcgggtcatcgcgtcggaggacgagaacgaggggtcgagggcgcccttggtgcagcagctcctcggcgtgctccgcatctacttgacgctgctggagtcggtgaagcgcgtggcggtgggcatcgtggccggcgcgcacgcgtcgtcggggcggtcgtcccgcgcgcacgccgtggcggtgctgtccgtcgcctcgttccagctcctgttcatgctgctcgggaagcccttcgtcaagaagcgggtgcagctggtggagaccctgtcggtggccagcgaggtggccgtgttcgcggcgtgcctggcgctcatcgacaggacggcatcgagtggcgggtggctgcccgacggcgaggcgcgcggcgtggggctggcgatgctgggcgccttcgtgctggggttcgcggcgcaggtgtgcaacgagtggaacgcgctgtaccggcaggcgcggctgctgagcgccgaccggagctccttcctggacggcgccaagacagcgggcctgggcctgctcgtgctggtgctgccgtcgtctgcgctcggcgaccaccgggatccgccacctcccgacggcggtggaggagccggggagagcgtgtcagcgtcgacggcggccgacgggggcaggggcgggagctccaacaacgagcggtggtggcttgggcagctgtgggagatggcgaaggctagcttcagcaaggagagtaatgcgagcagtcgcgcctccgccctgcgtagacggctagacgcagctctgagctccgcgcctccgccctgctgtgagcgagtaagcttcgccctgcccctgcacagctgcgctgagcgccttcagatctcaaacagagctagtgctactactccaacaagtgcaggtgttgcgactgatactccgacaccgtcctcaagtgctgctgctgctggtactccaacacctatagatggaggtacagataatgtggttgtagctggggaagatggtaatgtaactgttggaagcaaaagaaagctcaaatctgat

SEQ ID NO: 10091 - DNA, 132 bp, Zea mays
  Peptide Sequence Number=SeqID_53466
atgggcgtcggtctagttcgattcaatggttcggcaagcattacggagatggaagggggtgttacaaggaggatcgacaacagtgaccagttcgtcatcctcgccaccgtcagggtagctgagagcacctag

SEQ ID NO: 10092 - DNA, 1599 bp, Zea mays
  Peptide Sequence Number=SeqID_53467
atggcgcgcgccccgagctcgtggacgccgtccctcgccatggtgctcctcgtcgtggccgccgcggccgtggtcgcgtcgtcggaggcggccagggtgcccgccgccgtcggcaactggacgggggaggagctgcgcggggccgcggcgaggcggggcggccggcgctcccggcgccgcgcgttcgagaacggcctcggccggacgccgcagatggggtggaatagctggaaccacttcggctgcgggatcaacgagaacctcatcaagcagacagctgatgcgctggtcaacaccggtctggcgaagctgggctacgagtatgtcaacataggtgcgcaccatgattgctgggcggagtctgacagggactaccagggaagcttcgttgcaaacagacaaaccttcccctctggcatcaaggcgctcgcggactacgtgcacgccaaggggctcaagcttggcatctacagcgatgctgggacacggacgtgcagccagaaaatgccagggtcacttgaccacgaggagcaggacgtgaagacattctcgtcctggggtatcgattatctgaaatacgacaactgcaacgacgccggcaggagcgtcatggagaggtatacgaagatgagcaacgctatgaagacgtatgggaagggcatcttcttctcgctgtgcgaatgggggaggcaaaaccctgctacctgggcaggcggcatggggaacagctggagaacgaccgatgatatcgccgacaactggggcagcatgacgtctcgtgcagaccagaacgacaggtgggcttcctacgccggacctggcgggtggaacgatcctgacatgcttgaggtgggcaacggcggcatgtccgaggcggagtaccgctctcacttcagcatctgggcgctcgccaaggctccgcttctgatcgggtgcgacgtgcgggcgatgagccagcagacgatgggcatactcagcaactcggaagtcatcgccgtgaaccaaggcaagagacaggcttcccctttccgcgttcctataactacgacgagttttacggcgtttcgatgcagcagtttgttaaggcctgagcctgacttccgaagcaaagctgagagtggtgtggtggtgcgttcttctgtaggtttgggctgggccgctcagcaacaacaggaaggccgtggttctctggaaccggcagggataccaggcaaccatcaccgcacagtggtcgagcatcgggctcgcttcttccactgctgtcactgctcgcgatctatgggcgcactcgtcgttctcggctcaaggccagctatcagcttcggtgccacctcacgactgcaagatgtatgtcttgacgccgaactagctcagaagacaagagcggattgttccatggcgcgtgggatgcaaccattcggtcaggattcagggaagaagagtatgcagtgcaggcaaggatttcaagagaaggaaattcgatatcatttggttatacaggatatgagtgcgaatggaggaataatttatactaatactatggaagtgtatctaaggcgccgtcaaaatgccggtgcctgtgttactggatgtttgtaa

SEQ ID NO: 10093 - DNA, 555 bp, Zea mays
  Peptide Sequence Number=SeqID_53468
atgtccatcgttccagcgcacaagaattcatgtccgcacggtgcaactgctctgtaccgcgtccaagcggcggctttgagagagcttgtcgtacacagcggcgcacgcgaccacgtaggactgcttctagaggtcgaactgacagtcgccaagcttcttctcgtcatcgatgagcgacgccaacgcgagtgcctcctgctcatggtgtttgttcagggtttcaaccctgcgacatcatcttcggctccgtcgtgctctatgacaccggagacaaggagctcacgatccttacggccctgcgacatcagctcaggcgcgctctatggcaccggaggcgaggagctcgcagtttgccagacctacgcaatgtcgttggacgctttcatgatcctcatcgccaacagcagtgagcgattggcagctggagacgaggacattgagaagaagaaagtcaagatcctggtcgtcgcgatcggcgtgggtggctgcagtggcgctctacctctaacacaactatacttgagcaacacttcatggcttgcccctttcgggtaa

SEQ ID NO: 10094 - DNA, 225 bp, Zea mays
  Peptide Sequence Number=SeqID_53469
atgggcgtcggtctagttcgattcaatggttcggcaagcattacggagatggaagggtgctcaaacgaaatagcagaggacccggggctgacctgtggagggctgcccacggctccaaggacggtggctggtgaatttcgaggagatgcgcggcggtcggaggtgacgaaggttatcggcttcgcgactacgtgtctaccgccgtggcgggctcaccggccttga

SEQ ID NO: 10095 - DNA, 519 bp, Zea mays
  Peptide Sequence Number=SeqID_53470
atgccgccacgtaccaggctaacggcacgcaagtctacgggaccaattggggtgcctcgacatcaattggctccccgacatgaaagcagcagtagtgggagtaacgaccccatcggagaccttgaagctcgtgtgagtcgacttcaggcagcactgcaacaaaggactgatgcttgggtcgctgacggtgatagaatcaatgaactgagaagggacatccgacatctacaggatcaactcgctgatcgagacttagcacttgactgggccgtacagtcttcgtttgctaatgtttactgcaacacgttgcacgaggaagtccatgtattatactcacaactacacccaagtgagcctgcaccacctgctgaggcagaagctggaccatctcacattgcgggacgtgcgctgggtggggagttagacctttttgagccccctccttctttgaggttggttgatgtctggactcccacacctgacgatgaagccgccaagactgatggcaagcaggaataa

SEQ ID NO: 10096 - DNA, 582 bp, Zea mays
  Peptide Sequence Number=SeqID_53471
atggacgtgaagaatgccttcctcaatggaccaatcaaggaagaggtctatgttgagcaacctcccggctttgaagataatgtctatgatgggggagttgaagtacttcttaggattttaagtgacgcaactccaagagggcaccttcctaagccaaacgaagtatactcaagatattctaagcaagtttgggatgaaggatgccaaacccatcaagacacccatgggaaccaacgggcatctcgacctcgacacgaaaggtgccaaaggttcatctacaactatactaaatcgactgtccggaataccgtagattattccggacaggagaagctttttggaaaaataggccaagcgcggaccgtccgggcccttgcggcggaccgtccgcaacaccaggatgatcctcggacagaaccaatgcaaaaatccaagtctacactacggaccgtccggaggaaaagcaaggactgtccgagacctcgcgcggaccgtccggcctcaggcgcggaccgtccggtgcggaccgtccggaccaggcgggcggaccgtccgcggtcggcagaatggagcaacggctag

SEQ ID NO: 10097 - DNA, 792 bp, Zea mays
  Peptide Sequence Number=SeqID_53472
atggcgcctcctgttgacgtggctggtctgcgccctaggttgggcgatgtggaagctcctccgaggccgaggtcgagtctgtcttccatggtcgaggtcgagtccgagcccctggttcaggcgaggcggagaccgtcggctgaggccagggcggagtccgagccctggggtcgggcggagcggagttcgtcgtcttctggggctgagcccaagtccgagccctgggtcgggcggagcggacccgagtccgagccctgggtcgggcggagcggagttcgtcgtcttctggggctgagcccaagtccgagccctgggtcgggcggagcggagttcaccgtcttccgggacttagtccgagtccgagccctgggtcgggcggagcggagcttcctatggtgccttcggccgggcctgactgcctgtcagcctcactctgtcaagtggcaccgcagtcggagcggcgcaggcggcactgtccttctgtcaggccggtcagtggagcggcgaagtgacggtggtcacttcggctctgctggctggggggcgcgcgtcaggataaaggtgtcaggccacctttgcattaaatgctcctgcgatttggtcggtcggtgcggcgatttggtcagggttgcttcttggcgaagacagggcctcgggcgagctggaaatatattcgccgctggaggggggcctcgggcgagacggaaatcctccaggctttatgctgatgggggttaccagctgagaattaggagccttgagggtacccctaattatggtccccgacagtag

SEQ ID NO: 10098 - DNA, 663 bp, Zea mays
  Peptide Sequence Number=SeqID_53473
atgaccgcgtcaaaaaagcagggaccgggaaagggggataccccgaaaaggatccttccccatgaaggaaccaggctccgagccttcctactgatcagaggttcgaaggctggcccctcggaagggttcgacagccgcctcaggtcgcgtgggccctacacccactactggtcagaggttcgaaggccggcccctcggaagggttcaacggccgcctcaggctactcaggctccgcgcccactactaatcaggggttcgaaggctggcccccgaagggttcacagccgcctcagacacagaaatcccatcagagggaggcatcgagccctcggaccccgtcgccaggggaccgggtccggcagatcacccgcagctcaccggaaacaccatgttcggcgcccatcgagggcaacatggcgctttcccccctccttgcggaaaggcgacgcaggggcgtatgtaaaaaagtcgagtctgtccctgatcgccctctcgccctgtgcagaggctcgggggctgctctcgcaaacctggctccggccgaaccgttgacagcgtcaacataccagcccgagaacttgggacccgaccgtacacccgggctacggccagctcgcatgagggaacgatcagaccagccaaagcattacgcgaggcattaa

SEQ ID NO: 10099 - DNA, 637 bp, Zea mays
  Peptide Sequence Number=SeqID_53474
atggcgcctcctgttgacgtggctggtctgcgccctaggttgggcgatgtggaagctcctccgaggccgaggtcgagtctgtcttccgtggtcgaggtcgagtccgagcccctgcccgagtccgagccctgggtcgggcagagtggagttcgtcgtcttctggggctgagcccaagtccgagccctgggtcgggcggagcggagttcgtcgtcttcccggggcttagccccgagtccgagccctgggtcgggcggagcggagttcgtcgtcttctggggctgagcccaagtccgagccctgggtcgggcggagcggagttcgtcgtcttccgggacttagcccgagtccgagccctgggtcaggcggagcggagttcgtcgtcttctggggctgagcccaagtccgagccctgggtcgggcggagcggagttcgccgtcttctgggacttagtccgagtccgagccctgggtcgggcggagcggagcttcctatggtgccttcggccgggcctgactgcctgtcagcctcactctgtcaagtggcaccgcagtcggagcggcgcaggcggcactgtccttctgtcaggccgctttatgctgatgggggttaccagctgagaattaggagccttgagg

SEQ ID NO: 10100 - DNA, 294 bp, Zea mays
  Peptide Sequence Number=SeqID_53475
atgccgaagctcacgaatcaagcgaaatctgacagagcaagaaaattcaagcttgaaaaaatagcacaagcgtttgagatggcgcatcaaatgcttgcactgcgggttcctatttatacacccactgcattgcaacttggcgggccctacatgtcattgactttcgctattctagcgaagggaaggaaggacaatctagatccgaagatgtggctgaagaagcttcggcttagcacgatgatgatggtgaaaggcgaaaccgacttaaaggagaaaagactgcttagtccttga

SEQ ID NO: 10101 - DNA, 1500 bp, Zea mays
  Peptide Sequence Number=SeqID_53476
atgccgacctcctcttcttccgctgccgctacgccgccggccgacgcctcgccgccggccaacgcctcgtctaaggagacgctgagtagtttgatggcggaggagttgcgcgccggcgattctgtggattttggcgtgtcgcggatgtcgtcggtccgcgtgcaatatatgcagtggttgggttacttcggcggtggagttgctcgtgtcccggggatggaggaagtccccgagccggagggcgagttggttgtgttcgaggcgttcttcgccgccggtctccgcctgcctgcgcaccaatttgttggcgaagtccatgagctgggcgcgcggaccggtgacttcgaagtgccggaccgagagcccggacttcgctgcctggagtgggtgcaggaggagttgcaggcactccccactgtcgtggaggggtttatgtcgtatgcctccctggtcacttgcgagggggcgatgaacgcgctctcccgcgaagggtgccgacacttcgaggtcttcgaccaagccgatgaagattttgagcgagatatctacaaggttgaggaccccatagtgaaggactccgctggagccatctacgaccggatgtggggtccgcacggtcgcgaggtggtcagggagcgggccgagacggcgagggctcaggcggcgcgtggcgagagggtggatgacttcggggcgttgaacagcgcgctgcctgacccagagccgatcccggcggaggccgtgtccggggccgccctggagccgcccccggagaccacggaaggcgctccggatgtccccgcagctgctgcggccgtcggagaccttctcccagagaccgccgaaggcgcgccagatgcccccgcagccgctgcgccgagtgctgaggatcctgcgacggtggtggcggaggcgacagcggaggcaacggcggaggctcccgcaacggctgggtcttcgcaggttcaagattttgggcctgcgcacgcaaccgccactactaaatttttggcggcttcgaccgtggatggcggtaataaatgtgatggttctgcatctgagttttctgattttgctgactctgggagctcggttgagtggactgaggagtcgtcggaggaggacttggactactttgcagccttggatgtggctgcggcggaggcttcaccgcacgctgcggacgcggaagatgtgcctggtcctagtaccgggcgccggcaacgaagggcggttgcgaagcgcagagtgagtgaagcggagggagggagatggggatcattcctaaggttgagccgatgtagagtgtggtgccctcgcttgtacatgtggaaaggcttgtatgatgaggttgtgtacccccgcacacttggctatgcttgcgaaggcgttatgtacttggtctgtccggctgcacccttaggcggcttctgcacggatagtcttcgtggtagactgaggtttttcgcacttgttgtgctagtccggctgcacccttag

SEQ ID NO: 10102 - DNA, 489 bp, Zea mays
  Peptide Sequence Number=SeqID_53477
atggaggatgaggaagaggcaggcttctctacggcggcactccaaagaaagccaaaggtggtggtggaggatgaggaagaggcggggttggaggatgaggaagaggcgactgtgacactatccatggagagggacgcgttggagtgcgacatctgctgcctacccttccagtccgaagttttcatggcaagtcagattaccatgcatgtatatatacaatacatattgatcggtaggctccagcatgatgctctgctctgtgtaaaatcagtgcaagaacgggcattctggatgtgcaaagtgctgcatccgcacagacgatcatatgatttaattggaacatggagtgaccacccacgaaaacagtgcgaccatgagggtggaacagagttgtcggggaccataattaggggtaccctcaaggctcctaattctcagctggtaacccccatcagcataaagctgcaaaggcctgatgggtgcgattaa

SEQ ID NO: 10103 - DNA, 979 bp, Zea mays
  Peptide Sequence Number=SeqID_53478
caggagtacgagtagagcagactcggcgaaggaggctatggcgggttcaacggcgttgggaagggaaactagcgcagcgcaggactcggtgtcgcgggacacgacgaggtggatgtcggcagcgcaggggagtgagctccggcgcggaagagtgcgcggacaagagcgagagcgaggggaaacagaagctctacggggtgcagtggattttattgtgccgagagaaggtggatcggcgccgaggagaggaacggagaggttggccaccattgacacgacatcggtaacagtgggaaggggatgcgtcgcggcagtggaggacgggcaacggttcacagaggtggtggcgcactcagctgatgggcggacggagggatgcgaagggtcggccggcgtccggcagcggcggcacgcgagcgtccaggcccatgcggctgcgaagacgagacccaagtccggcctcgggcgccataggaagctccgcctcgcccgatcccagggctcggactcggccttggccccggaagacgacaaactccgcctcgcccgaccccagggctcggactcggcctcggccccggaagatgacgaactccgcctcgcccgaccccagggctcggactcggcctcggccccggaagacgacgaactccgcctcgcccgaccccagggctcggacttggcctcggccccggaagacgacgaacaccgcctcgcccaaccccagggctcggactcggcctcggccccggaagatgacgaactccgcctcgcccgaccccagggctcggactcggcctcggccccggaagacgacgaactcagcctcgccagaccccagggctcggactcggcctcggccccggagacgacgaacaccgcctcgcccgaacccagggctcggactcgacctcgatctcggaagacagactcgacctcgacctcgacctcggaggagcctccgcctcgccctacctag

SEQ ID NO: 10104 - DNA, 303 bp, Zea mays
  Peptide Sequence Number=SeqID_53479
atgaattgtgtaaccctaaatctaactttctcttcaacagttgccacgatcgccctcctcgttaccaccacccctgccatccacgtcgacgccgccggaccagatgtcctcctcgtcgttgccccagtcgttcgcctcgtcgccaccgccccagccgttcgcctcgtcgccaccgccccagtcgttcgcctcgtcgccaccgccccagtcgtctgcctcggctcctctgcaacaaccatccgcatcggcgccactgccccagccgtcttcctcgacggcctgttcctcactgccttgtcgtga

SEQ ID NO: 10105 - DNA, 765 bp, Zea mays
  Peptide Sequence Number=SeqID_53480
atgagccatagccatagcactaagacatcgtggccggaggtggaggggatgcctgctgaggtggcgaagcgcaagatccaggaggaccgcccggacatccaggtgatccttgtgcctgtcgactccgccgtgaccgatgacttcaacaccaagcgcgtccgcgtcttcttcgacaaggccggcaacgtggcacaaaaatcttggtgtgcagactctccatcccgccgccgcctccctacgtccgcctgcctaaccccgccgcgaatatccacgcccgccgctaccgctctgcacgcccgccgcgaatctcgccgcgcgaaccgcccgcccgcccgcccgccagccagccgctccgcacgcccgcaacgcccgccgcccagccgccgcaggaggatcgccctcctcccgtcgtgcttctctggccccagcaatggcggcggtgaagaggagcaggagatcgacggcaaggagcggttcgagttcatggtcgagccgatggcggcgagctccaaggactgtgtgggcacgtacgagtacctcgcgtcggagctcgtgagcgggagcggctacgacaacggcgtggaccggtgggccttcgacgtcttcctctacgagctcgtctacggccgcacgcccttcaagagccacaccaaggtggccaccctcaagaacatcctctccaacgccaccgagatcaagcggcacccgttcttcgctggcgtggactggacgctcatccactacaacacttgtgaccttctgtga

SEQ ID NO: 10106 - DNA, 591 bp, Zea mays
  Peptide Sequence Number=SeqID_53481
atgccatcctcttcgtcgttgtcgttcgctgcgagcgcttcaccggccaagccgtcatctgagaagacgattagcgattcggcggcggtagacctgcaccccagtcatatggttgagtttggtacctctatgatctactcgggccgcatgctagagatgcaacgactgggttactttggaaagggagttaggcgggctccaggggctaaagatgtccctgagccggagggggagttggttgtgtttgaggctttctttgatgctggtcttctcttgctagcacatcggttcgtagttgaggtcccgcggtggtttgaggtacaagacgagcaggcccttcgctacgcagcccgcctgagcaacgggcgtgaaggtactaggcttattgattaccatatttctcggtttcaaacaactccaacacttaatgcacaatacaagctgttggaactaactaactcgtggtcagccaagctcaaacaaacggagaatgggaaacagtttaatgccagtaaacgcaaggaacgtttcacccgtcttgcagacattacagaacatcggagatatagaaatgcggaagcaattacataa

SEQ ID NO: 10107 - DNA, 1113 bp, Zea mays
  Peptide Sequence Number=SeqID_53482
atgaaggcccaggcccacacgtcatgtaaccggcgcgccggttactacgtgcgaaaaactgcaccgcctcttgcgccagtaccacgccttctcgactgcggaaccggtgccgcgactcgaggcaaccctgcgcatggcccaacagtgccaaaccgagcacatcggtcacggggcaggcgacacctttggcaggcgaagcgggcgacgcttcacctccgccatgatgaccgcgtcaaaaaagggactgggaaaggggatactccgaaagggatccttctccgcgaaggaagcgggccccgagccctcctactaatcagaggttcgaaggctggcccctcggaagggtttgacagccgcctcagagcagtcgggctccgcgcccactactggtcagaggttcgaaggctggccctcggaagggttcgacagccgcctcaggccactcgggctccgcgcccactactgatcaggggttcgaaggctggccccccgaagggttcgacagccgcctcagaacacgcagaacgagggatgactctagccgagttcgtgatccgcccatatcttgctaggtggtgcaatttatttgctctgcgactgattggacatttgacggacgttccctggctagtcttcacgtcgcttctgttggtcagattttgtacttcaccggctatatttggctttcctttgatccttctgatatctcatttttgtcttgagccgactcctccatcggaggacttcggtgactcggaatactcggaggaggagttctcctctgagtccgaggggtctccggctcccgtctctcccccggcgtcgtctgacgactcagacgactctcaggggattgccgcggaggtctggacttacatccgggccgtcgagcgctccgggctcgagggcttggatgagtcggagtactcctcggacgaggaggactcgcccgaggaggacggcgatggtgacgacgacgacgacggaggcgacggcggcgatgacggcggcggcaggggcggcaacggcgatggcaagggtggcaacggcggcagcagcaggggcagcaacggcggcggcaacagcaagggcagcaacaaggccagtggctag

SEQ ID NO: 10108 - DNA, 624 bp, Zea mays
  Peptide Sequence Number=SeqID_53483
atgacctcagggcagacgctgctgcgacaaagccctcgcccacgtccccactcgaggggcgaggacaagctatcaaatccaaagagccggaggcccggagcacagatggcgccgacgatctcgtcgatgacgaggccttctccagctaccgccacctcggcaccgacgacagcagccacctgctcaccggcagatccccactcgggtcctcccggacgggcgagcaccgacctccgcgcggaggcgtcgtgccggggcgagggcaggacagcccaagaacacaaatgccgccctagcagcgcgcgacgtcttgggcggtcccccggtgcgcgcgggtcgcaacagccgcccgtacggcgggcagatagccacactccgtccagcggtgggaggtggcaccggaagctatgccagagccagctgagccagcgaaccaggcatgctggagctaacgacgcttgcggccaatcggccccgcgttgtcgaagtccgccccctccgctaggccggcgagtgccctctcccctgaatgctgaaggaggaggtggcctgccggcccgtacgggaggtagagctccggctcagctcgccctccgccccagcaaggatgatgaagatccttga

SEQ ID NO: 10109 - DNA, 1260 bp, Zea mays
  Peptide Sequence Number=SeqID_53484
atggtcgtcccagtcccgccgccgcctctcctcgcttcccacgtggccgtccgggccgcggcctccgccatatcccacggccgccgggtcctccttaacggcgaccacccgccgcaggtcgcggccctcgggcgcggcgactgggtcaagctcatctgcggcgccagctttgaggatgcagctgatgtcaggaatctctcccttgtctacactcttgctggagcagatgcatctgtggtgggagcagtgaatgaaggtattgaagtagcagcatcaattgtaccaacagttcaaaggccttggctgatgattagtgttaatgatgattgcagagatcttcatttccgtaaagctgagtttgatcctgatgattgcccactggattgctcaaagccatgtgagaaagtttgcccagctgatgcaatatcactaaagcattccatggttgatggagagcgcacactatctgatcccttacgtggtaaatatgagggtggtgtaattactgagcggtgctatggatgtggtcggtgcttgccagtttgcccgtatgacagaataagagctgtgtcctatgttcgagaccctactatgactgctgaattattgaaaagagatgatgttgatgcaatagagatacataccactggaaaaggaactgatatgttcaataccctctgggacaacttgagtgggtccatcaataatgtgaagctggttgcagttagtcttcctgatataggtgaatcaactgttgacctcatgaacacaatatacacaataatggagccccattttaaagggtataatctttggcagttagatggccgacctatgagtggtgacattggccgaggtgcaacaagggagacagtttcttttgccgctcatgtggcttcaatgtcagaaagacctcctgggttctatcagttggctggtggcaccaactcatacactgttgattacttaaagaaagctggtcttttccaatcatcaaattggaattcagggaccgcaacctctgaaatggccagttctcaccaagctttaataggagggattgcttatggtggctatgctcgcaagatcgttggacgggttttgcgcaaaataccagaacagtttggccgtgtgcacatcgaggatcatcctgatcatctactggaggctctacaagaagccatgtcattagtaggacctgtgaagggttatatacccagtcattccaagcctttcatgaaacaagtagatagacaatag

SEQ ID NO: 10110 - DNA, 366 bp, Zea mays
  Peptide Sequence Number=SeqID_53485
atggcgttagggcaaacgctactgctgaaaggccctcattcatgtcccctcacgggggacgagaaccagccattaaagccaaagagccggaggtctggggcgcaggtggcactgacggtctcgtcggtgaaggcaaccgcttcggcaagggggagcctcacctatggcgaccaccccctcagcaccgactacagcggccacctgcccaccaacactgcaccgacgagcggcgcccgccccaaagcgcaccggcaggtcctcactctcgtcctcgctgaggctgtcccagaacacgagtaccgccctcgcggcgtacgacgtgttgtgcgaccccccggtgcagccgacggtgccaggaggacctag

SEQ ID NO: 10111 - DNA, 441 bp, Zea mays
  Peptide Sequence Number=SeqID_53486
atggagtcttcggcgaagacaaggcttccactcaactctatcggtgccaaaggttcaacacaaaccaataaaaagaacaagttagagctcaaaagaaaggagcaaaaagaaaccgaagtgctccctggtctggcgcaccggacaatgtccggtgcactagggaggatcgccttcgaactcgtcaccttcgggtttctcaggcgcagctccgctataattcaccggactgtccggtgtgacaccggactgtccggtgcgccagcggagcaacggctatctgtgtccaacggtcgactctgcaaaggtgaacagttgaattcagatgtcagagcagaagtcagaggggcaccggactgtccggtgtggcaccggactgtcctgtgccgcatgaggacaaagcctccaacggtcgaccagctccaagccctaacagaaggatga

SEQ ID NO: 10112 - DNA, 999 bp, Zea mays
  Peptide Sequence Number=SeqID_53487
atgatggttgaacggtaccaactcccacggagttgcgttcctccaacgacaaggcgggaggactgcgggtgtcccccatccgggggctcggaaagtggaaagacacgatgcataagggagcgcgaagacatggtcgcctttcaagggggtcaccctctttttaaaggcgactctccctacctgcgtccccagccgtcgtgggctgagtgttctccaacacgctccaaggtcctctccctacggcgcgggggctgggtcccacatgtcatgcaaactggcccagagcagaagaagccaaaccaccgcgtgcggtgcatgcaaccgcccagcggttacgagcattcctccactttcgcccagaccagcgggcgaaagggcgggcagccatgcaggcggcatgcaaccgcgccaagtgggcgcgcccctccggcttccaacgcacccagcatgggggcccacgcccacgcgtcatgcaactggcgcaccggtcgctacgtgcaagcaactgcaccgccactcgcaccactgccacgcctcctcgactgcggaaccagtaccgcgactcgaggcaaccctgcgtacgacccagcagtgccagccaggggcgacggtcaatgcggccaaaaatgggccggcagtaatggcagtggcaagcgggcgggagcagcggtcatgtcgtcagccaagcttacgtcccatcctgggggaggaccgggaaagggggataccccgaaaaggatccttcttcatgaaggaagcaggctccgagcctccctactgatcagaggttcgaaggctggcccctcggaggggttcaacagccgcctcagagcgcgtgggctccacacccactactggtcagaggttcgaaggccggcccctcggaagggttcaacggctgcctcaggccactcgggcttcgcgcccactactgatcaggggttcgtaggttggccctcgaagggttcacagccgcctcagacacagagcgagggatga

SEQ ID NO: 10113 - DNA, 144 bp, Zea mays
  Peptide Sequence Number=SeqID_53488
atgttcggattgcaggtgataatgagactgatggttcttggttttgactctggtaatggttgtccgcattgtaaccactgctcaggagaagatgaagccgtggaaggagacttccaggagttccaagactacgacgagttctag

SEQ ID NO: 10114 - DNA, 618 bp, Zea mays
  Peptide Sequence Number=SeqID_53489
atggtcacccaagacggtgaccaccagtttgatggtggggagaagcaagccgggctgcggcctctgccccgccctcagcttcaaggaccttcatcatccttgctggggctgagggcggctgccgtcgtcggcgctaaggtggtggcggctggagaagtcctcatcgccgacgagatcgccgctgccatccgcgctccgtgcctcggctctttggctttgatagcttgtcctcgcccctcgagtggggacgtgggcgagggccttatcgcagcagcgtctgccctgaggtcatcgctgctgctgtttggccgcccggagcggaggtcgttgtcgctgctgccgaaggtgacgagtgaggtatccatatcccggaggcgtaggagtccctcggctcggtcggccttgccgcccgaggcttctcttgctcagtttaaagaaaccctcggccgctctgcgatgagctggagccggaggcagcggtgtcagcatggacagaggcggagttggctcgaaaagaagcttcgtcggctggagcctggctgggccatccactggcgggaccaacgccggagtcgggttgccgaggccatgagccgggctgatgtcctcgggggatag

SEQ ID NO: 10115 - DNA, 165 bp, Zea mays
  Peptide Sequence Number=SeqID_53490
atggcgacggtgggtgcgctgcaaaggggaagtggggcggtggtggtgtgcatggagcttgttccaggcttcaagggtaagcttcccggtatcttcttgggtaagggctctagccaaagtgaagaaaaactccactacccaatgcatgcagaggactgggcataa

SEQ ID NO: 10116 - DNA, 219 bp, Zea mays
  Peptide Sequence Number=SeqID_53491
atgaaggatgccaagtccatcaagacacccatggaaactaatgggcatctcgacctcgacacgggagcatcctccaagcgcctcatcctgtggtacctgttcttgacctgtggggtgtgtgagacagcaagagtgagctcacatacgttcatcgctcaacaagttgtggggaataatgtgcatgaactcgccaaaggtgggagctcacgtgaagtgtaa

SEQ ID NO: 10117 - DNA, 177 bp, Zea mays
  Peptide Sequence Number=SeqID_53492
atgacgaaggtgcctaattgtaaaatggtggacaaagtacaaatcaaggataaaggaaaaatccaattgagaatgccttggctcgagcagccaaagtatgctcagtctgggagcaccggactgtccggtggtgcaccggacagtgtccggtgcgccaggctggcttgggcaaagtag

SEQ ID NO: 10118 - DNA, 1299 bp, Zea mays
  Peptide Sequence Number=SeqID_53493
atgagggtggaatgggacgccgaggaactgaggtgtagtttgcttcgccaacgtgccgtcaatggggcttggtcctcagggaatctttgtaaaggctacatagtgaaaccctacctattcaccttggtagtgtttaagggtttgatcggcctgaggcaagagggaatcacggcttgtggagatgtttggattacaagtggtgatgaggatgatggtcatgattatgcttatggtaatgaggctacaccaccgcctgcacgaggagcaggagcgtcggtgacaggagttggagcagcagggctcttctttctcgcttcagcaggaggtagagtttgtgaagagctgctctcatgtgcccccgctggaggcgtcccctgcaccacactgggcgtcccgaccactggagtagctgttggaggagaccccgacgacggaggtgacaacagcagctcgagccacaacaccgacctttcagaggagcaggagctggagggatgggttgctcgacccatcactcgtgacgccgctcgcggtcgcgtggtttacccggaccgctgggaggcaacttgcttggtgcgccgtccgaagaacagtctccggggtgtggatgtctgctcagaacattactctatttctgagagagactcagctgaggcggccatgcaagatgttgcatggcgtgcgctttcgcactactcagtgctcggtggggtggccgatggtcttaacctgaggtattacccccatcgtccatctggcagcacaggaggcgtggttgtctcacctgttggtgaggacaatcctaggttgagcagcatagtcaacctagccgtcgtgctaaacacggagctggaccatgctttagatgagctgagtagggctcgtgctgagatcgcccacttgcgggctaagcgcgcggagcgccgtcacctagaggatggttctcccgcccccgtcgggactcagcacccgtaccgctcacctcagcatggaccatgcttatgtattgtggaagaattctatactcttttcttatgctgcaagtttgcaagatcagttctgatatgtgattgcattctgcagatgtcagacaacaggcgcagaggaggaaggcgtgctcagcaggagcaggcagcaccgcaggatgaggcaccccggcaacagttgccaccaccgcccccgatgatgatagagcagatgttcttgatgcagactcaggcagtccaagccattggtcagactctagccgctatgcagcagcagcaccatcagcccccacctcagcctcagatgccttag

SEQ ID NO: 10119 - DNA, 900 bp, Zea mays
  Peptide Sequence Number=SeqID_53494
atgagattgatggttctggttatgactatggtgctgatggctcgtcttagacacactgcacgaaagtccgtcatccccttcttaccctcccgccttgctgagcatccgcttcaccgtcccgtggccggtcagtccagtcacttggagaggctgcatcaccgccttcatgaggagcaggagcgtcgacgacaggaacaacagggctcttctttctcgctccagcaggagatagagtccgagccggaaggatgggttgctcgacccgtcactcgtgacgctactcacgggtgtcacttccacgatgcgctcgacaccctgctacgtcgagcacttaaccggcgtacttggtctatcgagtatcactgtgtggtctaccagcatagtcgcggggtctacccggaccgctgggaggcgacctgcttggtgcgccgtccggagaacagtctccagggtgcggagacctgctcagagtactattctatctctgagcgggactcagctgaggcggccatgcaagatgctgcacggcgtgcgctttcgcactactgcttggttctcggtagggtagctgacggtctcaacctgaagtattacccccgccgtccatctggcagcacaggaggcgtgattgtctcacctattggtgaggacaatcctaggttgagcagcacagtcaacctagccgccgtgctaaacacggagctggaccatgcattagacgagctgagtagggctcgtgctgagatcgccctgctgcgggctgagcgcgcggaacgtcgtcacctggatgatggttcccccgctcctgtcgagactcagcacccgtaccgctcacctcgacgtggacgccagtcttatggcaatcccgactgcaagaccaagataaatctagaaccatag

SEQ ID NO: 10120 - DNA, 168 bp, Zea mays
  Peptide Sequence Number=SeqID_53495
gtgctctcaaatgggcgtttcgccttcgagtttgaatttcacagcggattcgggcgaagtgttgaacgggtcttgcccgggcctttatatacccagaagagggaccggcggtggttctttactctgctgctcgcctcctgctttggtttccgcaacctaagaggatag

SEQ ID NO: 10121 - DNA, 294 bp, Zea mays
  Peptide Sequence Number=SeqID_53496
atggatccttctccacgaaggaagcgggccccgagccctcctactgatcaggggttcgaaggctggccccttggaagggttcgacagccgccccagagcactcgggcttcaggctcagtactgatcagaggtcaaggcttcgtctactcaagggacgcaatctcgcctcgcccgagcccagcctcgggtgagaacagtagtcctaggcaaattcacgcctcgcccgagggcctcctcagcaacgggcgcaccctcgactcgcccgaagcccagctcgggcaggcttcattgtga

SEQ ID NO: 10122 - DNA, 2226 bp, Zea mays
  Peptide Sequence Number=SeqID_53497
atggagtatcgtgcggcgccgccggacgacgtgatcgtccaggtgaacgccgccgccgtggcgaccgtggacgaacggatctcgacgtgccagatcaccgaggaggaaggcggcatcgtcggacacgagcaggtccccgtcggctggctcgcccatcggtccttcagccagtcgtataggacgagacaccgcaaccctatggagttcaccgggtggcaattggcgctgctggcgtaccagtcgctgggcgtggtgtacggcgacatcgggacgtcgccgctctacaccttctcgtccttcgccctgccgaaccccggcgccgccgacatcctaggcatcctcagcctcatcctctggacgctcaccctcgtcagcctcgtcaagtacgtcttcgtcgtgctccatgcagatgaccacggagaaggtggcaccttcgccctgtactcgctcctgcgccagcacgtcaacttcagcggcaagtcggtgccggtgccggtcacccggctggcgtcggatgtcaacctcaggttccacagcaggaagagtagccagcaaccgaggatgctcgccttcctggaaggcagctccatcgcgcaggcggtcatcacctacctcgtgctggttggaacttgtatggtgatgggtgacggtgccctcactccatccatctcagtcctatcagcggttcaagggatccagtcaagatcttctagcatcaaacaaggccacgttgtcctcctgtgcgtggttatcctagtcatccttttcctgttccaacagtacggcacaagtaaagttggcttcaccttttctcccatcatgctcgtctggttcgcgttgatcgcgtccactggactgtacaacatcatcaagcactatccaccgattctgaaagccatatcgccgcattacatataccttttcttcgcgaggaacaaaagggttggatgggagcaatttggaacagttgttctgtgcataacaggtgtcgaggctatgtttgctgacttgggtcatttcaacaagaaatcaatccaaatggcatactcgtgtctggtctatccatcactgatactcgcatacgctggccaggcagcatttctgatcaagaacccatcgaagctcagcacaacgttctacagcagcgtcccagagccactgttttggccaatgttcgtcgtggccactttggctgccatcgttgcgagccaggcactgatatctgccagcttctccatcgtcaggcagtcggttgctctaggttgctttcctagagttaccatgaagcatacctcaaagaagtacgagggccgagtgtactctccagagatcaactacttcttgatgattgcctgtgtattgatcactgttggcttcaagggtggaccagagattgggcaagcctatggtgttgccgtgatatgggttatgcttatcacaacccatctgatcacagtggtcatggtaataatatggcaggtccattatgcaatagccgggacattttatgccatcttcgctgccatcgaaggtcttatgacgatctcactcctgtataagatcgcacagggtggctgggttccgtttgcgataactgcattcttccttataattacactttcttggacctacgggcgaagcaagaagcacgagtacgaggtgagcaacctgatggacaggcaggatttcatcaagatagtgaatatgagcaatagagtacctggaatatgcatcttctgcacagacctgatgaacggcatcccgcccattgtgcggcactacgtccagcacatgggctgccttcgcgaactgatggtgttcgtcactgtgaggcacctacctgtgacgtctgtgctacctgaagagcgcttcctcttcgacaggctggagccttttggtgtctacaggtgcatagtccagtatggttacatggacacccagaacatggaggaccacgagtacgttgtatcgatcattgcatccctcaaggaaattgctcagagcggtgatgagatcctgatgatggattctgctctagcgaacgggacgacctttgtgcttggaagggtcatcttaaacatgagccctgagcgggggaactgcttcaagcgctttgttatcaacaacctttacaggttcctgcaaaagaacttcaggtccaacatttccaatctgaagatagctcctagcaaaaccttgcaggttggaatgcagtatgagatttga

SEQ ID NO: 10123 - DNA, 366 bp, Zea mays
  Peptide Sequence Number=SeqID_53498
atgcctagtttcctgtctgagtctggcccacttattcgtgtcgtgtcggttcggacccgcatagaaccggatcgtgccaggatcggaccaggcccaaacaacggattttgtgtcgggctcgcgggcctcatgcttgttggccatctatactggcatctcaagttaccactagcactatgcttggctgctctccaccgtggcccatgcgtgaacactactgtccactaccttgacgtgtatgggaaggttgatgggccaaggtgggccgtgggattatcatcaaataatttcaaattggagcaaaacaactgcactatccctgctctgacagtagtccttcgggtgtttggttcttgcaagctatga

SEQ ID NO: 10124 - DNA, 446 bp, Zea mays
  Peptide Sequence Number=SeqID_53499
cggcacaacaatccagtgaagcgcaactcaagaagccaaggcgggcacaatactgctcagtgaggagtggtcgcctactcgcctgttcaaccattgaacagacaacagaggagaacataagcgcgctggaggggggtctctgcagactacagttgtcgcacgatgcaagggcgcagttgttgctcaaggagtgggccaccagagcacaacagacgacgggagaggagggcgcgattgaaagttgcctagaggggggtgaatggtcacttagacccctacaaggaccaccacaacttggtgtctcttgctttgattacaagtgtcttgagaacaagaaaaaggaagaagaaaagcgatccaagcgcaaaagctcaaagaacacaagcaaaactctctctctagtcactaattgctttgagtggaattgggacttagagaggctttga

SEQ ID NO: 10125 - DNA, 903 bp, Zea mays
  Peptide Sequence Number=SeqID_53500
atgcagattattgaaagaaagtgtgaggctcaaaagggtgctgggataaggagaaaaaaaacactcgataaactcaacgatcaacctggaaatctgataccacttgatatagttgaggtaccctatctttcggtgagtggagataatttcgatttggtggaagatgacccttgcgatccgactacgacgagcaagaccgaggcgccaatgcaatcgctgaaccaactccctgtggttatcgaccttgctgatgcgagatcggagaaaaaagatcaaccgggaaatctgataccacttgatatagttgaggttcccgatctttcagagaaaaaaacactcgataaactcaccgatcaacctgcaaatctgataccacatgatatagttgaggtgcccgatctttcggtgagtggagataattacgatttggcggaagatgacccttgtgatccgactacgacgagcaagcccgaggtgccaatgcaatcactgaaccaactccctatggttaccgaccttgctgataaagaaacactcgataaactcactgatcaacctggaaatctgataccacttgatatagttgaggtgcccgatctttcgattattgaaagaaagtgcgaggctcaaaagggtgctggcataaggtataacctgaatttttatgtggttttgtggaatgtaggagaaaaaaaaacactcgataaactcaccgatcaacctggaaatctgataccacttgatatagttgaggtgcccgatctttcggtgagtggagataattctgatttggtggaagatgacccttgcgatccaactacgacgagcaagcccgaggcgccaatgcaatcgctgaaccaactccctgtggttaccgaccttgctgatgcgagattggtctga

SEQ ID NO: 10126 - DNA, 1380 bp, Zea mays
  Peptide Sequence Number=SeqID_53501
atggcggtccgccctttcacccgctggtctgggcgaaagtggaggaatgctcgtaaccgctgggcagttgcgcgcaccgcgcgcagcgccatcgttcggcttcaaggattttcatcagccagcctggccgcatcccctcgtcggtggtcacccaagacggtgaccaccagttcgatggtggggagaagcgagccgggctgcgatcttggtcccgccctcagcttcaaggatcttcatcatcctggctggggcggaggccgggctgagccggagctctacctcccgcgcgggttcgtgggtcaccttctccctcagcattcaagggagagggcgctcaccggcctagcgggagggtcggacttcgacaacgcggggctggtcggcggcgagcgtcgtccgcttcagcgcgttgggctcgccggctcagctggctctggctcggctcccggtgccccctcccgccgcaagagcggttgtcgcgccgcgcgcaccggaggaccacccaagacgtcgcgcgctgccagggcggcgttcgtgttctggggctgtcctgcctttgccccggtacggcgcctctgcgcggagctcggtgctccgctcgtccgggaggatccgagtggggatctgccggtgggcagatggcttccgtcgtcggcgctaaggtggtggcggctgaagaacggcgtccgccctgaggccatcgccgctgcagtttggccacctggagcggaggtcgttgtcgctgctactggagcgggcggcgggaaccctcggccgctcttcgatgagccgaagccggaggcagcggtgttagcatggatagaggcagagttggctcgaaaagaagacttcgtcggccagagcctatccgggccgtccactggcgggatcgacgccggagtcgagttgccgaggccacgagccgggctggtgtcctcaggggacagctggctgaggcttcggggcggccggccgaaccgtctgctcgggccagattccaggaggagaccctggcggcgatggcccgggcgcagtgctgacgtcgtccttcggagtggagatccttcgaccgtgttgccgtccgaggctcggtcggacttcgccgaaggtggggttgacgccgagggtgctgctgctccccttccgtcgacgtctgagcctgcaggattggttcatcttatagattctgctatcgatatagtcgagaatgcccgaaaaatcgtttcggcagaagagttttcgagcgtgaagacttgttcggtccgcggaatcacttatccgagcgtgagttacttatcgcagaaggtgatgagtgaggatcccactttcgaagtagtcgaaaagcacgaaagacgttctggcagaaaagatgttttctga

SEQ ID NO: 10127 - DNA, 285 bp, Zea mays
  Peptide Sequence Number=SeqID_53502
atggcgaaaaacgaggaagaaattgtggttgaagaagaagttgtttcccaagctgaaaatcctctagccgagaacaacttctacttcgacatctgcggagtggaccctgaacctcctgcacacaaggcaagtgatgaggacatcacctacaacatgagtacgactacaccagcagcacctccacatcaagcgacacttccttcattagctaggccaatcactcgggcccgtgccagagatcttaacttcatcatgctactgaagaatgagggcccagaagaatag

SEQ ID NO: 10128 - DNA, 153 bp, Zea mays
  Peptide Sequence Number=SeqID_53503
atgacgatggtgaaagatggaaccgacctaaaggagaaaagattgcttaatcctcgacatctggccttatggttaatagaaaatgccagggacatgaatgacgagttccctagtggccgggtgtcacgctccacaagatcgtggcagccatag

SEQ ID NO: 10129 - DNA, 576 bp, Zea mays
  Peptide Sequence Number=SeqID_53504
atggcgcgcactaagactacccagcgcaaatcgactggacctctttgtgtgccacgacatgagctagcctccagacatgaaggaagtagtagtggcagtaatgacccaattggagacctggaagccagggtggagcaactccggtcagaactacgccactggaataggacacgtgagcgggatagccaccgtattgtggagctgtcggccgaagtgagtcgcctgcagtacgaaatttcagaacacgatacagccattgattgggttgttaactcgtgctcattcgcttgggactgtgaagcgaaagctctagctcgtgtggcagagcttagtgcatccctcgagaacctgcaagcatactgtaacaatttacatgaagaagtgcatgtaatgtatgaacggctgcacccggacgtgccaccagacgtcgctgcaatgggagccgggccatcgggaacagctagtgaaggacctgatggggagctagacctttttaggccccctccttccgtgaaccttgctgacgaacggtcttctgcatcaggaaatggagcaacaaaggatgaagaagactag

SEQ ID NO: 10130 - DNA, 600 bp, Zea mays
  Peptide Sequence Number=SeqID_53505
atggcgggacacgcgtctgatcgtggaggacgtgcacaaggtgcggtgctcacgacaggtttggtggtttgggcctcaaaacctcccagcgctacggatgagtggtttgctgagtttgggcctcaaaactcggcggtggtggttccggcgggaactggtggcggcacgcggcgtgatcgcggagggtgcgtcaaggcgaagcaactccatgtgaaggatgtggccgtcggatcgaaaacctatgagttggtcaatttcacccccgatggagtggatgggctctatgaggtgaaggtctcggcgatcatcgagtcgcccaactacgagactctcaccgtggacgagctcttcagcaagctcaagtccatagagattgaccaccagactcgggccaagattgagaaccctagtgcacccaccatggccctggccattagtgatatagctgaggtgcctgatctttcggtgagtggagataattccgatttggcggaagatgacccttgcgatccgactatgacgagcaagcccgaggcaccaatgcaatcgctgaaccaactccctgtggttaccgactttgctgatgcgagatcggcctga

SEQ ID NO: 10131 - DNA, 576 bp, Zea mays
  Peptide Sequence Number=SeqID_53506
atggcccccctgtgtcgtggtcagttcgagccctgggtcgggcgaggcggaggctcctccgaggtcgaggtcgagtctgtcatccgtggtcgaggtcgagtccgagccccgggtcgggcgaggcggagaccgtcggctgaggccgaagccgagtccgagccctggggtcgggcgaggcggagttcgtcgtcttccagagccgaggccgagtccgagccctggggtcgggcgaggcggagcttcctatggcgcccgaggccggacttggctgctgtcagcctcactctgtcgagtggcacagcagtcggagcggcgcaggcggcgttgtcctctcgtcaggccggtcagtggagcggcgaagccatcctcacattaaatgcttctgcggtgtggtcggtcggtgtggcgatctggccaaggttgcttcttggcgaagactgggcctcgggcgagccgaagatttgtgctgatgggggttaccagctgagattaggagtcttgggggtacccctaattatggtccccgacaatatgtgcagcaacatctacatgtggggcgttcgcaacattaagtga

SEQ ID NO: 10132 - DNA, 420 bp, Zea mays
  Peptide Sequence Number=SeqID_53507
atgacgcgcaagcacacaagttcaacaatgctgattattgaaagaaagtgcgaggctcaaaagggtgctgggataaggtctaacctgaatttttatgtggttttgtggactgtaggagaaaaaacactcgataaactcaccgatcaacctggaaatctgataccacttgatatagttgaggtgcccgatctttcggagaaaaaaacacacgataaactcatggatcaacctggaaatctgataccacttgatatagttgaggtgcccgatcttttggtaagtggagataatttcgatttggtggaagatgacccttgcgatccgactacgacaagcaagcacgaagcgccaatgcaatcgcggaaccaactccctatggttaccgactgtggcggaactgcccgaattattccaacttaa

SEQ ID NO: 10133 - DNA, 534 bp, Zea mays
  Peptide Sequence Number=SeqID_53508
atgccagatttattgaaagaaagtgcgatgctcaaaaagggtgctggcataaggagaaaaaaaaaaacactcgataaactcaccgatcaacctggaaatctgataccacttgatatagttgaggtgcccgatctttcggtgagtggagataattctgatttggtggaagatgaccctttgcgatccaactacgacgagcaagcccgaggcgccaatgcaatcgctgaaccaaactccctgtgggttaccgaccttgctgatgcgagaattgggtctgatctcagaatggagaaaaaaacactcgataaactcaccgatcaacttcgaaatctgataccacttgatatagttgaggtgcccgatctttcggtgagtggagataattccgatttggcggaagatgacctttgcgatccgactacgacgagcaagcccgaggcgccaatgcaatcgctgaaccaactccctatggttaccgaccttgctgatgcgagattggtctggtctcagaatggtgtcaacaagctcctgtaa

SEQ ID NO: 10134 - DNA, 426 bp, Zea mays
  Peptide Sequence Number=SeqID_53509
atgggcaagagcaagagaggtggcagctcttcgcatcactcgggcgacaagcgcaagcgcgagccgactcctcccttggaggacttcggcgactcggaatactcggaggaggagttctcctccgagtccgagggctctccggctcctgcttctcccccggcgtcgtctgttgattcagacgattcccaagggatcgccgcggaggtatggacctacatccgggccgtcgagcgtgccaggctcgagggctcggatgagttggagtactcctcggacgaggagaattcctccgactcgtccgaggagggcagcggcggcgacgacgacggaggcgacggcagcggcaagggcggtgacgacagcggcaagggtggcagcggcgacagaggtggcggcagcaagggcagcaacaaggccagtggctag

SEQ ID NO: 10135 - DNA, 594 bp, Zea mays
  Peptide Sequence Number=SeqID_53510
atggcccgcgcctataaagcccacttgggcgtcgactgcactcttccgcacaccctcaagcctcaccggagctcagttcaccgccgtttgcccgtgcatggcgtgtccgcggccatccgagccactgccgtcatcgccgtgatttggccgggtacaatcgccgccgacgagaaccccccgcaggaccaggtggaccgaatgattcaggccatccccaccaccgagccgtccctcgctgtgaccgcccagagcctccccgagccaaccctacccttcaccgggacccatctcgccgctgactgtaaccttgctgacggagagtacgtcctcgtgccggagcaaggagctgctcaggaggtagccccagatccagcacccgagtctacaccagaggatctgcctgccacagccttggaaggcaagccccgaaactcagctagtgcttttggcaaccaaaccccacagccaaacagctgcatgtctagaggttctctggaggacatggttgctggagtgacttggccgtccatcttgccacctggttggactatcgagtgggaccctacctcggctgaggagaagcatgaggagtga

SEQ ID NO: 10136 - DNA, 1086 bp, Zea mays
  Peptide Sequence Number=SeqID_53511
atggccggccacatgcgccgcatgcacggcaacaggtgctacgcgcggccagcgactatacaccacggcgaccacggcggcgcagttcccacccgtggcggcgacacgccggagcagagcagtgctagagccacgacacacagggccgtggcgtattcaagtctagcgctagatcccgtcgatcccgtgttctactccatgggcgaactggaggtttcgtccaagcacgacgctcatgcaacggctgagaagctaccttcgtcaagcggtatcagcgaaggggatggagctgactccatggtcccacgtatcactgagacaggcaaccccgactgcacccctccgccggtggtcactcaagacggtgacctccagtttgatggcgggggaaagcaagccgggctgcggcctctgcccctccctcagcctcaaggattttcatcatcagtgctggggaggggactgccacgtgcccggctctcggacccttgcctcacgagtttgggcacgggcgggggcctcctggcagcagcatccgccctgaggtcatcgctactactgttcggcccaccggagcagaagtcgtcgtcgtcgccgctgctggagcgggaatccctcggctcggttggcgttgttgtccgaggcttctcttgcttagttaaaggaacccctcggccgctcttcgatgagccgaggccaggggtagcggtgtcagcacggacagaggcagagttggctcgaaaagaagacttggtcggccggagcctggccgggtcgtccattagcgggaccgacgccggagtcgatctaccgaggcctcgggccgggctgatgtcttcgggggacagctggccgaggcctcggggtgaccagccgagccgcctgcttgagccggattcttggaggagacccaggcggcgatggcccgggcgtgatggtgaagtcgtccttcagagtggagaccctcggaccgtgtcgccatcggaggctaggtcggacctcgccgaaggtgtagttgacgccgagggtgctgctgttcccttcaactgtcgagatccgagcctgcaggatcggattatcttgtag

SEQ ID NO: 10137 - DNA, 450 bp, Zea mays
  Peptide Sequence Number=SeqID_53512
atgggcaagagcaagaagggcggaagttcgtcgcaccactccggcgacaaacggaagcgcgagccgactcctccctcgaaggacttcggtgattccgagtactcggaggaggagttctcctccgagtccgaggggtcgtcggtccacgcctctcccccgacatcgtctgatgactcagacgattcccaggggattgcggcggaggtgtggacatacatctgggccgtcgagcgcactgggcttgagggctcagatgagtcagaggtctcctcggacgagggagactcctctgactcatccgaggaggggagcgacggcgatgacggcggtgacgggggcgacgacgatggcggtggcgacagcaacaagggcgacgacagcaagggcgacgtcaagggcgatggcggcaacgacaagggcggcagtggcagcggcaaggccagtggctag

SEQ ID NO: 10138 - DNA, 792 bp, Zea mays
  Peptide Sequence Number=SeqID_53513
atggcgcttcctgttgacgtggcgggcctgtgccctaggtcgggcgacgtgggggctcctccgaagctggggtcgaatctgtcttccgttgccgaggccgagcccgagcccctgggtcgggcgaggcggaagtcgttcggcagaggccagggcggagtccgagccctggggtcgggcgaggcggagttcgtcgtcttccggggccgagcccgagtccgagccctggggtcgggcggagcggagttcgccgtcttccgggtcttagcccgagtccgagccctggggtcaggcggagcggaagtcgttcggcagaggccagggcggagtccgagccctggggtcgggcgaggcggagttcatcgtcttccggggccgagcccgagtccaagccctggggtcgagcggagcggagttcgccgtcttccgggtcttagcccgagtccgagccctggggtcgggcggagcggagttcgccgtcttccgggtcttagcccgagtccgagccctagggtcgggcggagcggagttcgccgtcttccgggtcttagcccgagtccgagccctggggtcgggcggagcggagttcgccgtcttccgggtcttagcccgagtccgagccctggggtcgggcggagcggagttcgccgtcttccgggtcttagcccgagtccgagccctggggtcggacggagcggagtttcctatggcgcctctggcgagctttatgctgatgggggttaccagctgagaattaggcgtcttgagggtacccctaattatggtccccgatag

SEQ ID NO: 10139 - DNA, 447 bp, Zea mays
  Peptide Sequence Number=SeqID_53514
atgaacaaaaccactggcattcgaagtgccattacaaacggaactccggttccccctccgcaggtacgaacaaccccactgcgagggggaaggcctgtggagcaacagaagactgacgagcggctcgccgccgcccgttctaaccacgacgacaaccacccccgccccgggcagcgaagcggcttaggcagcagcttcggggcaggtgtcacgacaggagggctctcccccgcagaggacgagaaccagccattcaggccgggagacggagacccagggctactggcgccctacctatcccggcatggctggaggaagtccccgtgggactcaaggatgccattctcccccaggcgcggggggaagaaaaaggcagccgacccatgcaggggcagccccccgactcgcctcatcttccatcttggcctggatgacgaaaatccttga

SEQ ID NO: 10140 - DNA, 816 bp, Zea mays
  Peptide Sequence Number=SeqID_53515
atggcgccgtcgcggttcggcgggtgcgccaccgtgcggcagggttgtggcagggacgaacaagccactgtggattctgaggttcaacaagtagagatagctgagcaggagctcattgaaggcaagttccttacacttcatgaactcccacctttggtgagttcatgccacattattccccacgacttgttgagctatgaacggtgtcacttccacgacgctctcgataccctattgcgttgggccttcgaccgacacacttggtccatcgagtatcgttgtgtagtctaccagcatcgttgcgggttatacccggaccagtgggaggctatttgcttggtgcaccgtccggacgatgatctccggggtgcagaggccttctcagagcattattctatcactgagagggatactgccgaggcagccatgcaagatgcagcacgacgggcactttctcagtattgctcgttgttcagtggggtagctgacggctttgacctgaagtactaccctcatcgttcgaccggcagtgctgtaggtgtgattgtctcgccagttggtgagggaaatcctaggctgaacagcatggtcaacctggtcgtcgtgctcaacacagagttggaccacgcccttgacgagttgggcaaggttcgggcggaggttgcggaattgcgtgcagagtgcgttgcacaccactatctggatggtggttcccccgcccctatcgggattcagcacccttaccgctcaccgccctgtggtcgcttcgactatggtaccccagactgcaggacccggatagatttagatccatag

SEQ ID NO: 10141 - DNA, 516 bp, Zea mays
  Peptide Sequence Number=SeqID_53516
atggcccagttagcccaagtcggccctgcttgcgcgcgcgccctctcttcccctctccctctcgctgctcggattgagtgtgtcgcacggtgccagatcagtccagtcacctggagaggctgcatcgtcgctacacaaggagcaggagctccaacgacaggagcaggagcagcaggactcttcccctcgcctcagcaggaggtggagtctgagaggtcgccttcccctgcacctcagccagagatgccccctgcaccacctcagggcatcccgactgctggaggagaccttgacggagacggagacgacgacgacgccggtggcagttcgagccacgacacggagcgctcggaggagccggagccggaggggtggatcgctagacccataactcgtgatgttgctcgcgggtgtgtaacactcaagttgtgtaccaagagtaataaagagagttcctcattttgtgtgtcttatttgcgtcataaaaagagcacctatgtaattgagagtgactaa

SEQ ID NO: 10142 - DNA, 204 bp, Zea mays
  Peptide Sequence Number=SeqID_53517
atggcgagagtaacctgtgcccacctggcaagtggttggatggtggggtgttgtgctctcgggtcgcgtgaacccgttctggtcttgggagaaacccggtggcgagttgacatatatccccagcttggtattaatcgattcggatcgccgaacttctcggatatgaagactggatcttcgacccccatcgtagataacaagtga

SEQ ID NO: 10143 - DNA, 258 bp, Zea mays
  Peptide Sequence Number=SeqID_53518
atggaggcgcggcagctcacgacgctcggcggcctggccactgagacggagccagagctggaccagttcatggaggcgtaccatgaggtgctggtgaagctcagggaggagctgacgaggccgctgcagaaggcaatgaagttcacgcgaaagatggcgccacagctcaactcgctttccatctctggaaggtcgctgcacaaccctttcgcccgagcgctggcagaagaagcgccacccccacgaacatctccctga

SEQ ID NO: 10144 - DNA, 1092 bp, Zea mays
  Peptide Sequence Number=SeqID_53519
atgcgagagacatgcaaccgcaccacggttgtgcaccctttcggcttcgtcgcatccggcggtccagcatggaggcctgggcccacatgtcatgtaaccggcgcaacggttactgcgtgcaaggaaaccgcaccgccactcgcgccaatgctgcgtctactcgactgcagaaccagtgcctccactcaaggcagccctgcgcgtgacccaacagtgccagttgagtgcaatgatcatgggtcaatcagccgcggggataggcgcgacgatcgatatggccaaaagtggaccggcagtaattgcagcaacagacgagcagaagcagcggtccaatcacctacaggctcgcatcctctcccgaaacggccaagcgacacctccggtaggagaagcgggtgccgtttcgcctccgtcataatgaccacgtcaaaaaagggaccgggaaagggggtatttcgaaaaaggacccttcccagcgaaggaaacgggcctcgagccctcctactgatcaggggtttgaaggttgcaccctccggggttcggcaaccgccccagagcactcgggctccgagcccattactgatcaggggttcgaaggctggcccctcggaagggttcgacagccgccccagagcacgcagagtcagggatgaccctgggtacatccgttacatggccgaggctcgggctacgctcccgaggtaccctaggacatttccgagaccagcaggaacgatttgtaacggaatcccaccggagggaggcatcgagccctcggaccctatcgaatgggtccaggtccggcaaatcacctgcagggagctccgcctcgcccgacctcaggcctcggcctcagcctcggccttggaagaagatctctgcctcgcccgacctcaggccccggcctcagccttggcctcagaagaagatcttcgtctcgcccaaccccaggccttggcctcagcctcggactcggtaggagtcaccacctcgcccgagcccagcctcgacctcaggagaagtctccgtctcgcccgacctgggcctcggaccgactacgctacagcggatacatcattaccctactcctag

SEQ ID NO: 10145 - DNA, 2325 bp, Zea mays
  Peptide Sequence Number=SeqID_53520
atggcggagatagtcaccggggcgatgggcactctcctgcccaagctggccaacctcatcaaggaggagtataacctacagaagaaagtgaggggtgagatcatgttcctggagactgagctcaagagcatggaggctgctctcatcaaggtctccgaggcacccatcgaccacccacctgacgtccaagtcaagctctggacaagggaggtgagagagctgtcctacgacctcgaggacagcatcgacagattcatggtgcgagttggcgatggcaagccacatagtttcaagggattcattgatagaagcctccacctgctgacaaggggcaggattcaacacagcatcggcatagacatcaaggagatcaggagccgcataaaggatgtgagtgaacggcgtgacaggtacaaggttgatctggttccttccaagcctgttggcagaagcattgacaacctgcggctgtcggctctttacagaaaggcgacagaacttgttggcgccgaagagaagagcagtgaccttgtgaaaaggctcatggagggcgacaaggaggcatccaagcagccagttgtactgtctattgttggctttggagggttaggcaagactactcttgctaatcttgtgtatgagaagattaaagggcaatttgtctgtggggcatttgtttatgtgtctcataatcctgatgtcgtcaaggttttcaaaaacatgctctaccagcttgatggagacaaatacagggacatcaatcaaggaacatggagtgaagaacaactaatctgggaactgaggaagttccttctacacaagaggtctgggtggagcataaaacagctagacggatttggaaaactaacctctctacaagaagttaaagggaccataactatcgagtcaccaagcatgctgcatgatctggggtgtctgaccaatctcaggaccttgggcatcaactttcgtgattgggatgagagctatgaggaacctttcatccaatgtctatctaaccttgtcagcctcaaatccatgaaaataaaaggtaccatgatgagcagcctatgttccgaatgtgacaaattgtaccctggtcctcaacaactttgctccattgatatgaagtcacttgcaagaactgtcatcatgactagagtaccaagatggatgtcatcactctgctccctgtctagcataaagatcacattattagctctgggagtacaagatatccatgtccttgggagcataccatctctacgttgtctcagtgtacatgtgaaggaaaccagagatgaaaggttggtcattgacaagtgttatccattccggtgcctaactgagatgcaaatcgattatgaatccatggcggtggtgttcgcaccagggagtatgcaaaacctcaaagaactccatttattgttcggggtgaaagaggtaatgcataagtacggtgattgtaactttggtttggagcacctcatgtcacttgagcatgtctctgttaaaacaatgtacactatcatgcccgaggaggtggaggccgtaaaagatgaattccagaaatccctggacatgaatcctggcaagcccacgttgatagtagattatttgtatccgaaagaaggcggcggttacttgtcccgctccaactacaaagcccagactgcccagtccgcatccccagcagccgtgacaccgccacagcagcctcggcgctgcgtttctgccttcccggtgagacaaatggccgccagcgccaccgacgccgacgccggcgccgggctcagatcggagttcctgcaggtcctgctcagccgccgccgcgatctcctaggtcaggcaaatccgatggagtcgtgccccagtaaagaggtggagaacttgagggagaagctggttgaagaaaatttctaccttatcactgagctaggtgaacaaggacgagtacctgtacttctgctgaagcttgacgaccccgtccctagaagaaaaccagctatcgtgttcctgcacagctcttacaagtgcaaagagtggctgcgcccactgcttgaggcatatgcttccaagggctacgtctgtgtggctattgactcgcgctatcacggcgaaagggccagcaatgaaaccacttacatagatgtgtgggacttggtaaagcttggagactacctcggcgagagggaggacgtggatccctgtagggttgggatcaccggcgaatcgctgggagggatgcacgcgtggtttgctgcttttgtggacacacggtacagtgtcgtcgttcctatcatcggtgttcaggtgggccattga

SEQ ID NO: 10146 - DNA, 439 bp, Zea mays
  Peptide Sequence Number=SeqID_53521
aagtcagatggaggttcgctgccaaaccagcttttgccagaatgaagatggtttccccaagttgctgagagcatgcacagctcgcctcggaatcaagagccagccagagtatgatggtcgtgaatttgtcgagcatggcacagagaagtgtgtcgtgactgtatacattggatctaaagatgcagagaagcgcaaccgtaagctccatgtggatctcaccacagctcaagctcgtgcaactgccttggaaagtcgtgaagttattgctgttgaagccctgaagcaagccaaggatgagcacatccagaagttgatggaggcctacatggctatggataagcaagagcaccttgaatcctcccaagatcccccgccagagttgtttgagcccctcaccatgaagaagattccagcaccatcccttgaagtcaaggaataa

SEQ ID NO: 10147 - DNA, 339 bp, Zea mays
  Peptide Sequence Number=SeqID_53522
atggatgagagttgcactcaactcctttcaagtgatccaatgatcaacttgaataccacggtgttctttttcctttactctttcccgattgcgaggaatctccacaacttggagcctctcgcccttacaatgagatgttcacaaagaagcacagatccgaccgttgacgatttggagcctttggcgcaccggacactgtccggtgcacaccggacagtccagtgcccccttcagaccgttggcccggccacgcgtcacgcgcggattgcgcggtcgaccattggctcggtcgaccgttggctccctgacagtccggtgcaccactggacagtccgatga

SEQ ID NO: 10148 - DNA, 273 bp, Zea mays
  Peptide Sequence Number=SeqID_53523
atggacaaagtacaaatcaaggataaagaaaaaatcgagttggagaagagatggctcgagcagccaaagtttgctaagtctgggagcaccggactgtccggtggtgcatcggacaatgtccggtgcgccaagctggctcgagcgaagtggccgctctcgggaattcaccggcgacgtacgactataattcaccggactgtccggtgtgcaccggactgtccgtgtaagggcgagaggctccaagttgtggagattcctcgcaaacgggattga

SEQ ID NO: 10149 - DNA, 1032 bp, Zea mays
  Peptide Sequence Number=SeqID_53524
atggtcaatgcggccaaaaatgggccggcagtaatggcggtggcaggcgggcaggagcagcggtcacgtcgtcagccaagcttatgtcccatccgggggcagcgagagaaccctctctcacagcgtgaagacgacgcgcccgtgttccgttcctcgaacggctcgcgcacgcgcgacgaccgccccgcgaaccactcgccccatcgcattaactccgcggcgggcaggcggcgcctccggcaggagaagcgagcgacgtttcgccttcgccataatgaccgcgtcaaaaaagccgcctcagagcacttgggctccacacccactactggtcagaggttcgaaggccggcccctcggaagggttcaacggccgcctcaggctactcgggctccgcacccactactgatcaggggttcgaaggctggcccccgaagggttcacagccgcctcagacacaaagcgagggatgaccatgggtacattcgatacataaccaaggctcgggctgcgctcccgagctcaacggagacaccatgttcggcgcccaccgagggcaacatggcgctctcccccctcctccttgcagaaaggcgacgcaggggcaggctcgggggctgctctcgcaaacccggctccggccacaccgttgacagcgtcaacataccagcccaagaacttgggacccgaccgtacacccgggctacggccagctcgcatgagggaacgaccagaccagccgaagcattgcgtgaggcattaagacctcggaggagtcaaaccactcctccgaggcctcgggggctacacccgacgggtgcgctcgcgcgcacccaccggaacaaaacgcaaccgagaaaggctggtccccttgcaaaaaagtgcgacgaaagcctccaagcgagtgctaacactcctatcgaggctcaggggctactgtcggagaccataattaggggtaccctcaaggctcctaattctcagctggtaacccccatcagcataaagctgcaaaggcctgatgggtgcgattaa

SEQ ID NO: 10150 - DNA, 1392 bp, Zea mays
  Peptide Sequence Number=SeqID_53525
atgcatcgtgtctctccaccttccgagcctccggatggggaccgcccacggttcttctgtcttgccattgttggaggaacgcaacttcgcggaagttggtacctttcagccatcgctcggcttcaaggattttcatcaggcagcccgactgcatcccctcgccggcagtcacccaagacggtgaccaccagttcgatggtggggaggagcaaaccgagctgcggcctgtgccccaccctcagcttcaaggatcttcatcatccttgctggggcggagagcgaggcgagctggagctctacctcccgctcgggtcagctggccacctcttcttccagcttctgggggtggaaaccatcctccagctctgcggaggaggtgtcctccagccatgccggggaaggcgaactgttgctgcccagccagggtgcaacattccgtcctctgtcctcgctttcgtggcgaggacgggagtgaggacctgccggtgcgctttggggcggccggcgctcgctggtgcggtgttggtggacaccgccgtcggtgctgacgtggtggcagctggagaaagcttctccgccgacaagcccgtcagcgctacccacggactgacctccggctctttggctttaatgtctggttcgcgccccttgagtggggacgcgaacgagagccttccggcagcagcgtccgtcctaggaccatcgctgctgctgcagaggtcgtcggcgagtcaccaggagtttgtcgtcccgtcccgcaggctctccgatgtggaggttgttcatacccgcgggggcggaacccggagttccgtttgtaatggcaccttgagtgccggtgtctgttcattatggctgtcggggcctgaacatgagtccctcggctcggtcggccttgccgcccgaggcttctcttgcttagttaaagaaaccctcgaccgctctacgaatagccggagccggaggcagcggtgccagcacggacagaggcagagatggctcaaaaagaagcttcgtcggccggagcctggccgggccatccactggcgggaccgacgccggagtcgggttgccgaggccacgagccgggctgatgtcctcgggggacagctggctgaggctacggagcgaccggttgagccgtctgctcgggccgggttcccggaggagacccctgcgacgatggtccaggcgtggtgccgacaggattctgctatcgatatagtcgagaaggcacgaaaaatcgtttcggcggaaaagtttccgagcattaagacttgttctgtcagcggaatcgcttatccgagcgtgagttacttatcgcagaaggtgatgagtgagaaagaccttttcgaggaaaattttgacgcagagggggttcgccccttctag

SEQ ID NO: 10151 - DNA, 1590 bp, Zea mays
  Peptide Sequence Number=SeqID_53526
atgctccaagatcccccccctacgagacaggggctgggtcccatgcgtcatgcaagctggcctagggcagaagaagccaaaccgccgtgcgcggtgcgcgtaactgcccagcggttacaagcactcatccactttcgcccagaccagcgggtgaaagggcagaccgccacacgggcggcatgcaaccgtaccaagggggcgcaccctttcgactccgacgcgtccagcatgggggcccaggcccacacgtcatgtaataggcgcaccggttactacgtgcgagaagctacaccgccacttgcgccagtaccacgccttctcgactgcggaaccagtgtcacgactcgaggcaaccctgcgcatgacccaacagtgccaaccgagcgcatcgatcacgggtcagtcagtcgcgggagaaggcgcgatggtcaatatggccaaaagtgggccggcagtgatggcggcggcaggcgggcggaagcagcggtcaagtcgacaggcggcacctttggcaggcgaagcaggcgacgcttcaccttcgccataatgaccgcgtcaaaaaagggaccgagaaaggggatactccgaaagggatccttctccgcgaaggaagcgggccccgagccccctactgaacagaggttcgaaggctggcccctcggaagggttcggcagccgcctcagagcactcaggctccgcgcctactaccgatcagaggttcgaaggctggcccctcggaagggttcgacagcctcctcagagcactcgggctccgcgcccactactggtcagaggttcgaaggctggcccctcggaggggttcgacagccgcctcaagccactcgggctccgcgcccactactgatcaggggttcgtaggctggcccccgaagggttcgacagccgcctcagagcacgcagagcgagggatgactctaggtacgttcgatacacaaccaaggctcgggctacgctcccgaggtaccctaggacatttccgagaccagcgggagcgattttgtaacggaatcccatcagagggaggcatcgagccctcggaccctatcaaacgggaccgggtccggcaaatcacctgcagtcacttcgccgctccactgaccgacctgacaggaaaacagcgccgcctgctccgctccgactgctgtgccactcgacagacctcggcctcggaagacgaactccgcctcgctcgacccaaggctcggactcagcctcgaccccgaaagacggactccgcctcgcctaaccccagggctcggactcagcctcagcctcggaagacggtcgctgcctcacccgacccagggctcggactcagcctcgaccccggaagatggactccgcctcgcccgaccccagggctcggactcagcctcggcctcggaagacggtctccgcctcgcccgaccccagggctcggactcagcctcgacatcggaagacgaactccgcctcgccagaccctagggctcagactcgacctcgacctcggaggagccttcgcctcgcccgacctcgggctcggacctgccacgtcacagggaaggccaccattaccctacccctag

SEQ ID NO: 10152 - DNA, 258 bp, Zea mays
  Peptide Sequence Number=SeqID_53527
atggcggctctcggcccccttacggaagcaagaggacgtcagcaaggactcgacagccccgacagctgtccctccgctaggctccagcgctcctccgacggccacgacatcacacaaaccgggcgccaaaacctctctggccgccacgatggttcgggccgctttgagatgcgtaacaccctacgtcctggcgagtatgctttgtgtaatgggttacaaggtagctctcgtagagagttgaggtggatggctgagtag

SEQ ID NO: 10153 - DNA, 408 bp, Zea mays
  Peptide Sequence Number=SeqID_53528
atggcgcctcccgttgacgtggccggcccgcgccctaggttgggcgatgtggaggctcctccgaggtcgaggtcgagtccgtcttccgtggtcgaggtcgagtccgagcccctaggtcgggtgaggcggaggccgttggctgaggccagggcggagttcgagttctggggtcgggcgaagcggagttcgtcgtcttctggggctgagcccaagtccgagccctgggtcgggtggagcggacccgagtccgagccctgggtcgggcggagcggagttcgccgtcttctggggcttagcccgagtccgagccctgggtcgggcggagcggagttcaccgtcttccggggcttagcccgagttcgagccctgggtcaggcggagcggagttcgccgtcttccggggcttag

SEQ ID NO: 10154 - DNA, 819 bp, Zea mays
  Peptide Sequence Number=SeqID_53529
atgatttgctgcccgagtgagcagctgccgatagccctcggcgtccggagtccgggggaggccatcggctatcccagccaataccccaccgacctcactcggtgtgttcatggctcaggcgaagtcggggttcaggttccgtccgaagagagggttctcttggcgttgtcttgcttcctgctcagcctgctcttgagcttgccgacgatcacgtcgccgagaattccttctttccctgaagacccattcttctggagtttctcccatctccgagatttcgtctctcgacacgggttgcgccgggtcccgctctctggcttcgtgatgtcgccgaatatttcggcgtcggttccttcgtcggcgagattcttgctgaagaggagggagtctctgttcggagcgctggaggtcgcgctttttcctgcttcgctctggcttttccgaaatgaaatggttccgaagcagaacgtggacccagggcagaggacaatcttgtgctggaagtcactttgccactccactgaccgacctgacaaagaagacagtgccgcctgcgtcgctccgactgctgtgccactcgacagagtgaggctgacagtagccaagtccggcctcgggcgccataggaagctccgcctcgcccgaccccagggctcggcccccgtcccggcctcggacgacgaactccgactcgcccgaccccagagctcggactcagcctcggctccggaagaagacgaactccgcctcgcccgaccccagggttcggactcagcctcggcaccggaagacgacgaactccacctcgcccgaccctag

SEQ ID NO: 10155 - DNA, 471 bp, Zea mays
  Peptide Sequence Number=SeqID_53530
atgcctgccccgcctcctcctccgtcggcggggaaggtgacgggacagacccggatgttgctcttccgccacgtggggaagacgtcgtcgattccgccgtcggcgggcgggctgacggccgccattgtcattgtcgcgtggcggaggaaggagtatcatgtcgtagctgccgttgagggacatgaactcaagactcccgaaatggagcaccgtcccgggttggaggggttgctggagactacccatctggagcttgacgggaagctgttcgtcaacacgcagcagacccctaccaggcgcgccaactgtcggcgtttcgaccccggggggtccctggaccgacgagtaaattgtcgctgcgtgtcccagcccagatgggttggcgcaagacggaacacaaaggggggagaaatagtaaggggaaactgtggccttcgtgttgtcctgcgcccagggcggatgcgcttgtag

SEQ ID NO: 10156 - DNA, 219 bp, Zea mays
  Peptide Sequence Number=SeqID_53531
atggccaggggagtcgtgtcgaggggagggttgcatggtgtgcgtaaggaaaagaacacgacatggctagagaagaggatcggcaagggtcggcaatggcgctacgtgcttccacggcgagggttacgactagaaatcctggtgcagcataggctttcgtggcttatggccagaggagtaggcgaccaggttcttatatcccaagcatcgatggtctag

SEQ ID NO: 10157 - DNA, 273 bp, Zea mays
  Peptide Sequence Number=SeqID_53532
atgaacaaacaccagcactcaagggtgtcatttacaaacggaactccggttttcgcccccgcagcgacaacgacccccgctccgaagcggccaaacagcagcagcgatgacctcagggcggacgctgctgcaacgagctcctcgcccacgcccccactcgaggggcgagaacaagcaggaggccgtagagtcggaggtcagtccgcgggtggcaccggctatcccatcggcagagaaacctcttccggctgcctcggtgggaggtggcactag

SEQ ID NO: 10158 - DNA, 453 bp, Zea mays
  Peptide Sequence Number=SeqID_53533
atggaggagagagcccgtaccttcgaagacgaagaagacagggggagaggttccttcgcggcggggctgcggcgaagaggttgcgcgaaccctagaaatgacgggaatgagacgccgctgagggaaacagacggttgggatggaggagttcgcggatggaggtcgaccgtacctgcgaagacgacagctgtggcgcgttgggtgcgcggcggcggcgcgttgggtgcgctgcggcggcgcgtgcttggcgagtaccctaacccaacgcgaagtggacagacttctatccgaagccaagtgaaggccgcttccagcggagcgtgcgcggggggcttcttaccgaagcgcgtcggtcagaatccgcgccaaaagctgagcgtttggttccagcttctgcttctggcggctagaagccgactagaagctgaaccaaacaggggccatatcaaatga

SEQ ID NO: 10159 - DNA, 120 bp, Zea mays
  Peptide Sequence Number=SeqID_53534
atggctggaaaacagtgccgctcaccccgctccgactgctatgccagccacctgggcaaggctgacaatagcaagttcagcctcgggcgcaacaggaagctccgcctcgcccgaccttag

SEQ ID NO: 10160 - DNA, 1146 bp, Zea mays
  Peptide Sequence Number=SeqID_53535
atggaggccggggagcacgggccacgcaggaggacatcggagacagtggcggatgcggtgagcgcagggctgcgcgcggtggagaccgccgggacgtgctggcactcggagactggcccgaagcccgtggagggcttgcccggcgccacgttctgcagcttatcctacggccgcaaggagaaggaggacgaggggacgtcgggtcggcatcgccatcgcttcgacaggatgggatggcacatgaccgagtacgacgacacccagggcggcggcggcgaccacgtgctgtgcaaggtgcagcagatgcaggaccccgccggcgccatcttcaccggtgctactgcttacccgacgatggatgatccccggatggtcggaggcgagttgggcaagtccaacgtcgactacttgctcaacatcaacaatgtcgatggggagcagcagcagcagcaacagccatgcgctgagccgagcagcgacgtgcaggtgcaggtggaccccgccgccaccttgatgcccagctatgttcatggtcatcaacaaggcggggatcccctgatggccggaggcaaggaggaacagagtcgacgcgttgagtcaccagaggcggagctcgactacttcgacgactggctcaacaatgtcgattggaaaggtttcctagagatactgggagacaatgaggagcaggggttaccgctgcagcagcaaccatgcattgaaccggccgagcagagcagcgacgtgcaggtgcaggtggatcccgccgccaccttgatgccctgctatgttcatggtcatgaacaaggcggggatcccctgatggccggaggcgaggaggaacagagtcgacgcattgagtcagcagtggcggagctcgactacttcgacgactggctcaacaatgtctatcggaaaggtttcctagagatactgagagactatgaggagcaggggttgccgctgcagcagcagccatgcgttgaaccggccgagcagagcagcgacgtgcaggtgcaggtggtccccgccgccaccttgatgctgggagaccatgaggagcaggggctgccgcagcagcagcaaccatgcgctgagccggcggccgagcagagccagagcagcagaaccgtgccgtccgtttaa

SEQ ID NO: 10161 - DNA, 591 bp, Zea mays
  Peptide Sequence Number=SeqID_53536
atggaaaaagagccacttgacatggttgagagctcagttcgagtcatcgagacacatgttgacatcattcgcagtctagtgactgatggggttgtggatactagtgaaccggaatcagtgtacacacttaagaccactttgtttcaaattggagatgtatgcgacatgcttgagaagtgtgctctgtccatcaaaaagtatgctgactccaagagggctaaaattattcaagatgaagccctgcaatatgctgaagatgatgaagctgcagatgatttggaggaactcccaagcccagatctccttactcaagccgacatattggaaaaatattttggaattgagtatgatagcgaccagtcaagggttagacagagaaggcatggctgtgatgttataatgctgaaggaccccaagaagagattaagtcctgtagtctaccacctcccgttatttgtgggcttcaccgatggctggaaacatttggtgatagcaaacgaccttcgggttgaagacgtctgcgagcttgttaaggggccaaacgatggtgagccggtgtactatgtccggatgtgtggtcacaaaatttaa

SEQ ID NO: 10162 - DNA, 294 bp, Zea mays
  Peptide Sequence Number=SeqID_53537
atggccggaggcgaggaggaacagagtcgacgcaatgagtcagcaatggcggagctcgactacttcgacgactggctcaacaatgtctatcggaaaggtttcctagagatactgagagaatatgaggagccaggggttgccgctgcagcagcaagccatgcgttgaaccggtcgagcagagcagcgacgtgcagggagattcacagtatgcatggttgttttactttatttgatgttattcatatcgacaactcgagattaccctatgtagatgctgacaggaaattaagatga

SEQ ID NO: 10163 - DNA, 198 bp, Zea mays
  Peptide Sequence Number=SeqID_53538
atggcaggagatggagttgtgattcgtcaagacaccgaggcagtcgttgatggtaacttaatggttacaccacctcatgttctaatggggcctcgaatcaacgagataagcaatggggaggaaggagaacatcggattcgacctccgatgtccaatattagctcccgggagatggatacacctcaattgtttgagtag

SEQ ID NO: 10164 - DNA, 2046 bp, Zea mays
  Peptide Sequence Number=SeqID_53539
atggacaaggatcgccagggggctgcacaaaagcggcaggcggctatcaggattgttgaagccaggccaaagaggcaaaagcgggggtcggcgaaggctgaggcccccggcggaggcaagccgccgctggcggcgaagtcaggtgtccctgcgtctagcaacgcgccggaggcagcggcgggcgccgggggctccaaacccagcagggtggcggaggccacgaaggcggcccgagcgttgccgtcggcgggcaagcgtgtcgccgacttcgccaccgacatttgtgtggaggactatcttggtgggtcggacgagggccagcttgctacagttgcgcctgccgcggcgatcgcgacggcagccatagtgccgaaggcgaggggcgaggctcttggcaccggaggcgaggtgtcggccctcgcggttgtcagggatgaggcggacgcagcgacccgccggctgaaggaggtgacggaggcgctgagtcaggtggctgacttcgcccgccatactgcgtcgggggcccttacggcagctgtgtctgccgaagtcgagagacttcggacgcaacatgctgacgctgtccgtgagaaatcagcctccgatagcaagtgccgtaaactgacggacaaggtggccgcgttggagagggagaaggctgacctccggcgccaactggcggcggagaggagggaggccaacgaggccatctccaaggagcaggctgcgcaggcggaggccaagctggcgcgggcggagggcaatcttgccaaggagctcgccggagatctgcaagagcggctcaccgccgtggagagccgcgcgaagggggccgaggccgcgatgcgtgcggaggccgaacggacgcgcacgcagcttatggatacatatcgtgagctgggtgcgcggaccggtgacttcgaggtgccggaccgagagcccgggcttcgttgtctgcaatgggtgcaggaggagctgctggaactccccgccgtcgtgggggggcttatgtcgtacgcctccctggtcacctgcgagggggcgatgaacgcgctctcccacgaagggtgccgacatttcgaggtcttcgaccaggcagatgaagattttgatcgagatatctataaggttgatgacctcgtggtgaaggattctgccggggccctctacgaccggatgtggggtctgcacggtcgcgaggtggtcagggagcgggcggagacggcgttggctcaggcgttgcgtggcgagtgggtggacgactacggggcgttgaacagcgcgctgcctggcccggagccgacccctgcggagtccggggtcgccctggagccaaccccggagactgcggaagacgcaccggatgctcccacgtccgcagcggccggcgaagacctgccccaaaggtggccgaaggcgcaccggatgcccccgcggcggctgcgccgagtactgaagatcccgcggcggtggcggcggaaacgacagcggaagcagcggcggagccaaaggcggaggcttccgcggcgccagggcctttgcaggtggcgtagtgggtgtaatagggttcaagattttgggcctgcgcacgcaaccgctactactaaatttttggcggtttcgaccgcggaaggtggtaatgaatgtggtggatctggatctgaattttctgagtttttttatgttgctgattctgggagctcggttgagtggactgaggagtcgtcggaggaggatttggactatttcgcggctctggatgcggctgcggcggagacctcgccgcacactacggacgcgcaagatgtgccaggtcctagcaccgggcgccgacggcgaagggcggttgcaaagcgtagagttagcacagaggaaaggtctcggcttcgcgtgagtagggctggtcggcaggaactgttgtctttgccggccgccgcgagcacaggggaaggggaattgcgaagtctttttgcgggtgaggagcttaggataatgttatttaattatagggagatgggaattattcctaaggttgagccgatgtag

SEQ ID NO: 10165 - DNA, 1377 bp, Zea mays
  Peptide Sequence Number=SeqID_53540
atggccgccgcgacagagaagacggctgaggacatccgccgcgagctccaggagctccagcgccagcaccgcgaggtacaccttcttctttgtccggcgcatctcgaagcctcgagtctccgggccgtctgccctgacccccttgtcgtcccctcgcagatcaccgagcgcctgcgcgacccctgtggccttcgccgcggcacccccggccctggtcctggacctgggcccccccgcccgctccgtggcttcgtgagacccgttgatggctctgaaaataatgaagatgacacaaaggatgccgatggggaggggcaagaggcgggttcaggtgccactgaaggcagtgacaggaggactttcaacattggcgggttcagaagggacgggagcctgtggatgcagaggagggtggactataattcgctgccagagccagctccaagggagcttcccatgaatgaggacccgagtttggctgagcaaaaggttcgtgaagaaagtgaaaggctgcgacaacaggaacgtgagcaaattgcagagaagcgtaagtgtgatatgatgctccacgctcgtgtagctgctaaggcagaagaaaagagtatggagctgttgtacattcactggactgagcatcataaaaggctgtccaatttcttaagttgtttaagtgagtatgcagtatatatatcgtacatgaatgctggatgtatggttatcagtggtgactcatacaccgtttatgcccattctaaaattatatgccatcaatttgcaatgttttgccctacagaggtggactacacaatcagcaaaaagaacatgacattccaaatatattgttgcccaaggactactgcagaattggaggcacatgtagctgatacatctcttgtgtctgctgatgcacctcgtgtgcttgctgatactgtactggatatatctggtggggagcgtgcttttattgaggcagatgaagcaaaggaactgcttagtccacttacgaaaccagggaattcatataaaagaatttgctttagcaacaggagctttggtattggtgctgctaatgttgctggtccaattcttgattcagttaagaatcagctcacagaggttgacatatcagattttgtggcaggaaggcctgaggatgaagcccttgatgtgatgcgcatattctccaaagcattagagggttctgtcctgagatatctgaacatctctgacaatgctttgggtgagaagggtgtcagggcattcagtgagctcctgaaatcacaggaatccctggaagaactatatgtgatgaatgatggcatatcagaggaagctgcgaaagctctatctgagcttattcctgcaactgaagcttaa

SEQ ID NO: 10166 - DNA, 429 bp, Zea mays
  Peptide Sequence Number=SeqID_53541
atggatgagattcctacgtgcctctgctccagcgatggacgtcggggcgcccttctctggcccatggccgccacggtccgcagagcagagaagcacctctgttcctccttccttcctccaatgtcgaccgacgccatggaaccaaacccaagatctccatctctaatccagcgcgcagggcatttctcagggtccgagctcgagcagcgcctaaagcgaacccctgccgcgcctgagatccaggcagccatggagggcagccggaccctttctccatggccgccaatcgtcctgctcctttcccctggtgtgctcgacgcctgcccgcagggcgcgtccctcctggaggacgagagcgaggcccaccatcgacgcctctccctcagctgcagcacctgcagcaccctccctgtttccttcaccggctga

SEQ ID NO: 10167 - DNA, 285 bp, Zea mays
  Peptide Sequence Number=SeqID_53542
atggcaagacctgtaggacagggtacagtcaccacttgcttcaagtgtggtgaggttggggactacgctaatgcttgtccgaagaggattcccaacacacccgctcgcagcaatgtccaaggcaagcaaccaactctaggttctggcaagggattcaacattgccagggtcaaccaagtcagtgctgatgctactgctgatggagctgacatcgtgtcggtgtttagtgtccgaccgcacacccagggtaccctcgtggtgcttttgggtaggacgatgtggtag

SEQ ID NO: 10168 - DNA, 3198 bp, Zea mays
  Peptide Sequence Number=SeqID_53543
atggcacacctgctggaccacgtaggcgatgtcggccctggtgaaggtgaggtactggagagccttggtgagacttcggtaggccgccacgttgtcgacctaggcgccaccgtcgttggagatcttcgcctgagtgtcaacaggcgtgagcacgatgtcgtcgacgtagagaaggaggtagacgtcccgggagagggcgggggagaggacggtttgaacggtggcgagcttgacgacggggctgaaggccttgtcgtggtccactccggggcgctgagtgagaccccgaaggacccaatgggccttgtactgatccagggagtcgtcggacttgagctttctgtggaaaatccacttgccggtgaccacgttggtgccagggggacacgacaccaagtcccaggtgtggctggacagaagggctgcgtactcctccatagcgcgacaccaataaggatcggcgagaacggtgcgggcggaggaggggacaagtttgcgaccgaactggtgaacggtcctagtactaagatgtgcaccttggatctgcattctgcatcacttaacaagattagaattccagaatgcattttatgggttcatggacctatcattcatggtcttatacgcggggagaatatggagctgggacgtgattcagatacaggtggtcaggtgaaatatgttgtagaacttgctagggctttaggttcaacaccaggagtatacagagtggatctactaacaaggcagatttctgcacctgatgttgattggagttatggggaacctactgagatgctcagtccaataagttcagaaaactttgggcttgagctgggcgaaagcagtggtgcctatattgtccggataccattcggaccaagagacaaatatatccctaaagagcatctatggcctcacatccaggaatttgttgatggcgcacttgtccatatcatgcagatgtccaaggtccttggagaacaaattggtagtgggcaaccagtatggcctgttgttatacatggacactatgctgatgctggtgattctgctgctttactgtctggggcactcaatgtacccatggtattcactggtcattctcttggcagagataagttggaccagattttgaagcaagggcgtcaaaccagggatgaaataaatgcaacctataagataatgcgtcgaattgaggccgaggaactttgccttgatacatctgaaatcataattacaagtaccaggcaagaaatagaacagcaatggggattatatgatggttttgatctaactatggcccggaaactcagagcaagaataaggcgtggtgtgagctgctttggtcgttacatgccccgtatgattgcaatccctcctggcatggagtttagtcatatagcaccacatgatgttgacctcgacagtgaggaaggaaatggagatggctcaggttcaccagatccacctatttgggctgatataatgcgcttcttctcaaacccccggaagccaatgattcttgctcttgctcgtccggatccgaagaagaatatcactactctagtcaaagcatttggtgaacatcgtgaactgagaaatttagcaaatcttacactgatcatggggaatcgtgatgtcattgatgaaatgtcaagcacaaatgcagctgttttgacttcagcactcaagttaattgataaatatgatctatatggacaagtggcataccccaagcaccataagcaatctgaagttcctgatatttatcgtttagctgcgagaacaaaagctgctgcatatggtctacccatggttgccacccgaaatggtgggcctgtggacatacatcgggttcttgataatggaattcttgttgacccccacaatcaaaatgaaatagctgaggcactttataagcttgtgtcagataagcacttgtggtcacaatgtcgccagaatggtctgaaaaacatccataaattttcatggcctgaacattgccagaactatttggcacgtgtagtcactctcaagcctagacatccccgctggcaaaagaatgatgttgcagctgaaatatctgaagcagattcacccgaggactctctgagggatattcatgacatatcacttaacttaaagctttccttggacagtgaaaaatcaggcagcaaagaagggaattcaaatgctttgagaaggcattttgaggatgcagcgcaaaagttgtcaggtgttaatgacatcaaaaaggatgtgccaggtgagaatggtaagtggtcgtcattgcgtaggaggaagcacatcattgtaattgctgtagactctgtgcaagatgcagactttgttcaggttattaaaaatatttttgaagcttcaagaaatgagagatcaagtggtgctgttggttttgtgttgtcaacggctagagcaatatcagagttacatactttgcttatatctggagggatagaagctagtgactttgatgccttcatatgcaacagtggcagtgatctttgttatccatcttcaagctctgaggacatgcttaaccctgctgagctcccattcatgattgatcttgattatcactcccaaattgaatatcgctggggaggagaaggtttaaggaagacattaattcgttgggcagctgagaaaaacaaagaaagtggacaaaaaatatttattgaggatgaagaatgctcatccacctactgcatttcatttaaagtgtccaatactgcagctgcacctcctgtgaaggagattaggaggacaatgagaatacaagcactgcgttgccatgttttgtacagccatgatggtagcaagttgaatgtaattcctgttttggcttctcgctcacaggctttaagtataaaacaatgttttgcacgtctgtttgcacggtatttgtatatccgatggggggtagagctgtcaaacatcaccgtgattgtcggtgagtgtggtgacacagattatgaaggactacttggaggcgtgcacaaaactatcatactcaaaggctcgttcaatactgctccaaaccaagttcatgctaacagaagctattcatcccaagatgttgtatcctttgacaaacaaggaattgcttcaattgagggatatggtccagacaatctaaagtcagctctacggcaatttggtatattgaaagactaa

SEQ ID NO: 10169 - DNA, 420 bp, Zea mays
  Peptide Sequence Number=SeqID_53544
atggcgctccacaagctctatgacgacggcggcccccagctctcttacggaagcaggacgaccactctgctacacccccattgtacacctggatcctctccttacgactataaaagggaggaccagggccttcttagagaaggttggtcgcgcgggaccgaggacgggacaggcgctctcttggggccgctcgcttccctcacccgcgtggacgctttcctacgtgacccatgcgccgctgtgtacggcaagctccggcgcagtcgccgcttagacacggtccagagcggctgcaccgcgctgtccatcgtcaaacatggggacctcatggtcgtcgccaatgctgatgactctcgggttgttctgggcatcgcaaccgacgacgtcgccatcacgccgtccagctcatcatccacctga

SEQ ID NO: 10170 - DNA, 486 bp, Zea mays
  Peptide Sequence Number=SeqID_53545
atgctggtagactacacaacagtactcgatggaccaagtgtgttggtcgaaggcccgacacagcagggtgtcgagagcgtcatggaagtgacacccgcgagtggcatcacgagtgatgggtctaacgatccatccctccagctccggctccttagagagctccgtgtcgtggctcgaactgccacccacgtcgtcgtcgtctccatctctgtcaggggggcatctttggctgaggtgcaggggaaggcggcctctcagactccacctcctgatgaggcgagggggaagagtcctgctgctcctgctcctactcccggcgtcgacgctcccgctcctcgtgcaggcgacgatgcagtctctccaggtgactggactaccctggcaccgtgcgacgcagtggactctccgtcaggcgagaaggcaaaaaggggatccagacttacgtgcagtgcacctaagatgagccatctacaaaatacatcgtaa

SEQ ID NO: 10171 - DNA, 420 bp, Zea mays
  Peptide Sequence Number=SeqID_53546
atgtctgagaacaggcgcagaggtgcgtggcgtgctcagccagaacagcaggcaccccaagaggaagcagcactacagcagcatttgccacctccactcccaatgaccattgagcaaatgttcctgatgcagacccaagcagtccaagcaattggtcagaccttagcagcgatgcagcagcagccacccccgcctaagcctcaggtgcaagtccagattcctcaagtgcccagagacaagcgggcagaattcatgaggggccatcccccagtctttgcccattccgctgatcccattgttgggggccttcggcttccgaaggtaccttcgggcttaggttataaccacaatatgaagaagcacaaagaatacgaaggatggcgcagagcggaagctatgcgcagaggagcttcggcgtga

SEQ ID NO: 10172 - DNA, 390 bp, Zea mays
  Peptide Sequence Number=SeqID_53547
atggcagttattggaagattatgtgcttctacccatgatgcagtaatgaaagaatgtgttgctccacctctgagtggttcagtctcccatgattatagcgtggctgagagcagttgcctgctccagactgagacacattctgctttgctggggcattggggcctgactgctgctgggctgccttcttcggacattgcatcacccaatggccttgctctccacagtggaaacatgctctgtttccaacctgagctggaagacgaggtgcctgctgattctgcctttggaactgacctcctcctgactgattgttctagcgattctgatactggtgctggggatactgcctttggaactgttgctgctgaggtggacgctggttctgcctga

SEQ ID NO: 10173 - DNA, 282 bp, Zea mays
  Peptide Sequence Number=SeqID_53548
atggtgcagggggcgcctccaggggaagcacgggggagcagctcctcacagactctatctcctgctggagcgagaaagaagagccctactgctcctgtcgtcgatgttcctgctcctcatgcaggcggtggtgcagcctctccaagtgactggactgaccagccacgggacgacgaagcgaacgctccgcgagacgggaaggttagcggttctacagtcagcacggctctgataccacctatgtcacacccggttttagaaggcaaaccgaatgcgaaccat

SEQ ID NO: 10174 - DNA, 672 bp, Zea mays
  Peptide Sequence Number=SeqID_53549
ttgccgtggccgagcccgagtcagggggtcgggcgaggcggaagtcgtccggtcgaggccagggcggagtcgcagccctgggttcgggcgaggcggagtttcgtcgtcttccgggtcttagcccgagtccgagccctggggtcgggcggagcggagttcgccgtcttccgggtcttagcccgagtccgagccctggggtcgggcggagcggagttcgccgtcttccgggtcttagcccgagtccgagccctggggtcgggcggagcggagttcgccatcttccgggtcttagcccgagtccgagctctggggtcgggcggagcggagttcgccgtcttccgggtcttagcccgagtccgagccctggggtcgggcggagcggagttcgccgtcttccgggtcttagcccgagtccgagccctggggtcgggcggagcggagttcgccgtcttccgggtcttagcccgagttcgagccctggggtcgggcggggcggagttcgccgtggcggcgctgtccttctgtcagactggccagtggagcggtggagtgacggcggtcacttcggctctgccgggggcgcgtgtcaggatgaagctttatgctgatgggggttaccagctgagaattaggcgtcttgagggtacccctaattatggtccccgacagtag

SEQ ID NO: 10175 - DNA, 762 bp, Zea mays
  Peptide Sequence Number=SeqID_53550
atgacactcggcaaagaaggaaacctgggaaccggcaaagacatctttgccgagtgctgttgccaaggcactcggcacagatactggcaaaggggcccacttgagggttctttgcccagtgccagtccaccagacactcggcaaaggagcctcctttgccgagtgcctactagagctctcggcacagggactggcggtggggcccactggaccagtctttgccgagggcctctcaagcaaacactcggcaaaattggcctctttgccgagtgccacagaaggcactcggcaaaggatccgtcaccgtcacttggcgccgtgacactgacttttctttgccgagtgccaaatggcactcggcaaagtctttgccgagtgcccgagaaaaagtactcggcaaagaggctgttgccgatgtacagttcgccgagcgttctttgccgaggactgcagtcacgccctgacttgttctcctacctcacgctgatcagagcatacatagaggctaagctgcacactgaggtagaagaacccatctggacaatgctgaggagcgacacgacaggaagccacctgattctcgcggttttgaaggtgtatatgctggaggccaaagctcgcagtcgatcgcgacgtagtggagcacgctttggtggcggtccgggccacatcgagctggtgccgcatggcgttccggaaggacgagcatggcgtggtgaacgctgtgccgcttctggacctggctacatctggtcttggtag

SEQ ID NO: 10176 - DNA, 793 bp, Zea mays
  Peptide Sequence Number=SeqID_53551
agattcgtccgaccccagggctcggactcgggctaagacccggaagacgacgaaactccgcctcgcccgaccccagggctcggactccgccctggcctcggccggacgacttccgcctcgcccgaccccctggctcgggctcggccacggcaactgaaggcaagactcaacctcggcttcggaggaaaccccacgtcgccctgcctagagcacagaccgccacgtcaacaggaaacgtcatcatcatcctaccccgaatcgactcaggacaacgtcagcagggactcgaccgctccaacagctgtccctccatcaggctccgtcgcacctccgatagccacgacatcacgccagcaggatgcccagatctctccggctgccacatcggcatggccttctcagagaaggttggccgcgcgggaccgaggacgggacaggcgctctcttggggccgctcgcttccctcacccgcgtggacgcttgtaacccccctactgcaagcgcacctgacctgggcgcgggacgaacacgaaggccgcgggacttccacctctctcacgcttggctccggccgcctcgcctctcccccctccgcgctcgcccacgcgctcgacccatctgggctggggcacgcagcacactcactcgtcggcttagggacccccctgtctcgaaacgccgacagtatacctgctgcccacgtggatgtcatgtgggtgcaagacatgaccaagacgagaaggatgatgcaaatatcagcagcggacgtcgagtgcacggccctcatcatcgt

SEQ ID NO: 10177 - DNA, 573 bp, Zea mays
  Peptide Sequence Number=SeqID_53552
atgaacgaactcactggcattcgaagtgccattacaaacggaactccggttccccctccgcaggtacaaacaaccccactccgagggggaaggcctgcggagcgacggaaggccgacgagtggtgcgccgtcgcccgctccagcagcagcgacgacaacgccttctgctccgagggaccaagcagcggcagcgccagcctcgggctcgatgccgctgccaggaagcccccgcccatgccaaaacttgtgaggcaaggacgggcagaaggccatagagtcggagggaccggggaagggggataccccgagagggatccttctccgcgaaggaaccgggctccgcgccccccattactgatcaggggttcgaaggctggccccccgagggttcaacagccgcctcagatcgcgtgggcccgacacccactactggtcaggggttcgaaggccagccccccgaagggctccatggccgtctcaggctactcgggctccgcgcctattactgatcaggggttcgaaggctggcccccgaagggttcacagtcgcctcagacaccgagcgagggatga

SEQ ID NO: 10178 - DNA, 1548 bp, Zea mays
  Peptide Sequence Number=SeqID_53553
atgggcagcttggacaccaatcctaacgccttctccgccttcggcgtcgacgccaccaccggcttccagcccctccaccccgacgacgtccgcgcctacctccacaaggccgtcgacttcatctccgactactacaagtccgtcgagtcactgcccgtgctgccggacgtcaagccagggtacctgcggcagcagctaaggtccgcgccgcccacgtcctccgccccgttcgacgtcaccatgaaggagctgacggactccgtcgtccccggcatgacccactgggccagcccaaacttcttcgccttcttcccgtccaccaacagcgccgcggccatcgccggcgacctcatcgcgtccgccatgaacaccgtcggcttcacgtggcaggccgcgccagccgccacggagatggaggtcctcgcgctcgactggctcgcgcagctcctgcgcctgccgcccagcttcatgaaccgcaccggcgcagctgggcgcggcaccggcggcggcgtcatcctcggcaccactagcgaggccatgctcgtcacgctcgtcgccgcgcgtgacgccgccctccgccggactggctcccagggcgtgtccggccttccgcggctggctgtctacgccgccgaccagacgcactccaccttcttcaaggcgtgccgcctcgccggcttcgacccggccaacattcgctccatccccaccggccccgagacggactacgccctcgacccggccaggctcttcgaggtcatgcaggccgacgtcgacgccggcctcgtgccgacctacgtctgcgccacggtcggcaccacgtcgtccaacgccgtcgacccggtcggagccattgccgacgtcgccgccgtgttcaacgcctgggtccacatcgacgccgcctacgccggtagcgcgtgcatctgcccggagttccggcaccacctggacggcgtggaacgcgtcgattccatcagcatgagcccgcacaagtggctcttgacgtgcctggactgcacgtgcttgtgggtgcgcgacacgcaccggctcactgactctctcgagaccaatccggagtacctaaagaacgacgccagcgactccggcaacgttaccgacctcaaggacatgcaggttggcgtcggccgccggttccgggggctcaagctctggatggtcatgcgcacctacggcgcggccaagctccaggagcacatccggagcgacgtcgccatggccaagatgttcgaggacgccgtgcgctccgacaaccggttcgaggtcgtggttccgaggaactttgctctcgtgtgcttcaggatcaagccccatggtggcggtataatgacggaggaggacgcggacgaggccaaccgtgagctcatggagcgcctcaacaggaccgggaaggcttacctcgcgcacacggtggtcggcgacagatttgtgctccggttcgccgtcggttcgtcgctgcaggaggagaggcacgtccggagcgcgtgggagctcatcaacaagaccaccactgagatcatgcagaaataa

SEQ ID NO: 10179 - DNA, 342 bp, Zea mays
  Peptide Sequence Number=SeqID_53554
atgagcgagtcgaccacggccttacatgtaactcgggccctcaaggcctcaacacatgaagagcacatttatacttgtgacatatacagtgttggagccttctccttccgaaggtcctcaaaaacaagattaactatttgttttcagtataagctgtcacagaaaacttcgtattcaagatataagcttctcccttatgacgaaggcacgcaagatgaagacaggtccgaagaggataagggtaaaacgtcgaagctatcaccagatggacaacttcggctcgcaatgaagatgatgagtaatgatgatgatcgaaagaggaaaagactatttagcccttaa

SEQ ID NO: 10180 - DNA, 462 bp, Zea mays
  Peptide Sequence Number=SeqID_53555
atgggcaagaacaataaacgcaagcgtgagccgactcctccgtcggaggatttcggcgactcggaatactcggaggaggagttctcctccgagtccgagggatctccggctcccgtctctcccccggcgtcgtctgatgattcagacgactcccaggggattgccgcggaggtctggacgtacatccgggccgtcgagcgatccgggctcgagggctcggatgagtctgcgttctcctcggacgaggaggactcggacggcggcgaggacgaagatgacgatgacgacgacggcgacgacgacgatgatggcgacgacgacggcagcaacggcggcgggggcagcggcggcaggggcggcaccagaggcggcagcagcacgggcagcaccagaggcggcagcagcaagggcagcaccaggggcggcggcggcaagggcagcagcagcaaggccagtggctaa

SEQ ID NO: 10181 - DNA, 357 bp, Zea mays
  Peptide Sequence Number=SeqID_53556
atgtggactttggtaaatccaagatcaaagaaggacacagtcaggtgtcgattgaaccgtgtctctgatgttatcggcttcttttatcctgactatcccatcatgattcaggactcaaagaagaagaaaaagaaaataactactaggcggagcaaagttctaaaggtgcaagctgaatcaactcctcgagcttcgaaagaaattctggctgcacccgaagccagggtagcagctaagattgaaggactccctcctatgggagtcgaagacgcaaaaattggagaagatttcgccttgatagcgcaaagggttacacctttggaatcacttccagagagtggaataagaggaagatga

SEQ ID NO: 10182 - DNA, 288 bp, Zea mays
  Peptide Sequence Number=SeqID_53557
atgtacgatagattcaacagtgtcactcatgggcactctgatgcatgggtgagagttgcagatgaattcgtagcactcgcatttgctggtgatgctcgttcagcgaggtgcccgtgtataaaatgtcggaacttggtttggttgaaaaagtggagctctcgtatcatgttttcaaacatggctttatgccgaactatctggaatgagtacccagaactacagaataatcaagcttttccagaggatgtgagagagttctacaagcgtcttgaagcctcgaaggcttaa

SEQ ID NO: 10183 - DNA, 246 bp, Zea mays
  Peptide Sequence Number=SeqID_53558
atgcagaacctcaccggcggtgatgaagaagcaccatcacgcgaggcggctgacctatgcctcaatcaccgtttctgctcacgccttgatccacacgctggggctttgcccgccatctcgccggggattactccatcccggtgtggtgtggcgccgttcggtatccgtggaagctctaggacgccgggatgcagctcgacgtgccactgttttgacataaaagccacattaaaaatgttatcttaa

SEQ ID NO: 10184 - DNA, 1383 bp, Zea mays
  Peptide Sequence Number=SeqID_53559
atgtcctcgcgcttccttatgcatcgtgtctttccaccttccgagcccccggatggggaacaccagcaatccttccgccttgtcgtcggaggaacgcaacttcgcgggagttggtacctttcagccatcgttcggcttcaaggattttcatcaggcagcccggctgcaccccctcaccggcggtcacccaagacggtgacctccagttcgatggcggggaaaagcaagccgggctgcggcctctgtcccgccctcagcttcaaggatgttcatcatccttgctggggcggaggccgggctgagccggagctctacctcccgcgcgggttcgtgggtcagcctctccttcagcattcaagggagagggcgctcactggccctgcgagaggggcagacttcgacaacgcgaggctggtcgacggcgggcgtcgtcagcttcagcgcgttgggctcgccggcttggctcccggtgccccctcccgtcgcaagggcggttgtcgcgccgcgcgtgcgggaggaccgcccaagacgtcgcgcgctgctagggcggcgttcgtgttctggggctgtcctgcctttgctccggtacgacgcctccgcgcggaggtcggtgctccgctcgtccgggaggatccgagtggggatctgccggcctccgactctttgtacttgtcctcgcccctcgagcgtcggcgtgggcgagggcaaggttgcagcggcgtccgcccagaggccttcgctgctgcagttcggccacccggagtgggggtcattgtcgctgctgctggagcgggcgacgacgagccatgcgtcggccttctgttgctccgcaggcccccctatcgtgtggggttgttcgtacctgtggaggagtccctcggctcgatcggccttgctgtccgaggcttctcttgcttagctaaaggaaaccctcggccgctcttcgatgagccgaagccggaggtagcggtgttagcactgacagaggcagagttggctcgaaaagaaggtttggtcggccggagcctagccgggtcgtccgctggcgggaccgacgccggagttgagttgccgaggccacatgctgggctgcgatggcccgggcgtggtgctgatgtcgtccttcggagtggagatcctctgaccacgtcgccgtccgaggctaggtcggacctcgctgaaggtgtagttgacgccgaggaggagctttcgagcacgagttacttatcgcagaaggtgatgagtgagccgaagcaccaggtcgcccacctggaggtctcgagaccgaacccctcgggcgtggtagcgtcgcagggactgctggccctcgtcctcggggaaccgtattctaagtttgtgggcaagacggcctcggccccatag

SEQ ID NO: 10185 - DNA, 861 bp, Zea mays
  Peptide Sequence Number=SeqID_53560
atgggtccacagatcccagtgggggtcaatccccaaaaatccttcgcaaaccgccgcaaagatggctgcttgcgcgatagagttggggttgagattgtgcagctccaccccatagaaatgcagaatcgcccgcatgaaacggcttgtcggcactccgaacccccgctcgtggaaagagacgaaactcagcacataccccgacggcggggacggggcggctccgctcggagggaccatccactccggctgcgggtcaccggagaggggacgaagcaagccatcggcaacaagggcttccaggtcgtccgccgtgatggtggagaagggccacgggtcgcgcggcggaacgacggttacccggtcgaccatcaccaagcgaagggggtggcggcggagcagacaagggcaggcgacacctttggcaggcgaagcgggcgacgcttcacctccgccataaggaccgcgtcaaaaaaagggaccgggaaaggggatactccgaaagggatccttctttgcgaaggaagcgggccccgagccctcctactgatcaaaggttcgaaggctggcccctcggaagggttcgacagccgcctcagagcactcgggctccgcgcccactactggtcagaggttcgaaggctagcccctcggaagggttcgacatccgcctcaggccactcgggctccgcgcccactactgatgaggggttcgtgggctggccccccgaagggttcgacagccgcctcagaacaagcagagcgagggatgactctgggtacgtccgatacatggccgaggctcgggctatgctcccgaggtaccctaggacatttctgagaccagcaggagcgattctgtaa

SEQ ID NO: 10186 - DNA, 258 bp, Zea mays
  Peptide Sequence Number=SeqID_53561
atgtcgcgtgcttctgtgccgtttgctacgcttggcacatccgtgccattcgtgttcgacatgtccctggcacggttatttctctacgggataggatattgtatttcgatatttaatctcgtctggttcattccctacgaggcatcaccgtttgcgctaagcacgtttggcccatctagttcacttgcacgccaggtgttcgatgaatcacctaaactgggactcgttgtcgtttccacaacatctgagtcaatttag

SEQ ID NO: 10187 - DNA, 1149 bp, Zea mays
  Peptide Sequence Number=SeqID_53562
atggcgcagtcgaccgttgcagatctgggagccgttggcgcaccggacatgtccggtgcacaccgaacagtcccgccaaggctgaccgagccgagggactcctacgcctccgggatacggatacctcactcatcaccttctgcgataagtaactcgcgttcggataaagtgattccgcggaccgaacaagtctttacgttcggaagcccttctgccgaagcgatccttcgagccttctcgactgagtcggtgacagggccccatggacaggtgaaagtacgcgtaagcggcaaggccgaccgagctgagggactcccacgcctccgggatacggatacctcactcatcaccttccgcgagaagcaactctcgcccgcacaaacatccctgttaccaacaaaaagtccagatactcgaaacaagagaaaaagagacgcaactttacaacgcagcgagggtgtgttttctggcctcagcggccgcagaaggcacacgctacaagacaatctgatcctgcaggcgaggcccgacctagcctcggatggcgacgcggtccgaggatctccgctccgaaggacgacgtcatcaccacgcccgggcaatcgctgccagggacttctccgggaatccggcctgagcaggcggctcggccggttgcccctgaggcctcggctgatcaactccgccaactccgcctctgttcgtgctgatatcgctacccctggcctcggctcgtcgaagagcagccaaggggtacgaacaaccccactccatgggggaaggcctgcggagcaacagaagactgacgagcggctcgccgccgcccgctctgactacgacgacaagcgaccccccacttttgcccagaccaacgggcggaaggggcgggcagccatgcaggcggcatgcaatcacaccaggtggacgcgcttctccgactcccaacatgccagcatggaggcccaaggcccacgcgtcacgcaaccggcgcgccagatgctgcatgcaagcaactgcaccgccacttgtgccaccaccgcgcctcttcggttgcggaaccaataccgcaactcgaggcggcccagcgcacgacccagcagcgccagcctggcgcgacggtcaatacggccgaaagtgggccggcggtaa

SEQ ID NO: 10188 - DNA, 60 bp, Zea mays
  Peptide Sequence Number=SeqID_53563
atggccgccgctatcacgcagcgcctgccccactccgccgcggcccagcatacatattaa

SEQ ID NO: 10189 - DNA, 222 bp, Zea mays
  Peptide Sequence Number=SeqID_53564
atggggtccaggcacagtgcttgctctgccgagactgggtgtcgaggttcttttgttttgcttttgttagccaccctcctgcggggagagagatacttgatcagagatggttggtttacagatgatgatgatgatgatggttatgactatggtaatggtaaagaagaaggcgtcgaggcgaatctccaggagttccaggacttcgacgagttcgaggattag

SEQ ID NO: 10190 - DNA, 577 bp, Zea mays
  Peptide Sequence Number=SeqID_53565
atggggcgccatcaaatcagtctggcggagctagccagatgggacaccgttatggggctcctccgaagccaggatgagtctcaagaattggccgaggccgagcccgagcccctgggtcgggcgaggcgaagatcgttcggcagaggccggggggaagtccgagccctgggtcgggcggagcggagttcgccgtctttcccgggccctagcccgagtccgagccctgggtcgggcggagcggagttcgccgtcttctggggcctagccccgagtccgagccctgggtcgggcggagcggagtttcctatgcgcctttggcagggcctgactgcctgtcagtctcactctgtcaagtggcactgcagtcggagtggcgcaggcggcgctgtccttctgtcagaccggtcagtggagcggcgaagtgacggcgggttgcttcttagcgaaggcaaggcctcgggcgagccggagatgtgtccgccgttaaaggggggcctcgggcgagacagaaatccctcggggcctctgcagctttatgctgatgggggttaccagctgagaattaggcgtcttgagg

SEQ ID NO: 10191 - DNA, 288 bp, Zea mays
  Peptide Sequence Number=SeqID_53566
atgggtcgagcgtgtgggcaagcgcgaaggggggaagagaggtggccggagacgggcgtgagagaggtggaaatcccgcggccttcgtgttcgtcccgcgccgaggtcgggcgtaaggagaggatccaggtgtacaatgggggtgtagcagagtgctacgtgtctagcggggtgaaagggaaatgtgcccttgggccatttttaagtattttggtgattgagtgcaaacacaagggcctaaatgtgaatttatgtacatggatgaacaaggtgaaaatcatgaagtaa

SEQ ID NO: 10192 - DNA, 750 bp, Zea mays
  Peptide Sequence Number=SeqID_53567
atgacttctcacggatcctcggatgaagggaatgcacagtcccacactgatggacttgcacgagagggtttcccctgtattttgtgggaggtacttcagggagctggttacacgacgcctccccaggctgaggatactatcgaggcgattgctcttcacggactgaccaccttctacggattccaccccttggaactgtccactcaccccattggcttgttccccgcggagaaggaggacgacccaatgtggaaggaccgagtggagcatgccaaggatatctgggctatctacccaggtcagactgctcacttgacggtgcggtgcatgaatgccctgtatcgtctgcaagtgatgcgtggagaggcaatgtcccatctaatggcattgttggaggcaaccaagatcactttggataacagagaggaacttgtggttgacttgtccactgagatggtggaaaaagacctacaggtggaacaattgtcaaatgagatccaagagcttgaggagctagtgggaacaagggagaacaccatcgaggttctcgaggatcagcttatcaacactcagcagcaacttgcggaggctaaccagcatttggatatgcaccaccaggagatccaggacatggaggccaacgaggatgtcgacatcgagggaggagaggagcctgcctccagcttagacacttctggctcgggaagaccaccttccctcgagtcgagcattgcctcgtttgctcactag

SEQ ID NO: 10193 - DNA, 225 bp, Zea mays
  Peptide Sequence Number=SeqID_53568
atgtatggtttacaactagtgatgaggatgatggttttgattatgcttatggtactactagtccactacagccaaacgggacattctgctgagtatgttgatgtgtactcacccttgctttacacaccaacccccccaggttttccgcgttccaaccactgctcaggtgaagatgaagtcatggaggaggacttccaggagttccaagagtacaatgagttctag

SEQ ID NO: 10194 - DNA, 387 bp, Zea mays
  Peptide Sequence Number=SeqID_53569
atggagtacgggctcaccagcatcggatccgtaggtcatacctactctagaaaccctagcttgactgctcctgatcccccaagttctaccccaatctacaacctctgctcttcagtatcacacatgctcgacctaaaggtgttcgatgaaatggaaaaagattttaaggctatcatgaagctttctggtcaaagtcccaaaagaatgagagacctatcaagtttgtgggtttcactcccttcccacctcatcctttccgtgtctactcgcctcgcttcttatgctctaaattctgtgtctgcacagatcagcaagcccgaggactgggaatgtaagccaacgccaaaaaagttcttcgtctggttctacggcaccgatgagatgtaa

SEQ ID NO: 10195 - DNA, 882 bp, Zea mays
  Peptide Sequence Number=SeqID_53570
atggaaggagtctggatactaccaaatattgatgaagtcgtggagcacggcttctacgtgcacccatcagacttgagcagagtacaagccgttgagtgcaatctgttcggagcagataagatgggcgccaagcccacgagccgaagttatcaaacgcagcactcgccagtcgccaccccgatgctactggtgcgcgccccgccgtctcccgcgccgctctcggcggcggccaatttcccggctgatctggagcgcccccttcgccttcgcggtctgtcctcttcccgtgccggcgttactacggccactgccacggcgaagccggcggcttcctccctgggcgggcaaaagcgcaagcaggtgacgagcgtggcgaacccgctggtgaagcactgcgtcaagctccggctctccgccgcgtaccgacgctcctgccgccgcctcctcctcgtcggcctcgcgcctatcctggaggtgtgtagttttgagctcgaagccatcgattacttgcttctcctggacggcgtagaggccccagaggcgctgcgcgagttctctggtgatatattgtatgtcagcgccgcggtgatgaagaaggtgtccgggatgcagtcggttgattccaccgaggcggttgctgtcatgcacatgcctaaccatttccgcgatctcgggagccatcaggatggggatgctcttgatggtttgttcagttatccaaagaggattctagtccttgatgggattcaggagggaggcagcggtggggcgccccgagccccctactgccctacagctttcaaacacataaacttctacgaggtgcaccttcctctcaaggcaggccatgccaccaccggaggggaggagggtcaccactga

SEQ ID NO: 10196 - DNA, 115 bp, Zea mays
  Peptide Sequence Number=SeqID_53571
atggagcctggccggggcctccctgcggcggatcgaaagtggcgtcctcctggacttgccggttgggagcaggccggcggcggcggtggttgggagcaggccggcggcggcggtg

SEQ ID NO: 10197 - DNA, 1483 bp, Zea mays
  Peptide Sequence Number=SeqID_53572
atgcaggtgccatgcaactgcaccacagggacgccccttttcaacttcgacgcatccagcacggaggcccaggcccacacgtcatgtaaccggcacaccggttactacgtgcgaaaaactgcaccaccacttgcgccaatactgcgccttctcgactgcggaaccggtgccgcaactcgaggcaaccctgcgcatggcccaacagtgccaaccaagcacatcggtcacgggtcagtcagccacgggagaaggcgcgatggtcgatatggccaaaagtgggccggcagtaatggcgacagcaggcgagcggaagcagtagtcaaatcgtctacaggctcacgtcccctcctggagcagcaggggagccctcccccacggcgtgaagacgacgcgcccgtgttccgtccctcgaacggctcgcgcacgcacaacggctgccccgcgaaccacctgccccgtcgcattaacttcgcgaaagggatccttctccgcgaaggaagcgggccccgagccctcctactgatcagcggttcgaaggctggccccttagaagggttcgacgctgccctagagcactcgggctttatgctcattactgataagaggttcgaaggttggcccctcggaaggtttcgacagccgcctcagaccactcgggctccgcgcccactactgatcaggggttcgaaggctggcccctcgaagggttcgacagccgccccagaacacgcagagcgagggatgactctgggtacgtccgatacatggccgaggctcgggctacgctcccgaggtaccctaggacatttccgagaccagcaggagcgattctgtaacggaatcccatcagagggaggcatcgagccctcggaccctatcgaacgggaccggaagcctgatgggcgcaattcaggtcaaggctccatccactcaagggacacaatctcgcctcgcccgagcccagcctcgggcaggaacagtagacctaggcagattcacgcctcgcccgagggcctcctcaagcaacgggcgcaccctcgactctcccgaggcccagctcgggcaggcttcgcagtgaagcaaccttggccagattgcctcgccaaccgaccgtatcgcaggagcattcaatgcaaggatcgcctgacaccttatcctgacgcacgttcctcagtcggcagggccgaacaaccgagtccagcctcaggcgccataggaagctccgcctcgctcgaccccagggctcggcccccgcctcggcctcggaaggtggtctccgcctcgcccgaccccaaggctcagcctcaacctcggaaggtggtctccgcctcgcccgaccctagcctcggcctcaggaggagtctccgcctcgcccgaccttgggctcggaccgaccacgccacaggggggatcatcattaccctacccctagctagctcaaggctatggggaacaaggtcggcgtcccatctggctcgccccg

SEQ ID NO: 10198 - DNA, 255 bp, Zea mays
  Peptide Sequence Number=SeqID_53573
atggcaagggggccactcgtcatccctcatctggtcgtcgttttcctcttcacgtcgtgcgccttggttgcctccatggctgcacctaccagcgagcaggcgtgcgcgtcgctgctccgcttctcctgttgtgcctgcctgcgccgctcaatgcagcctcctaccccatgcgtcgcgctcaatgcaacacagcccgtcgatgtgcccatgctcgactcgtttccccagtgcgcgcagccagccctcatccgatag

SEQ ID NO: 10199 - DNA, 474 bp, Zea mays
  Peptide Sequence Number=SeqID_53574
atgaccggggataaacaaaggcaaaagctcaagcaaaagccatcaagcaaaatctccaacacctacatcaaaaaggtggataaaaagactgctacaccatacttaatcaaaaagaagaagaatggaaaggtgatagcaataaaggccaacaagcaagtcaacaaaggaaaggaggccaaacgcatctgggtgccaaaggaaataatttcaaccatgaaaagcaccaagaaggtttggatcccgaaagggaatggatcaagtttattgccaagtgggttagtgaaaatcttggacccaaatttcccacccatgactaagatatgcgtatctatttatcttttatctagtttacctttcttgcctagtattacatttgttatgtacttttgttcaaaatcatgcatactagttcacaggatgcgaagagaattggaccaaggcaatgaggatgcaacacctcaaaagaagacataa

SEQ ID NO: 10200 - DNA, 4284 bp, Zea mays
  Peptide Sequence Number=SeqID_53575
atggaggccgatgcgccgctcgacctcgcgctcttccagctatcccctcggcgtcagcggtgcgagctagtggtgtgcggcaatgggcggacggagaagatcgcgtcagggtcggtgaagccgttcgtggcgcacctgcgggctgcggaggaacaggcgtcggctcagccaccgccgctggccatccggctgcagctggagcggcccgccccgtggtttagcaagggcacccttgagaggttcgtgcgcttcgtgagcacaccggaggtgctggagttggcgaacacctatgatctggagatgtcgcagctggaaggggccaggaagatttatgcgcagggaggtactggagatgctacttcaggtggagctgctgaaaatgttacagcctcagcggcagcggcggcagatattacaaagaaagaacttcttagggcaattgatgtgcgtctaagttcccttaaacaagatctggccgcagcttgttctcgagcatcctctgctgggttcaatcctatcagtgtatctgagcttattctttttgctaaccattttggtgccagtcggctgagcgaagcatgcacaaagttcatgtcactttgccagcggcgtcctgacatcagtcctcaaactgcacagccagcagtttcatcacactggaaggtctttgacgatgggaatgtccgtggttcttcgagttcagacatgtctatagatgaaccactagttgatctcagtgaatccaagaacaaatctacagtcagtggaagtggctctcaggtccacagactaagcaacatccaaggtttagaatctgctgcagcacagcaacccaagccaaccatccaacaagcagtagataaacaagaagcagaaacagatgcgtctcctgcaccttctaaaggagagctttcaaggcggctgagtgtgaaggacaggataaacatgtttgagagccagaaaaaggagcagactccaagttctggtaacagcaactctgccggtactggtagagtggttccagggaaaggtgagcaccgcagggttccttctggcgcctccatggagaagttagttagaaggtggagcagtgttagcgacatgagtattgacctcagcaacaatgagagtagtagcttaaatgacaaaaaggataatggaactcctgccgggactccaacatctactgatttggaggccgactctaaagtaagagctaatgaggactctaatggacagaaggattcaatcacgtcacactcttggccttgtcaaaaggataatgtaccaatggatctggccaccacagatttgtgcccaccctcaattttaagtaatacacttgctcctcataaagagagtatatatggtgatggtgcagaaaacgacatggttatgaactctagcattgaaagtgaagcatcctttgggaaagaaccgggggttattcaaggacacacaaggatgtcaaatcatgctacttcaaatgtttccactcaagaccgtctaaaatcttctgcaaagtcagttgaagaagccttgctgaaaaataaagttattgtaactagtgcatcgtcagaggagcatgtctgcatgatagacaaggaaatcacagctgttgctcatgaagtaccagttgcaagtgaacagattccccagaatgatattagaggtctccatacaaaagatattcacactgaagcagaagtgactggaaggaaggatcagccttcacgatcatttggaagggtatctggtggtgttaatcctaaaccaaaagcctcatccaattcccgagctaatgctaaaggctcatctgttagggatgcgattgcctctacagaaactgagttccgtgacgttagtttgcagcggaatcgtctaccacggaagtcagaagatgtagggaaaaaggttacagctggttctgattcagattgctctggtcgtcagggaaaaaatttgagcaggcaatcatccattaccgatcaggaactaaacttgcaggctagagtgacaagaccaggaaaagggaaccaagatcggcatggtgaattgcaaatgaaggccaatgagttggagaaattatttgctgaacacaagttaacatcctcccgacgaggtaaacctacagatgtgcaggttgaaagcacacctatggtgagtgaggtaaagccgacaatggttcttcatgagacaattcatacaaaacaagttgtaaaggagagtataactgtcaatgattttgatgccggtgagcttctgaagatggtgaataatcaagaatttaacattagcacaccacaaaaacttggcattctaagtttagaagagtcgagagggaagttttatgagcattatatgcagaagagggatgcaaaactgaaggaaggctggaagctgcagagagaggagaaggaagcaatgttaaaggctatgcatgacagcctagaacggagcaaggctgagttgcttacaaaattctctcggtctgcagatgtccctgactcaacttatgtttcccattgttctcagaagattcctccttcgcgatcagcaagaaaaaataaagatcagggggttggctcattcttggtggaagaggaaatgaatagtgactacctatctggtgatggttcttccaggagtgctgattccagaaagcatttttcaaataaagttgcttctacccaaaatgcatctgctggtcctatccataaacgttcatcaagaaccgcaagctctggttatgctaatcgcaggaatccaccagaaaatcctctcgcacagtctgtccccagtttttctgacttgagaaaagaaaatacaaagccttcacctggagtcagtagagtgagtgcaagagttcagcaaaagtcttttgcccgtagcaagagtattattgaagagtcaaagagcatattgaaagaagatcaatcgaggaggtcacaatctatgaggaagaaccaaattcctgatgagcttaaggacatttcgtcagggaatgatgatatttacaattgggctccctcaagaatttccaagaatcaatcagagggaccttttgcttacagtacccgtagatcgggtccaccaaagccttttcttaggaaaggcaatgggactcaccctgttattggtatagctggatttcaggctgcagctgccatgatggcgaatgccctccagcatggtgacagtggtgattttgaagatcagcaagaggattcccctgatgatgccaaagaagaggaagaatatgaaagcatggaagaaaatcttagagaaagtgactttcctgctgattctgacagtgagaacccaagagtgagtcatgaatttggaaattcagatgacccagggtcagaaaacggtgatgctgattttccaagcaaaacacctgccattggcagtactaagttcactgcttttacaggaaatgttcacaatccagctggtgatgttccagcaccctggagttctcgtcttccacagctgttcccttacacgaatgataattcagatggtgacgcctttgctgattcaccatcgggaagtccatcaccatggaattctcattcactggatgaaataacagatgctgatgtatctcggatgcggaaaaagtggggcagtgcacagatgccttttgctggtgtcaatgcacctcaacagccacgcaaagatgtttccaaaggattgaagaaattgtggaaatttggtaggaagactagaggcggtgacggtttagtaaatgattgggtatctgcctccactgcctcagaatgtgatgatgacatggaagatggacgggatctggtagtaggatcttctgatgatttcagaaagtctcgaatgggttatcttgcttcatatgacggttttgttgagaacgaggttttttctgaacaagaacaatcactacgcagctccattccaaacccacctgcaaatttcagattgagggaggatcagctgactggaagttctcttaaagatcttggttcttattctcgtgtatttaccacaagttattacttattattctcgaagccacaatcttctctaaaacgtgttatcctcaaaatgcagcgccgcgttctttcttctccctgtcaacattccgaagcaagggaggtgatgccaggctcaggtgatcctcagaagacaccagaggtgtgtggctacactgctactggctactgccatcctctcggtcctcggatccatgttggtaggtgtcctaggttgagccccagcccagtggagtggagtggaggctag

SEQ ID NO: 10201 - DNA, 633 bp, Zea mays
  Peptide Sequence Number=SeqID_53576
atgatctttcttcaagaaaataaggataaagtagaaggaacacaaaaggtcaagcaaaaactgaaaggacacaaaggcagagatgagcaacagatttatggcctgaaactgggattcggtaacaaagatgctacacgggaaaatctcatcacaggatttggagacatgaatccggcagagaaatctgtgatgctccaaaagggatcgggctgttgcagccgcgtcgcagactgcctctgctgcatgtgctgcatcaaggcgtgcaacaggatgaacgaccagtgcgccgttctgatggcacagatctgcgcggctctagcgtgcctcggctgctacgagtgttgtgcagaggacccgctaaatttagaggacgtagatctggagggagtagaggacgtcctcgtcctaaatagtacaggacccgctagtcttagccggttcctcccgaatggacgtactcggaggatgatagaaaagcccgtctatggcttagtgcagatgaatgaaatatttggatacacaaatgacttatgcattgctttgcaaaggagagagcaagatattgtgaatgcaatggatcttcttgagttcactatggtggaattgagtgttttgagagaaaatcatggatga

SEQ ID NO: 10202 - DNA, 351 bp, Zea mays
  Peptide Sequence Number=SeqID_53577
atgtccggcgtcatgcccgatcctgaagacaagagcacagaacagaagctggacttcctcatggacgcaatgaacaggatgttgggtcagctgacaaccatgaatagtcggctggtgtcaaagattcaacaaaaaccaatagaaagaacaagacagggttcaaaacaaaggagcaaaaagaaaccgaagtgctccctggtctggcacaccggactgtccggtgtggcaccggacagtgtccggtgcaccaccggacagtgtccggtgcaccaccggacagtgtccggtgcaccagggaggattgccttcaaactcttcaccttcgggtttctcaggcgcagcccactataa

SEQ ID NO: 10203 - DNA, 189 bp, Zea mays
  Peptide Sequence Number=SeqID_53578
atgccgaagctcccctgcgcacagcttcggctctacgccaaccttcgtattctttatacttcttcacattgtggttctgatccgagtccgaaggtatttcctcttgctgggagtgctaagtggtgctcaggagaagatgaagacaatatggaggactttcaggagtttcaggacttcaatgagttctag

SEQ ID NO: 10204 - DNA, 492 bp, Zea mays
  Peptide Sequence Number=SeqID_53579
atgtccggtgcaccagaggactccaactcaaactcgtcacctttgggaaaatccaaaggcgactccgctataattcaccggactgtccggtgtacaccggactgtccggtgtacaccggactgtgtccgatgctccaaggaacggcgtctcaggaactcgccagcttcgggaaactgcaacggctgctccgctataattcaccggacatgtccggtgtaacagcggggaaacgtctatttcggcgccaacggctacctgcagcgcatttattgcatgccagcgcgcagaagtcaggcgtgcccatactggcgcaacggacactctacagtacatgtccggtgcgccaccggacatccaggcgggcccagaagacagagctccaacggtcagaacccaacggctttggtgacgtggctggcgcaccggacatgtccggtgtgcaccggactgtccggtgcaccatgcggcagtcagccccaccaaacggctaa

SEQ ID NO: 10205 - DNA, 198 bp, Zea mays
  Peptide Sequence Number=SeqID_53580
atggcccgcgcccgctcctataaagcgcccaggaaccttgaccgtacccctccgcacgcgctcaacctcaccggagcccaaacccaccggcgttctctggaggacatggttgctggagtgacttggccatccatcttgccaccgggttggactgtcgagtgggaccctgcctcggccgaggaggagcatgaggagtga

SEQ ID NO: 10206 - DNA, 546 bp, Zea mays
  Peptide Sequence Number=SeqID_53581
atggttcgtgccgatcgcacgagagacaatggacaaggtttgcaggttcgggccgctttgaagtgcgtaacaccctacgtcctgctctcaaccacgggcaagaacaacaagcgtaagcgtgagccgactcctccatcagaggagtttggcgacacggagtactcggaggaggagttctcctccgagcccgaggggtctccggctcccgtctctcccccggcgtcgtccgatgactcggacgactcccaggggatagccgcggaggtctggacatacatccgggccgtcgagcgcgccgggctcgaaggctcggatgagtcggagtactcctcggatgaggaggactcggacggcggcgaggagggtgaagacgacgacgacgacgatgacgacgatgacggcgacggcggcagcagtggcaggggcggcggcgacggcaggggcagcaccaagggcggcaacggcggcagcggggacagcaccaggggcagcagcaggggcagcaccaagggcggcggcggcagcaggggcagggccagtggctag

SEQ ID NO: 10207 - DNA, 210 bp, Zea mays
  Peptide Sequence Number=SeqID_53582
atggcagaagcaagcttccacgtgttcgacgcgagctggcatccgggggcgcgctcagagcacgcccactgtaatctcgctgacggagagtacatcctcgtgccggagcaaggagctgctcaggaggtagccccagacccagcacccgagcctgcaccagaggacctgcctgccactgctttggaaggcaagccccggttttatgcataa

SEQ ID NO: 10208 - DNA, 219 bp, Zea mays
  Peptide Sequence Number=SeqID_53583
atgggtcggcgcgagacggagcacgaaggggggaagagtgtaacaccccaggtgttacccagggtgtccaccccagggagccgccaacgacccccgctgcctgtgctcgtggccagggtagctccgaccacctccgacaccgacccgcacaccgacgtgaccgtcgcgacctcccggacgtcactgaccaccccgccggagctctactgccgtcgatag

SEQ ID NO: 10209 - DNA, 639 bp, Zea mays
  Peptide Sequence Number=SeqID_53584
atggcctgctggaaggtgaggacggaggaagcggaagagccccgttggttggcagcggacacggtggaggaggtggaggcgtcgccgtctgcggcggatagggggaggcgagggcgtcggcatgggcggtggcgaggagcacagaagcggatggaggctggaggaagcaaagcggagggcgccgttagtagcggggtgtgccgggaggcggcggtgggggagaggaggggaggcggaggagccatcatcaaggtggggagtgcctgccaggtggaggtagaagaggataagggaggaggagacggacaggctgttgcagcagcagaggcgggaaagaagaagatgctctatcctcgcgtggagctcacactaaggttgtcgctgcctcgcctggagctcgcgctagggccagggtcctctcacagcagcctctgtcctcacctggagctcacgctagggttcctctcgcagtcgtcgctgctgaggtcagactctgccttctcctctcaccctccagctctctccctttcccatctcctctcgccctccagctctccctctcctgtttcctctcctcgctccgaacactggctcgggccgtcccgatctgcccatgctggcgccgccgcctcatgcctg

SEQ ID NO: 10210 - DNA, 405 bp, Zea mays
  Peptide Sequence Number=SeqID_53585
atggggagccggaggtgggggaggaatcggatcggactcgaggagggagtcaagatcggtgggtggggtggagccagcaaggggaaacacatcttcgtcaaagatgacatgacgagagatgatgatgcggtgggaggtgaggtccagacaccgagcacggaccgggcgacgaaactgagtggatacccaggtgaagaagtgtgtgagggtggtgaatgtgtccgacttcaaacgaagcgggaaggtccagagaaaatgggaaaaatcatccaaaatcaccaaatagtatttatagccagaaagactgagtacaggggaggtccaaagatcacagtgaaccaggtcaaaagcctgctcagcccgagaagaagaagtagtaaatgggagacgagtatgtcggcctaa

SEQ ID NO: 10211 - DNA, 1173 bp, Zea mays
  Peptide Sequence Number=SeqID_53586
atgtggacgaacattttcaaaataggggagctccaaacagtttcttggtttcagtttcttcctatcgaacccgatgcaagtgcagcgtctgagaaaagttcaaaggtcgagcagaaagatgctcttaatagcattgtgctttcggcttatcttcacttacaaagtgaaggttttctaagtacttggactaattcctttgttggtccatgggatccatctcaaggagagcataaccctgatgagaagatcaagctctggctgtttcttcctggctgccactcatcggtatctgaaatcgcccaacctgctgtaaacaagctgagagttgcttcaaatggtttatgggtagccccaggcaactcggaagaggtagcagctgcactatcacaggctttaagaaattctttagaaagatcactgaaagggctttcatatgcaaggtttggtgatgtttttacaaaatacaacccccctacaagaaatcaaaacagctttaggagagcacagcctacagtcgagtttgtctttgctgccaccgaggaagcaatatttgttcacgttgtaatatctgctaggtatgttcggaacctttgtagtgatgacatagagaaagttctcgctcattctcctccctccatcggtgaaggtcttccagttgttgttgctcctagtgggatgctgggtaggcttgtcggttgttgtccaagtgatcttgtacgacaagtttattcaagcaaatcattgacgcctaatttaccaggttttagtcaacctactgtatgccagctgagaggccaaagttactatgttgaagttgcgcttggctttccagctgcttcagccaaaaaagtttctgagtttgagcatattcatataaaaaaagaattggatccagtgaaggatgctatggtcggttctgatggacagcgtaaggtagaatcacctgatggccttccaattcttgagaggacatttatttacccacctgaagctgttttggtacctatggtccatcaagcatttgttcgcttttcgagcaaacgaatgtgtttacagggctcgctgggaagttcatcatgggaggcatggccattctggaattttgctccgtcttcttactttcagaacaggagaactgtgtttcattatattaagaaggagaaaaaggtctaa

SEQ ID NO: 10212 - DNA, 273 bp, Zea mays
  Peptide Sequence Number=SeqID_53587
atgggggtggaggaggtacgatttgtacttcctgatggtgatggtaagagtggtgcggtgggtgcggagcgggagcgtggatatatggtggagggggtggctgtcttcgccgtggaaaaggcagtagaaccggcgcggcggctgcgcgcgtcctcggcccctgccacgagttccatttccgcggccctgggggggatattcctggcgacgagggggcaaagcgagagctcggccaaagcgtcggtgtctggacgggtaccccttggaagttga

SEQ ID NO: 10213 - DNA, 111 bp, Zea mays
  Peptide Sequence Number=SeqID_53588
atggggtccaggcacagtgcttgctctgccgaggctgggtgccgaggtaaagaagaaggcgtcgaggcggatctccaggagttccaggacttcgacgagttcaaggattag

SEQ ID NO: 10214 - DNA, 649 bp, Zea mays
  Peptide Sequence Number=SeqID_53589
atggcgcctcctgttgacgtggctggtctgcgccctaggttgggcgatgtggaagctcctccgaagccgaggtcgagtctgtcctccgtggccgaggtcgagtccgagcccctgggtcgggcgaggcggaggccgtcggttgaggccagagcggagtccgagccctggggtcgggcgaagcggagttcgtcatcttctggggctgagcccgagtccgagcactgggtcgggcggagcggagttcgtcgtcttctggggctgagcccgagtccgagccctgggtcgggcggagcggacccgagtccgagccctgggtcgggcggagcggagttcgccatcttccgggacttagcccgagtccgagccctaggtcgggcggagcggagttcgccgtcttccggggctgagcccgagtccgagccctgggtcgggcgaagcggagcttcctatggccggtcagtggagcggcgaggtgacggcggtcacttcggctctgccggctggggggcgcgcgtcaggataaagggcctcgggcgagccggaaatatgtccgccgttggagggggcctcgggcgagacggaaatcctccgaggcctttgcagctttatgctgatgggggttaccagctgagaattaggagccttgagg

SEQ ID NO: 10215 - DNA, 633 bp, Zea mays
  Peptide Sequence Number=SeqID_53590
atggcacatttctattggacgaaaacgaggctataccgggagtcgccgaggatgcaaccacagaagatctggatgatgggatttcctgtgctcttcttcaatcaacacgcaggaaccagtctacacagggagaacgaaatcgcgcttgacggtccgccgtgcaggggaagctcgccggtgcgcggacaggggctggatttggccacgccaccgcgtgcacaggggcgcgggcagcgaaacgaccacgacagccgtgcaccccggcgcgggcgagctcggccacaggcgaggccacacgcgagcgggcgcgggccgaccccggcagccgtgcaccccggcgcgggcgagctcagccacaggcgaggccgcacggccaagcgccgccacagcgtgggcgcggcgagcccccagcgactctccgcggaagccctggcaaccgagcgtcccggcacgagaagagagaaaggggagggaggaggcgacgactggcgcggttttgagcggagcgcggtatgggagatcgtggccgcgcgacgtgctgcatggggcacggcgggagctggtgggggggcgcgcacgcgcgctgcgggagcggcggccgagcgcgacgctgggcctaggcgagcgccctag

SEQ ID NO: 10216 - DNA, 193 bp, Zea mays
  Peptide Sequence Number=SeqID_53591
atggcgctcctgccccggctcgacgtggcgtgtgcgatgcccccggcgcggctcgtcatgcccgcgcggcgcggccccggcccggcgcagccgtggcgccctcgcgtcctcccctccccatcgcggtccggccatggcggctcggcccccggtggtgatgagaatgatggttttggtattgactatggtaatg

SEQ ID NO: 10217 - DNA, 693 bp, Zea mays
  Peptide Sequence Number=SeqID_53592
atggagataagcacaaaagtgcggccaccaaaattgagggaggtgatacaggttcccaagaaggttggaagggatccaagatttgagcctgtttatggatctgttgacaaagaaggtttatacgggttgagtcgggtggcccatgtcgcgccctctgctgccacccggcacgatgtcgattacctcagccttttgaagcagattgtcgagttcaaagctttgctctttattcccccgaaggctccacatgatctctatgagagatactacaacagtaacaagtcaaatctcaagttgtatgttaggagcgttttcatctctgatgaattcgatgaccttcttcccaattaccttagctttttgaagggtattgttgactcggacacactgtaccttagcaacaaggataagacaaatgaagagaaaagtgagatggaggagaagaagggccagtacgccaagttctggaataagttttgcaaatcaatcaagctgaggcagaaagacatcttctacatcacgggaagcagcaaagagcagctaggaaagtctccattcctagagaggctaaccaagaagaactacgaggatgagccgatgatgttgttgctttgtgatcgtgacctcatttacaggacaactgttgtttccaaggctgacatgaccaagttcaactaccggggaatattctaa

SEQ ID NO: 10218 - DNA, 282 bp, Zea mays
  Peptide Sequence Number=SeqID_53593
atgtggagtaattacttttccgggaattcagtaccccatggatgtgtatgggtatacggacatgggaatactgagaagtgtaatgtacttgtaacgacgcacctacgctcaggtagagtctctttgtatattgtcacccttgtccaatcccttggtgtcgtgcgagatttcttattggttatgtctggtaatggtgttatgactaaaatcggtggcaccgcgctgaaaccgagggcctcttgtgggtgcacacacatggttgtgctacctggcacgcactag

SEQ ID NO: 10219 - DNA, 534 bp, Zea mays
  Peptide Sequence Number=SeqID_53594
atgatggaaaatttcggcagcaaaacagtgcaaatagcaatgaatgctgtggtaacttcacacctacctgcttgtttatatagtactgcaggaaagaaggcgaagcggcggaattgttacaccaggcgcgccgtaacttgtacccgctgcgcagtggaccgcaaggatcaaacagtaactctgcaaggtgggaccgacacgcgctcggaagtcggatcgtttctccgcaacgagctcagggaaggtgttttttggaccttcggcttcccgaagctgaagaggcttttttcacgggtcaagctcgttacgaagaacgatctagcaccgcgaaaggggctactgttggggtcgtgcttcggtggacctgtcatttgctttcgcatcacgcttgtacctttgccttccgcaggatcgaagcatttgaggaaccaagtcccccaacaacaacccgttcccatagatccctcccccaacgtgaacccgatcccgcgctacctcgggagcaccagtactcctcccatcccagccctctag

SEQ ID NO: 10220 - DNA, 75 bp, Zea mays
  Peptide Sequence Number=SeqID_53595
atgagattgggttttatcaaggaccaaaagagatggcctccgttggggcagacatctgcaactgcaggcacctga

SEQ ID NO: 10221 - DNA, 180 bp, Zea mays
  Peptide Sequence Number=SeqID_53596
atgttggccctgaatgcagcatgccctaatgtggtattgggtacaggcgttgctgggggtgcatcgtcaggcaaaagtaccgtgtgcaagatgatcattgatcagctccgtgaccagcgcgttgtggctgttacacaggtcgaattcatccttacacaagaattatatttactatcctag

SEQ ID NO: 10222 - DNA, 1047 bp, Zea mays
  Peptide Sequence Number=SeqID_53597
atgccgccagcgccgattggtgatggaggggtcgggtcggcccgcgatctatcctcgggtaacggaggtgactgtcttcttcatggagaaggcgaggtccagcggggaggacacacgacacgcggagaggatgagtcggctcatggtgctcacagtgacgagcttgctgctgcttcaaggctggaagatagcatcaacttttatcaaacttcgattcctgatgttgctaagcttttccatatcgacccagcagcaaagcgtccatccatagtattactgaagaaagaggaggagaagttgaccttctatgatggaaagtttaaagcatcagccattgctgattttgtgtctgctaacaagcttcctttggttaccacactaactcaagaaacttccccttctatttttggcaatgcaatcaagaagcaggcacgtgatgttgcctacagtaggatctcttttctacattctaagggagtgtttgaatgcactagagctaatagttctcagattttactatttgctgttgcaagtgaatcctcaaaatttctgtccatctttaaggaagcagcaaagccatttaagggaaagctattatttgtctttgtggagcgagacaatgatgaagttggtgaaccagttgccaactactttggtcttactggacaagagaccacagttcttgcttacactggtaatgaagatgctaggaaatttttccttgatggcgaggtgtcacttgaagccattaaggacttcgctgaaggtttcttggaagacaaacttacaccattctacaagtctgaaccagtacctgaatctaatgatggggatgtcaaaattgttgttggaaagagtctggatgtaatagttttggatgaatcaaaagatgtacttctggagatatatgcaccgtggtgtgggcattgtcaatcactggagcctacttacaacaaactagccaagcatctaagtggagttgactcccttgtgatagccaaaatggatggtactaccaatgagcatccacgtgcaaaggatttataa

SEQ ID NO: 10223 - DNA, 196 bp, Zea mays
  Peptide Sequence Number=SeqID_53598
tgagactctgcctactcaccttgggagtgttcaagggtccgtacaacccgaggcaaaaagggaatcacggctcatggggatgttcggattgcaggtgacaatgagactgatggttcttggttttgactctagtaatggagaggtcgaagccgtggaaggagacttccaggagttccaggactacgatgagttctag

SEQ ID NO: 10224 - DNA, 510 bp, Zea mays
  Peptide Sequence Number=SeqID_53599
atgaggctttcacaaaatacacttaatacgaagcaacccgctaaggtttctaaagacgatggtggtgaccccctgggtgaggtgccaaaggttcacaacaaaccaataaaaagaccgaaaaaggattcaaaaatagagagcaaaagtcagccgaagtgtgccctggcctggcgcaccggactgtctggtgcaccaccagacagtgtccggtgcaccagggactccaactccgaactgctcaccttcgggaattctggaggccgctccgctataattcaccggacagtgttcggtggcgcaccgggctgtccggtggcgcaccggactgtccggtgtgccagcggagcaacgactacttcgcgccaacggtcgtctgcagaaggcattaaatgcgctacagtgtgtgccatagtcagagcagagccagatggcgctccagacagtgaacagtgcttgtccggtggcccagaagacagaagctccaatggtcggaatccaacggtttggtga

SEQ ID NO: 10225 - DNA, 369 bp, Zea mays
  Peptide Sequence Number=SeqID_53600
atgaacaatatgggtatccttgaggtctctttattgatgatatatttccagtttacagagtacattgtcatcccgatagcttttgaaatacagctagggccgttcttcttcgagtatgtcaatatcctccagcctagtagcctcggcttctgctatgctttcgaagatcaaccttggcgccccaaactggagaaatcaaagaactctgaacttgtgaagttggatcctaggtcagttatgatattatttggtattccgaatctgaatattatgtcttgtatgaattccacggccttagctgaggttaaagaagcaatgggtttgaattctatccatttagtgaatttgtcaattgctaccagtatatga

SEQ ID NO: 10226 - DNA, 411 bp, Zea mays
  Peptide Sequence Number=SeqID_53601
atggacacgagacggagaaggtcaggctcagagacaacagacatatggttacctgcgaaaggcaactggctattggggtcgatggggggaatcactgcagcagacgaactcgaggcctttcgcttgggcgccttctcaactccaacgatgaacagagcgggagtcgaattgcaaaaggacagagaagatccggaggcaggaaagcaagaactagggcacggaaagcagaggcggctaaaagcgcaatacatatgggatattcccgggtcagataccgtttccaaaaagcgcccagtcatcacccggcggttactcctaaaaacgctgacgtgccatgtcatcacccggcggttacttctaaggcaccggtatgccagatcatcactcggctattatcctcaaagtagctga

SEQ ID NO: 10227 - DNA, 255 bp, Zea mays
  Peptide Sequence Number=SeqID_53602
atgatggtccttcggttcctgctgctgaggaagtgcctgtgcctgaatttaccgatgctgaccccaatgggtgtgctccatctgtcgctgatcccaacgggggtgctccatctgtcgctgatcccaatggaggatctgttatcagagccggcggacggtgatgcgatggatgtttgtgctgatgtgttcgacgccgggttggggtcatccccggacagcgtcccgcgcctcatcgaccttggagcgcggtcttga

SEQ ID NO: 10228 - DNA, 219 bp, Zea mays
  Peptide Sequence Number=SeqID_53603
atggaggccaagtcacaccatcaaccaaatcaagaaggtacctgcaaaaattatgccacaagcaaggctgagtatactaatactcagctagacttacccgatgtgtacctagctattcatacatggtatcaaacatttttatcaatcaacctcttttgccagtccactcatttccacttattactcaatgtagcagcatggatcaagcagtctcattag

SEQ ID NO: 10229 - DNA, 588 bp, Zea mays
  Peptide Sequence Number=SeqID_53604
atgcccgatctagagattcgtggtcgggcgaggcggaggccgttggctgaggccagggcggagttcgaggcttggggtcgggcgaagcggagttcgtcgtcttctggggctgagcccaagtccgagccctgggtcgggcggaacggagttctccgtcttccggggcttagcccgagtccgagccctgggtcgggcggagcggagttcgccgtcttccggggcttagcccgagttcgagccctgggttgggcggaacagagggcgctcgtcaggataaaggtgtcaggccacctttgcattaaatgctcctgcgatttggtcggtcggtgcggcgatttggtcagggttgcttctcggcgaagacagggcctcgggcgagccggaaatacgttcgccgctggaggggggtctcgggcgaggcggagatcctccgggctttatgctgatgggggttaccagctgagaattaggagccttgagggttctctggaggacatggttgctggagtgacttggccgtccatcttgccaccgggttggacagtcgagtgggatcctgcctcggttgaggaggagcatgaggagtga

SEQ ID NO: 10230 - DNA, 1255 bp, Zea mays
  Peptide Sequence Number=SeqID_53605
atggccaatgtggccaaaagtgggccggcagtaatggtggtggcaggcgggcaggagcagcggtcacgttgtcagccaagcttacgtcccatccggggacagcgagagaaccctctctcacggcgtgaagacgacgcgcccgtgttccgttcctcgaacggctcacgcacgcgcaacggctgccccgcgaaccactcgccccgtcgcattaactccgcggcgggacaggcggcgcctccgggaccgggaaagggggataccccgaaagggatccttccccgtgaaggaaccaggctccgaggctccctactgataagaggttcgaaggctggcccctcgaaagggttcaacagccgcctcagagcacgtgggctccacacccactactggtcaggggttcgaaggccggcccctcggaagggttcagcggccgcctcaggctacttgggctccgcgcccactactgatcagggcgggaacgatcttgtaacggaatcccatcagagggaggcatcgagccctcggaccccgtcgcctggggactgggtccagcagatcacccgcatctcaccggagacaccatgttcggcgcccactgagggcaacatggcgctctcccccctcctccttgcggaaaggcgacgcaggggcgtatgtaaaaaagtcgagtctgtccctgatcgccctctcgccctgtgcaaaggctcgggggctgctctcgcaaacccggctccggccaaaccgttgacagcgtcaacataccagcccgagaacttaggacccgaccgtacacccgggctacggccagctcgcatgagggaacgaccagaccagccgaagcattgtgcgagggctcggactcgggctaagccccggaagacggcgaactccgctcagcccgacccagggctcggactcgggctaagccccggaagacggcgaactccgcttcgcccgaccctgggctcggacttgggctcagccccagaagacgacgaactccgcttcgcccgaccccaagactcgaactccgccctggcctcagccaacggcctccgcctcgcccgacctaggggctcgggctcgacctcggccatggaagacggactcgacctcgacctcggaggagcctttgcatcgcccaacctagggcgcgggccgaccacgtcaatgggaggcgccatcattaccctactccaagctgactcaggctacggggaacaagaccagcatcccatctggctcgctccaccag

SEQ ID NO: 10231 - DNA, 84 bp, Zea mays
  Peptide Sequence Number=SeqID_53606
atgggagaccacgtctcaggtcgcgtgaggagggcaatctactgccaggttcaatcaggatttaatattcattatgctaagtga

SEQ ID NO: 10232 - DNA, 138 bp, Zea mays
  Peptide Sequence Number=SeqID_53607
atggatcctaaaggggaagggaatcgtgatcaacgacaagggagaaaggagtccttcgtccacgagccaaaggatgacaagtcaaacgactcaggctcaggccttaggcgcaaaaatgggaaagaagaagaatacaag

SEQ ID NO: 10233 - DNA, 225 bp, Zea mays
  Peptide Sequence Number=SeqID_53608
atgggagactctgtctcaggtctagtgaggggtaaagtctgcgggcaggttcaatcaggtactaggcttaccggttaccatatttcccgatatgtatttagtacattcaaacgcttgacacagaccatcatcattccgttatcaaagtggatacaaccaattcctgacctcgcgctagtgttagaaaaatcactcgacttctaccgaaatcctgatttagcatag

SEQ ID NO: 10234 - DNA, 208 bp, Zea mays
  Peptide Sequence Number=SeqID_53609
atggaccggtcctactcagccggcgtccgcgccacgccggtcgtgctcaatgtcccagtgtgctcgcgcccggtgttcgggttcttcaaggagaagaaagaggccgcaaacgccgcctcggcgcgggcgcggttggcgttggcccggaggactgctgcgggtaccgccccgccagccggcggagcgagcgccagagatcttggcagtg

SEQ ID NO: 10235 - DNA, 441 bp, Zea mays
  Peptide Sequence Number=SeqID_53610
atggtggacaaagtacaaatcaaggataaaggaaaaatccaattggaaatgtcttggctcgagcagccaagactctgctcagtctgggagcaccggactgtccggtggtgcaccggacagtgtccggtgcgccaggctggctcgagcgaactggccgctctcaggaattcatcggcgacgtacggctataattcatcggactgtccgatgtgcaccggactgtccggtgctctcaagggtgaccgcataccgtaccccggagggtttggacatgcctctataaaggcttccaccaaagtgaagtcgcttggtgggtcgaggctgaatccaaaaggcacgagatgggaatcggtcggtacctcttggtcgacgggcggtgacgaagtcgcgccaggggcggactgcaccgtcgtctcagcatctcctttgaaaattgcataa

SEQ ID NO: 10236 - DNA, 99 bp, Zea mays
  Peptide Sequence Number=SeqID_53611
atggcgggcggaattgagctcgccggagctaagggaaagtggctggccggtgaggaaggaagtccttttaagttttacttcacagttacttcattctga

SEQ ID NO: 10237 - DNA, 87 bp, Zea mays
  Peptide Sequence Number=SeqID_53612
atggcgggcggaattgagctcgccggagctaaaggaaagtggctggccggtgagggatgtgttcaagggaatttggcacaactttga

SEQ ID NO: 10238 - DNA, 1032 bp, Zea mays
  Peptide Sequence Number=SeqID_53613
atgaagctgtggaaggagacttccaggagttccaagattacgacgagttctaggtgtgggttagcggcaacccccagtcggctgcctgtgaaggccgcgttatctacgtttcttttccgcactttgatttattgtaagaactatatggacgtctcggacatggctcgacttagacacactgcacgaaagtcagtcatccccttcttaccctcccgccttgctgagcgtccgcttcgccgtcccgtggccggacagtccagccacttggagagactacaccaccgcctgcgtgaggagcaggaacgtcgacgacaggagcagcagggctcttctttctcgctccaccaggagatagagtctgtgaggagctgctcccctgtgcttcctctggagccgccccctgcaccaccactgggcgccccagcttctggagtagctgctggaggagacccagacgacggagatggcgacgacagctcgagccacgacaccgacttctctactaaccctgagcctcgtggggtctacccggaccgctgggaggcgacttgcttggtgcgctgcccggaggacagtctccagggtgcggaggcctgctcagagcactattctatctctgaacgggactcagctgaggcagccatgcaagatgctgcacggcgtgcgctttcgcactactgctcggttttcggtggggcagctgacggtcttgacctgaagtattacccccgccgtccatctggcagcacaggaggcgtgattgtctcacctgtcggtgagggcaatcctaggttgagcagcacagtcaacctagccgccgtgctaaacacggagctggaccatgcattagacgagctgagtagggctcgtgctgagatcgccctgctgcgggctgagcgcgcggaacgtcgtcacttggatggtggttcccccgctcccgtcgggactcagcacccgtaccgctcacctcagcgtggacaccagtcttatggcaatcccgcctgcaagaccaagataactctagaaccatag

SEQ ID NO: 10239 - DNA, 892 bp, Zea mays
  Peptide Sequence Number=SeqID_53614
atggtcacccggtcggccaacaccaagcagaagaggtggcagtggaaagggctgggtgcgcggtttcctttctctggctattccctcgggttgcaaaaacctaagtgggaggcgagcaacagagacaggcggcacctttggcaggcgaagcaggcgacgcttcacctccgccataatgaccgcgtcaaaaaagggatcgagaaaggggatactccgaaagggatcctcctccgcgaaggaagcgggccccgagcccccctattgatcagaggttcgaaggctggcccctcggaagggttcaacagccgcctcatagcactcgggctccgcgcccactactggtcagaggttcaaaggccggcccctcggaagggttcaacggccgcatcaggccactcgggctccgcgcccactactgatcaggggttcgtaggctggcccccaaagggttcgacagccgcctcagacgcagagcgagggatgaccctggccaagtccggcctcgggcgccataggaagctccgcctcgcccgaccccagggctcggcccccatctcggccttggacgacgaactccgcctcgcccgaccccagggctcggactcagcctcggcctcagacgatggctacggggaacaagaccggcgtcccatctggctcgccccgggctctcgtacgaggaggttggccgcgcgggagaacgggacggcacgtataagcctctcgctccctcccacgcggacgcttgtaaccccctactgcaagcgcacccgacctgggcgcaagacaacacgaaggccgtggggaccccccggggtcgaaacgccgacagatgccaagcccatcaagacacccatgggaaccaatgggcatctcgacctcgacacggaag

SEQ ID NO: 10240 - DNA, 207 bp, Zea mays
  Peptide Sequence Number=SeqID_53615
atgggtgccaccggtcttccagccaccggcggtctctcagccatttcaagcgtggatggcaccgccaccgacgggggttcagtgtcaaatgctcagggatcggagggtgctgccaacgtccaaggcttccatggttctggagggagtggccaccttcctggtggcggaggagggagtggccaaaactcccacagcccgcaggagtga

SEQ ID NO: 10241 - DNA, 561 bp, Zea mays
  Peptide Sequence Number=SeqID_53616
atggatgggctatgcgcaggaggccatggcaaaatgacgacgcgcccatggcagcgagcgcggttgggttcatggcggcggcgcttttccctccccctggtgttctctctttcatctctcctgataagttgctggcggctttgcccctgtcgaacccctggtgggcgcgggtattaccaacggcggcaacgacatggcaaagatgcgacggctgctgattcctttttcccccgttggctgacctttgctggtattggtggcacgcgcccagttgccggtgcccgcggcgaggatcatgcgggatccacggattctgttgaacagcctgatccgaacctcacggatccgagctctcgtggggaagaagggacgacggacgcgagggtcccacacggcgatgtcaggcgcgagggtgtaaatgggctggtcaaggccattttggaccagtcgcaaaaggaggatggacagggacaagatgggctgaattgcattcggcccagaaacatgtttcttcttttctatttcccattttcagttttattccaagtctcaagttcgtaa

SEQ ID NO: 10242 - DNA, 264 bp, Zea mays
  Peptide Sequence Number=SeqID_53617
atggagacctgcgatgcgaccctgaacgggtgttcagccccacggaccgcaacggccgcagccaagcgaagcaagaccgacggagcaaccccaaacagcgtccggtcgggcgtgatggttagcaaaggacgagccgacgccgataagaaagggcccttcgcgaggacggatgatactccagagcttcagcacctgtccaatacacgggacaagccacaggttgactccatcattctaatagccttgttctatgtgcggcgctaa

SEQ ID NO: 10243 - DNA, 114 bp, Zea mays
  Peptide Sequence Number=SeqID_53618
atggagggtcacagatatcatagtgttataataaggggtaccctcaagactcctaaatctcagctggtaacccccatcagcacaaagctgcaaaggcctgatgggtgcgattaa

SEQ ID NO: 10244 - DNA, 66 bp, Zea mays
  Peptide Sequence Number=SeqID_53619
atggctgcgtcacatgccctgcgcagcgcaggattcttcacttcccgtacctttcagaggccctga

SEQ ID NO: 10245 - DNA, 413 bp, Zea mays
  Peptide Sequence Number=SeqID_53620
cgtcccccacgcctggggtggtagcctcggcgcaccctctcgtcgaggtgggcccgacggtcgcggtgatggtgctcgttgttggaacttgctctcaatcgcaaggaggccaacaaggggatacctttacagatcaggcctgtaactcgcggcggccacgcagggcctgttacaatgggccggaacgcacgtgggcctctgagctggacgaggccgcgctgtgggatgacttcgtcgccggtcttcgtctggtgccgatcaagcgaagggtgtccctgcctgctctgtccctgtctgaccagcggttatcagcaaagacttcgagcgaggggtggcgcctttgccttcgccccaacatttgccctcagagggaccagttcgacaaagtcatctggtgccgaagacgtcgctag

SEQ ID NO: 10246 - DNA, 1983 bp, Zea mays
  Peptide Sequence Number=SeqID_53621
atgggcaagatgagctgcttctccggtctgctcagctgcaagaagaaggcattggagggtaagaacaagggcgcttacgccaagaaggctagcggcaatgattgccccaaggtgaagccggtggaattcatggacatggtggtggcggacgctgttgtcgacgacgtcagcaggtgccgagacagcgttccagcgtctgcatgcagcagtaggcttgtcgctcacgcagccgccgagctggcacgccatgccactggcgagaacggcgacaaggccgcagctaagagggactcgtcctccgccgctggctcctcctcctccggttacagcagcgacggaacaggcgacgatgccaagagcgccgagccggacgacggcgaaccctgcagcctcggccgcatgtcgccgacggcggcatcgccaaagctgatgcgctcctgctccaacatcgagacgacgagatctgtcctgacagggtccgacctgccggcgaagtcacgctcctacgacgacctgaagacgctgccctcccacggaagctcgagcgcccgcagcggcggcgcggtgcgcgcgagcccgacgccggcgtcctccaggacctcgtgctccgctgaccgcgtcatgctgaagaagcggtcgtcgaggcaggtgctcccgtcgcggagccggaagctgtggtggcagctgttcctctggagccaccgcaacgtgcaccgtcgtcggggcgcgagcgcgcccacgcccacgacgctgctgtggccatcgccggggagagaaggcggcggcgccgcgcaccggcgcgacgggtacgcgtccgacacgctgggcacggccactgcggacgacgccaaggagaagggcgtcgccgtggaggaggagggcccccgcgtcccgacccagtgggtggcgttctccgccgaggcctcgccgctggaccgggtcagcgcgtgggtgaacagcctcgggaacggctcgttccacgccgtcgacgaggacggtggcgccacggggcacggcggcgacggcgcctcgcgcctgcgcccgcgaccgcgtcgctctgagattgtggagctgccaacgtcggcggccggcggcaggaggcatccgcagccgcaggcgaggcggcgcgcggcggcggcggcggccgaggctggccaggcgagcggcatcatcgtgcagacgctcaacaccttctcctccgtcgcgcacatcgccggcatggggctccaggccgtcccggcgatcgcggccttctcgaccctccgggccgtcaatctgtctggaaacgtgatcgttcgaatcaccgctggatcgttgcctaagggcctgcactcgctggacctgtcgaggaacaagatcgcaatcatcgaggggctgcgggacctgacgaggctgcgggtgctcaacctcagctacaaccggatctcacggatcgggcacggcctgtccagctgcacggcgatcagggagctgtacctggccgggaacaagatcggcgacgtggaggggctgcaccgcctgctcaagctggccgtcctggacgtgagcttcaacaagatcggcacggccaagtccctgggccagctcgtggccaactacggctcgctgcgggcgatcaacctgctgggcaacccggtgcaggccaacgccggcgacgacacgctgcgcagggccgtgtcgggcctgctcccgcggatcgagtacctcaacaagcaggccgtcaagccgcagcgcgcgcgggaggtggccaaggacagcgtcgcgcaggcggcgctcgggaacgccgccggcgccaactcgcgcaggcggccggcgcggcgcctcggccagagccccgccgggtcgtcggccgccaagggccgcaggggcagcaggggcagttgtagattgcagcctagtggagtagtgggcctgcagtccgcagctatgggtaataataataatacggaggtgacaagatccactgcaagcagagaagtttga

SEQ ID NO: 10247 - DNA, 225 bp, Zea mays
  Peptide Sequence Number=SeqID_53622
atgacccactccctcccctttgcattcgcctctgcgctcggccaatgtgcccggttgggaaggagcacggggagggcgcggttagagcacgaccagaagggagcagggagcgacgcggtcgggtggcgtttgctagggggagacattgtgcccatagatgagcgtcggatcagtaaacacacaaggtctggtgaagcgagagcagatcatcctgaaagactttga

SEQ ID NO: 10248 - DNA, 249 bp, Zea mays
  Peptide Sequence Number=SeqID_53623
atgacaaacacagagatgcggaaaactggggagcagcttacggagtcgaggagggagagcgcctcgcgggtggcctggtgctcgcggccgccatcgcaggtgatgaagaagcctgcacgccggggcgcagtcgctgctgttaggtctagggacgcacgcacgggtgacggcgcgccggatcgtgacatccattttaccgacaaacgatctgatgctacttttttccgacagactgtgcgccacgcataa

SEQ ID NO: 10249 - DNA, 207 bp, Zea mays
  Peptide Sequence Number=SeqID_53624
atgaaaacttcggactggaagggtaggcagcagatgtcgcactccagcgcgtccttctccacggatagtgtcacagtcgcctcttcctcatcgtccaaccccgcctcttcctcatcctccaccaccaccttggctttctttggagtgccgccgtcagaggaagccgtggtctttttcccggtcatggtttatcacctagaacgcgag

SEQ ID NO: 10250 - DNA, 366 bp, Zea mays
  Peptide Sequence Number=SeqID_53625
atggcagctcgccccacgaggttgcgcgactgcaggtctccgatggggaaaatccgtgcgccgccggggatcctaacgctacaatcaccgccgccgacagggtccgccacaacccaacgatgctccctggccgatcaccgatgcccgcggacaagtacggcaacagcgctcgagcgcgactgcggcgacggatttgctgccgagctaaatgcggcggcgcaagatttgtggagctgtggcaacggaggaacgagcgcacgactggacgggatgaggactaccgcgagttggaggaagttttatctccagcgggcgcggctgaacaggtcggacgcgcgaggattccgcgacggtcgttgcgcttga

SEQ ID NO: 10251 - DNA, 603 bp, Zea mays
  Peptide Sequence Number=SeqID_53626
atgattttcgacaaagaagggaagaagcttagagatactctgaaatggccaggggcttcggaggaagattccaccccaggcatgtcaggtcaatcgataatgccagcccaagtgacgatagaggaaaccaaacccaaaggtagcagcatagctcccaatcatcaggggcgcaacaaagttccttcaggccaccagctccaagaggcagaggggccagaagctttggaggaagatatatggagatcagcctatgagactgttttgtttgttctacggcgaagacaaatgccacaccacaagaacgtgccaagtcacgattcaaaagcagaaagagattgccgaagccaaagcacggcagaatcagcgaaagcaggttctacataccgcttcatgctattctccctacatcctagagtacgtaggcaatcaacagcctacggcctctgtcgcttcgacaagccattctcaagcttcctgggcccagctgccaccaccaccaccgctagcacctactctagttctgagccagcagccagaagagcatcaacacgctcagcagcagcgagatttttgggaggagtccgaagctcgcacagtcaatag

SEQ ID NO: 10252 - DNA, 150 bp, Zea mays
  Peptide Sequence Number=SeqID_53627
atggagcggctgaccggtgggcccagcccgccagcggaagcggtcgcaagcgagggcgagggaaaggcgactgacgagtggggccattattccagtgggagcgaccgcgagcgtgggcgagggggcggggctgacaagtggggacaataa

SEQ ID NO: 10253 - DNA, 243 bp, Zea mays
  Peptide Sequence Number=SeqID_53628
atggggctcggtgtatgcggctcgctctgccaaggtggcaatgagattgatggttctgattacgattatggtattgctagtccactacagccaaacaggatacttgctgagtatgttgatgtgtactcacccttgctctacacaccaaaccccccaggttgtcagcattgcaaccactgctcaggcgaagatgaagctgtggaaggagacttccaggagttccaagactacgacgagttctag

SEQ ID NO: 10254 - DNA, 609 bp, Zea mays
  Peptide Sequence Number=SeqID_53629
atgccgctaccaagcccaaatatccaagatgctcacgaggactggtgcagtataccaacagtcgtatgtggtattgttgtagggcatgttccattatctgtaataaacaaaggcatgaagttgtgttttaatgagtacaggtcggcgattgctgaggagcctcaaccaccaaaagtggccgttgggaggctgtctgttcgatggcgcaccggacagtccggtgcacaccggacagtccggtgccccctgccacgtcatcactgccgttggattctgaccgttggagcttctgacttgtgggcccgcctgggtgtccggtgcacaccggacagagtgggggaggaaggagattattataacagtgggatgaggcatggttccccgacgctaggcgtggttgaagctctggacgccacgagggccactgcagtcactgccgaggaagcgcgcactaccgccaaggagatggagaagaaggccaccactactgcaaagctagccgccatcgctatggacaaggtgggatttgtcgtcgttgctgtggccagtgtcgtcgccgaggaagccaacgcgcgttggattcagtggcacatcgctatttggctgtga

SEQ ID NO: 10255 - DNA, 1254 bp, Zea mays
  Peptide Sequence Number=SeqID_53630
atgtccatggccgaggaggggagtgaggccgaggaggggagtgaggccgaggcgctcgagaaagacggcagcaaggcttcttcaccttcggggccagccagtcgactcgtctccagcaatgcggccggggtcggctcgctggaggtgggcgccgccaccgacacctccaacgcctccaggcagggattagatttgggcaagaaaggcccgggcgcgatgtccatggccgaggaggggagtgaggccgaggaggggagtgaggccgaggcgctcgagaaagacggcagcaaggcttcttcaccttcggggccagccagccgactcgtctccagcaatgcggccggggtcggctcgctggaggtgggcgccgccgccgacacctccaacgcctccaggcagggattagatttgggcaagaaaggcccgggcgcgatgtccatggccgaggaggggagtgaggccgaggaggggagtgaggctgaggcgctcgagaaagacggcagcaaggcttcttcaccttcggggccaagcggtcttgaggacgaggagctacaggtgcaggatgcagttgccagtggttccaagaggagcaaagactccgccgccgccgccacacgcagcgccaatgtcagctcgccctctgtggttcactctctccctgccatcctccctgctcccgcgcagcagatccagaggttaagcaagcaggattttcctcttgagaaggcagtgttagtatgtataccatacggatttcatagattaaagagtttggagtattcaaagcttgtatctcagtgcctaaacactgaatggacagctaccatagggcaaagtgaagaaacggaagagttgagcaagatcacattagagaataaggatattcagcttgatatcaatataagagaagaatctcggagttcttcacaacaagggaactttgacacagaaggtaccagctccagtgaggctttcttgcttggaacggttgcttcagaaaagatgcttgagaaactgaaacataaatctggaagatgtgagcctgctttagaaaaggctattgtggaactggagcatgataattttatgtctgggctgaaggtcgtgtttgatcgagagaggaaggtcttgggctggaaaaactttgattgttacagcgtgggcaactcaagaagcaaccttccagtgaacccaaatccttctggtgttccccctgcccctggcttgggaccgaacagctacactcactcctga

SEQ ID NO: 10256 - DNA, 1446 bp, Zea mays
  Peptide Sequence Number=SeqID_53631
atggagcacgtagttgggggcaagttcaagcttgggaagaagatcgggagcggatcatttggggagctctacctcggcgtgaacatgcagagtgacgaggaggtggctgtcaaactggaatcggtcaaatcacgacatccccagcttcactatgaatcaaaactctacatgcttttgcagggtggaactgggattccacatcttaagtggtttggggtggagagggagtacaatgtcatggtgattgatctgcttggcccaagtatggaggacttatttaactactgcagcagaaagttctcccttaaaacagtactaatgcttgctgatcagatgatcagtagggtagaatacatgcacacaagggggtttctacatcgtgatatcaagcctgataatttcctcatgggtttaggacgtaaagcaaaccaggtatttgtcatcgactatggccttgcgaaaaagtatcgagatctccaaactcataagcacataccatacagggaaaacaaaaatctcacaggaacagcacgatatgccagtgtaaatacccatcttggagtagagcaaagcagaagagatgatctggaatctcttggttatgtgctgatgtatttcttaagaggaagtcttccttggcaaggcctgaaagctggcacaaagaagcaaaagtatgatataatcagtgaaaagaaaatgcttacaccagttgaggtcctctgtaaatcgcatccatcagagttcactgcatactttcattactgtagatcactacgatttgaagataaaccagattactcctatttgaagagactcttccgtgacttatttctccgcaagggtctgctaatggactgggttgaaatgtgcttgcttctcaagtgggtgtactttggatgggtgggaatagggtaccaactagattatgtatttgactggaccattatgaagtatcctcagtttagagataaaaacaaatttcagtctagcggcaagactagtgggttggcaggcccttctgcagaaaggaccaatagaactgcagctgaagctttgtttagaagaactagatccggttccggtcacaatcgagaacacaccaagcacagaagtcttctagagtcactgatgccatccaaggtgactgttgattcggataaaataaggccatcgtcatcatcgcgcaatggaagcacgtcaagaagagctgtgctttcatcaagcaaaccaagctcttctggagatccaagcgacccaaaccgcgtgggcggcttggccccgagtagcagcatacgcccattgagtgcccaaagggcacatcattcaggtggaacagagatcaaatcattatcttggtcaaaaatgggaaggtcttcacatgatgacgctatcaggaacttcgagttgctctcactttgtgctgacaagagaaaaataaggaactaa

SEQ ID NO: 10257 - DNA, 165 bp, Zea mays
  Peptide Sequence Number=SeqID_53632
atgcagttggttctcctgtccatgaacaattaccatctcaagggaattaagaagatggccatactgccagaagtccatgggtttgctagtgcttcctattgcaagtatagctcttatgagaagccaacagttgtagcatttgtacctgctgtaactgatgaatag

SEQ ID NO: 10258 - DNA, 897 bp, Zea mays
  Peptide Sequence Number=SeqID_53633
atgctctgccccagctcgcgtccgccgccgcgtcacccccgcctccccacgctcagcccctccgcccccctgcccgtgcgtcccctccccctcccttgcagcccctgccccctcacgctagcctccgctgcccacccccaccggaaatcccatcccgccttgcccatccccgcaaggagagagagggggggagagagaaggcaccattcgtgggatgtgttcgctgatatgtgttccctggccgcaattcgtgggatgtcccacccgcaccgggcgctggccgagcaccacgacgccaggtccagggcctccaccaccaccacatcgtccttgtcctcctccgcccgccgcgacgacgaccccgacccgccgccgaggtcgctcagggacccgccctacacgctgggccccaagatcttcgactgggacgagcagcgcgccgcctggcaccgccgccacccggagacgccgcccttcctcaacgacatcaagccacgagtgctgctcgtcacggggtcctcgcccaagccctgcgagaaccccgtcggggaccactacctcctcaagtccatcaagaacaagatggactactgttgcgtccacggcatcgaggtcttctacaacatggcgctgctcgacgccgagatggcaggcttctgggccaagctcccgctcatgcgggcgctgctcctcgcgcacccggaggtcgagttcctctggtggatggactctgtgccatgttcaccgacatggcattcgagctcccgtgggagcgcagcgctacgggccgtacaacctcatcatgcacggctgggacgagatggtctacgacgacaagaattggatcgggctcaacaccggcagcttcttgctgcgcaactgccagtggtcgcttga

SEQ ID NO: 10259 - DNA, 321 bp, Zea mays
  Peptide Sequence Number=SeqID_53634
atggtggagcacgccaaagtggaggaggagatggcgcaccggcaagaagcatccgctatcgccaccgccgccctcaacgcaaataaagaaggatccagagagcctcctctccctcggttgttcagccacacatcattgcgtcggcgcctcatcttcctctcactcagctgtctgccccgctgcctacagagacgcatggtggcggagagtagcggcagcggttcaagacgcttgctgatgagggaaggtcgatgtcctctacggtggtgcggaagaatccgagtgagtgagacggaggcagggaaagagatggaaagttag

SEQ ID NO: 10260 - DNA, 834 bp, Zea mays
  Peptide Sequence Number=SeqID_53635
atggagtctgggcagagaagtctgcgcggccatctggacaaaacagaggcctccacccatgttagggtcgatcgaacgcacgcgtttctcgtggacgcgtaccgccagcttggtgcgcgaaccgcccccttcgacacatccggcgaaggggtgggcctccgttttctcgggtggctgcaggaggaattggagttgctcctgtccatcatgaagggtctcatgtcctttgcctcgctcattacctgcgagggggctacgaatgctttgtcccgtgagggatgcaggcatttcaaagtctttgatcgggcaactgaggacttcgaacgtggcatcttccaggtcgaagacaaggtgctaaagcggtccgctggggcgctttacgacaggatgtggggccctcacggccgtgacactgtttgggagaggtccgaccaggcgctggagcaggttccgacgttcgggcctgcgcaagcaacccctactgaagttgatattaattttttggcggctgcgagtgcagtgcctgttaatgataattcacctggttctgaaactgagtcttggtcgtcggacgtgggtgattttgagatcccgttttcgtggattgaggagtcttctgatgaagatttagattattttgctatgttggatgtggtcacggcggagtctttgccgcagcctgaagcgcgcaaagtgtcggctcccccggctggggcgatggccgaagagcactgccggcgaaaggtggtgtcgaagcacaatgttggcgagatgtcgcgaagtggaaggcatcgacggatggggacggaacgatcccgtcttcggctagactga

SEQ ID NO: 10261 - DNA, 621 bp, Zea mays
  Peptide Sequence Number=SeqID_53636
atgtcgacaatgtcgaatgtgacctgctcacttcgcgcgctgggtgctacaccaaatgacagtgggagctctatcttgccaatagggaaaatcccagcctgctaccctgcagttgatcaccatggcgtctgcgtgtggaacgctgcgcaagtcaacgtccctggcatcgaagaggcggtggtggtagaacctgcacctcttaatggtgctggtaagcgtggttgggtggatgctggatttgttcgttgtggtagggttgttggtgatgtcttcgccgtgaaacaagcaacagaaccttcacaactgttgtgttcgtcctcagcctcttcctcttacgccgttgccacggccttggggggtattcctgacgacggttgggctctctggcagggtgctgattggctatggtgtgcacctactgattattgcgattgtctctaccggagtctggcggcgccggtctggtccaggttctgctggactgcggaggatccttgggcttcctctgagattcaaccttgcattgatggagctcctcagacctggcatacttatcaaatagctggtatagttcttagggataactcagcgagggcgtctgtatcgggtcggtacccatga

SEQ ID NO: 10262 - DNA, 468 bp, Zea mays
  Peptide Sequence Number=SeqID_53637
atgggcaagggtactaagcgcaagtgcgagccgactcctccgtcagaggatttcggtgactcggaatactcggaggaggagttctcctccaagttcgagggatccccggctcccgtctctcccccggcgtcgtctgatgtttcagacgactcccaggggattgccgcggaggtctggacatacatccgggccgtcgagcgctccgggctcgagggctcggatgagtccgagttctcctcggacgaggaggactcggacggcggcgaggacgaagatgacgacgacgacgacggcgacgacgacgacggtggcgatggcgacagtgacggcagcaacggcggcgggggcagtggcggcaagggcagcaccagaggcggcagcagcacggggagcaccagaggcggcagtagcaaaggcagcaccaggggcggcggcggcaagggcagcagcagcaaggccagtggctaa

SEQ ID NO: 10263 - DNA, 219 bp, Zea mays
  Peptide Sequence Number=SeqID_53638
atggcccccaagagagcaacttcgaaggccaccccatccattgacgacgcggcgaaggcggcactgctggtggagaagaaaggcaaggccctcgtggacaccacccccaagaggccttcgaagatgacactgtcaacagcaagagacagcgccaggaccaccctgtcgatgttttgggtccgaccgcacacccggggttacccctcaaggtgtttttag

SEQ ID NO: 10264 - DNA, 117 bp, Zea mays
  Peptide Sequence Number=SeqID_53639
atggcgccgtcacaccgtccagctcatcatccacctgaagctcaacctcccacgtgtgacacgtgctcttcaatgatgagaccatgcaaatcgtggcatatatcgaagtctgcatga

SEQ ID NO: 10265 - DNA, 312 bp, Zea mays
  Peptide Sequence Number=SeqID_53640
atgtggttcgcatatctctgcctcgcgctaggagcaccagaacaccggggcgccgctctccggcgaagtaccgccactggagccgtctccctagccaccactagggatggcaatgggtacccgctacccgaaacccggtgggtttttgctctattagagtatgggtttgggtcaatttctctacccatgggtttgttaatgggttcaaatgaaaacccaacagtgggtatgggaaacctgttgggtacccgaaacccgcatgggtatgggtttgggcaaaattttatactcgtcatgggtatgggtttttag

SEQ ID NO: 10266 - DNA, 693 bp, Zea mays
  Peptide Sequence Number=SeqID_53641
atgggtcaagaggagccaacttcttcaaggccatatgcttttgcatgtgatgcaaagaagaagggcaagaagaaggctcccactccaagttcctcaagtgaagaagaagaagaagaaagtgatgatgatgaagataatcaacccccaacatcatcctccgaggacgaagaaacagtcaaagatcttctctttaatattgataagaaaaagcaaagaaagagaggatgcttcacatgcggggagaagggccacttcagggacaactgtccaaatatggccgaacccaaaaagaggaggagcaaaggcaagacacttacaggtgtcaaaacttgggatgattcttcaagcgaagatgatcctccatggactcgcagccactgctcttcatcacgctcttcacggtcatcacacaaatgccttatggcaagaggtgatagcaatcaaggccaacaagcaagccaacaaaggaaagggggccaaacgtatctaggtgccaaaggagattatctcaaccatgaaaatcaccaagaaggtttggatcccaagaggaaagtgagaagtccgaaggacttcggggaatttggagacttggcaaaattgggatgtatatcatgggatgcatcatattggatcaagtctattgccaagtgggttagtgaatactttggacccaaattccccaccgttgactaa

SEQ ID NO: 10267 - DNA, 900 bp, Zea mays
  Peptide Sequence Number=SeqID_53642
atgatggatgctgagaaggaggtagcaacagaaagacggatggactcaccgcctcgatgcgattgtagagaccgtgctgtcatcgacgaagaccatgagaagcagttcgtgtgtccgaacattgattatgagacgaggaaatgcagttgggagagttacgacgacaaaggggaggtgatgcgcacaatagagtccaagagactaatgggacaaaagatgcgttgtggatctcagctcgtcgattcgtacattaacgatcgcatatgcgacatgcgtagggacgcaaaatgtgccttttatgacaacccgaagcgtgcaaagtataggaggttgaaggcggcagatgagaagagagcacaggatgcaagggaatgggaagcggcccgagccgagaaacagatgttggataatcttgctgatcgcctcaagggaaagattggatgtggcgtaaactatttggccgatgaggcgcatgcaagatatgttcaggataaaatggcgacggttgagctgatggaggaggaggaggacacatctagattgagtgagcttatcgctctcgcagaggcaggattacatggagaagaggaggacgacacatcaaggttgagtgagctcatcgcactagctgaggcaggattacgtgctcaagaggaagaggacgagtttatgtctcaggccgctgaagaggtagaggcggcttattacaagaagaagtctgatgaggctgaggatgagctattatcccaagttgcagatgaagcagaagccaattattacaagagaactgttgacaagtgtgatgcagggcaatgcagcaagtggaatgaggttgtcgttgaagattgcgtgacggatgactccgaagatgagttacttatagattgtgattgtgattga

SEQ ID NO: 10268 - DNA, 195 bp, Zea mays
  Peptide Sequence Number=SeqID_53643
atgtcggctgctggcctagtggtcgtggcgaagggtgctactgcgaagggcgacatagggacctcgacggacctatggtcgaggttctgtgccgtcgccggaggtgggggcgagcttgcctctaccatcactgctgctggcgtggccgcgtcagctatgcagcacctgaaatttgtgaccgccttcgccgagtag

SEQ ID NO: 10269 - DNA, 429 bp, Zea mays
  Peptide Sequence Number=SeqID_53644
atgtttctgatttcttggtccaactcgtcctcctggggtgttggactagtggccttcctcttctggcttcgggcctctcaaagagaaaaggtgtcttggttcgagtctagcggctgcagagcggcagcccctgtcgctgaagctttcttcggtggcatgacgaagctcatttctattctattatcatggaaaaatagaaatgatatcaaattacaaatgtaccttcggcttgaaagaaggtcccctacgtacaacttcggctctgcgccaaccttcgtattcttcgtacttcttcacattgtggttctgatccgagtccgaaggtacctgtttatgtattatactccagaaacattgttaaatcatgtttttgaggaccttcggaagacgaaggcccccaacagatcctccacaaccatagttgactag

SEQ ID NO: 10270 - DNA, 217 bp, Zea mays
  Peptide Sequence Number=SeqID_53645
gtaaatatccttcattcgattatatcagtgtaacaccaccatatctggaggtcaactatagcacactgctcgcccaacttgcaaggtcaccattggttggaaaagactgcttcatcctagttgagtacccgctgaaaacagacatggctgaatcatgcggaaaccttgtacagtcgtcgctcacttattaccaaatgctgcagatagctgacaggag

SEQ ID NO: 10271 - DNA, 879 bp, Zea mays
  Peptide Sequence Number=SeqID_53646
atgggggggggcctgcggaacaacagaagaccggcggacggctcaccgtcgcccgctccagcagcagcgacaacgaccccctctacgggtggccaaactgtagcggcgacggcctcagggcgaacgctgctgcaaccttgccctcgcccatgccgacgctcgaggggcgaggacaagtacaaagagtcggaggcccgaagcgcggatggtggcggtgatcccatcggcgacggggacttctcgagccgcctccgcctcggcaccaacgacaggggccgtcagcccgccggtagatccccactcggatcctcccggacgagcagggcaccgacctcctcgcggaggctccgtaccggagggggcgccgggggccaagccgacgagcccgacgcgctagggctgacgacgcctgctgtcgaccggccccgcgttgtcgaagtccgacccgcccgcagggccagcgagcgccctctccctcgaacgccgcaggagagggtgacccacgaacccgcgtgggaggtagagctccggctcagcccggcctccaccccagcaaggatgatgaacatccttgaagctgagggtgggaccaagatcgcagcccggcttgcttctccccacccaggggctggtggtcaccgtcttggagaccgggaaagggggataccccaaaaaggatccttccccgagaaggaaccgggctccgagccccccctactgatcagaggttcgaaggctggcccctcggaagggttcgacagccgcctcagatcgcgtgggccctacacccactactggttagaggttcgaaggccggcccctcggaagggttccacggccgcctcaggctactcgggctccgcgcccactactgattag

SEQ ID NO: 10272 - DNA, 681 bp, Zea mays
  Peptide Sequence Number=SeqID_53647
atggcgtcctccactctgccagcctaccccttccgtatgtctcttcccggactacgagccccggaccctgctaaggttaagcacgtatccgttcgagcccccgctcgccgtcttcccgttgcagcctccgcggcaccatcaggcgccgcggcggcggcggcgagggagcgcaggcgtttcctggagagctacgggctcaacccaaacgacttcgaggaagatgcagaggagaatccgagggtctactccaattattctgaacttattcgtaatgattgtcgctgcgaattggaagagagaaaggacaggcggagacgtcggcagtcggggagaggggagcaaactgcggaagcggcagtgactccagcgaaggtggaggagcctcgggagactcacaaaatgctccaggtgctaggtggaaaagtccgcagaaggaaattactttcacccaaagataggaatgtccgtccaatgatggaagttgtccgaggagcagcctttgacattttacaggcacatttcgttgagatggatccttgggtcatctctgaggtcctcaaaccaaatctggagtgtactggatttattgacgtgtcacagatacatatgctccgcgttgaaaaattcttggccaatgccgaaaaatctcatggtacgaatcttcttaggaaacacatatga

SEQ ID NO: 10273 - DNA, 663 bp, Zea mays
  Peptide Sequence Number=SeqID_53648
atgcctatgactcataactcctctgttgtggactgcgggtcgattccatttaaactaggggtctcttttgcaaagatgcaccgcgaaggggtatcaacagatctaggccatccgatcaggcttctacggtctagattagatctccatatttacacaaccagcgcgcatgatggccacaggatccgcgatcaaaggcccagatttaatgcatcctgcgatccgacttctaccgtttatcgcaagatcaacgattcagctgcactcgctcaaatccgatcgcccatcaacgatccgaccgtccaacacccatccgacggcgcaagtgtatcttcctccctcggatacaggcagcgaccaggtgctgttagtggcacggccgacgacggacacgccatggccatccccatggacgccgccgagggtacggggagcgccgcagccgccacgcgcgtccagagcccggacgactcctcccgcggtcgccagaccacggcgcacagctccaacttcggtttatgggtggagggtcatcggatgcggtcgttctatagtgcccaggtacgaggtccgagttggagtcccatatcccaaccataccgcgacgaaatcgcagcaaaccaggaaatgggccaaattgagggaccgaggcccaggtcgggttag

SEQ ID NO: 10274 - DNA, 291 bp, Zea mays
  Peptide Sequence Number=SeqID_53649
ggagctggttacgcgacgcctccccagtacgcggtgcagctgtttgagaagcaccgagtgccccgctgtagggacactatcgaggtgattgctcttcacgggctgaccaccttctgtggttttcaccccttagagctgtctactcatcccattggcttgttccctgctaaaaaggagaacgacccaatgtggaaagacagagtggagcatgccaaggatatctgggctctttacccagggcagactgcgcacttgacggttcgatgcatggatgctctatatcgtctgcag

SEQ ID NO: 10275 - DNA, 645 bp, Zea mays
  Peptide Sequence Number=SeqID_53650
atgctgacgctgtccgtgagaaatcggcctccgacagcaagtgccgcaaactgtcggagaaggtggccgccctggagaaggagaaggctgacctccggcgccagctggcgggggagaggagggaggccaacgaagccatcgccaaagagcaggctggcgcgggcggaaggcaatatcgccaaggagctcgccggagagctgcagcggcggcttactgccctggagagccgcgcggagggggccgaggccgcgatgcgagcggaggccgaacggacgcgcacgcagctcatgactgcataccgcgagctaggtgtgcggacgggtgacttcgaggtgccggagcgagaggccggacttcgctgtctggaatgggtgcaggaggaactgcaggagctccccactgtcttggcggggttgatggcgttcacctccctggtcacctgcgaggcagcaatgaacgcgctctctcgcgaaggctgccggcactttgaggccctcgaccaggcagatgaggattttgggcgagatatctttgaggtcgaagaccccgtggtgaaggaatccgccggggccctctatgaccggatgtggagttcatacggttgtgaggtggtccgggcgcgggccgaggctgcgtgggctcag

SEQ ID NO: 10276 - DNA, 405 bp, Zea mays
  Peptide Sequence Number=SeqID_53651
gaagacaggctgcctggttgctctgacgctggtattgatttcctccttgctggttgttctgatggtactgctgctgctgctgaggaaactgcctctggtactgctgctattggttctgacgctgatgctggtgctggttctggtggggaaggtgtggttcatcagttgatagtggaggggatcaaccaatcctctcaagaagcgggcgagaaactcctccttcctcactatcatcagtccctcgggcacatggtagcgacgaaagttatccctgaactcctcccaagtgatagcttcagggttggcatgggtggcgaggtacttgttgacaatgacgatgaggaaaccaaggaagacgaggctactaaagaagtggagtccaaagaggaggtttctgaagagtag

SEQ ID NO: 10277 - DNA, 105 bp, Zea mays
  Peptide Sequence Number=SeqID_53652
atgggcgctcaacttctagatcctacgctgactcctactaccatggtccacctcaaccctaaaggaaagattcacttctctataccctccaacagtgtcctctaa

SEQ ID NO: 10278 - DNA, 621 bp, Zea mays
  Peptide Sequence Number=SeqID_53653
atgacgaactccaccttgcccgacccagggctcggactcgggctcggccctggaagacgacgaactccgcctcgcccgacccagggctcggactcggcctcggcccaggaagacgacgaactccgcctcgcccgacccagggctcagactcgggctcggccccggaagacgacgaactccgcctcgcccgacccagggctcggactcggcctcggccccggaagacgacgaactccgcctcgcccgacccagggctcggactcgacctcggcctcagccgacggtctccgtctcgcccgacccaagggctcggactcgaccccgacctcggaagacagactcgacctcgacctcggaggagcctccacctcgcctgacccaaggctcagaccgaccacgtcacaggaggcgccatcattaccctaccccaagctaactcaggctacggggaacaaagaccggcatcccatctggctcgccccgataaacaagctccagcgctcctccgacggcaacgacaccacacgaaccgggtgccaaaacctctccggctgccacgacggcatggccctcttacagagggttggccgcgcggggaaggacgggacggcgctcgcgtaa

SEQ ID NO: 10279 - DNA, 708 bp, Zea mays
  Peptide Sequence Number=SeqID_53654
atgcaggcggcatgcaaccgcaccaagtcggcgcaccctttcgactccaacgcgcccagcatgggggcccaggcccacacgtcatgcaaccggcgcgccgtttactacgtacaaggaactgcaccgccactcgcgccactaccgtgcctcctcgactgcggaaccagtaccacaactcgaggcaaccctgtgtatgacccaacagcgccagccaggcacatcggtcatgggtcagtcagccacgggagaaggcgcgacggtcgatacggccagaaatgggccggcagtaatggcggtggcaggcgggcggaagcagcgggaccggaaaagggggataccccgaaagggatccttctccgcgaaggaaacgggccccgagcccccctactgatcagaggttcgaaggctagcccctcggaggggttcaacagccgcctcagagcgctcgggctccgcgcccactactggtcagaggttcgaaggtcggcccctcggaagggttcaacggccgcctcaggccactcgggctccgcgcccactactgatcaggggggctcgggggctgctctcgcaaacctggctccggccaacccgttgacagcgtcaacataccagcccgagaacttgggacccgaccgtgcacccaggctacggccagctcgcatgagggaacaaccagaccggccgaagcatcgcgaaacgctttaa

SEQ ID NO: 10280 - DNA, 156 bp, Zea mays
  Peptide Sequence Number=SeqID_53655
atggcgcttccccccatcctccttgcgaaaagtcgacagggccgaagtgaccgcagtcacttcgccgctccactgaccgacctgacaggaatacagcgccgcctgccctgctccgactgtcgtgccactcgccagagtgaggtcgacaacggctaa

SEQ ID NO: 10281 - DNA, 255 bp, Zea mays
  Peptide Sequence Number=SeqID_53656
atggactccgcctcgcccgaccctagggctcggactcaacctcgacctcggaggaatcgccacctcgcccaaactcgagtccagaccggccacgtcgccaggggggccatcattaccctgcccctagctagctcaggctacggggaacaagaccggcgtcccatctggctcgccccaggctccggcactcctccgacggccacgacatcacatgaacagggcatcaacacctctccgatagccacgacggcatga

SEQ ID NO: 10282 - DNA, 429 bp, Zea mays
  Peptide Sequence Number=SeqID_53657
atgtacggctcgacggtggggatggccggaatcgctcggtcgacgtgcgcaggcgggtgtcctcgtcgtcggcgggaatcggaaaatggttcagtggattacccggtccacgcactcccggcggggttttgtgactccgacgaccgtggactggcctatccggcgaagcaggcttcgattcctcgcttggggagcttcaccgaggtgtgctcactcgtctccgagggttggacggggttgggaaaggctaggctggccggtccacgacggcaggggctcgggtggccgcggacacgccgtgcacgggcaaacggcgctcacccaagtcgcaaacgtgcgaatcttggcaaaaatccggcgcgagtcttttcctggcacctagggctgtctctcatccgtgagttgccatggcagatatggcctaagtag

SEQ ID NO: 10283 - DNA, 2094 bp, Zea mays
  Peptide Sequence Number=SeqID_53658
atgacgagcggggtagggcgccaagaatggggcggggtcagacgccgtcacgtcgagaacggggtgtcaagccgaactggctcaagcgacgtcgaaaagaatgaagccggacagatagatgggggtcatgtccagctttgctccgtcggtctatccctagaacagctgcccaccccctaccccaccggcaccaccgaccaccgtgtccgccgccttcccttcgcctcccccaaccccgcggctgaccagcgccatgcgcatccgccggagggcctggatgccatcaagcacaaagggtacattgccgaccgggtgctggaatccgttgtcagggccgacgagcgcgtcggcctacccgagcgaccgcctgttcccgaagttaaaaaatgcaagattgatcatgtacctcctgtgaataaagcttgtgtgggactgcaagttgtgaaacttgccgcgaaaccggaaggtgctgctcctgctagtgaagatgctgctgatcctgcaactaaagctggtgtttttgttgtcaatgatgctgctattgagcagggagttaaatgtatagcttctctctcaggtggtgcctccaagatggaggttacagtggagaattctcttgcaaatggaccgaccactgaattagaagtttccaattctcttgcaaatggaccgaccactgaattaggagtttccaagggcacgtcccttgctaatgaatcggctgatctgccaggggttacatgcattatgccagaagttacagacaaacctgttactgatctaggggttataagcaccgtggtggaagttagtgatacaggtcctgtcgttcatgaaactactgaactggaatctgcaggggaggattatattgctagtgaagccactgctgaaccagaagatgctggtagagcttcttgcaatgtagatgacactgctgctttagatgagccacagccgcctaactgtgatctgtacttaggcaatgtgcaggatggaaatgctatagatactgttaccagtacactgcagccttctcgatgtgatgctgcagaaggtggtggttctgtgaatttcacaaccaatattcctgttagagccagaggaccaacctttaagggaggagtgctgaaggataaatctgttgcacccagtgttttacttgtattggacgtattgactagaagcattggtaaatcagggagaacagatgttatttgttatgctaggcgaacaggtaagaggaaggcagagctgctgaaggtaaagaaggaaaatattgacttagaagatggtgttatatgtgagaaagaggagacactggtgagcactgatcgttgtgaatgtgtcttgtcaacagctgggtccatagatgttaaacttgccgacataaagaaagaccttatggataattccgctgtaggcaaggttaaaaagatgaagagaaatagatttgaatgtaatattgattactgccacatggtgttcaagacagaagctgagcttgctgtccacaagaagaacatgtgcacggtcagttcatgcagcagacatttcagatcccacagatacctgaggcgccaccagagtgcacacaacgatgatatgccttacaagtgcccatgggatggttgtaatatggctttcaagtggtcatgggatcgggctgagcatttcaaggtccatgctggggccaagccttacaaatgcacgacgcctgggtgcagcaaaatatttaagtttgtttcagatttcacccggcataggaggaggtgcaaacctcagaggtgtctcttctatgcattccaagaagaatccactaaatattatgtgacactgtcaatttggaaattactatgttgttcgtctttaccaaggaaaaaagatgtcagcaaactgcgaggtcgtcggaatgtgaagaatacgaatatcctcaacgacaacacactcacggatgaagtgaagatcgatctcaacatgcttcatgtgttggtgctgaatcgggttgacagagaggtagacaatgctgacattgtcgtagtagataaatgtgctcctggtgagagggtcgtgaatcctggaggcgttgactga

SEQ ID NO: 10284 - DNA, 1077 bp, Zea mays
  Peptide Sequence Number=SeqID_53659
atggctcgtagaagatcccaaaagaacaagaagactcctccaacgaacgcaactcaaaaggaggtaactcttgagatattatttgatgattgttctaattatgattcatggtctactagtgtgataaatgcctttagaaccatacatcctcaattagaacaaattattgacaagagtattttcccctctagttttaatggaaaaattaattccgaggaggatcaaagatgttatcgcttaaactacctagcttttgacatcttaaacaattctcttagcaaagaagattatcgtgccttcatatcaaactatgacgaatccattcccgatgcgcatgatatttggactagaattaaaatcaagtttgatgagtccaaacataatagttcatttaatgcctcaacttcctttagtttttgtgatactaacccttgcaaggaagaaggagaaaatgaacgatggagaccaaacgatgaatccacctctccaaaagctaatgaaaatgatagcggaagcacaaacgaggatgaggaggaagaaagaagctttgtgcatctctacgctcgcctaagccaagaagataaggcggtcatgctcaaacttctagaaagagcgagagaacaaagcaaagctcgtcaaaggctagaagatattctctccataaagatgcaacactttgacgagttgactaaagaacatgaggagctaaagtgctctcatgttgatttggtccaaagcaaatcttcctttgagctagaatttgcaggaacaaatgatgattcatatcaaaagctcaaagaagaaaatgagaggctaaagaagagcttgacacaactaaaagggaaatgcattgcccaaccttctcaagataaccgtgatcacatggtgaagaagcttgagacgggaacaaccgtggcatgcactacatcccttgaagaaaatgtcaaggatttgaggattgccatgaggaggaaacaaaaaatgaaattcaacacctcctccaaaagcctcaaccacgcctccacaaaaggtaacatccaaggcaacccaaaattgcaacttgtgctagaaaggtaa

SEQ ID NO: 10285 - DNA, 444 bp, Zea mays
  Peptide Sequence Number=SeqID_53660
atgggtggagtagtggaagatggaggctgtagggtgtacaagggcctaaagctatcacgtcaggcgaggaggcttaaggagaatgtccccattgctgacaatgataagaggaaggatgagatgggtgagcaggatgggaagaagaatgctgccactagagctggagttgaagaacacaatggctgtgtcggagcgaggctaagccccttcgtgttctcctcgaggacgaggttatggacgttgtggaaggacgagaatgggactgatcaggggacagcggagcagagcgaggggcctcgaccggtggtggggctggtggtggctgcccctagggaagtaatgggtgctgctccaacaatttcagcccacgattggctaggaagaggagggaaggagggagaaggcgcgccggctgccacggggaggccggtggccactggctag

SEQ ID NO: 10286 - DNA, 768 bp, Zea mays
  Peptide Sequence Number=SeqID_53661
atgcagcccggctgcacccctccactggcggtcacccaagatggtgacctccagtttgatggtggggggaagcgagccgggccgcggcctctgcccctccctcagcctcaaggattttcatcatcagggctggggaggggagtgtgccgagtcgggaggccgcctccacgtgggtcggtaacccttttcttcccccggcgtctgggggagaaaggcatctaccagctctgcggaggcttcccccaggcatgccgggctaggcggaccgccgctgctcagccagggtgcagcattccgtcctccgtccggccatgtccaggccttcctcgcgccgacagccgcatcagtgggtcgcccagcacgtcgcgtgccgcgagggcggcgctcatgttctgggcggctccggcaagggcgaggacctgccggcgcgcttcgaggcgtctggcgcccgctggcgcggtgctgaggtggtggcagccggagaaggcttctctgtcaatgagattgccaactccggccgcacccctgggcctctgtctccagcctgaatggctggttctcgtcctcggtgaacgagagcccccgtgccgtagcgcccgcccggaagccgctgctgaagctgcttcgccgcccggggcggaggtcaccattgctgttgccggaacgggcgacggagagccacccgtcggccttctgttgctccgcaggccccccaatcgcgtggggttgctcgtacctgcggaggtggaaccggagttccgtttgtaa

SEQ ID NO: 10287 - DNA, 435 bp, Zea mays
  Peptide Sequence Number=SeqID_53662
atggcgcagccggctccggcttcccaggcggcagagacgatgaagaagacgctagaggatctccgggcggagcaacgcatcggggtccagcatatcaccgcatgggctgacgaggcgagctcggctctggtgccgctaggggtgagcccgatcccagtgtcgaagcagccagtgtccatttccgacgcgctcccggtgttggatttcactgctgaccgcctccgacgcctagatcagatccttggcgcccgcttggaggctgagggcagcaggctctgccgggcggtgatagaatacatcctgacgtgcttccggagccacgacccggccatctccttggggccagtgatcgccggtccggtggccgataccgaagacgccgctcgggggagtgtgcaggacgctgtagatgtggtggcccagcgtttccagtga

SEQ ID NO: 10288 - DNA, 1299 bp, Zea mays
  Peptide Sequence Number=SeqID_53663
atgccgactccagatctcgcccagcaactctcagtccctcgggcaagggcaagggagctacgagcagttcttccgcccctggtggttccgggagatcggagggggagaggcgacaccgactgcgtcgtgccgacggatctttcattggggacccgccccttgattcggacctctctcagaaacgccagaaaacagctggcggggtcggggaggctggctccccggcccagggctcgcagaggtgcgttagccctcctccaataccatcatcagtcccgccgccaccaccaccatcatctggcctgccaccgccacaggggcagcagcatcgacaacgggaacagcagcaaagccagtggacgtcttgcttcgaaggtcattggaaggtccagggccccaagcggcgccatcgggcccccaggttcctaccggtactgtcgaggcagcgttgtcgggcccccgggctcccaccaggagttcagtagcagcgccgccgggcccccaggttccggctgggactgccgaggcagtgccgtcggtcccctaggcgcccgccagaagtccagaagcagcgccgtcaggcccccaggtttcagctggtactgccgaggcagtaccgccagccccccaggcactagccgggcgcccagcagctgtagcaccgccaacggttacggcagacccaacgacggcggcaacgttgagtatgccttcggcaacggtggaacccacagggagccaaaggtcattcttgggcggcggctccaggccggtgccggtccggaaacaacgccgcctcccctcccttgggtgttgtcccgcgctcaccaggctctctgggagactgaagcggtgatccttcgggagtgggaggcactcgagactgagcgccatcgtcttggggattggtgcacccagttggagcaacgtaccaaggccatgtcctgccaatttgcttcagagcggtccgagcttgagcgggggcgtgaggacctcagggaggacctagagaaggtgatcgagcgggagcgggaggctgctcgggaggagaggaggctgctcaagaagaaagagcacttggaccaacgagaggtggtcgtcacagaatatcatgagaagttgaaagcctacaatgcgatgcttgaggaacagtgggataagcagaccgctactgaggcgacactgcaaaagctgcagcaggagcttgacaacaaggctggcaaaatttctcttgccgaggaaaacctcagggcaaagggtgtctttctggaggagcgggcatcagatctcattcgatag

SEQ ID NO: 10289 - DNA, 444 bp, Zea mays
  Peptide Sequence Number=SeqID_53664
atgtgcgggtcgccgtcggggatggtcggagtcggccggtccacgtgcgcaggcggggatgctcgtcggcggcgaggagtccggcctgctcacggcgtgattgtccaattgaacgggtcagagagcttcaccagggatcaaggaaggggcgggcgaccgaagtccggtgaagtcgatctcgggcttccggtgaagtcctgtcgggtccgagggcttggaaagcttcacgggccactggcggggctagccgaagcactggctcgacttggggatggctggagtgggctggccacggtggccgaagctctggcgacgatggcgggcggaaaagagctcgctggagctaaggaggggtggttggccggtgatgagatatggagcccggaaatccggtatgtctccctgctcaaacccgaggcaaatccagggttttgtcgtgtctag

SEQ ID NO: 10290 - DNA, 1197 bp, Zea mays
  Peptide Sequence Number=SeqID_53665
atgaccgcgtcagtaaagggaccgataaagggggataccccgaaaaggatccttccccgtgaaggaaccaggctccgagcctccctactgatcagaggttcgaaggctggccccccggaagggttcgacagccgcctcagatcacgtgggccctacacccactactggtcagaggttcgaaggccggcccctcggaagggttcaacaaccgcctcaggctactcgggctccgtgcccactactgatcaggggttcgaaggctggcccccgaagggggaccgggtccggcagatcacccgcaggtacttttgggcgtgcctctgggcccctagccgacccctaacgaacggggcacggacgtccactcggattacccgctcgcagctcaccggagacaccatgttcggcgcccatcgagggcaacatggcgatttccccccctccttgcggaaaggcgatgcaagggcgtatgtaaaaaagccgagtctgtccctgatcgcctctcgtcctgtgcagaggctcgggggctgctctcgcaaacccggctccggccgaaccgttgacagcgtcaacataccagcccgagaacttgggacccgaccgtacacccgggctacggccagttcgcatgagggaacaaccagaccagccgaagcattacgcaaggcattaagacctcgaaggagtgaaaccactcctccgaggcctcgggggctacacccggcgggtgcgctcgcgcgcacccaccggaacaaaatgcaaccgagaaaggctggtccccttgcaaaaaagtgcgacgaaagcctccaagcgagtgctaacactcccttcaaggctcgggggctactgtcggggaccataattaggggtaccctcaagactcctaattctcagctgggttcggactccgccctggcctcagccgacgacctccgcctcgcccgacctaggggctcggactcggcctcggccacggaagacaaactcgacctcggcttcggaggagcctccacatcgcccaacctagggcacaggccggccacgtcaacaggaggcgccatcatcaccctaccccgagctgactcgggccgcaggaaacaagaccggctccatcgctcctccgacggccacgacatcacaccagctgggtgccaaaatctctccggctgccacaacggcatgtacttagggcgctag

SEQ ID NO: 10291 - DNA, 921 bp, Zea mays
  Peptide Sequence Number=SeqID_53666
atggcgaggtggccgcggctgagcgggacctcgggtatgaactacccccacaccaataagggccgcgggatagctggctccgagcggctcgccaccagcggcggcgaccacatcagcaccggcggcggcggccacccctgcaccgacgactcgccaagcagcggcgatcacctcagcacgtgcgccgctgcgaaaaggtcctcacccccgtcttcctacggggggggggggggcgacaacgaggccattaaagccaaagagccggaggtccggcagcaggtgacactgacggtctcgccagcggaggcaaccacctctgcagtgggcagcctcaccagcgtcaacaacagcggccacctgcgcaccagtgccgtaccggcgaatggcggccgccccagcgcgcgcgaagaggtcttcgctcccgtcctcactgcaggagtgaggacaagaccatccaagaacgcggacgccgcccccgcggcatacgacatcttgtatgacccccagtgcgaccgacgacgcgggagaagccgtggatgtgcccgacccacgcacggcgcgaccgtcacccatgcggtggacggacagccacgccccgtccaagcggcaggaggcagcgccggaggcggcaccaaagccgcccaggccgaggagccagacacgtggcagctgacggcgcctcagacggccggccccacgtaccctgagttcgcctccttcgcaaggctggcgaacgcccttctccctcgaatgctggaggaagaagcgggtcgccagcccatgcggagggcagggccccaactcggctcgccctcctccccagcgcggatgatgaacatccttgaagctgaggataggggggaggccacagcccggctcgcttctctccaccacaaggctggtagtcatccttgtggatga

SEQ ID NO: 10292 - DNA, 240 bp, Zea mays
  Peptide Sequence Number=SeqID_53667
atggctggaggacgtctccgccgcagggttggagggagattgccaccaccaaaagctggaagaagaggtggcccgccgacccgtgcaggagggaccgggaaagggggataccccgaaaaggatccttccccaggaaggaaccaggctccgagcctccctactgatcagaggttcgaaggctggcccctcgaagggttcgacagccgcctcagatcgcgtgggccctacacccactactag

SEQ ID NO: 10293 - DNA, 96 bp, Zea mays
  Peptide Sequence Number=SeqID_53668
atgtcggggttcagggtctctttgtacatgtcccccttcggctataaaagggaagaaatgagaatgccatattacatgctaagattgatgaattaa

SEQ ID NO: 10294 - DNA, 450 bp, Zea mays
  Peptide Sequence Number=SeqID_53669
atgaacaagttcaagaagaaggccctgcttgccgacatcgacgggaacgggaccctggactgcaaggagttcgtgacagtctccattcacctgaagaaaatccgtagcgaggatcacctgcccaaggtgttcagctacttcgacaagaacgggagcgggtacatcgagatcgaagagctgaaggaggccctctctccaagaggtgaccagaaggcgatcgaggacataatcctagacgtcgatatagacagggacgggaagataagctacgaggagtttgagctgatgatgaaagctggagtggactggaggaatacgtcgcggcagtactcgagagcggtgtacaacaccctcagccgcaagatgttcaaggacgcgtcactgaagcttggtagtaacaatggtccacttgctgctgcagccgtcaaagaacaacaagatgttgattga

SEQ ID NO: 10295 - DNA, 714 bp, Zea mays
  Peptide Sequence Number=SeqID_53670
atgcaccaaggcgggtcccacatcccaccaccaccaccatcagcgagcctccgcaccgcacactccccagcctctatccggtccggcgtgtccaagcgacgacaccacgccgccgagatgtggatctcagattccgcctttgtggagccctcatcttcctccccatccgcctctgcctccccgccgccgagcccgccaccagcacgccttctccgccaacgcaaccgccgccgacgccgcagcagccggaaacagggcagtgccagcgccgtcgacggcgtcgccgaccccgaggcggaggacgtgtggcgtggggcgcagtgggaggcggcgtggccggcgcggcgggactcgaaacccgtcgtgctcgcgggcggagacgacgcggtggggcggtccaggagcctcacggacgacgacctcgaggagctcaagggatgcgccgacctgggcttcggcttcaactacgacgagatccccgagctccggagcaccctgccggcgctcgagctgtgctactccatgagccagcgcctccagctggacgacgagaagccgcagcagcacgaggccgccgcaccagatgccgccacgccgtcgccgcctgtcaccaactggaagatctccagccccggtgacagccctgacgaggtgaaggcgcggctcaagtactgggcgcaggcggtggcgtgcaccgtccgcctttgcagctga

SEQ ID NO: 10296 - DNA, 735 bp, Zea mays
  Peptide Sequence Number=SeqID_53671
atgtcccgaccacttcacagtttgccgacatctttaccaagggctttcttccaccattttcacggagttccggatccattttccttttcatttgcatgtaagaagggagtggctgggaattctccgaaggctgacgagctggttttggccttgacaaatcatgacctattcctgtactttgggcatggaagtggaacccagtatatttctagtaaggaagtcgaaaagatagataactgtgcagctgctcttcttatgggatgtagcagtggaacacttcattgcaaaggaagttatgctcctcgaggggccccattatcatatttatttgctggttcccctgctatcattgcgaatctctgggatgtttcagacaaggacattgacaggtttagtaaggctttgctcaattcatggttgcatgacaaatctctagatggcaacaattgttcaaaatgttgccagctaacaatggagcttgagtccatgagtattgcttccaaggaaaatggtaaagcaagacgacaaggcacacgaggaaagaagcaacaacatataaatgatagtaccaagtgctgcagctgcaagcagaggcgaatagcttcatatataagtgaagctaggagggcttgcaggcttccacttttgataggcgcatctcctgtgtgttacggcgtgcctacaatcattaggaagaaagtaatgacggattctaccacgagagagatgacctaa

SEQ ID NO: 10297 - DNA, 294 bp, Zea mays
  Peptide Sequence Number=SeqID_53672
atgaagcctcaaccacagtgtgatactcgacctcaacgttggagcgggagacgaagggttgtcgcttcgaggaccaagagacgaagttggcagccaggaacacggcgtagccagtcgtggaccggcgcgtgtcggggtagcagcccaatcggcgttggtgtagaccaccagcttagaagtcggagagggccgaagaaggccaaagttgagggagtcgtgaaggttgcgaagaatccacttgagagcaatgaagtggggctcccgcggggtgtgcatgtgaaggcacacctgtag

SEQ ID NO: 10298 - DNA, 93 bp, Zea mays
  Peptide Sequence Number=SeqID_53673
atgagcggcaaggaacttcatgggttggagatacttgataagaaatgtttggtttacaggggtgacaaggatgatggttttgatatggtaatg

SEQ ID NO: 10299 - DNA, 252 bp, Zea mays
  Peptide Sequence Number=SeqID_53674
atggtcgctcatggaccatcaagaatcaagggtgatcaagggcatattaaccgaaaggttttgaacaatcattgggatatgaaggtcagcggtcctacagtcagcacggctttgataccacttatgtcacacccggttttgaaggaaaagaccaactggaaatgccttggctcgagcagccaagactttgctcagtctggagcaccggactgtccggtggtgcaccggacagtgtccggtgcgccaggatga

SEQ ID NO: 10300 - DNA, 450 bp, Zea mays
  Peptide Sequence Number=SeqID_53675
atgtcaccaggtcgttgggttccgactgttggcgttctgacttctgggcccgcctggatgtccggtggcgcaccggacatgaactgtagagtgtccggtgaagagttcagcgtgaagttccttggtgcaccggacactgtccggcggcacaccggacagtccgaatgcgatctgtttccgagctcgaggaatcgaagatcaagcttcgacgaccatgtgatcaagttcttcgagttctacgagatcgaagaccctgagcatctgtttggtgaaggcaagaactggggtgtagttcgcttcgccgtcgtgccgttaatggggctcggtgtatgcggctcgctctgccaaggtggtgacgaggatgatggttttgactatggtaatggtaaagaagaaggcatcgaggcggatctccaggagttccaggacttcgacgagttcgaggattag

SEQ ID NO: 10301 - DNA, 482 bp, Zea mays
  Peptide Sequence Number=SeqID_53676
atgggcgcggtccacaggacggacggggacctcaccgcagtgtttctcacggaccacggctgcactgcacggcaccgcctaccttggtgctctagccatgatgtggatcccaccagaaacgatgaggaaaagaagcgacgaaatgtgcgccatttaactagcgtcgcgtccttccaattcctcctctctgttgcaaacctctcctcactcactccgtccgacgcccttcgtcaccagcctccttcctcgcgccgaccgccgggatccggcgcccccgtctacgcccgcctcggtctaggtacgggccctgcttctgattcgggcgcctccggtatgcctgccatgcttgcgacgaaatcggcggctcggttcggcactgggtcctgctggactaggtcactagggctcttcctttgggatcctggccgtgtgggtgggggcaggaacaggcttgccttcgatgaaattcgggtgctcccgtg

SEQ ID NO: 10302 - DNA, 636 bp, Zea mays
  Peptide Sequence Number=SeqID_53677
atggcttcctcctcccttatgcgtcgtgtctttccatctcccaagcccccggatggggggtatccgccgcctttccgcctcctcgttggaggaacgcaactccatgggagttggtacctctcagccatcgttcggcttcaaggattttcatcagccggcccggccgcacccctacgccggcgatcacccaggatggtgaccaccagtttctgggtggggaagagcaagccgggctgcgatcttggtcccaccctcagcttcaaggatgttcatcatcctcgctggggtgggggccacgctgagccggcgctctacctcccgcgcgggtccgcgggtcccccttttccgcggcgttcgggggtggaggcgctcgctggcctggcgggcggtgcggacttagacaacgtggggctgatcgacggcgggcgtcgtcacctccagcgtgtcggagtcgtcggccgggctcccggcggcccctcctgccggagggcggccgccgcgccgtgtgcacgggaggaccacccacgatgtcgcacgctgctagggcggcgttcgtgttctggggtggccctgcttttgcactgggacggcgccctcgcgcagaggccggtgccccactcgtctgggaggatttga

SEQ ID NO: 10303 - DNA, 723 bp, Zea mays
  Peptide Sequence Number=SeqID_53678
atggggggtgtagcagagtgctacgtgtctagcggagagagagctagcgccctagggcgacgtgggggctcctccgaagccgaggtcgagtctgtcttccgttgccgaggccgagcccgagcccccgggtcgggcgaggcggagaccgttttggccgaggccagggtggagtccgagccctggggtcaggcgaggcggtgtttcgtcgtctcccgggtcttagcccgagtccgagccctggggtcgggcggagcggagttcgccgtcttccgggtcttagcccgagtccgagccctggggtcgggcggagcggagttcgccgtcttccgggtcttagcccgagtccgagccctggggtcgagcggagcggagttcgccgtcttccgggtcttagcccgagtccgagccctggggtcgggcggagcggagttcgccgtcttccgggtcttaacccgagtccgagccctggggtcgggcggagcggagttcgccgtcttccgggtcttagcccgagtccgagccctggggtcgggcggagcagagttcgctatggcgcctttggcaaggcctgactgcctgtcagactcactctgtcgagtggcactgcagtcggagtggcgcaggcggtgctgtccttctatcagactgctttatgctgatgggggttaccagctgagaattaggcgtcttgagggtacccctaattatggtccccgacagtag

SEQ ID NO: 10304 - DNA, 522 bp, Zea mays
  Peptide Sequence Number=SeqID_53679
atgaggaccctcgcctccccctccgcgcgcgtggcagctatggcgatggacgacctcgcgggcacctcctcctcctccaccaccatggcggcgactgcctcctccgacccctcgtacggctggcagacgatgtttgctgccctgcgccaggagggagaggtcaagaagcagaaggtgatggtcgccgaggtcgccgtcttgatcgacaccgagaacctcgcagcgcacctcttcgagatctcggcattgtacgagaatcaacaggacattcagttcatgaggtttgctgattactttggccgagcatttgcagttcctcgggcgactactctgggtccacaacagcgcctgaccccaccacatgggcgggtccggagccgcaacgtgtccaaagaaagtgatagaccccaaggcctcaacagtgagtccggacccccatgggagagtgtcgaacccctggatatacagtccggacctccaagattggtccaggacctccacgtgtgcaagccggacccctag

SEQ ID NO: 10305 - DNA, 576 bp, Zea mays
  Peptide Sequence Number=SeqID_53680
atgaacttgccaccttcgggaaatgggaggtcgctctgctataattcaccggactgtccggtgaaacaccgaacagtgtccggtgtcacaccggactgtccggtgtgccagcggagcaacggctacttcgcgccaacggtcgactgcaaccgcattcaatgcgctacagtgcgcgccagagtcagagcacgcgcagttggcgcaccggacagtctacaagacctgtccggtgcaccaccggacaacctagagaccccaccagtcagagctccaatggaccttcggccgctgtgcgatgagctgaagccggaggcagcggtgtcggtgcggacggaggcggtgtcggctcgaatagaggcttcgtcggcccgggagcaggtggcttcccaggccgaggaggtgcagcagcggcgactggagtttgaccaggtcatccgcaagcgggaccaaccccggagtcacgctgccgaggccgtgagccaggctgaggtcctcgggggacagctggctgaggctacgagcggccagccgaggcgttcgcttgggccgggacccttgcggagagcctggccgtga

SEQ ID NO: 10306 - DNA, 87 bp, Zea mays
  Peptide Sequence Number=SeqID_53681
atggagatcgccgtggtcgtgcacgtcgtgtggccggggtccaacacacagctcaactccttccagccctgcaccttctacgcctag

SEQ ID NO: 10307 - DNA, 771 bp, Zea mays
  Peptide Sequence Number=SeqID_53682
atggctgaaaggtacgaacttcctcgaagttgcgtccctccgacgacaaggcggaaggattgcgggcgtcccccatccgggggctcggaaggtggaaagacgcaacgcataagggaacgcgaagacatggtcgcttttcaagggggtcaccctccttttaaaggcgactctccctacttgcgtccccagccgtcgtgggctgagtcttctccaacacgctccaaggtcctccccctacgacacgggggttgggccccacgcgtcatgcaagctggtccagggcggaaggagccaaaccgccgcgcgcagggcatgcaactgcccaacggttacaagcgttcctccactttcgcccagaccagcgggagaagcaggcgacgcttcgccttcgccataatgaccgcgtcgaaggagggaccgggaaagggggataccccgaaaaggatccttctccgtgaaggaaataggccccgagcctccttactgatcagaggttcaaaggctggcccctcggaggggttcaacggccgcctcagatcgcttgggttccgcgcccactactggtcagaggttcgatggccggcccctcggaagggttcaacagccgcctcaggccactcgggctccgcgcccactactgatcagggcgggaacgatcttgtaacggaatcccatcagagggaggcatcgagccctcggaccctgtcaaaaggggaccaggtccagcagatcacccgtaggtacttttggagcgtgcctccgggcctctag

SEQ ID NO: 10308 - DNA, 522 bp, Zea mays
  Peptide Sequence Number=SeqID_53683
atgaataagacaccggcattcaaggtgccaatgcaaacggaactccggttccgtccccacagcagcagctatggccccaggacggacgcggccaccggaaggctctcgttcgcgtccccactcaagggacgcgaaccagacattaaagccaaagagccgagggccggtccgtgggcggcgctgacggcctcgacggggggcaagcttcccccagctgccaccacgtcagcacagacggcggcgtccgcctctccaccaacgccgacagttggcaaggcgcaccggcgggtcctcactcccgtcctcgccacgaaagcgaggagaaggatggaatgttgcatcctagctggacagcaacagttcgccttccccggcatggctagaggacgcctcctccacagggccggaggatggtttccaccaccagaagctggaagaggaggtgaccggccggcccgcacggggggaagagctctggctcagcccggcctccgccccagcaaggatgatgaacatccttga

SEQ ID NO: 10309 - DNA, 1053 bp, Zea mays
  Peptide Sequence Number=SeqID_53684
atggctgcaggcagcagattggtgagagagaggcggagcggcttcgcggtagagggcggcagcgcagggcatggaaggaggcagcagagtactaggtcatcacgggagaggggttttgcgttgagcctcctggcagttcaacatgagcgaactgcttatgagagaagacgggataaacaagtggaggagaatataaagaagatgcaagatttgggtctgaacaaatatacttctgttctaaataattctgtctcaccatctgcatcaacaaaggggaaaaatgcagtaaacaagataaataatagtttagattcggattcatatgtctctttctatctccttgacgatgatgatcaaggagatactgatgatgacactgaatattatgagcagccaaaacccctggcaatgaagtatcctagaagaggtagaaacacaacccttgcttcaaagaagaagatagaccccaacatggctccatgcattaggttcagcaagagagtgagggcaggtgcacaaccagaggagcaatcttcaaaaaggcttcactctacagagacagatggccacaatgtacatgaaccaacagatggaaatgatcacataccaaacagccctactacacctggacttgctgatcatttcagcagagctgcagaggaagccatggcatctactgctcatgacagtacaggtgatgctaaaggcaacagccgtactacacctggacttgctgatcatttcagcagagctgaagaggaagacatggcatctgctgctcatgacagtacaggtgatgctcaaggcaattctcatatggaggctttgagggctgaacctgttgctgaaggtgagatgccagcatccagtgtgcaccttgtgtcgaaggtgctgtcccagagcagctcacaccaattcttgaaaagtgtcggcatcaaaacatcggcaacctccaaggcatcatcatcaaatcatagtgagcttcgggaacaacttgcagctgaagcgacggctgctgttcaaggtgaactcgtgtcacacccggttttgaag

SEQ ID NO: 10310 - DNA, 111 bp, Zea mays
  Peptide Sequence Number=SeqID_53685
atggggagttatgatccccaggcaaaacgggaatcacgactcatgggtaaagaagaaggcgtcgaggcggatctccaggagttctgggacttcgacgagttcgaggattag

SEQ ID NO: 10311 - DNA, 291 bp, Zea mays
  Peptide Sequence Number=SeqID_53686
atggtggctgtttccatggagagagaacgaacggccaacgtgtgggggaagcagaggtatggctcgaggggacggagaggctgcggttgggagcgcgcgctaggccacgggaacagggcggttgccggcgaagcaacacgggcgcgtgcaccgtgcgcgccgggccacgaccgagcggggtggctaggccaggggagggcacagagcgcgggcaaggagctgggccgtgacgtgccgagcacgaagggcgggctgcgcacgtgctggctgctgggccggggagcggactag

SEQ ID NO: 10312 - DNA, 426 bp, Zea mays
  Peptide Sequence Number=SeqID_53687
atgccgagggctatcgacgcctattcacccaagcaaccaaccatcttctacctctcgctcacccgccgaccgatttgcgacacgccatcaacactcgccgagacgcgcggagctccatcaacgcttcgcgtgaacgacggcatgagaacgagatcctccgccgggaagagtacgacagggatcatggcatcccaactcggagtcaagccaccagagccgaatcaacgacagcctcgactggcggaactacccggggacggtcgaggaaccacaacaactactcccctccccaggacagacatcatccccgacaacaggaggacacatgcggagtgtccgcccttactccacgccttagggccattcaatggccccctaacttcaaggtatccaatgtcgataagtatgaacctaagcaggacctag

SEQ ID NO: 10313 - DNA, 1134 bp, Zea mays
  Peptide Sequence Number=SeqID_53688
atggcagccggcgagcatgctctggtcgaggagtccaccgtccctgtcgtctccgacgtcgctgacgccgccgccaaaccctacgtccggccggcccttttcctgcgcccccgcgcgggggacggcgcccctgcccctgctccgcccggcgacccgggccccgtcctcccccgcgggatcgaggcggagttcatgggctgggcgggcgtgccccggctgtggccggagtgggtggccaagctccgccggcgccacgagccgctgtggcgggaggtcgggatcctgggcggcatcctcgccagcacgtgccgggtgcgccaccaccaccacgagcgcgtgctgctgcagctcgccgccttctggtacggcgccaccagcaccttcgtcttcccctggggcgaggtcacgctcaccctcgaggacgtcgccacgctcgccggcctgccgctcctcggcgacccagtacgcgcgcccgtgtcggacagcctggagaaggacgtggccgcgatcgaggccgtccgggcggtgatgaaccggagcaagaagaagaaatcttcttacggcgcgtgggttaagcgcttcgtcgagcgcacgccggaggaggagatgccgccgcccgcgaccggtgacggtggcagagacggcgaggcgcaccagctggtcgagcatggcgctttcctctccatgtggctgtcccttttcgttctacccggcccaccgttcgacgtcgtccgccgggagatcattccgctcgcggcccgtctggcgcgcggcgagagcgtggcgctcgcccccgccgcgctcgccaccatctaccacgatctctccgcgctcaaacgccacataacctcgggcgacaaaaacggacccttcgtcatctcggcaccgatccacatcctccagctctgggtctgggagcatttcacccagctccgccctgaaacagtgggctcgtctactcctgatgatcatgacatgccaagggctgcccgatggcgtgaagctggaaaaaggctgagctccaaggacttgcacgcagtgctcatgtcaccgaaggggtttgagtggaggccctataaaaatagcaggttttttggtctgcacccagggtgcagtgagtactgtaaagagtga

SEQ ID NO: 10314 - DNA, 623 bp, Zea mays
  Peptide Sequence Number=SeqID_53689
acagcgcgttcgcgggcaacctgcgccggctcatgtccgtcctcgaggccagggccgccgccggcggcggcttcgacatcgccacggtgggcgccggagccggcggcgcgcgcgtgcacggcctggcgctgtgccgcggcgacgtggcgcgcgcggcgtgcgcgcggtgcgtccggtccgcgcgggcccacgcgcggcgcctgtgcgcgtccaggacggacgccgtcgtctggctcgacgcctgcacgctccgctactccgcgcgcgccttcttcggcgaggtcgaccgggaccaccgcgccgtcgcggcgctccgggacgcgaggccggccgagctcggccgcgaggtcgtcgccggcctgctgacgcggctcactaggacggcgtacctctcgccgctgctgttcgccgccggggaggaggacgctgcagtcggccagcagcagaggctgcgcgccatggtgcagtgcaccaaggacctctccggcggggactgcaaggcctgcctggaggctgccattgcgcagctgctggccaggggacgggcgccggagggcgccagggtgctgggcggaagctgcagcctcagatacgagctgtccccgttcatttctgactcctaa

SEQ ID NO: 10315 - DNA, 912 bp, Zea mays
  Peptide Sequence Number=SeqID_53690
atggaggaagaagaaaagcgatccaagcgcaagagctcaaaagaacacgcctcgggtaggaacagtggtcccagacgaattcacgcctcgcccgagggcctcctcaagcggcagatgccccctcgactctcccgaggcctggctcgggcaggcttcgttgagaagcaaccttggccataccgcctcaccaaccgaccgcttcgcaggcacattaaatgcgggggatgcctgacgccgtatcctgacacacgagccttagtcagtcaggccgaagtgaccgcagtcacttcgcccctcctctttactgttcgatatgacagggaaacagcgccgcccgctccgctccgactgccgtgtcagccaccccggcaacgactgacaacaggtcacggtcagccaccgagatcaagcctcgggcgccacaggaagctccgcctcgcccgacctcacgctccagcctcgggaggagatctccgcctcgcccgacccccggacttggcctcgaccccggtctcgggaggaatcgcgtcctcgcccgaccccggcctcggccacaagagaagtctccgcctcgaccaaccctgggctcggattgactgtgctgataggggatgcatcatttccctactcctagcctactcaggctataaggaacaagaccggcgtcccatctggcttaccccggcaacgggactcaggtgctcctccggcggccacgccatcacatgtacagcgcccaagctctcccccgacggccacgttggcttccaaggggctgcttcggtctggggcaccggactgtccggtggtgcaccggacagtgtccggtggtgcaccggacagtgtccggtgcgccaggctgcctcgaccgaagaggccactctcgggtttttctccggcgacttcggctaa

SEQ ID NO: 10316 - DNA, 1320 bp, Zea mays
  Peptide Sequence Number=SeqID_53691
atggctgacggcagagaagaagaaactggcgaggatatttctgcgtcattgcacagagctgaatcaggaccgtacccctttctgttgaccgcattcactttcccatctcccgcccaagatgaccaaaatttccctcctaccttatcctctcggctgctcacctccgcgtccgcccccaccaccacgcgcccgcccccaaaacccccacaaaccctagccgtcgccagcaaggaatggccgccctcctgcggctcgccgcaactcaacataaagaccctgacgcaggcgctggcgaaggcgtcggcggtgatagagaagacggtgtccacgacgatgcaagaggtgacgggcccgcgcccgttgcaggactacgagctgctggatcaggccgggtccggcgggccggggctcgcatggcggatctacacggcgcgaccacgggatggcgccccctcggcgccctaccccgtcgtctccgtctgggtgctggacaagcgcgccctcgttgaggcgcgggcgcgggcggggatgtcgaaggcggccgaggatgcgtccctcgacctcgtccgcgccgacgcggcgcggctcgtgcgcttgcgccacccggccgcccaacccagcggccgcttccccatcgccctcgtcatcgctgaggctgtggaggagcaatacagtggcatgcttctgtcggcctacaaggagatgaggctgctactcttggaatttctctcgattgctttaaaggaaggtgtagaactcgagacatcattaaattggggtgatgaactatatgatggtgaatcaaatgaacttcagagtattggccttcagtcaggagatgcctactcaccgcctgaaaattggtgtgcagaacgtttagggagtcagcgacctggcaatctccctctgcacgaagctgaaagagagaaagctgctaggaagcaggaagagttgcaagcacaactacaagctcaacaggccacacttgaagaaaaccaaagaaaacatcactattcaccccatttcgactactgtgccaaccaccagggtaagactaacaacagtaagtcacggcctctcccgagttcagcctcgggcgcaacagggaactctgcctcgcccgaccccgggcctcggcctcagccctggcctcgggagaaggtctccgcctcgcccaactccaggcctcagtctcggcctcgggagaaggtctccgcctcgcccgaccttagcctcggcctcaggagaagtcgccgcctcgcccgacctcggcctcggaccgactacgccataggggatacatcattaccctacccctag

SEQ ID NO: 10317 - DNA, 495 bp, Zea mays
  Peptide Sequence Number=SeqID_53692
atgggagaccctacaaatgtggatgcagccgatgctaaaaagattcctatgcctaatgtggatgatgatgatgactttaagccaccaaaaaagaagtgcaatatctcaatggatgccccaaataagacgcagaagctataccccagagacatgactcttcgtattggtccagacaaagaactcaaaatcaccaagcagactgtccatcagatattgggtcttccaaatttgggtggtggaaagccccttaatattgatgaagcgaacgctgcggcaacacttcgggcctccttgaatattagcaaggatgagtttgttatttcaaagctccaggacagattgaggctaggtcaggatgatgatctttctatcatatgtttttttattctcttcaaccggctgctattcccaacagctagctggtctatttcttacaatgaggttctacttacagaagaaatggagcgattcctcaaattgattggtgccatctaa

SEQ ID NO: 10318 - DNA, 765 bp, Zea mays
  Peptide Sequence Number=SeqID_53693
atggcgacggacatggatggatttgatcaaacagtgaatgtgaaggttgtaatggcaactaatagggcagatactctagatcctactttgttgcggctaggtagacttgacaggaaagttgagttccctcttcctgattggtggcataagaggcttgtgttccaaatgatgaaatttccatggattgcttcagatgttttcctgccactgtcattatcatttggcaaaaggatagcaaataccatgttgctaactttccccacagtcccagtaatatataactccaaagttgttcttatcttgaaaatgcctccctccgctgcattcacagagagtatgcttatatttcctagcatagggattcgtcgtgaagccagagtcgctgcccgacgggacgacgaacctgatgatctgtttagccataggttccaaacacttgctcagataagactacaaaaacaatcgaagcagttagcagagtggaacactgttgccttctcatctaaacttgcagctactaaacacaaagaggacaatgtcgagtgccctatcactcgactggttggcacaccccgctggaagttttttacttccaaaatcatgaagattatatgtgatcttgacaagacccctggacctggccgtcaggtgaagtacgacaatttggagtttaggaatgctgctgaaactacgtatgctgatgggcggttgcttggcaccccaaatgaacaggtgtggccaggtgttggcaagttgctcaattag

SEQ ID NO: 10319 - DNA, 390 bp, Zea mays
  Peptide Sequence Number=SeqID_53694
atgatggaaaatttcggcagcaaaacagtgcaaatagcaatgaatgctgtggtaacttcacaactacttgtcagtttatatagtgctgcagtggaccgcaaggatcaaacagtaactctgcaaggtgggaccgacacgcgctcggaagtcggatcgtttctccgcaacgagctcagggaaggtgttttttggaccttcggcttcccgaagctgaagaggcttttttcacgggtcaagctcgttacgaagaacgatctagcaccgcgaaaggggctactgttggggtcgtgcttcggtgcgccgaaggtctcacacgaagaagcagcttcggctgaagtcgtctccaagagatggccgaaggtcccttttcatggagcttcggcgttttaa

SEQ ID NO: 10320 - DNA, 345 bp, Zea mays
  Peptide Sequence Number=SeqID_53695
atgcagatagctgctgcgtattctcgaacttggagaggtcatcttcagaatctacttggatatgctttatcagtctattgtgtttataagatgctcaagagtgtagtctttaaggagtcaggctctgttgatcctgtaacaatgtcaataacgattttcctgagacattttgacattggcattgatgttgcactgttatctcagtacatatctttgatgttcatcgggatgttggttgtcatatctgttcgaggtttcctggcaaatgttatgaaggatctagaaggcgaagggttccggagacctgctctcctaatcgcagatgcacctctacgatcgggatga

SEQ ID NO: 10321 - DNA, 882 bp, Zea mays
  Peptide Sequence Number=SeqID_53696
atgccgttccaaccatttcccttccactgctgctgctgctttattgcgattgggtacgggccctacttcggcaagaaggtggacccggagcccgggcggtgccggcgtacggacggcaagaagtggcggtgctccaaggaggccgccccggactccaagtactgcgagcgccacatgcaccgcggccgcaaccgttcaagaaagcctgtggaagcgcagctcgcgcccccgccgcacgcccagccgcagcagcagcagcaggcccccgcgcccgctgctggcttccagaaccactcgctgtacccgtcgatcctcaccggcaacggcggcggcggggtaggtgctggtgctggtggtggcacgttcggcctggggcccacctctcagctgcacatggacagtgccgctgcctacgcgactgctgccggtggagggagcaaatatctcaggtactctgcatacggggtgaaatctctgtcggacgagcacagcacgctcttgtcgggcggcatggatccgtcgatgatggacaactcgtggcgcctgctgccatcccaaaccaacacattccaagccacaagctaccctgtgttcggcacgctgagtgggctagacgagagcaccatcgcgtcgctgccgaagacccagagggagcccctctctttcttcggcagcgacttcgtaaccgccgccaagcaggagaaccagacgctgcgccctttcttcgacgagtggcccaagtcgagggactcgtggccggagctgggcgaggacagcagcctcggcttctcggccacccagctctccatctccattcccatggcgacctccgacttctccaacaccagctccagatcgccgggtggaataccgtcgaggtaa

SEQ ID NO: 10322 - DNA, 711 bp, Zea mays
  Peptide Sequence Number=SeqID_53697
atggggtggggcacagtggtttacgagggcgcggtcgtcggctcgtcgctggtggggctcggctgggcggggctgtggttcctgaaccggcggctgtacaaggagtacgaggagcggcgggtgctggtgcagatcctcttcggcctcgtctttgccttctcctgcaacctcttcgagctcgttctcttcgagatcctgcccgtcctctccaagcacgcgcgcttcctcaactggcacctcgacctcttctgcctcatcctcctcctcgtcttcgtactcccctactaccactgctatcttctgctccgtaactcagggatgaggagggaccgggcgtggctcgtcgcggcgctctttctgctggtcttcctatacgggttctggcgcatggggattcacttccccatgccttcaccggagaagggtttctttacgatgccgcagttggtcagtaggattggggtgattggagttagtgtcatggctgttctttctggttttggtgccgtcaatctgccatacagttatctgtcgctattcatcagggaaattgatgaaacagacatcaaaaccttggaacgccagttgatgcaatccatcgagacatgtactgctaagaagaagaaaattattttgtcccagatggagatggagaggattcaaggatcagaggaggcacttactttactagccctgctttatgtttcatag

SEQ ID NO: 10323 - DNA, 1788 bp, Zea mays
  Peptide Sequence Number=SeqID_53698
atggagcaaattttgactgatctgcaggcgctcacgaggctatacggcctgcttcacagtccagcagacgaaaatttagatgaggcatccagggctcttctgatgaagatactagaagatgctacccaggaggctgtccggaggcaggcgaagatgctaatgccatcaggttctctaatgtcccctgtgctagagagagagctctccacacaatcacactgccggacacgccatgccgatccaatcctgaggccactggcctcgccccgccccagcctcctggccagtgagcgatcgcgccggctagacccgcaacattctacagtgtcacgccgatccggcctctacgccgacggccagcgccatgcagcggaagagcctcctccccttgctcgcctcgcctccaaccgctcgtcgagaaccgcattgacggcgcggcaccgtccaagccaagagcagcggtgccccagcctcagcctgcaccgtttccccgtagctggaacgtcgagacatggcacggtgatcggaagtactcggcttgcccgtcgccgggacagcatccgtcacagctccggtcgtggtgaccagtggtcgctggaacgcagcaatagcaatagcagcagcagccgccgttccgtgtcacggcgagagctgtcgtctctgcggccgtcgtcaaggctgcgtggccgcgccaccccgcggcacgtgggaacggaaaactcctcctcggtgtctcccttcgagaggctggactctgggttgtccctgagcttgacgtcgcgtcatggcgtggagcatgccggacgcggcgtggctacgccggaacgctcttcctcgagcaagacggtggcgaccattcaaagccgcatccgaccaagcagtactcctctcagggagcgctccctacaccgacctgcagtagaagcgaagactctgcgcgggaggcaacaagacagccacgttttaagcgaggaggacacgtacagcagcatgttcagcggcagcggaagctcatcggacgccgccagcctgtccgcctccacgagcccgacggcgtcgccggcgccggcgccggcgccgcgtgcttctgctactccctactactactacccgtcggtggcgacacgtggcattgcgccaccaccgttgtacgcacctgaggtgtcgcgctcaatgaggaggcgacgtctccaggaacgtcggcaggaaatcctggagaggcgggtggcgcggctgcggatgctcaagaacaaaatcgccacggtgttccatgacttccatcaccgccacgaccaccaccaccacctcctcctcgggggcggccaggaggcgggtccctcgtccaggactgtcgtccgcggcgcaggccaccaccaccacctcgggggcggccaggaggcgggcccctcgtctagggccgtcgtccgcggcgcaggccaccacctcaactcgccgtggcagtaccttacgagaatgttccaccgcgcgaaagggaagatagacaagaatactaggagccggacggcggtaggcgtgccggaaaagaggcacggcgctggcggtggcggtggcgggaacatgcacgcgctattcgacgcgctgcggcggcacctgaagagcaagcggagggcaccggcaggcataaaactggggaggaagggcaactgggtgcggggcaagaagatgcattggtggcagcggctgaggcgacggcgcggcatgccagggttgacggcaggcagtggaccacggcggcgtttacgacatggaaaggcagcgtggctgtag

SEQ ID NO: 10324 - DNA, 837 bp, Zea mays
  Peptide Sequence Number=SeqID_53699
atggagcaaccctcgcttatttctgttcgcggtcgtcctgggtttctccgtctctctcttgggcttttcacttttgttgtacgcaaggggagcaagcgagagagagggtggggtggagcgcggcacgcggccgtggtgataacatttgaacttctgatgcgacctgggcatgctacttcgtccgcgatagcacccaaccgccggacgttttgcttcgccattcgcatgcagcgcagagcgcaggccggggcacttcaccccctggcccctggccccgcgcggccgggcatccacgatccattccatgcgacaggggtacacgcgcagcatctggtagataccgtagcctggccaggccaggccaggcctggaagcaaaacaacagtacagtgggccccccagattgaccaggagtcaaacgcagagctcctcataggaaaaaagaaaaaaaacaggaaatggcttcgcttgccagttgctaatatacaccgcaactccaaaaggtctgcaatgcagacgggtaagatcgtaggagcagatcatggacagtggcaaggttttctcaatgaaacaaagggaagctgttctcacccggcgacgtgtggggcagctagcgccctgcgccccgtaggcattggccacagccctgcacccccacatgtgcccaacgacgttgtccttctcgaggactgtgcaaatgtaggagtattgactattgaccgccttgacttctcgtgcacctctttactcttcacggtccgatatcaatccacggactggcacgctgcctcctacaaaccagaaccctaccgcgccgccgaacacactgggcagtag

SEQ ID NO: 10325 - DNA, 438 bp, Zea mays
  Peptide Sequence Number=SeqID_53700
atgccgtcctcctcttcttccgctgccactacgccgccgaccgccacatcgtctgaggagacgttgagtagcttgatggtggaggagttgcgcgccggcgactctattgattttggtgtgtcgcggatgacgtcagcccgcgttgaagatatgcagcggttgggctattttggcggcggagttgctcgtgctccggggacggaggaagtccctgagccggaggggccggacgagggccagcttgctatagttgcgcctggcgcggcgatcgcgacggccgccatagtgccgaaggcgaggggcgaggcgcttggcgccggaggcgaggtgtcggccctcgcgttggtcagggacgaggcgggcgtggcgacccgccggctgaagggggtgacagaggcactgagtcaggcgacagaggcgctgagtcaggtccgctga

SEQ ID NO: 10326 - DNA, 531 bp, Zea mays
  Peptide Sequence Number=SeqID_53701
atggagtggggcgagtttgagaaaatttcagaatttgaatttttgggatgctacatcgagagacttcggacacaacatgctgacgctgtcagtgagaaatcggcctccgacagcaagtgccgtaagctgacggacagggtggccgccctggagagggagaaggctgacctccggcgccaactggcggcggagaggagggaggcaaacgaggccatcgccaaggagcaggctgcgcaggcggaggccaaactcgcacgggcggagggcaatcttgccaaggagctcgccgaacatctgcaggagcggcttgccgccctggagagccgcgcgaagggggccgagaccgcgatgcgtgtggaggctgaacggacgcgcgctcagcttaaggatacatatcgcgagctgggcgcgcggaccggcgacttcgaggtgccggaccgagagcccgggcttcgttgtctgcaatgggtgcaggaggagctgcaggaactccccgctgttgtggggggatttatgtcgtacgcctccctg

SEQ ID NO: 10327 - DNA, 309 bp, Zea mays
  Peptide Sequence Number=SeqID_53702
atggccggcgctgtgcagctcgccggcgccgcgaagctccaccgcccccccttccctcgcgcgcctataaaagggccgccccgagctcctccttccccgcaccggccgcggccatccctctcctccctcgtccgagctcaattcatgggagagtcgccgccttcgtcttcctccccgcttcgccacaccgccacagacgcagtacaccacttccccaccccgatttctcgcccaaagctcaccgacggcaaccccgccgcgaagctccgccgcctccccgcgaacaaccccctccccgacctcctctga

SEQ ID NO: 10328 - DNA, 303 bp, Zea mays
  Peptide Sequence Number=SeqID_53703
atggacttgccttcgtcgaagctttcctggcacaagaagatctacttccggaagttcgggctccggcccttctaccggggctacgggttctggatcaacgggcaggggacggcgcaggcgcgcgaggagacgacgccgttgccgcgggcccacacgccagtgagagcggagggggagagaacggcgtcagcggttgacggtgggacgaaccgaccgttcgcgggggagggcccggccgccagtgggctcggcggcgattcgccgccggtggcctggttcttggacaatgtacaggtgccttag

SEQ ID NO: 10329 - DNA, 336 bp, Zea mays
  Peptide Sequence Number=SeqID_53704
atggcgtcgccgcaggccttcgtctggtgccgaatggagcgaagggtgtccccgcccgttttgtctctgtcagaccagcgactgcagcgaaggccccgagcgaagggtggcgtctttgccttcgccccaacactctacacaccaaaccccccccatccccaggttgtcagcattgcaaccactgctcaggagaagatgaagctgtggaaggagacttccaggagttccaagactacgacgagttctaggcgtgggttagcggcaacccccagtcggctgcctgtgaaggccgcggttatctacgtttcgttttcgcactttgatttattggtgtga

SEQ ID NO: 10330 - DNA, 570 bp, Zea mays
  Peptide Sequence Number=SeqID_53705
atgtccggtgcaccagaggactccagcgcaaactcgtcgccttcgggaaaatccagaggcaactccactacaattcaccggactgtccggtgtacaccggacagtgtccggtgctccaaggaagagcggcctcaggaactcgccatcttcgggaaactgcaacggctgctccgctataattcaccggacatgtccggtgtacaccagactgtccggtgtaactgcggggcaacgactacttcgcgccaacggtcacctgcaacagcaattaatgcgcgccagagcgcgcagaagtcaggcacgcgcgtagtggcgcaccagacactctacagtacatgtctggtgcgccaccggacatccaggcgggcccagaagacagtgctccaacggtcgaatcccaacgggtttggtgacgtggctggcgcaccggacatgtccggtgtgcaccggactgtccggtgcaccattcgacagatagcccccaccaaacggtggggctataaatacccccaaccacccaccattcattgcatccaagttttccacttctcaaccacttacaagagctag

SEQ ID NO: 10331 - DNA, 108 bp, Zea mays
  Peptide Sequence Number=SeqID_53706
atgacgagagatgatgatgcggcaggcacaatcaaagatacgaaggtgctcataggagggggtggtgctgaagagggtgaagaacggagtgggatggggttgtgttga

SEQ ID NO: 10332 - DNA, 513 bp, Zea mays
  Peptide Sequence Number=SeqID_53707
atggaggctattgccaaagagcacaagctatccaagaaccggtttgaatggaatggcaaatcagtccaagtttttgccaaactggctccgcttcttgcaagagctaacctcgtcattgccagggatattgagtgggcaaacatcatgtttgcttttgagcaggagagcaggtatatcataatggacccactctttccacaatctccagtaggttttattcgagagaaaagcaacatcatctttagacagctactcagaacaagacggccatttgttgcagaaataactgatgctatgggtaacgagatatttaaggttcgccggccattttggtggatcaacagctcaatttatgtagaagtgaatgataaggagatagatgttgagactggatcgaaactcagtgcaaatggtagacagaagcctcttggtgagatgtcgacgaattgcgaagttgtcgggacgcggagaatgcggacatcgtcgacggtgacgcgcttgcagatgaagtga

SEQ ID NO: 10333 - DNA, 1458 bp, Zea mays
  Peptide Sequence Number=SeqID_53708
atggcggccggcctgccgcctgctagattacacttcgacgaccacgggcatggcagagcacaggtagggttctcgtcgtcgttcgtgcgcgtggatgggtcaccggcctgctgctggccggaaggcggagaggacggctcccgtgccgcggccacgacgcctcacggcaaagaggccgtcaagtccctcacctcacagggggtgtcagttcttctttctgtagctgtgttcagcgtaatggacctcaaggacatggtgctcaagttctccggctccagcaagcagtgcagagggacgcccggggcccagtcgttcaggagcagcggcgggggcaggtacctccgcccctaccccagcttcatcgacgtcaccggcttcgcgccggcgaacaaggttctcggcaacgcattggcaggtgcaggcgccgccggtggtgcggcgcgaaccgcgtcgtcggatacgttggacctgaccaggagcaaccgcaaaaccccccagagtagcggatggattccgagcaccgaggcggcggcggccggggacgatgtcagggagtggacggcgcaggtggagcctggcgtccagatcaccttcggcaccatcccgagcggcggcaacgacctcaagcgtatccgcttcaggtgtgtcgtcgttacgcggccactactgcttcccctgctcaacgactcactgcgacgaccattgattcttgcaactgaactgactcctaagtgcatggtcgtatctcgtatatgctacgtacgtcgtcgtagtcgggagatgttcaacaagtgggaggcgcagcggtggtggggcgagaactacgaccgcatcgtggagctgtacaacgtggtgacgttcagcggccggcagcaagggtgctccactccggcgtcctccgtcgacgactccgcgctgagggactcgtcctactcccgtgtcggctcggcgagcaggggcagcccgatcacagtgccgccgccaccggtggcaagcaaagaacggctcgcccggagcgcgtcgttcagggcaacggcggcagggtcctcctcggcaccgtacgcggccgcgcattccgccagggcggcatacttcccgtccgcggccgtgcccgacccgtcggaccacgtgtgggcgcaccacttcaacatgctcaactctgcggcggccggcacgtccgcgatgggcggcgggggcccgtcgccgtacgacccgtcgtcggttgccaccgcgtcgtcccgggacgaggcttccgtgtccctcagcaacgcgagcgacctggaggccacggagtgggtcgaggaggacgagccaggcgtgtgcctcaccatccgcgagctcggcgacggcacccgcgagctccgccgcatccggttcagccgggagaggttcggcgaggagagggcgaaggtgtggtgggagcagaacagagagagaatacaagcggagtatctgtag

SEQ ID NO: 10334 - DNA, 396 bp, Zea mays
  Peptide Sequence Number=SeqID_53709
atggagccttctgtgcctgacggtccttttgagtcgcgaggactctcctgctgcgttcagctcgctgcttctccggtcgtctcggcgtcgacaggagttgggcctttgccacctccggttagagatgaccgtcaaaatgggaaccttggtgatcatgcccccaggacgagttcccagtggttgagcgacgctttggagaccctgccaaatgaggatttcgtggaagatcatgcttctgttatcaaggagtccaaggatcacgggtggatcatccaaggagcccttacggccagagtcatttgggagtttatggagttgtacgaggtgcttgaaaatgttgttctcaagcccaagactcctgatgttcacagctggagactttcctccaatggttag

SEQ ID NO: 10335 - DNA, 219 bp, Zea mays
  Peptide Sequence Number=SeqID_53710
atggggaagcctgtcccatcactcctcatgctcctcctcagccgagtgaccgcacttgtacccaccataaccggaatgggagaccacatctcaggtcgcgtgaggagggcaatctgcgggcaggttcactcaggtatccgcacgttaatccttattccatttccccatctcgtggacaaccaatccccatggattgttgtccacagactagtatcatga

SEQ ID NO: 10336 - DNA, 72 bp, Zea mays
  Peptide Sequence Number=SeqID_53711
atggcgccccgcaagccctgtgacgacggcggctctcagctctcttacggaagcagggagacgaacaactaa

SEQ ID NO: 10337 - DNA, 327 bp, Zea mays
  Peptide Sequence Number=SeqID_53712
atggcgcccgaggccggacttggctgctgtcagcctcactctgtcgagtggcacagcagtcagagcgacgcaggcgacactgtcttcttgtcaggccgggcgcgcgtcaggataaggtgtcaggccatccttgcattaaatgctcctgcgatacggtcggtcagtgtggcgatctggccaaggttgcttctcggcgaagactgggcctcgggcgagccgaaggtgtatccgttgcttgagggtgccctcgggcgagacgtgaatcctccggggttggctgcccttgcccgaggctgggctcgggcgaggcaagattgtgtcccttga

SEQ ID NO: 10338 - DNA, 396 bp, Zea mays
  Peptide Sequence Number=SeqID_53713
atgaaggcgaaggggcgcaagcgattgggagagaatgcgaaaaggaaatctcacccgacgggcaccagggaccaaggcagagcagtctatgacacgagggcccggaagacaagcctagtctatgacatgggggcctgggtccacaagtcatacggtctgtgtaccggacttcggcagcaacaaggcaccccgtgtgtggtctggcaaaaccaccaggcatgggggcccatgggtcagtcagccgcgaggacagatatggcagttggcgtgaccgaaggtggattgacggtgggcgtgtcagcagacgcgctgaaacagcgcgccaatcatcaatcaggccgtgttgaggcaaagtacaagctttggccccacctacaggttcgcatcctcccctga

SEQ ID NO: 10339 - DNA, 795 bp, Zea mays
  Peptide Sequence Number=SeqID_53714
atgacgagtgacccgtcagcacgacgcagcctatgttgcctctcctcctccgacccccagagctacctggggcagaggcgcctcttgcagcccctttgcccttgtcgaaggggctggggccatggcggggttggcgctgggagccgcaccggcgggtgtgggacctccagctggtgcattggagattcggatcccgcggtgggggtcccggccgctggtctggcgaaccaccatgccactctcgttgagggtcgacagtgtggccaagatcaccgtcctcagccctgggtcgtcgcagagtgtagggatgttttgggggaggatcagggactcagggatgaaggtttccccagtagtccctcccaccaggactgccagctcgtcctaggacaggtcggtgcccagcccacgctggatcctaccgatgtcgttcgcgccggtgaaccaacaacacaggcgcggtctcctctgcagcggcgtgatccggcgcttcaggaggtcgccgaccacgtgcatcgacgtcaagccgcccgtagccaagcccttgatcctatccaatacgggcaggaactctggcgaaagggacagcttagtcctccactgcttgcggtcgagcgctggcccatcgctcgacaggacgagacggtcgttggcctcggcgctggcaatcacccagtcgctgcgccagttctcccacctcgcgccgccaaaggtggggatgtaatgtcggtggggaaatccactggccgggtggcggaacgcacccgccctaatcctaagatgaggagggcctaa

SEQ ID NO: 10340 - DNA, 189 bp, Zea mays
  Peptide Sequence Number=SeqID_53715
atggcccttggagaccgtacaaaaaataataccgcgggtgcgtgcgtcccatacccatacgtgcaccaacacaatttgaagtcccaaggacagggacttcgccgcatatgtgaagtcccccattcgcatggcacgagaagtccacagatcctagccgaggtcgcggacaatgatgaccaggatccatag

SEQ ID NO: 10341 - DNA, 208 bp, Zea mays
  Peptide Sequence Number=SeqID_53716
gaaagtggttgtagagaagaccccagatggaggggagacattgaagatcattatcatggcctccaacgctgaggggcagacgcaggcgggcaaccgagagcagtgccctgttctgtgcaccgtggatagtctggcgcataggcacagacggtctaggatatcgctggatggttcgaacacatctagcggacggtctggcaacacctag

SEQ ID NO: 10342 - DNA, 837 bp, Zea mays
  Peptide Sequence Number=SeqID_53717
atggaactggatccggccgctgaggaggagtaccgacttgaggcacataacgaggagcaggatgcaagggcctttattggcatcggcaacgatgatgctcctggtgccggtacagggataggctcaactagccccactactgctgatggaagcagtattgatactggtactagtggtagcatgggtgccaatgcctcaaggaagagaagcgaagtctggaatgactttgaggagctgactaatctcgtcaatggtaagagggttccctgcagcggcccatccatcgccctccaccgctcagccggcgagctcctcgacggcgcgctcctcgacggcgcgccccggcgagctcctcgacgagctcctcgacggcgagctcctcgacgacgcgccccgcagccgcaggagccgttcgcccgggccgcacggcaggcggatctcggcctccgcgggcgctccggcgggcggttctcggcctccgcggtgtgctccggcgggcggcttctacgcgggacaacgcccactgccagggacaacgcccattgccaggcggatctcggcttcaacactcccactggcagggacaacgctcggtcgtccggtgtgctccggctgacggcttctacgcggttctcggcctcagcagcattacagcagcaccataatcacctcacgacgctcggtcgtggccatcctcggcggcgccctgctcgctgcatcctcggcggcgccctgctcgctgcatcctcggcggcgccctgctcgctgctagaggatggatttaaatacatcttttgtgttgaatgtgagaagaaaaacaagcagaaggttggatga

SEQ ID NO: 10343 - DNA, 2268 bp, Zea mays
  Peptide Sequence Number=SeqID_53718
atggagaagtgcaaaccaatcaagacccccatgcctacaaatggacatctcgacttatatgagggagtgaccttgattgcccgtgtgccgtctcctgtcctgcctggatcgtcacctctcgttcatcagtttaggatgccgcgcacgaagaatgtgtcggcgccagggggaggcgatgatgaggatcctcgtcgccccttcaggcaggtcaagggcaagacagtttacttggagcagcaggaaggccgcaagaagcggcattcggacagagcagcccgtgcagcggcagcagctgccgcagccgctgtgcaggccgagcttggagatcagccacagactccatcagatcagattgcctaccgtgttcgtcgtctcgcctcccggcctcgctcctccactcacaccactgcttccactccaccacccactctgcctgctcccgtcacccctattgcgccatccaccaccacagccatacctgctacctccactacgctagcttccactgctcctcctcccgctcccgcttcagctcctcctgtccctccacctcgatttcgggagcgcgatgagactgaggttcgaccccttgctgcggatcccagactttttgaccttcagcgtgctacagcggcacgggtacgtaggtttagatacgtacccgtggagtcttggttaccagctcagagggaccctgcagcagttgacctattcagcacacgtattcaggagtcttttttcagagctcagatgtctgcccagatagctctgcaagtgcaccggcttttggatcttccagcctttctccttgcagccggtgctgactctgaggcgcacctcacatatctgcctggccttctaacccttttgactaccagcggccggtatgttgaggagtgggtacgagtcttctatgcctctgtatggatagacccggatcatcactggatgaggtttcgttttgagcgagaggatgtcaccattactgccactcagattcgccagctctttggatttcccgagtcgacgactcgacttcacagcctctgctacggcacctctgaccctcctcgtcgccctcatggcggtgtggctccgggtatagctcacgtcgcggctctgttccgcccgcccttctcagatgggtcgcgacgttcatcggcagattttactacaacaaccaagttcttatttgagcttatgagatggactcttctgccgaggatgggatacagggaggctaccacacatattcagctctggctccttggtgccctggtctctcactctgagtttgacgtcgtggatttccttatttgtgagatcgaggacaccgttttggatgggattcgtgctcgtcgacaggtgccatatgctcactacttgtgccacatctttgcgcggctgattcagcctcctcggtttcagggcacacttgaggcctcacgcctcgtttttggatcctaccgtcctgcgcctgaggctcctgtgccagcttttgctcctgttttttactctcaggccgaggacgctgctcttcatcagttcgacactcaggatacagcagctgatgatgatgatgattttggggttccgcctccgcctcatatgcctccacgctcacatgatcatgaggctgggagttctagtgctgcccctgctgctcctccggctatggaccctgctcttgcttcgattctccagtctatcactcagcagcaggctcacctggcagccgagcaggcccggttatccgagaggatgctctcgatgtttcagaacatacaggacaggcaggattcgcttcagcaacagctactccaggatcgggctgagagcagggcattcatggctcttatgctacagcagtctggtgtctcagttcctccggttcagtctgctccacctcctccgcttcacactccagttgtgccatcgattctgtcaggaccccctgttccctctggtggtccctctccgctccggccggtcactttggctttcgcctctccggttctcagctctgtctgccctcagccgccagtgccaccagcatctgctgttaccactactgttgtggcagtatctgtgacctcttctgttccggcagctcctgcagcgcggcctcagtccgagtcagtaccagctccagcttctacagcagatcctggatccgagactgactctgaccccctgccggcgttcgctctgctgcctcgaccgcgaccggatgcgcccccgccgcctcctcccgcttcagatgtttag

SEQ ID NO: 10344 - DNA, 207 bp, Zea mays
  Peptide Sequence Number=SeqID_53719
atggatgttttaatgattaggaaccttggagaggaccagcaaggacttgggaaaggcctagttgttgaggaggagcagcaagggcgcccacaacaggaaggagatcaagcaaggaataagcttcgtggcgaggtcaatcgcgccacgcacgggttgataacagaaggaaaggggtgcctgcgaatggcgggggtctatcctggttga

SEQ ID NO: 10345 - DNA, 741 bp, Zea mays
  Peptide Sequence Number=SeqID_53720
atggctgctgaccgagcagagaggggcgtcggccagaggtggaggaaggggttcggcatccaagctgttggagcccaaggagagggtgctggccgccgggcagagggaggcggccaggtggggtggctcgagggaatccacggcaaggcaaggatggccggacttgagaaaggcagaggtccggctagggcgacggcggctcacctgctcgagctgggggccggtccggccatggccagcgaccgagagagtagagagaggaaaaacaaaaaaatggagcagcgacctggagggagcagaacgccggggggagaaggaaagccagtcgtgggagggagctcggcgaccagggaggaaaaaaaactcctgctcaccggcctggggaagaaggagcaggggcgccacgccaagggattgaagacagggagcgccggcgttgagggaggaggggtgcagcgaaggggtggctggggaagaacgccctgctggttgggtgccgggcgccatggcaaggagccaagctctagcgtgcgtggagcctgcggctggaaaatggcagaggaggaagagaagagatgttggcggctgggggtgggaatggaaattttccaatttgcaagggagagagctcctatttatagaagatggctagggttagggtttccttactgggccaaaagggctgggttgggctggcccaaacacgttatcgggccgcggctaatttattttccggaataa

SEQ ID NO: 10346 - DNA, 663 bp, Zea mays
  Peptide Sequence Number=SeqID_53721
atggctgaaaggtaccaactcccacggagttgcgttcctccaacgacgaggcggaaagacggcgggtatcccccatccgggggcttggaaggtggaaagacacgatgcataagggagcgcgaagacatggtcgccttccaagggggtcaccctccttttaaaggcggctctccctacttgtgtccccagtcgtcgcgggctgagtcttctccaacacaccccaaggatctcccctgcggcgtgggggctgggtcccacacgtcgtgcaagccggctcagagcagaagaagccaaaccgccgtgcgcggcggcgcccctggcaagagaagcgaacgacgcttcgccttcgccataatgaccacgtcagaaaagggaccgggaaagggggacaccccgaaaaggatccttccccatgaaggaacctggctccgagcctccctactaatcagaggttcgaaggctagcccctcggaagggttcaatagccgcctcagagcgcgtgggctccacacccactactggtcagaggttcgaaggccggcccctcggaagggttcaacggccgcctcaggctactcgggctccgcgcccactactgatcaggggttcgaaggctggcccccgaagggttcacagccgcctcagacacagagcgagggatga

SEQ ID NO: 10347 - DNA, 357 bp, Zea mays
  Peptide Sequence Number=SeqID_53722
atggagtattcggcaaagacatcgcttccactcaactccattggtattatccactctttgccggtatcctggtgccaaaggttcatctacaactatactaaatcgactgtccggaataccgtagattattccggacaggagaagctttttggaaaatcagggcaagcgcggaccgtccgggtctttgcggcagaccgtccgcgacaccgagttgacttcgaccaggaactacaaatcagggacagtccgactaaaccgcggaccgtccagctacaacgtgcggaccgtccggctataattcgcggacagtccgcatgtgaagacctggttcagcccgaagggaacgaatcaagctga

SEQ ID NO: 10348 - DNA, 111 bp, Zea mays
  Peptide Sequence Number=SeqID_53723
atggccgtggcctgtgggcatatgcatggagccttccgatcccgcggagctgtcatggttactgcatgcaagtcccactacaagaatatggtttgtatataccgctactaa

SEQ ID NO: 10349 - DNA, 282 bp, Zea mays
  Peptide Sequence Number=SeqID_53724
atgccgtcctaccatctgtccaccggacgaggacgccacttggaggggtgtctttcagggcccctgttgggcggcaccggcagagatcccctctgcccagcctaccgccggcagcgacaaatagaagacaacccacaacgcccccacgccgcctgcgccgtgtggctcccaacggtctgcgcgcagtgggactgtggtgggagacgacgccggctgcagccatggcccatcctatacgtgcatggtggggtcagtgatgatgcgcgcgtcttccagacggat

SEQ ID NO: 10350 - DNA, 1407 bp, Zea mays
  Peptide Sequence Number=SeqID_53725
atgtctctcaagagcatcgttcgggagctgaaggagatgagggacggcatcgggagcatgtcgagacgcggcggcagcggctccgacggccgcgccgccggccacgcccgctcggggtcgcggcattcctggcctagcctgtgggcggagcagcaacagccgcagcggcagggccagggccagggcctgggtcaggaggggccgcggcatcagcaccaggggcggtgggcggacctgcctccggaactgctgctggatgtgatacagagggtggagtccagcgaggcgacgtggccggcgcggcgccaggtcgtggcgtgcgccgctgtttgccggtcgtggcgcgaggtcaccaaggatgtggtgaagacgctcgaggagtgcggcagaatcaccttccccatatcccttaagcagcccgggcctcgcgaactgccggtacagtgttttgtgaggagggagagggcgacatccacatatctactctacctagggctcagcccatgtttcagtatggccaacaacaaaatggttctgttattttacatgtcaaaaggtttcctagctcatggaggagaaaatgctaggttcaagtcagctatgaatgtggaaaacgacaagctattgcttgcagctcgtaaggtcaggcgtgccactcggacttctttcgtgatctcactggtctctgatgatttctctcgctccagtagcacctacgtcggcaagctgaagccgaacttcctcggcacaaagttcacgatattcgacagccagccgcctcccgacgctgttgcgctaccaaacaacagaccgagcaaaaggcagtcgaagcaagtgtcaccgagactgccactaggcaactacaacgtcgccacggtcacgtatgagctcaccgtcctgcgcaacagggggccaaggagaatgcagtgcaccatgcactcgataccagccgagtgcatccaggagggcgggaaggccccaacccctaccggcaccgtccagtcgcttgacgagccagtgcccaccttacctagtaccaccaaggggaaggaagtggctgtacaattttcttcgacgagcctcagcgccgatctgtctggaccggtttctgggaacgaagcgcctctagttctgaagaacaaagccccgcgctggcacgagcagctgcagtgctggtgcctcaacttccgggggcgtgtcaccgtcgcttcggtgaagaacttccagctcgtcgcgtcagttgacccttccctaaacgtccccgcagcggagcaggagaaggtgatcctccagttcgggaagatcgggaaggatatattcaccatggactaccggtacccactctcggcgttccaggccttcgcgatctgcctgaccagcttcgacaccaagccagcgtgcgaataa

SEQ ID NO: 10351 - DNA, 951 bp, Zea mays
  Peptide Sequence Number=SeqID_53726
atgcagcagctgcaaccgaagcagatgcactgggtgagggccgactcctccgacttcgggggcgaccgtcccgccccccgcagtcaccagcgccacgacgcctcttgcgaagaggacgatttgtacgggtatgggggcatcgtcaatgagtggggcacgattgggctgttgctgctcgaggcggcagccgagcggatcgtcggggatggggccctcgagacatggggtgtcgcagataaggccactcgtgtgaagctctgcatgttgggtgagaatctttttgtgtgtccctgtgggggtccagcgcgagggagatcacacgcgtcgcgccgcgccgcgcggaacgtgttcgaggagcgccagctccatagccacctccatcgtgttgtcgtggctgccctctccattcaggagatttggcattctagagtaattcagtactggaagcacttgaagttcgagatacaaaaggattcctttcgatacgttatggatatgagtgctagccttggtggatttgcagcatctctgaagaaaaagaatgtctgggttatgaatgtagttcctttcacggaatctggaaagctaaaaattatatatgatcgtggtttaatggggactacccatgactggtgtgaatcattctcgacatacccgggcacctacgacctccttcacgcctggctcctgttttctgagatagagaagcagggatgtagcctggaggatcttctgatcgagatggaccgcatcctaaggacttatggttacgccatcatcagagacaaagttgatgtcgttacctacatcaagaaacttttaccagcgctaaggtgggacgactggacgtttgagatgaggcctaagaaagatgcgctcacgacaggtgacgaaagagtcttgatcatgaggaaaaagctctggaatcactcggtgcaagatctgtcgtag

SEQ ID NO: 10352 - DNA, 2328 bp, Zea mays
  Peptide Sequence Number=SeqID_53727
atggaatccttcgaccaaatgagagcgcacgtaagcggcaaggccgaccgagccgagggactcctacgcctccgggatacggatacctcactcatcaccttccgtgaaaaacaaactgttcctgcaggttcgggcatcggcagggggagcagcagcacccttggcgttgtttccaccctcggcggaacctggcccagcctcggacggcgacctgggcaaaaggacccccacctaagggaggatgccagcaccgcgccagcagatgtcttggccaagctctggcggctgctaccacgtcttcctcggcctaggaacccgctatctcccgggccgacaaagtctctttccgagccgactccgcgtctgtccgcgctaacaccgctgcctccggcttcggctcatcgcagagcagccgaggacgtcggtataaccctcggcggttctcccgacctacgacaaatgtctaagtacttgaagtggttacattttgctccggcaaaaacccggtatatctccttacaaacgagactccagttccgctcccgcgggtatgaactacctccacaccagagggcctgcgggacaacaaattccaggtggctcgccggcgaccactacaccaatagtgacaacgacccctgcttcgggcggctaaacagcagcagcgatgacctcagggccgacgctgctatgacgaggccctcgcctgcgtctccgctcgaggggcgaggacaagccatcaaagccaaagagccgggggtccagccgcagctggcacagatggtcttgtcggcggagaaaccttctccggctgccaccacctcagcaccgacgacagcggccacctgcgcgccagcaccgcgccggcgaacaacggccgccccaaagcgcaccggcaggtcctcactcccgtcctcgccgaggccaccccagaacacgagcaccgccctcgcggcgtacgacgtgctgggcgaccctccggcgcggctgacggtgcgaggaggacctgggcgtggccggcccgtgcgcggcacgaccgccgcccggacgaaggacggaaagctgcaccctgtccagggagcagcagttcgccttcccccgcatggctggaggatgcctccacagggctggagggtgcctttctcccccaaacactgggggaagaaaaggccgggctgcacgacgaaaatccttgaagccgagcgatggctgaaaggtgccgatctccacgaagccgcgctcctccaacgacagcaagagcaaggaggcgctggagcaccccatccgggggctcaaaaggcggaagggcagacctcctcacttgcaccccttagcgtcacgggcgaaatccccactgacatcctccagggtttctctccctacgacacgggggctgggacccacacgtcatacgagctgatccgaagcacgaagaagaaaccggtggtcgaaagggtggactgccacgcgacaggcatccaactgcaccacaactgtgcgccctttggctccgtccacatccggcggaccagtgcaaaggaagcgggcctgcatgtcatggaccgggaaaggggacgttgtggaaaggatccttctcgacggaggaagtgggacccgagccctcctattgatcaggggttcgaaggctggcccctcgaaagggtttcgacagccgccccagagcacttgggcttcaagcccattactgatcaggggttcgaaggctggcccctcggaagggctggcccctcggaagggttcgatagtcgccccagagcatgcagagtgagggatgactctgggtacgttcgatacataaccgaggctcgggctacgctcccgagcctcgggcgcaacaggaagctccgcctcgcccgacctcatgctccggcctcgggaggaggtttccgcctcgcccgacctcaggctccagcctcgggaggaggtctccacctcgcccgacccctggactcggcctcgacctcggtctcgggaggaatcgtgtcctcgcccgacctcggccttggcctcaagagaagtctccgcctcaaccgaccctgggctcggactgaccgtgctaataggggatgcatcatttccctatccctagcctgctcagtctacaaggaacaagaccggcgtcccatctggcttaccccggtgacgggacttaggcgctcctccgacggccacgccatcacatgtacagggcccaagctctcccccaacggccacgttggcatgtacacagggcttaagcactccactgccggacacgaagcgcatggtggtggtttgatgggtcactttggtgccaagaagacatag

SEQ ID NO: 10353 - DNA, 294 bp, Zea mays
  Peptide Sequence Number=SeqID_53728
atggagcaccgtcccgggctggaaaggttgctggagactgcccatctggagcttgacgggaagctgttcgtcaacacgcagcaggcccctacctggcgcgccaactgtcggcgtttcgaccccgggggtccttggaccgacgagataaggtgtcaggtcatccttgcattaaatgctcctgcgatacggtcggtcggcgtggcgatctggccaaggttgcttcttggcgaagactgggcctcgggcgagccgaaggttttaataagtgaaaaccaaattaagactataatttag

SEQ ID NO: 10354 - DNA, 891 bp, Zea mays
  Peptide Sequence Number=SeqID_53729
atggaggactgccacacgcgcgcgtgccgccagccgagccgtggccgaggccgtggctcatggctcgtgttcaagctctgcaaggtgaggtctgttcagtttggccagaaaggcatcccctacctaaacacctacgacgaccgcaccatttgctaccccgaccctctcatcaaggccaacgacaccatcaagatcgatctggagaccaacaagatcatggacttcatcaaatttgcaagcacaggtgagcccgccccgatccactccttctcctcttccctcggtggatctggattcgagtacccctttcactctcacattcaaatccatggcatcgtcgactggacacacagggggacagtcctgaccttaccgtcgcctggatctctaccagtcacttcccgatcagattccagcagcgccaacgaagtcggtcataacttgctagatccgagtgcttttctgagttcctttgtgtccaagggcaggaagaagatcgtcaaacagggttccttcaacaccttctacgccaaggagtaccgcgccacgctcgagttctactgggcgcccttcctcgtcgagtccaactctaacaaccccaacttccacaatatcaaggaacgaatcatcagtcccgagcggatcgaggcgcacgccaaacactggaaggatgttgactacctcatcttcaacacctacatctggtggatgaacaacgccgacatcaaagtcgggagacccaatttgaggtactggtctaacaacgatgaggttcccaggattgaggcatatgactgtgtgttcaagacatggtctgattggctcaatgacaatatcgatcctacccgaacgtccgtcttcatgacgatttctcctcgtaacctcaggtga

SEQ ID NO: 10355 - DNA, 1287 bp, Zea mays
  Peptide Sequence Number=SeqID_53730
atgccagagactgggctgtcggtttcggcgagggcgaagaggcgcactaccgcaggcagtggcgcgctcttcacgcgtcgattcgccttctccgcacatagaaaccggcgcgccaggtgcatgacatgtgggcctgggcccccatgccagaggttggaccgctggttgcagcgaagacgagggggcacactaccacagggcggtagcacgctccttgtgcggcggttcgccttcatgaccattggtccaggcgaagataaaggggcgcactaccgtggggcggtggcatgctccttgtgcggcggttcgccttcttcgcactcgaagaccagcacgccagctgcgagagcgggggagtctgcctttaaagaggggttcatccctcgagtagcagccatgccttgcttctctcccactcacggcgtcctctcgcctccgagcgctctgcgcccctttgccttcaaggtctctgctttgcattgccatagtttgtcatggccttgtaagttcatcccgagcgtgcccagactgagtgagtgctcgacatggtataccgcctgcttggatgggatgcgccggcgttcggcggaaggatttgcgccgacgccatccatcccggtgaacttgccgctggagagttcgtgcctttcgtcctccccaacgggttggtgctaccggtcttgtctttcctctgctggaggtgcgcgaccttgtgggagcggcgctcttccaccggtgcttggcttcaaggatgttcatcagcctcgcggtggtggagagcgagctgagccgtggctccgcttcccacatgggctggtgacccgcctcttcctccagcattcagaggaaaaggatgatcaccagccttgtgaaggaggcgaacttcgggagggtgggggcgagggcctctttgccatggcacgcacgctgaggtggtcgccaccgctggggaggctgcccggtgcagaggtggtggccgccgcttgcaagccgctcggagcagaggtggccaccactgctaacgagccgtcggtgcagaggctcgatttgtcgaggctgcagaccagcatacctaagaaagagttggcaatggcccccaggaggcccacgatacaggaccaggctgagtggcacacggctccggaccaccccaggagacaagcttttgggtacgggaccaggctaagcggccacacagactccggaccaccccatggaacgggctcccgttctttagaaccggcccccaggctgtcgggccctcctgctttcgcagagaggtcttaa

SEQ ID NO: 10356 - DNA, 1908 bp, Zea mays
  Peptide Sequence Number=SeqID_53731
atgacgactcaaggaggtttgcagccgacaagcaatgaagctaatatgtgcaccaacgacaatggtagccaacttggtacacggattgtggacgagattatggccgggaagaacgtcttctttgatcttcctgacaagttgactggtgagatatggaccttgaaattccattgcattggagcacaacctggaaaagaaattgtcacagtaaatattgataaagcttatgttgccttttacaacgtggtgtacataaaatcgaaacttggatattctgggagggacttcttgttttacaagaaacgatgtggcattgatcgatccaggctattggcacttgattacatccaccaagaagaggccatgctgtctgataacatggatgagagaaaaataagttttgtgctcacaaaagatccacccagtgatctagaggtaagcataactcccatcaagcgtccaagacagcgaacaaatgttgatgaagaaactatagaagtgtcgattgatgcatataaggagtggcttgcaatactacaacatgataatccagaaacggtattgtatgaacgacaaagcaatgatgacctaatattatcagatgaagaaattcatggcagcagcaaacctactactaattggccatctcatgctagacgtcataggaaaagagatcctgatgttattggtatatatgtagataacgatggagtctttaaaaaggaggggcgtggtacccttaagggtatagcagcagccaccaagcggatcaagaacggtgatcacaaacttaagattgaattttcatctaagcttggaggtcctgtaggaccaaacgctcgcacttttgtggatgaaatcgtattgtttacaaagaaaaaggcaccactcattggagtgaaaaagtggaaagatatagagctcaatgttagatcttctatagcctctgacgtactgcgaaggtgggagtttctaaccaatgaggacgcgcatgaaaagatctggtctattgctaaggagagatacaaaggatggcgatcaacgttaagctcaacatacaaggcatacaatagttatgctgaaaggatgaaaaacaagcctgaagatgtagacatcgtcgagtggcattacatggtgttgtattttggatctgagaaattccagaaaataagcagccggaactcggaaaaccgtcagaaacaaagaacgaagcatataatgggttctagaactttttcccaaataagctttcaacagagagatccagaaactgaaaaattttatctaacaagagaagaggaaaatgctattttccaaacaacattcaaggaaacaacaggatgtaaggcaaacagacttcatggtcatgggtacctatcaagatatccaacaagaagtcaagtgatggaatcaaagttcctcgaacaagctcgtgccacggttgcaaccaaccaaaaaaacattgaactcgaaagtcaggtccagttgttaaatgaaaaacttgcgtgtgaggttgcagaacgagaaagaatactccaggaaaaaatgcaagcactgcaagaagaagaagaaaaaaaaagacaagtgcttagagaagaaatgaggcaagaaatggttgctgcccttgctgttgtagcacaacagagcaaccgtgaaagcaccactccaatcgatccttcttccgttgtccctactaaacctcctgaattcatcccagctgattctcctgcacctgcaccaagtagtgcaaacaacgttcgtacaccagacacaaacaataagaaagacaatatgccagcaaactatattagctcttacactctaaggaatgctgtgacaagacgtgtgcaggcaaggggcaacaaaagaagcgaatgtgtatggaatgcaaatgttcttgtattatga

SEQ ID NO: 10357 - DNA, 1020 bp, Zea mays
  Peptide Sequence Number=SeqID_53732
atgagtgatcaggtgcggagcagccccgacagggaggagaaatttgccattacggtgtgggcgggctcgcccaaccacggcatcgccttcgactcctcctgggggctcctcgacgacctggagatactcgtcaagcgcctccactcaaagcaggtgcgaaagggctccatcgacgggagcggcggcgccggcaacagcaacttcgactccttctccgaggccgggtggtccagggagatctccggcgcggcggattcggcatccaccagcgccccgtgggacgagacgagccgcgactacctcaccttcgtcaaggagtaccgagaagccgccatattgtgcccatctcatgccagggcactcaagctcctggggagcactctctttggcgttggggagtaccgagctgctgagaaggcactggaggaggccatcttcctgaaggaagactatgctaatgcgcactgtgaccttgggtcggccctgcatgcagtaggggaggatgaccgtgctatccaggagtttcagacagcaattgatctcaaacctggccatgttgatgccttgtacaatcttggtggattgaacatggatgctggccgcttcgtatgggctgcagagatgtatactcgtgtgctgagcatccgaccaaaccattggcgtgcacagctaaacaaggcggtggctttgcttgggcagggtgaatctgaggaggctaagaaggcactcaaggaggcgtttaagatgacacagagggtgaaagtgtatgatgctatctcacatttgaagacattgcaaaagaaaaagccaaagccttccttgatgctcctggttctggtcgtgttgatctggatgttcaatgatccggattggggatttgggatcctaagcactctggtgaagctcgaagagagtgaccacatacgccatggtagccacacatcccagtcccctgagctcgtagtagtcgccgccaccgtgacgggctccgctgcgggcgccgaggatgcatggcgatga

SEQ ID NO: 10358 - DNA, 159 bp, Zea mays
  Peptide Sequence Number=SeqID_53733
atggcgagagtagcgtgtaccctccgtggcaagaggctggacggtggtgtatatgtgctctcggtgaagaagctgcaaacttttgttgcttctgttccaaggtggtaccaaaagaagagaatcaagactaaagttgcgggaggaaagatcctccgttaa

SEQ ID NO: 10359 - DNA, 381 bp, Zea mays
  Peptide Sequence Number=SeqID_53734
atggccatcatcttcaagagcaagatcaccttcagcccaggagctattttctgcttcgggaccatcttgtgcatagcagacatagagggaactctgcaccgcatagcagctccacccaagaagaaaccttcctcaagaattccgcgagaagctggagtgaaaccggggaggaacctccccagcgtgatgctcagcgacggagaaactggtaccagaacgtgcgacaacatcacgaagttggagaatgagacccagcacaacccgtctctcgagacgaagcctcaaaaatgggagaaactcctgatgaaagagcacatcgagaaaggcgtaactcccgccaccgcgatcgccgttaggctcaagaacgagagcgggaactag

SEQ ID NO: 10360 - DNA, 336 bp, Zea mays
  Peptide Sequence Number=SeqID_53735
atggggtccgggcacagtacttgctctaccgaggctggttgcagtggttctttgatagggatggcaacggggacacccggtgggcacatggcacaggcggcaggccgcagatgcgatgcgcgagtgccgcagggacggacgattgcgcgcagccgtgcgactgcggtaggagccggagtgccggagccggagtgcagcgggagtctgggagaggacagaggagagatagagcatggagtgggcggtggcgataggagtggtcgggtgggagaggacagaggagagaatgagagatggaggccgagcgagggcttcgctggcagcctggaggactag

SEQ ID NO: 10361 - DNA, 429 bp, Zea mays
  Peptide Sequence Number=SeqID_53736
atggtggcggagctccggctgcgcgagaatcactccggtgaacatgggccgactgaaccagggagggaaggggcacaccgaagggtgtcccgagcagctgacagtgaggcggagctcaccgtggcattggacggggcgcgaacgcgacggtggccccagaacaggcgacggtcggcggctggcggtggcggggctctctgcacgcatgggcagagcgagagagagggcgagcgagtctggcagagggcgcaaattggcaaggggaggtgggcgagcagggcgcggggctcaaaaggggcacgggggctccgacgtggccgaagaacgcgtgaacgtgggtgcgtccacggcggggagatcgtgggcgagaggccgaaggggtatgagagcgtcagagccgtccgattgaaatatgaagatccagattag

SEQ ID NO: 10362 - DNA, 306 bp, Zea mays
  Peptide Sequence Number=SeqID_53737
atggattccagcatctactgcacctacctgtatccccaaaccctcaccaaaaacgaagaagagagtgaggtgactcaagagaagacaccaccacctttggaatctcaggcagggacttggctctacttcgacatctgcgagtctgagcctgactcacctacaaacgaaggcaagccccgctcaggggttatcctgaggaaggatggcttctacctgcaagaatattttcatttggagcaatggtgggatcttactgcaaagttccctgtaatgctctttcatcctaaggaacagaaacaatcctaa

SEQ ID NO: 10363 - DNA, 621 bp, Zea mays
  Peptide Sequence Number=SeqID_53738
atgacggcagttggggtcagtgaggcattgtacgccaaggcgggagccggttatgctacgcctccccagtacgttgtggagttgttcaaggagcatcgggatactattaagtccactactgtgcatgtgctgacgaccttctgcggctttcaccccttggagctatcaacccaccccattggcttattccccactgagaaggaggacgacccaatgtcgaaggatcgggttgagcacgccaaggatgccttgcgaggtgaggcgatgtcccagcttatgggcatagtggagtctaccaagatcaccctggataacaaggaggaccttgttgtggagcaaatggccactcaaatccaagagcttgaagatcaggtggaggccagggagaacactattgaggttctagaagatcagcttcaaactacccaccaacagcttgaggaagccaaccaacatttggatctgcaccatcaagagattcaagacatggaggcagagggggccgatgaggatgtagacatcgagggaggagaggagccggagcctgcatccagcttggacactgctggctcaggaagaccaccttcccccgagtctagcgttgcctcgtttgcccattag

SEQ ID NO: 10364 - DNA, 201 bp, Zea mays
  Peptide Sequence Number=SeqID_53739
atgaggatggaatgggacgcccttagcagaataattagaggaaccagaggagtagttggcttcgccgtatggctgtcaatggggtccgggcacaatacttgctctgccgagagtgttagaaactggtatatcagtcgtgctcatggttatgagcagccttgggatcctcttcgattagaagaacaatggttacttatatga

SEQ ID NO: 10365 - DNA, 960 bp, Zea mays
  Peptide Sequence Number=SeqID_53740
atggccatggtgctgttcatctctaagttgctgtcactgccatcttcccacgccacctccacctggccctgctgtctccttccagagaattcacgcacgattagcagatcagatgattgtaatgaagagaattattgcttcagagataactcaacaagcacaggtaagctacgagagttagtcgatgcagtgagaatgaggcgtgttagtatcctttgtgtccaagagacaaaatggaaaggaaaaaaagcgaaggaggtggagaacactggtttcaaactatggtactcaggaacagtggcaaacaaaaatggagtaggtatcctgattgataagaccctcaaggatggagtggtggacgtcaaaaggaaccagtcttggaaaattgaaacgaccgagccggtaacagctatatacaatacaagatatggtgagactgaggagaggcaaagtatgaaaaattctatttctgaaaagttcataaattctttcttgaagcacgagagtgaatataggaccttaatactgcctctgtctctatctaaaaatatcctttattatttacaggaagtagaatttgttttcatccattgtgtatccggaggtgttatgtctttgattgatggttcatatgagtattatcattatcttcacgatggtattgatgacaatcttatgaggggcggtggcggaagtgttattataacaggcacaaccgaacacgcgaaggtggtcgtaagagggggctgtgccgtacagggcgaagcggggagtagggtggctcaccgccttcgagggaaggcagttgaggaggtgtatggcggtgtgcaaggcctatgcctagtagctggcggggagcgatgtctggaagcgaaggcagtgggtcatattagtggtggtgcgaatcatgcgttcggcccagccgttctgggcagaggtgtagggaaacgagaaacataa

SEQ ID NO: 10366 - DNA, 195 bp, Zea mays
  Peptide Sequence Number=SeqID_53741
atggagtgcaccatttgtcagcttgatgcttcatacactgctgagctctcaagagatactattgttggggtcttcttctccgccgaaggttctcaaggcaaaaacaccttcgacagaaaaatacaaaagcttgtcgaagttatcttcagcctcggctcaactcctcgagacgaagctcaaaggctttggcgatag

SEQ ID NO: 10367 - DNA, 552 bp, Zea mays
  Peptide Sequence Number=SeqID_53742
atgcctggcaagttctctgcacttttcaggaagctcatcgccagacctcacattgataaccttacaactcacctgaaagatgcagtttctgctcagcagacatggaaccacgtaccactacagatgttgactgaaccaaaactccaagaacaccgtggagcggaggcctttggtaaagatatcggcaaattgggaggtggtcgggacacggaagacgtggacagcgacacgcttgaagacaaagtaaaggtagaagtccacatgcttggtgcgttgatgctgcataagattggtggagaggtagaccgtgctaacgatgttacagtagacaagggtgccacgagcgagattgctatgaagctcctagagcagctgatggagctaggatgcctcaaccacgtcgctggccacaacgcagtactcagcctcagcgctagggcagaagatgacaggctgccacttcgaggactagaagacgagggtgtacatatgaaggcacacctaatggacaatgttggcaatgtcgagtcagataaaggtggtgactggtga

SEQ ID NO: 10368 - DNA, 957 bp, Zea mays
  Peptide Sequence Number=SeqID_53743
atgaaaatctttgaagccaagcgacgagtggagagcaccaacccccacggggtcgcgctcctccaacagcagcaagaagaaggcaacacagggcggttgaacctcccttggcaggcctggcagcctgtctgccagtctgactggcagactgacctgcagactgactgttggtcagaggtcagaggggtcagagaccagctgaactgcccctcaggaccagttcaactggtcttgaccagagagtttaggagagaaaaccccagctcaactgcccagaggcaagttcagctggtgtatggtcaaagagaaccagcgcagcgactcaaggcagccctgcgcgtgacccaacagtgcccattaagtgcgacgatcacgggtcactcagccgcagagataggcacgacggtcgatatgatcagaggcgggccgacagtaattgcagcaacaggcgtgcggaagcagcggtccaatcacctacaggttcgcatcctcccccgaaacggcaggggagccctctcccacagcataaaagacgacgcacccgtgttccgttcctcgaatgactcgcgcgcgcgcaacagatgcctgcgaatcgcccgtcccgtcacattaactccttggcagggcaagcgacacctctggcaggcgaagcgggcgccgtttcacctccgtcatgatgaccgcatcaaaaaaaggggttcgaaggctggcccctcggaagggttcgatagccgccccagagcacgcagagtcagggatgaccctgggtacgtctgttacatggccgaggctcgggctacactcccgaggtaccctaggacattttcgagaccagcgggaacgatttgtaatggaatcccaccggagggaggcaccgagccctcggaccctatcgaatgggtccgggtccagcaaatcacccacaggtacttttggagcgcgcctctgggccactag

SEQ ID NO: 10369 - DNA, 975 bp, Zea mays
  Peptide Sequence Number=SeqID_53744
atggtgctctcagtggcagaattacatcctcaatctaccaatgctgtcataagagtgcgtgtgatcagaaaatgggaattccgaggcgcaacaaatgatggtcctctgcaacacattaatttggttctagctgacgagcagggtacgcccatccacgctgagattgtagccgctctggcagttgacaaaggctcactgatagaaattgaaaaagtatatgagctcaaacgctttcgtgtcacgccttccagaaactattttaaacctgttgacaacaacttcatgatacaattcactctgtacactcaagccaaagttgtcaaagatccaccacaagtgtttccaagatatatctacaagctcacatgctttgaaaacatagaagataacattgacaatagaacttacttgattggttacaaggatatacacatcgtttacaagggaataatttacttctccaataatatagatgtccttggaatgttgacacaaattaatcctccacatctaattggctacaacaactcaaccatcatcagagacatcttcataaaaaatacaagtaacatgtctatgaaaattactctttggggaaatcaagcatcaagcttttctatcagtgatgtttacaatcaaagcaacaatcagcctattgtcatactgctcgttggatttcttgctaaacgattcaaaggtcaaccatacctaagcagtactacagcaagttcatggtacttcaatcctggaattcctgaggcacagacctactacaacaagttgcaaaacaatgacctccagctaatacaacccacaacagctgaagaagaaattctgctttctcaaccaccaaatttggaaaaaaagactgttgaagagctgctcaacatagatctggacatgtttcccccagaaggctacagatgcactgttactatctcacgcattgtgcaaaatagcaaatggtggtactga

SEQ ID NO: 10370 - DNA, 596 bp, Zea mays
  Peptide Sequence Number=SeqID_53745
ggaccgggaaagggggtattttgaaaaaggatccttcccagcgaaggaaacgggccccgagccctcgtactgatcaggggttcgaaggttgcgccctccggggttcggcaaccgcccagagcactcgggctctgagccctttactgatcaggggttcgaaggttggcccctcgaaagggttcgacaaccgccccagagcatgcagagtcagggatgaccctgggtacgtctgttacatggccaaggctcgggctacactcccgaggtaccctaggacatttccgagaccagcgggaacgatttgtaacggaatcccacctgaggaaggcatcgagccctcggaccctatcgaatgggtccgggtctggcaaatcacctgcagggagctccgcctcgcccgacctcaggcctcggcctcagccttggaagaagatctccgcctcgcccgaccccaggcctcggactcagcctcggcctcgggaggagtcacaacctcgcccgagcccagcctcggcctcaggagaagtctccgcctcgcccgacctaggcctcagacttactacgctacaggggatgcatcattaccctactactag

SEQ ID NO: 10371 - DNA, 342 bp, Zea mays
  Peptide Sequence Number=SeqID_53746
atggccgacaagatgaagacggtagtggtgctggtccaggagaaccgctccttcgaccacatgctggggtggatgaagtcgctgaacccagagatcgacagcgtgacgggcgccgaggtgaactacacggtcgccggcgacgcgtcctcgacgcccgtccacttcggcaacgcctcgcagtacgtggacccggacccgggccactcgttcatggccatctacgagcagatcctgcaccgggagagggcgaataaggtttttgggaagcgtcttcacgcgactgctcgtgatctgctgacctcgtcgacccagctgatcctggcgcgcgccaacaatcagtaa

SEQ ID NO: 10372 - DNA, 1503 bp, Zea mays
  Peptide Sequence Number=SeqID_53747
atgccgtcctcttcttcttccgccgacaccacgccgccggcggccgcctcgtctgaggagacgttgagtagcttgatggtggaggagttgcgcgccggcgactctgttgattttggtgtgtcacggatgacgtcagcccgcgtcgaagatatgcagcggttgggctactttggcggcggagttgctcgtgctccggggacggaggaagtccccgagccggagggctgcggccccggcggaggcaagccgccgctggcggcgaaggcgggcgccgctgcacctagcaaggcgccggaggcgacggcgggcgccggaggctccaagtcaacgagggtggtgccgccggccagcggagtggcggaggcttcgaaggcggcccaagcgttgccgttgtcgggcaaacgtgttgccgacttcggcaccgatattactgtggacgactatcttggtggactggacgagggccagcttgctatagctgcgcctggcgcggcgatcgcgacggccgtcatagtgtcgaaggcgaggggcgaggcgcttggcgcagaaggcgaggtgtcggccctcgcgttggtcagggacgaggcgggcgtcgcgacccgccagctgaagggagtgacggaggcgttgagtcaggcgacggaggcgctgagtcaggtggctgacttcgccagccgtactgcatcgggggccctcacggcagccgtgtccgccgaagtcgagagacttcggacacaacatgctgacgctgtccgtgagaaatcggcctccgacagcaagtgccgtaagctgatggacagggtggccgccctggagagggagaaggccgacctccggcgccaactggcggcggagaggagggaggcaaacgaggccatcgctaaagagcaggctgcgcaggcggaggccaaactggcgcgggcggagggcaaccttgccaaggagctcgccgaacatctgcaagagcggattaccgccctggagagccacgcgaagtgggccgaggccgcgatgcgtgcggaggctgaacggacgcgcgctcagcttatggatacatatcgcgagctgggcgcgcggaccggcgacttcgaggtgccggaccgagagcccgggcttcgttgtctgcaatgggtgcaggaggagctgcaggaactccccactgttgtggggggggttgatgtcgtggtcagggagcgggccgagactgcgagggctcaggcggagcgcggcgagcgggtggacgacttcggggctctgaacagcgcgctgccagacccggagccgaccccggagaccgcagcgatcgcgacggctgcctcctcatccgctgcggccggcgaagacctgcccccgaaggtggccgaaggcgcccctgatgcccccgcagctgctgtgccgagtgctgaagatcccgcggcggtggcggcggaaacaatggcggaggcaacggcggaaccaacggcggaggctcccgcagcgtcagggccctcgcaggtggcgtag

SEQ ID NO: 10373 - DNA, 330 bp, Zea mays
  Peptide Sequence Number=SeqID_53748
atggctttaagcgacctagtatcagtgatgcatataggtgaaacctacttacacaagactagcaatttaaggctttatccattgcaaagtcgtgaggaggtgaatcatgtaatgcaagggatggcaattttacccgtgggttcggatatccgtcggatatccgacccgtcgggtacaggttcgggcacaaaatttgacccgtgggtcttacccgtacccgacccgattttattatgggttgggtatggatttgatttcttacccgcgggtacccgatggatatccgaaaatagtgattttagattttcaacctaccagtacgctagctag

SEQ ID NO: 10374 - DNA, 945 bp, Zea mays
  Peptide Sequence Number=SeqID_53749
atgcatgaggagagtgcgaagacatggttgccatccaagggggtcaccctccttttaaagatgactctccccacttgcgtcctcagccggtgcggactgagtcttctccaacacgctccaaggtcctccccctacgacacgggggctgggtcccacgcgtcatgcaagctggcccaggacataagaagccaaaccgccgcgcgtggagcccacaatagcccagcggttacaagcattcctccactatcgcccggaccagtgggtgaaagggtggaccgccatgcaggcggcatgcaaccgcaccaagggggcgcaccctttcaacttcgatgcgtccagcatggaggcctaggcccacgcgtcatggaccgggaaaggggacactctgaaagggatccttctccgcgaaggaagcgggccccgagccctcctactgatcagaggttcgaaggctggcccctcggaagggttcaacagccgcctcagagcactcaggcttcgcgcctactactgatcagaggttcgaaggctggcccctcggatgggttcgacagccgcctcagagcactcaggcttcgcacccactactggccagaggttcaaaggctggcccctcggaggggttcgacagccgcctcaagccactcgggcttcgcgcccactactgatcaggggttcgtaggctggcccccgaagggttcgacagccgcctcagagcacgcagagcgagggatgactctgggtacgttcgatacacaaccaaggctcgggctacgctctcgaggtaccctaggacatttccgagaccgacgggaacgatttcataacagaatcccaccagagggaggcattgagccctcggaccccgtcaaaaggggaccgggtccggcgaatcacccgcaggtacttttggagcgcgcctccgggccactagccgacccctaa

SEQ ID NO: 10375 - DNA, 447 bp, Zea mays
  Peptide Sequence Number=SeqID_53750
atgggcaagagtaagaaaggtagcggttcttctcctcgctctggtgacaagcgcaaacgtgagctgactcctccttcggaggacttcggtgacttggagtactcggaggaggagttctcctccgagtccgagggatctccggctcccgtctctcctccggcgtcgtctgaagattcagacgactcccaggggattgccgtggaggtctggacctacatccgggccgtcgagcgctccgagctcgagggctcggatgagtcggagtactcctcggacgaggaggactcctcggactcgtccgaggagagcagcggtggcgatggcggtgatgacagcgacgacggaggcgacggtggtggcggcggcgacagcggcaggggcgacgacggcggcagcaagggcggcaatggcagcgacagcaagggcagcaacaaggccagtggctag

SEQ ID NO: 10376 - DNA, 108 bp, Zea mays
  Peptide Sequence Number=SeqID_53751
atggtcgtgatgggttcaacatcggaaaagatgtacctctgccaggggagattcttcggcgacaagttcgggagctggttcccgagcttcctcttgctgtgtctctag

SEQ ID NO: 10377 - DNA, 873 bp, Zea mays
  Peptide Sequence Number=SeqID_53752
atgcaggcggcatgcaaccacgccaagtggacgcccttctccgactcccaacacgcccagcctggaggcccaggcccacgcgtcacgcaaccggcgcgccggatgcttcaagcaagcaactgcaccgccactcgcgccactaccgcgcctcctcgactgcggaaccaataccacggctcgaggcgacccagcgcacaacccagcagcgccagcctggcgcgacggacaggcggcgcctctggcaggagaagcgggcgacgcttcgccttcgccataataaccacgccaaaaaaggctccgagcctccctactgatcagagattcgaaggctggcccccccggaagggttcgacagccgcctcagatcgcgtgggccctacacccactattggtcagaggttcgaaggccggcccctcggaaaggtaccacggccgcctcaggctactcgggctccgcgcccattactgatcaggggttcgaaggctggcccccgaagggttcacaaccgcctcagacgccgagcgagggatgaccatgggtacgttcgatacataaccaaggctcgggctgcgctcccgagctcaccggagacaccatgttcggcgcccatcgagggcaacatggcgctttcccccctcctccttgcgaaaaggcgacgcaggggcgtatgtaaaaaagccgagtctgtccctgatcgccctctcgccctgtgtagaggctcgggggctgctctcgcaaacccggctccggccgaaccgttgacagcgtcaacataccagcccgagaacttgggacccgaccgtacacccgggctacgaccagctcgcatgagggaacaaccagaccagccaaagcattacgcgaggcattaa

SEQ ID NO: 10378 - DNA, 168 bp, Zea mays
  Peptide Sequence Number=SeqID_53753
aggatccggggtgtagttcgcttcgccgtcgtgccgtcaatggggctcggtagacattatggtacaggtggctatgagatcgatggttttggttatgactatggtgctggagaagatgaagctgtggaaggagacttccaagagttccaagactacgacgagttctag

SEQ ID NO: 10379 - DNA, 579 bp, Zea mays
  Peptide Sequence Number=SeqID_53754
atggcgcaccggacagtccggtgcacaccggacagtgcggtgccccctgccacgtcatcactgtcgttggattcgaccgttgaagcttctgacttgtgggtccgcctgggtgtccggtgcacaccggacagtaaatgctcgacccagagcccttacgtcatgctccgcccgctggcctacgtcacggacaataagctatgtgacagcattagaccctcgaccgagtggggagcggaggcactctggatagagcctggacacgcgttaatatcggacccatgcctaggtcatgacacttcctctcccgggaccttgttatgggtggtgaggataggtcctaatcccacccatagttgcatagatggtgttgggggtcttcttctcagccgaaggtcctcaaggaaaaacatctttggcaaaatgatacaaaggatcgccgaagcttccttcagcctcggtttagctcctcaagaagaagactctgtgaagagacgacaatgcgagatgtcgaaggttaatgccttcagcctaggccaagcaaagaaggaaaaaggactagatatgcctcattggttttaa

SEQ ID NO: 10380 - DNA, 591 bp, Zea mays
  Peptide Sequence Number=SeqID_53755
atggccgcctcaatgcgtgcgccattgcgaagaggtcctcgcccccgtcctcctatggggggcgacaacgaggccattaaagccaaagagttggaggctcggcggcaggtggcgctggtggtctcgccagcggaagcaaccaactctgcaacgggcagcctcaccagtggtggcaaccacctcagcaccgacgacagcggccacctttgcaccggtggcttaccggtgacggcagccgcctcaccgcgtgcagaaaggtcctcgcccccgtcctcctacgggggtgaggacaagaccatccaagaacgcggccgccacctccgtggtatgaccactggcgggagactacagccgggctgcatgatgaaaatccttgaagccgagcgatggcagaagagcgccaacacccacgaggtcgcgctcctccaacaacaacaagaagaagacaagatcggcagcatcaccgcgcaggaaacgaagagtgcgagctctccggcggtgagaccgttgaggggtggccctgatgcggatccctccagcgaacaccggcgcgccccatctagaggcccagaaggccgaagggcgcggtga

SEQ ID NO: 10381 - DNA, 507 bp, Zea mays
  Peptide Sequence Number=SeqID_53756
atggcgcgtactaggaaaacagcgcgcaaatctactggacctcttggtgtgccacgacatcagctagcttctaggcacgaaggaagtagtagtggcagtaatgacccaattggagacctggaagccaaggtggaacaactccggtcagaacaacgccacaggaacagggcacaacgcgatacgaccattgattgggccgttaactcgcgttctttcgcttgggactgcgaagcgaaagctctagctcgtgtggcagagcttagtgcatccctcaaaagcctgcaagtgtactgtaatactttacatgaagaagtgcatgtattgtatgctcgacttcacccggacgtgccaccagatgtcgctgcaatgggagccggaccatcgggaatagtaaatgaagaacctcatggggagctagacctttttaggccccctccttctatgaaccttgttgatgaacggtctcctacaacaggcaatgtagcaacgaaggatgaagatgactaa

SEQ ID NO: 10382 - DNA, 390 bp, Zea mays
  Peptide Sequence Number=SeqID_53757
atgtcgcacgcccaggaagcatacgcccgacctcgagattcgttcatggcgatcgcagcttcatctacttccattatgcgcggctatggtgatggagagatcgagtcattaggagagggtctcaccggcgccggtgctcaggcaatctcgtttgtcatcgtgtctgtttggataggagaggttggcctcgagttttatagcatagcggcggagtccgagtccgtggtggagcacgtgcttcggagcagcgacagggagcgcccgccatggatctcggcgggttgttgcaacgatcgcaaagatcgctgggatcttcaacgaactggaaacaaagagcctgtatatgcgactcctcctatcaacgaaaccaggcacgaacaggttcactga

SEQ ID NO: 10383 - DNA, 564 bp, Zea mays
  Peptide Sequence Number=SeqID_53758
atggcgttaaccaaatcagttagagttcggttctttctctcagcaacccattggattgtgatggctcatcttagacacactgcacggaagtcagtcattcctttcttgccttcttgtcttgcggagcgtccgttacgtcaaccgcaggaggtagagtctgtgagtagctgctctcctgtgcccccactggaggcaccccgtgcaccaccactaggcgtctcagccactggagtagctgctggaggagaccccaacgacggaggtgatgacagcagctcgagccatagcaccgacctttcagaggagcaggagccagagggatgggttgctcgacccatcactcatgacgccgctcacaggtgtcacttccacgatgccctcgacaccttgctacgccaggcacttgaccggcgtacctggtctatcgagtatcgttgtgttgtcttccagcacagtcgcggggtttacctagaccgctgggaggcgacttgtttggtgcgccgttcggagaatagtctccggggtgcggaggtctgcttagagcattactctatttctaagtga

SEQ ID NO: 10384 - DNA, 1629 bp, Zea mays
  Peptide Sequence Number=SeqID_53759
atggcgcgacggtggcccggggcggcggtggcggacctccgcggctgcacggggaacggcggggtgttacacccagcagcaggtgttcttttcagcacacggattcaggagtccttcttcagagctcagatgtctgctcagatagcgctgcgagtgcaccgccttttggatcttccagcttttctgcttgcagccggtgctgagtctgaggcgcatctcacctatctgcctggcctcctgacccttctgactatcagcggccgatatgttgaggagtgggtccgcgtcttctacgcctctgtttggattgacccggatcatcactggatgaggttccgctttgagcgcgaggatgtcacaatcactgccagtcagatccgacagctatttggattccctgagtcgacgactcgccttcacagcctctgctacggctcttctgaccctcctcgtcgccctcacggcggtgtggctccagggacagctcacatcgcggctctgttccgcccgcctttttcagatgggtcgcgacgttctccagcagactttactacagcagcgaagtacttatatgagctcatcagacggacactcctaccgaggatgggatacagggaggctaccactcatattcagctttggctccttggtgccctggtatcccactctgagtttgacgttgtggacttcctgatctgtgagatcgaggacactgttctggatgggattcgtgctcgtcggcagttaccttatgctcactacttatgccacatctttgcgcagctgattcagccacctcgatttcagagcactcttgaggcctcacgccttgtttttggatcttaccgccctgctcctgagattccagtgccagcttctgcttctgtgtttgactctcaggccgaggatgcagctctacgacagtttgacactcagggtacagcagctgatgatgatgatgatgatgatgattttggggttcctcctccgcctccgcctcctatgcctccacgctcacatgatcatgaggctgggagttctcgtgctgcccctgctcctccggctatggaccctgctcttgcggcgattctggccaacctggcagctgagcaggcccggttatctgagacgatgctctcgatgtttcagagcatgcaggacaggcaggatgcacttcagcagcagctaattcaggatagggcagagaatagggcattcatggctctcatgcttcagcattctggtatctcagctcctccggttcagtctgctccgcctcctccgcttcacgctccagttgtgccttcgattttgtctggaccccctgttggtacctctccgctccggccggtcactttggcgttcacctctccggttctcagctctgtctgtccgcagccgccagtgccaccagcatctgctgttaccactaccgctgtggcagtatctgtgaccgcttctgctccggtagctcctgcagcgcggcctccgtccgagtcagtaccagctccagcttctaccgcagatcctggatccgagactgactctgaccctccgtcggcgttcgctctgctacctcgacctcgaccggatgcgcccccgccgcctcctcctgcttcaggcgtttag

SEQ ID NO: 10385 - DNA, 699 bp, Zea mays
  Peptide Sequence Number=SeqID_53760
atggcgcccagcaaggccgtggtggcacacctcgtggtgctattagtgcccttgctctccctgctgcccttctcctcccacgctctgacccaggacttatgcgtcgcgaacaggctcctcccagacacgccgtccggctacccgtgcaagcccaaaggtctcgtcagctccgacgacttctactccgacgccttggccaggcctggcccggtcatcgcccccttcaacaccagcctggcctccgccgccgttaaacagctccccggcctgaatggcctcggcatctccgccacgcgtgtcgatgtccggccaggtgggggcgtgcccatgcacacccacccggaagcctcggaggtcatgttcgtcctcgaaggaaccttttccgctggcttcatcagcgccgaaaccaataaggcctatgtcaagagcctaaagaagggcgacctctacgtgttcccgcagggcttgctgcacttccagttcaacaccggcaacacgaccgccaccgccatcgccgcgtacagcaaccagaaccccggcctacagatcgctgtctatgcactcttcggcaacaccctcacagtggaaacggtgaataagaccaccttcgtaacaaaggaggaggtcatgactcatgaggctcaaggacctcttcggccagtcgtcagtgccatcctgattaacgctcgccaggattaa

SEQ ID NO: 10386 - DNA, 840 bp, Zea mays
  Peptide Sequence Number=SeqID_53761
ggtggacaggcggcacgtcctttccgcaataaatgcagagaccgcgcggcccagaggccttatgtcaggctccgcccgctggcttacgtcatgggcaacaagccacgtggcagcatcggacctcacccaaggggtccggcttgcttgcatgggagccctggaccattctcggagatccgggtcgtgagtataggggtccggcactttcttgaggaggaaccgacgcccaaggaggatgactcgtgggcccagggcccccccgtgccagagactgggctatcagtttcgacgggggcgaagaggcgcactatcgcaggcggtggcgcgctcttcacgcgtcggttcgccttctccgcacatagaaaccagcgcgtcaggtgcatgacatgtgggcctgggcccccatgccagaggttggaccgctggttgcggcaaagacgagggggcgcactaccgtggggcggtagcacgctccttgtgcgacggttcgccttcatgaccgttggtcgcagcgaagatgaagggggcgcactaccgtggggcggtagcacgctccttgtgcggcggttcgccttcttcgcactcgaagaccagcgcaccagctgtatgacttgtgggatcgggcccccgtgtcataggatggataccccacgggttggtgttgccggtcttgtctttcctctgctggaggtgcgcagccatgtgggagcggcgctcttccaccggtgcttggcttcaaggatgttcatcagcctcgcggtggtggagaaggtggtcgcctccgctggcgagccgctcggagcagaggtggtcgccgccgctggcgagccgtcggtgtag

SEQ ID NO: 10387 - DNA, 144 bp, Zea mays
  Peptide Sequence Number=SeqID_53762
atggagagccacacaaagaagcccgtcggtgatgttttcctcaagatcggattactggaaggccagaccagctgctcgtattcactagtgcacagtgtgggagctgagagctccgttcctatggtcgggccccacctctcttag

SEQ ID NO: 10388 - DNA, 612 bp, Zea mays
  Peptide Sequence Number=SeqID_53763
atggcgcccagcaaggccgtggtggcacacctcgtggtgctattagtagggatgctcctcccagacacgccgtccggctacccgtgcaagcccaaaggtctcgtcagctccgacgacttctactccgacgccttggccaggcctggcccggtcatcgcccccttcaacaccagcctggcctccgccgccgttaaacagctccccggcctgaatggcctcggcatctccgccacgcgtgtcgatgtccagccaggtggggtcgtgcccatgcacacccacccggaagcctcggagctcatcttcctcctcgaaggaacccttttcgctggcttcatcagcgccgaaaccaataaggcctatgtcaagatcctaaagaagggcgacctctacgtgttcccgcagggcttgctgcacttccagttcaacaccggcaacacgaccgccaccgccatcgccgcgtacagcaaccagaaccccggcctacagatcgctgtctatgcactcttcggcaacaccctcacagtggaaacggtgaataagaccaccttcgtaacaaaggaggaggtcatgaggctcaaggacctcttcggccagtcttcagtgccatcctga

SEQ ID NO: 10389 - DNA, 384 bp, Zea mays
  Peptide Sequence Number=SeqID_53764
atggtgcagcttaacttcgccatggctcatccacacatcaacagcagggtgtcatggtgtcgtggtgcagcgaccagccgaccatccttgcatttccgcaggcttacaatgctttgtgtgagatatgggcttcgctggagtggattgagaagtcaaacaggaatcgacataggcagcgccattagcaggacggggacgatgatgagatattctatgtttaccggtgtggtcgattcgacggagttgcgctctcgtggcggctcttcatcgcaggcgggttgcggtagcagccgtagtcggcgctctagcatggagggccctatgagggagcagcaagaaaggtttcgtgaagagctgctacaacaacaaatgtcattcctctaa

SEQ ID NO: 10390 - DNA, 489 bp, Zea mays
  Peptide Sequence Number=SeqID_53765
atgggcgagagcgacgaagctgacaggtggggccaagctgccagggagagggagcggcgcgagagggagggaggcgggtcgctgacgggcggggccaggatgtcaacgagtaaaaagaaaaagaagaaggaccacgaccaccagaagccgcagtccaccactctagtcgtcgcagccgcgactgggggctggggcgactgcaacaaacacccacggccgcagaggggtaacagcggctcatgccctgtgcaccccaactatctccacagcgccgtggagtgtcgcgagatcatcgacctcgtgaaacgcgtcagcaagcgacgcgagcagtcttccaaggacggctccccacctcgttgccgacctagcaaggaaagggtcaacgacggcgaggtggccgcggctgaacgggaccttgggtatcagtcacccgagggggacctgaaggatgtctttaccggagactcctactccggtggcgacaactag

SEQ ID NO: 10391 - DNA, 990 bp, Zea mays
  Peptide Sequence Number=SeqID_53766
atgacgttgagtgctgagcagttccgtctccctcccgaccttccctccctccacaccctccctcttccgtcacgcccctgcctcctcccccgatctcgctgtcgagcctgcgccctctgcgtcgttcatgctaggccgactccaccagccttcctcccccgcgtcgtccccaagattcaggcctctctgtcctcctctcctcgcttccaccgcccctggtcggactccgccagccgccccctccgcctgaatatgacgccagcgggctcctttggcgggaggactgcaggaatcaaaggttggggcgaggacgaggaggcgggtgccgatgccgctcctgtggtcttgccatgtccatttcctgccccctcctcaactaatttgaccagagctgggccaccgctgccactcgcatctgctcctcacaactgttgcgctctgagcggggtcccgacacaacttcctcacgtgcctcgccttccgcactcctttgtccgccacccgcctcctcctcctagggttagggatcacgtcacgggggactgtggcgcccggcctgatatgctgttcgggaagcctgagaagagtgatctcgtggctctcaacttggatttcgatcaagtcaaggagtttatcaaggagcggctggggattgagagaggttgggcaacattatcagcttctcagagtgttggagggattgaaatcgaggagaactgggacaaggttaagactatttttcttcctactgagaagccaacgacgtctaattcatgtgctcctttgattgcaacccatccattggagccccaaccaccaaacatgaccgttggtggaggccgtctgttcgatggcgcaccggacagtccggtgcacaccggacagtccggtgccccagccacgtcaccagtgtcgttggaaattgaccgttggagttctgacttctgggcccgccttgatgtccggtggcgcaccggacatgcactgtag

SEQ ID NO: 10392 - DNA, 1140 bp, Zea mays
  Peptide Sequence Number=SeqID_53767
atggctgaaaggtaccaacttccacgaagttgcgttcctccaacgacaaggcggaaggattgcgggcgtcccccatccgggggctcggaaggtggaaagacacgatgcataagggagcgcgaagacatggccgcctttcaaggaggtcaccctccttttaaaggcgactctccccgcttgcgtcctcagccgtcgtgggatgagtcttctccaacacgctccaaggtcctcccctacggcgcgggggctaggtcccacgcgtcatgcaagctggtccagggcagaaggagccaaaccgccgcgcgcagggcatgcaactgcccagcggttacaagcattcctccactttcgcccagaccagcgggtgagagggcggacagacatgcaggcgacatgcaaccgcgccaagtgggcgcgcccctccgacttccaacgtacccagcatggaggcccaggcccacacgtcatgcaaccggcgcgccggttgctacatgcgagcaactgcaccgccactcgcaccactaccgcgcctcctcgactgcggaaccagtaccgcgactcgaggcaaccctgcgtatgacccagcagtgccagccaggcgcgacggtcaatacggccaaaaatgggccgacagtaatggcggtggcaggcgggcaggagcagcggtcacgttgtcagccaagcttacgtcccatccaggggcagcgagagaaccctctctcacggcgtgaagacggcgcacccgtgttccgttcctcaaacggctcgcgcatgcgcaacggccgcctcgcgaaccactcgccccactacaccaaaattatacacttcctacgcgcctcaggcaggagaagcaagcggcgcttcgccttcgccataatgaccgcgtcgaaaaagggaccgggaaagggggataccccgaaaaggatccttctccgtgaaggaaacaggccccgagcctccctactgatcagaggttcaaaggctggcccctcggaggggttcaacggccgcctcagagcgcttgggttctgcacccactactggtcagaggttcgatggccggcccctcggaagggttcaacggccgcctcaggccactcgggctccgcgcccactactgatcaggggttcgtaggctag

SEQ ID NO: 10393 - DNA, 699 bp, Zea mays
  Peptide Sequence Number=SeqID_53768
atggcgcctcctgttgacgtggccggtccgcgccctaggttgggcgatgtggaggcttctccgaggtcgaggtcgagtccatcttccgtggccgaggccgagtccgagcctctgggtcgggcaaggcggaggccgttggctgaggctagggcggaatttgagtcccggggtcgggcgaagcgaagttcgtcgtcttctagggctgagcccaagtccgagccctgggtcgggcggagcggagtttgccgtcttctggggctttgcctgagtccgagccctgggtcgggcggagcggagttcaccgtcttccggggcttagcccgagtccgagccctgggtcgggcggagcggagttcgccgtcttccggggctttgcccgagtccgagccctgggtcgggcggagcggagttcgccgtcttccagggcttagcccgagtccgagccctgggtcgggcggagcggagttcgccgtcttccagggcttagcccgagtccaagccctgggtcgggcggagcagagtttcctatggtgtgcggccgggcctgactgcctgtcagcctcactctgtcaagtggcaccgcagtcggagcggcacaggcggcgctgtctttctgtcagaccgctttgtgctgatgggggttaccagctgagaattaggagccttgagggtacccctaattatggttcccgacagtag

SEQ ID NO: 10394 - DNA, 522 bp, Zea mays
  Peptide Sequence Number=SeqID_53769
atgaacaaaagaccggcacacaaggtgccaatgcaaacggaactccggttccgtccccacagcagcagctatggccccaggacggacgcggccaccggaaggctctcgttcgcgtccccactcaagggacgcgaaccagacattaaagctaaagagccgggggccggtccgtcggcggcgctgacggtctcgacaggggggaagcttcctccagctgccaccacgtcagcacagacggcggcgtccgcctctccaccaacgctgacagttggcaaggcgcaccggcaggtcctcactcccgtcctcgccacgaaagcgaggagaaagacggaatgttgcatcctagctggacagcaacagttcgccttccccggcatggctggaggacgcctcctccgtagggctggaggatggtttccaccgccagaagctggaagaggaggtgaccggccggcccgcacagggggaagagctccagctcatcctagcccccgccccagccaggatgatgaacatccttga

SEQ ID NO: 10395 - DNA, 1215 bp, Zea mays
  Peptide Sequence Number=SeqID_53770
atgtgggtcggcgagggcagtgcgaacggaggagggcaccggggaagcgtcgggtggagtgctggacgtatcagctgccaggatcagccggtcaacggggcgaagaacgccggcggcacgtcgagtcaccatcgggtggacgtgtccggggtcgcggtggatggcgaccgggtggtatacggacggctcggagtggaccgccggaacgtcgagagcggcgggtgtggtcggctcgcggcggtgatagacgacggcggggtcggcgaagcgggtcgcgctcgtcgacgggcccgagtcggggggcgcggaggtagtggcgtggccgcggcggtggtaacggcgcaagacgaggcgccgggggtgggggggaaccgggtcggactcgaggagggagtcaagatcggtgggtggggtggagcctgcaaggggaaacacatcttcgtcaaagacgacgtgacgagagatgatgatgcggtgggaggtgaggtccaggcaccgataccccttgtggtcaggggagtagccgaggaagatgcagcgagtggagcgaggagaaagcttgttaggggcggtagcggaaatgttagggtagcaggcacagccgaacacgcgcaggtggtcgtaggaaggggctgtgccgtacagggcgaagtgaggtgtagggtggctcaccgccttcgagggaagacggttgaggagatgcgtggcggtatgaagggcctctgcccagtaggtggcagggagagacgcctgaaagagaaggcagcggatcatgttggtggtggtgcgaatcatgcgctcggcccgaccgttctgagcagaggtgtagggacacgagagacgcaactggacgccgtgagtgaggaagaaagatcgggaggcgttgttgtcgaactcgcggccattgtcgcactgcagggcacggaccgggcgccggaactgggtggatacccaggcgaaaaagtgagtgagggtggtaaacgtgtcggacttcagccgaagggggaaagtccaaaggaaatgggagtagtcatccagaatgaccaggtagtatttgtagccggagaggctaaggataggagatgtccagagatcacagtggacaagatcaaaggcctgaacagccctggacgtggaagtagaaaaaggaagacgggagtgacgaccgagctgacaagcatgacagaggcgctcagaagagccccgagtatatga

SEQ ID NO: 10396 - DNA, 99 bp, Zea mays
  Peptide Sequence Number=SeqID_53771
atggagagtctcacgctcatgaacgtctcgcacaggcaggaaaagatggaccacaagcccaagattaaaggtgtcctctcccatcccccaaggttatga

SEQ ID NO: 10397 - DNA, 627 bp, Zea mays
  Peptide Sequence Number=SeqID_53772
atggcgcaagcttcgcaggcggaggccaagctggcccgagcggagggaaatattgccagggagcgcgccgagcagctgcaggagcggctcatcgccctggagagccgcgtggagcgggccgaggccgcgatgcgcgcggaggccgaacggacgcgcacacagcttgtgaacacatatcgtgagctgggtgcgcggaccggtgacttcgaagtgccggaccgggagcccgggcttcgctgtctggaatgggtgcaggaagaactgcaggaactccccactgtcgtgggggggttcatgtcgtacgcctccctggtcacctgcgagggggcgatgaacgcgctctcctgcgaagggtgccggcacttcgaggtcttcgaccaggcggatgaagattctgatcgagatgtttataaggttgaagacctcgtggtaaaggaatctaccggggccctctacgaccagatgtggggtccgcacggtcgcgaggtggtcagggagcgggcggagacagcaatggctcaggcgttgcgtggcgagcgggtggacaactttgggtcgttgaacagcgcgctgcctgacccggagccgaccccggcggaggccgcgactggggtccccctggagtga

SEQ ID NO: 10398 - DNA, 270 bp, Zea mays
  Peptide Sequence Number=SeqID_53773
atgtatatgtggatatgtggggcaggggttcaggggttctgtcctagagactggaatgaagaattgcagtcctgccaggagtttcctcatggcaatcctcaagaaaggatattgcgtggcagagcacgctataaagtaacatgtgattttgtggatgctgcagtaaaaggtgcagttggtgtcattaatagatgcatacccccaataaatccaactgacccagaatgttttcatatagtaaacaatgtcaacaggttctatgttgcatga

SEQ ID NO: 10399 - DNA, 477 bp, Zea mays
  Peptide Sequence Number=SeqID_53774
atggctaatctttctcctgactctaatgagtccacttttgctgactggtgggcgaaagtaattaagcaagtgcacaaatccaaaagaagaggctttaacagtatcatcatcttgggggcttggtgtttatggcttcatcgtaataaggtggtttttgatggtgtcagtccttcaattattggcataaaggcaattttttttgatgaagttgaattctggaggcttgccggtgctagccatcttgaggctttggttcctggtgctggaatttttagggagcggtcactcatgtggggccgcacctatgcgcgccaaaagcgagaggccgcagggggcgctggcagcagcacgcgcaaggaaggcacggacgctggcagcagcgcgcgcaaggaaggcatggcaaaggaaagcgcgcacaaggaaggcatgacaaaggaaagcgcgcgcaaggaaggcatggcaaaggaaagtgactga

SEQ ID NO: 10400 - DNA, 261 bp, Zea mays
  Peptide Sequence Number=SeqID_53775
atggccaacgagatggaggagtttctgcattctgttgatgatcttactgttgtagagcctaccttaaatgttggtcttgttaatctaattttacagaaaaaacatgaagtggatttggatatgtcagaagaaagatctgattgggtaactaacctggttattttgaagttaaatcatgcaactttatatgttggtggatcccaaaagagttgggtgaagagcttggaaagactcagccactcgggtatccttccagtctga

SEQ ID NO: 10401 - DNA, 1074 bp, Zea mays
  Peptide Sequence Number=SeqID_53776
atggcgccccacatgctccatgacgacggtggccctcagcccccttacggaagcaagagtacgtcagcaaggacccgaccgctccgacagctgtccctccgccaggctccgtcgctcctccgacggccacgacatcacaccagctgggtgccaaaatctctccggctgccacatcggcatggccctcttagagagggttggccgcgcggggacgaggacgagacaggcgctcacttggggccgctcgcttccctcacccgcgtggacgcttgtaaccccctactgcaagcgcacccgacctgggcgcgagacgaacacgaaggccgcgggattcccacctctctcacgccggtctccggccgcctcctcgctttctcccccttcgcgctcgccctcgcgctcgacccatctgggctggggcacgcggcgacactcactcgtcggcccacgggaccccccggtctcggaacgccgacaattaggaacgtggccaggctcgagcaaagcagagcgacagccagacaggcacaagttgctgaactaaccgaggtggactgggcaagcgagcgagatggagtggacgacggtggactggtggagacgggggacggtgcgaagctgagtgtgcggttgttcaagccccccgcgtccggaaagaagatggagccaggggaggtgtcagggatcacaagagataatggagtcagtcagcgcctcgctacttcgctagacatcgctaacaggaggacgtgggcacgtggcagtggtgctggtgcacctctataccatcctcagcggcgtgcatatggcctgctgcgggggaacgcggcgtcgcgcggcggagatacaccgccatcaccttcgacatacgcggcgctccacggggcgtgcgtcggtcacgggctccaccgagggccggggacgtcgtcgccgtctgcggatgtgtcgcagagaacatcaggccgcgtgacatcctccgcgtcggatcctcatctggtaggttccagtctttcgcttctccccaaggcggaaaccttgtcgcgatccgtaccttttcggttcatggaatcgtga

SEQ ID NO: 10402 - DNA, 2022 bp, Zea mays
  Peptide Sequence Number=SeqID_53777
atggaacaaccacaatgcaatgcgcctttgcaggcagtggggcaagaaaagccgagggagaggaggaagcgacgctaccggcgatgcgtggctgaacaattgagggagagttttgctgtcgacgccgactatgaatacatttcaaaggaccacaagccagattgccaaaatgggtccagcagaagcaccaaggtttcctccccagatgtgatcactaagccagaccatgatgaatctgctgaggtagttgactcaaaatccgaagaggcacaaatcacagatagtgagcaggcaacatatgcttctgccaacaatgacttaaaaggaactaaggcctatcaagaagctgatgtttctggcctttacaatcttgcgatggcaataattgattacagaggtcacagggttgtagctcagcatctttttgtatattattatgccaaactgtcacaaatgagtatcatacctggtattcttcaaggagacaagtctgattctcttctgtatggctctgttgataatggcaagaagatatcttggaacgaaacattccattcaaaggtagtcgaggctgcaaagcggctccatttgaaggagcatgtggttttggacggttctggcaatcctgtaaaattagctgctacagtcgaatgcaagggcattgttgggagtgatgacaggcattacattttggatctgatgagagtgactcctcgagattctaactacattggacaagggcaccgcttctgtgtgctgagacctgaacttatagcatcatttgttgaggctgaatccatgaaacaatcgttgaagcagaaggttccagatgctccagttgcaagtacttctgatgctaaggctacctctgttgaagcagatgacaagtctgaagaaagctctgttcatacacacaaggaaaatgacaactcaagctccgagattcttttcaatccaaatgtgtttacggagtacaagcttgatggcagtccagaggaaatcgctgccgacgaagagttggtaaaaagggctggtacatatcttatagacatagtgatcccaaaaattgttcaggatctatgctcccttgatatctcccctatggatggacagactttaaccgatgcattgcatctccatgggataaatattaggtatctgggcaagattgcaggcatggtcaaacatttaccacacttacaggacttgttttctgctgaaataatagttagatctgcaaagcatgttatcaaggatatactgaggcaaagtttggatcatgatattgggccagctattgctcatttcttgaactgtttcatggggaaagttttaggtgcttctacagagggtagtctaagtgacatgcagtcaaagactctgaagggccatgaaaatagccaaactcaaaagtctactaaaggccataaactgagcaatgctgctgcttcaagaaaaagcttgtcagcttattctcatctaacctctgatggaatttggtttagcattaaggaatttgcaaaatcaaaatatcagtttgaagtgccagatgatgcaaggctttcagccaaaagggtagctgttctccgaaatctttgccaaaaggtaggaataacaattgctgcacgtaaatatgatcttgatgcttcaactccatttgaagcctcagatattttaaatctccaaccagtcgtcaagcattctgttccaacctgtacggaagcaaaaaatcttatggaagcagggaaagtcaggatggctgagggaacattgaatgaggcatatgcattgttttctgaagccttttcactgcttcaacagataactggtcccatgcacaaggatgctgcaaattgttgccggtaccttgctatggttttgtaccatgctggtgatacagctggggcagttgtgcagcaacatagggaactcatcataaacgagagatgtcttggtcttgatcatccagacacagcccacaggcatccatcttacctgatgcagaacttgcagaagatttga

SEQ ID NO: 10403 - DNA, 570 bp, Zea mays
  Peptide Sequence Number=SeqID_53778
atgatgaccgcgtcaaaaaagccgcctcagagcactcaggctccgtgcccactactgatcaggggttcgaaggctggcccctcggaagggttcgacagccgccccagagcacgcagagcgagggatgactctgggtacgtccgttacatggccgaggctcgggctacgctcccgagtcacatcgcccttccactgaccgacctgacaggaaaacagcgccgctcgccccgctccgactgttgtgccacccgccagagtggggctggcaacagccaagttcagcctcaggcgcaacaggaagctccgcctcgcccgaccctagggctcggcctcaacctcggcctcggaaggaggactccgcctcgcctgaccccaagactcggcctcagcctcgacctcggagggttgtggcaactccccccaccccagggctcggcttcaactcgacctcgggaggaatcacgtcctcgccccaccccggcctcggcctcaggaggagtctccgcctcgcccgaccttgggctcggaccgacccacgccatgggggatacatcattaccctacccctag

SEQ ID NO: 10404 - DNA, 501 bp, Zea mays
  Peptide Sequence Number=SeqID_53779
atgccagctcattccactcgagagatgcaacccaactcagttgcagagcaagcccagttagtcaaccaaggcccgggtcaagctcccaagttcactatcgatattctcccccgtgtcgagacaacttatgaaatgcctgccttgtttggaaatgatcacctcctcactttgcagaatcatgctactgatccgagtttggcagctgagccgatgataaccatgcacaatcggatagtcaccaagttctataccagaaggccaattcacttgaggaaaaggaatgttcaatcccctcaacccccatcttcagtgccccccagacgactgaagttagtaacacagatcgacaaatccacgaacttcccccctctaccagtgctggaactgcagagagtagcaacaaatacgtgcggccttgctcctgtggaggtggccacagagctcctgttgtctgaagaggagcccgctgatgctcagaacaaggaagtgatcaatggatag

SEQ ID NO: 10405 - DNA, 579 bp, Zea mays
  Peptide Sequence Number=SeqID_53780
atgaacgacgcgcatgagtccggggtcccgtccggcatcgtccccatcctccagaacattgtatcaacagtcaacttggagtgcaaggtcgatctgcaacatgtcgccaacagtgctcgtaacgcagagtacaacccaaggtctcagcgtgaccctgatacttacttgacagcgttttgctgcggctatcatgaggataagggagcccaagacaacgacactgatatttgcttcagggaagatgtacgtatctatcctccattgcagtttgcgcgtatcgtccagaagctcggttccccagctcggttcaaagatttcaaggtccaaaatatagttgggtcatgtgacctcaagtttcctattcgtctggagggcctcgctttggccagtggtttgtctgccacttatgaaccagagatcttccctgggctggtctaccgtatggtggaccctaaggtcgtgatcctcgtcttcgtctccgggaagattgtcctcacaggagcaaaggtgcgggaagagatatgcgcggccttcgagaagatacacccgatgcttgtgcagttcaggaaacggtcgtag

SEQ ID NO: 10406 - DNA, 2979 bp, Zea mays
  Peptide Sequence Number=SeqID_53781
atggcggcgggaacggaggcctttgaggcatacttccgccgcgcggatttggaccaggacggccgcatcagcggccaggaagctgtcgccttcttccagggcgccaacctgccgcagccagtcctcgcccaggtatggatgcacgccgatcagaacaagactggtttcctcggccgcccggaattcttcaacgcgctgcgcctggtcaccgtagcgcagagcgggcgtcagctcacgcccgacatagtgcagtcggcactgtatggtcccgccgcggctcgaattccagctcccaagatagccgcgggggcggctcgttcacagatgggtgctgcgggggcgcctaggcctcaggggagcgctgcgatgacgcccgggcaggttggagcagctcagatgaatccggctggcacaccaaggccccagggaagcggtatgatgccgacatctacccaagttagtatgctgcaggtgaaccctggtgctgctccaaggccccaagggatcagttctatgatgccagctgcgagtcagggtggtgctctacaagcaactcaatttgctgcaccaagggcaatgcagccacagcctcctaacctgggaattactcaacagcaaccttctagtaccggtttcatgcggccaccacaggttggaactccagcagcttcatttcaagctcaagcgcctggaatcaatcaaggtttggtccatggaggcagcatggaaggatctatcagttggcaaggcggtaatgctgcctcagttggaggcatcccacgagctataccaggagctgctccttctcagacaacacgtggatttggtccaggtttacctagcacaatgggcatggtgcctggacaacaggtacaagcaatgtcttcatcgccattgcctccacagagcaacagtgctgttttgcctcagaattcaaaagctttggtactgtctggaaatggccctgccagcagctctggatcaagcacagacatcttctctgcacttacacagccaaagccaagcttatctgcacctcagacaagctcgattccgagttcatccagttttatggccacgcctactggctcccagaacctgactaatctcactcagtttggttctttgcaaggtagcagccaacctcaacagactcagcctatcgtaaagtccattcctgctccagctacacctgttgtctctgctgggatttctaattcagcttctcaatggcccaaaattactcaaccggacatccagaagtacatgaaagtctttggggatgttgatagggacagagatggcaaaataactggtgcagaagctcgcactctgttcctcagttggaggcttccaagggaggtcctgaagcaagtgtgggatttgtctgaccaagacaatgatggcatgctttctttgagagagttttgcatcgctctttatttaatggagaggcaccgagctggaattcctcttcccccagcccttcctgactctcttaggcatgatgagacactgttacgagctacaggcttgccttcaacagcatacaatagtccatcatggcaacacaatcaaggaaacaaagatgacaaaagtgcgctgaaccaggctgcacaggaggtggtggatgctcctaagaaggttgaggtggagaagcaggtcctggattccagagagaaattggagtattaccgcacaaagatgcaagatcttgtcctgtataaaagtcggtgcgagaataggctgaatgagattacagaaagggcgtcctctgataaacgcgaggtggaatcattggctaagaaatatgaagagaagtacaagcaagtagctgagttagcttccaaactagcagttgaagaagctgcatatcgtgatgttcaggagagaaaagttgagctgcatgatgcactgattaaaatggtacaaggtggaagtgttgatggtttacttcaggttcgagctgatcgaatccaatatcaattagaagagatggaaaaagctcttagtgaacggtgcaaacactttgaacttaaattcaaaccatctgcatcagttgagcttccttccggttgggaacctgggccacaagagggactcattgagtgggatgaagactgggataaatttgaagatgaagggtttagtattgttaaggataatggtacaatacaggaaaacccagtttctgctgaaaatggaaaagtgccatctctttgggatgatggtgatatgtctcctgttgcatcctctaatggtcatatcaaggaagaaaggcgttacagtggaggtgatcaagtggctgagagtgaaatagcatatgattttggtgatgaatctgtgaggagtcctggcagtgctggaagaagtgcctcagggagtccatttaaatcttccggctttggcatgcatgactcatctcccagcaaaagagaaagttacagtgaccatggtggttctgaatccgtttttggtgacaagtttgctgatgaaacttcctggaactttgatgatcaagatactgactctgtttggggttctactgtactgaacactgaggccgaccaacgcggtggcacgcataactctttctttgggtcggaggcaggctcaccaagtggcgctagtgtatttggaaagaagaggaattcattcttcgacgattctgttccaagttctcctgcatacacatctgggttctctccaaaatttggcgaaagccgtgacgatagctcctcttataacttcgggaggtttgattccttcagatcccaagacactggatccttccctcaggaaagccgtttctccaggttcgactccattagcagctccaagggcgagaatgtatcaggatttgacacagggaatagctcacgaaattttggccggtttgactcttttgatgacgccgacccattcggttcaagtggaccttttaaagcatcgggaagccggtctccacccaagttctga

SEQ ID NO: 10407 - DNA, 780 bp, Zea mays
  Peptide Sequence Number=SeqID_53782
atgccattctctctgtgtcctctcctcctcattctcgccctggccgtcgtcttgctcgcccgaactctgctcgccctagccgtcgtcttcctcgagccgctctctttgtctccacgcactgggccctgtccttctccggatcctctcgtattccattctccctgtctcctctcctccttattctcgccctggccgtcgtcttcctcgagctgctctgttcgtcttcgcgcactgggtgcattcgtgccctgtccttgtccggatctcgcccttccctgcctcgccggttcctgcgcccgtggtccattgccgacctccgacgctggtaacgatgtggtttctactgttgatgttcttgaatccgctgtggcggcagaaaatagtgctttgcgttcttacaaacaggcgagtgcagccgtcgattgtgctaaggagacagtggccaaatattctgagcctctttgctggtttccaaagatgatcttgaaccctcagttaactttggcagtattactggtgaaccaaaaactagcgcaagcactcagatatgccatgtctcaaatgagtgatacgactaagaaacttcaagatactgcctctttgtgctacacagatgaagaagttgtagacggtttcaagctgactcaagtagctcgttcattggacgagttagctgaaatgcttgaagtaactgcaattgactgccaggtctcgatgatggatccaactactatgttagaagctggctatgctagtgaagatattgcggtgtgggagtga

SEQ ID NO: 10408 - DNA, 3123 bp, Zea mays
  Peptide Sequence Number=SeqID_53783
atgctgcagtacctggacttctcgcacgccagcacctcaaggaagtgggcgcacaggagacagggcgacggacttgaagctccaaggaacagcatggagttcgctttggaggcttcccacagctatggcgtgtttcaggaagatgttccgcactatccctgcaatatgaggcagtacccaaaatcagggctcaaccacagctttaacccagtcaagaagctgatccaggaggacatctcgttccgaacgaatgaagtccagaagaggcccggcggcgtcatcgccagactgatgggcatggaatcgcctccactgaacgcagctactgaatccatcagtcgttcggagatcaccccgagaccaacaatgccaagaagagatcctcctgaaagggagacctcagccaagcatgtctccttcgtgcagcacggcaacagggactccaccaagcaggcgtcaaagcaggagatccgagcctatggcgaggagagggacgtgtttgggcagcagaacaagaggggcaacgagtggagtaagccgcagccgcgggagcacccgcaggaggaggagctgcagaagttcaagaaggagttcgaggcgtggcaggcgagcagggcgtgggagcactcgagaagcttcgagctggagagtagcaccctcggcgacgacgatgacgacggcaggtgcacggacatcgtgccgtacaggtaccagcaccaccaccaccaccaccacaaggggaaagatgccagccatggcggcaagcacatacgctcctccaacgaggacgtgcattgttggagaagaagcagcaaggagagcggcacgtccatctccgggagccgtacgttctctctgacgaccagcgcagacgccgccgcctgctccacgaggctgccgctctccaggttctaccacgaggaggagaggtcgctgtcgccgacgaggatcgtgatcctcaagccctgccccgagctgagcgcggacgacgtcgaggagtcctcgctcgggtcgccggagctggtgaagaaggagaacaacatggaggccttcctggaggaggtcaagaagaggctcaagatcgagctcgagggcggggtggcctccgacgacaaggcggaccgccgttggttcgccgccgcagccgccgccgaccgacgtgccgttcgacgggcagggacagatggattacatcggccgagacgccaggaggcagctctccgacagctcaagaacgtgctgaggagggacccgccggacgccgagacgcccttctcgttctcccaccggagaagggccacctcgacgtcgttcgacgaggagccaacgaggcccaagccgacgaggcacgaggtggcgccgccgtcgtcgaggaaggggaaggtcaggagcaaggaggaggagaagaagtgcgcggtggagtccgacgtccggtcgttcagatacggaccgagcaacaccccgacgacgacccagctggactccgagcccgtgtcgccgcgaaacctcatgaggtcgttctcggcgccggtgtccgggacgaccttcgtgaagctcctctcggaggagccgcgggtgctgaccggagcgaggctgcagcgcaagcaggaaggccacgggagcagcaggccagcgtcgtcggaggagaggaaagggaggaaggacgcgttcagcatcagaggcaaggtgtccaacctgaggcagaactttgggctcagagccaagctgttcggcaagaagttccacgcctccgacgagccgttccccgacgacctcccgcccatcggcaccctcgtcaccgcaccatcggtcctcatacaccccggcgtcctgcaggagaactccaccgaggtaccaccgagcccggcgtcatggtgcagcagcccgcctgacgagatgagcaggggaggctacccaagccctgtctcgccattggaggcatcctttagcgagcaccggtctcccatgaggacggaagccaaagacatggcttcagctgcttctgaaccaggagaacaagcccatgctgaagaggggcgcgccgagacaagtcctgtcctggacgagcaggacgacggcgacatggacgatacagatcaccccatgaagtccttcgtcagagctgttctcgtcgtcgccggcatgtacgggcggaggcacaaccctggcaacgccaccatgtcagagtgcgaggtcaagcctatccccaagtgggtgctggaggaagtcgtgtccccgtcctcagccccggcgggcagcggcgcggcagccgtcatggaccaccggctcctcttcgacctcgtcaacgaggcgctgccgggagccgtccgggcctccacgacgctgtgcgcgttcgacaagtgccacgccatggcgccaaggagagcctccggtggcaaggcgctgctagaggcgctgtggaagtccatgcaggtgtggatagagccgccgagcgaccgcaggacggcgagctctgcctccgtggacgtgctgatcggccgtgacctgagcgtgtcggcgtggcacggcgcgttccgcgaggacgcggacgcgctggctggggacgtggaggcggagctgctggacgagctgctcgaagagacggtgtgggacgtgctcctcaatccggatgctttcaattggtcgaagacttttctgttgtcagatatccctccaaagttgcaggagcagggaatgaattccatcccttttgtggtccctaaggattgtccagttgatccctccctggaggatgccacttctgggatctccaaggattctgatggttatggtggaccgtctccaatcattgtggagtcagggctcagaagaagcaaacgattgaaggaaccacgtgctgggttcaggcatggggcctgcccaaaaaggaactgcctcatgtgccaacataacttcgatggcccacccccgctatcctccaaggtgctgcggaatctgggcaccaggctttgtaacctgtctgaggatgacctttctgagcagaggttgaagcaaaagaaattgactgtgggacctattgggccgcagagggttgacaggaaggacctgactgatgaaaaaactgatgattcatctgatgaggataaacaagacaaccactag

SEQ ID NO: 10409 - DNA, 140 bp, Zea mays
  Peptide Sequence Number=SeqID_53784
tgataccctgccggaccacctaggaagtgatcaatggggagtcatgatccccgggcaaaacgggaatcacggctcatgggtaaaagatggttggtttacagatgatgatgaggatggttatgatcatgcttatggtaatg

SEQ ID NO: 10410 - DNA, 96 bp, Zea mays
  Peptide Sequence Number=SeqID_53785
atggagaaccacccgggaaaacagcgctaccacaagggtggtgttgatattactttcgttctactacttaattggtttggtattacttatacatag

SEQ ID NO: 10411 - DNA, 906 bp, Zea mays
  Peptide Sequence Number=SeqID_53786
atgagctacggcctcagcctcggcccagcccggccggtggcgcgcgctcgtgtggcagttctttgtctttttctcaacttctcaatagatgcacctaaggaaccggcgcccaaggaggatgactcgtgggcccgggccctcgtgccaaagactgggctgtcggtttcggcggaggtgaagaggcgcactaccgcaggtggtggcgtgctcctcacgcggcggttcgccttctccgcacacggaggccgacgcccgaagagtgaagaggcgcgctaccgcaggcggtggcgtgctcctcacgcggcggttcgccttctccgcacacggaggctgacgcccaaggagtatgactggtgggcctgggcccccgtgccagaggctgggtcaccctggcgcgcgtcgggcgagatctttagcgccgccatggccttgctagaccctcccaagcgcctccagcccgaggtggtactcaacttggtgcacaacctgctcggatggggtgtgccggcgttcgccggaaagatccgtgtcggtggctctcctcacggtgatctcgccgccggagagtttgtgctcttcatctccaacctccccagcgggttggcgctgccgatcttgtctttcttcgtgctgctgctggaggagctcggcctccaacctcagcacttcacgccctgcttcatccttcaggcggccatcatcgcctacctccgcaagatgtccgtggggcattcgaaggaaaggatgttcaccagccttgtgaagatggaatgcgagctaagctgcggctccatctttcgcgcctccatctctttggctttaatggcttcggtgccgcctccaacggtgactgctggcccggctgctgaagacgccacccaagaggtcgtacaagatgtcgcgtag

SEQ ID NO: 10412 - DNA, 837 bp, Zea mays
  Peptide Sequence Number=SeqID_53787
atggctgtgatgggttcaacatcggaaaagatgtacctctgccaggatcttgtcgatgtaggcttgctgatcgaggaccttttaactgatatgccgccgcgcacgaggaaaaccacgcgtaagtccattggactgattggcgtgcctcgccaccagctggctccaaggcataaggagagcagcagcagctgcaatgactccattggagatctagaagcccaggtggagcagcttcgaatggagctacgtcacagaaatagtgtgtgggttgaggatggtcagcgtataaatgagttaagaactgacatccaacatctgcaagacgaacttgccgaacgggatttggcactcgattgggccgtcaactcacgttccattgcttgggaccgggaagccaaagctcgagcccgtgtggaggagcttagcacggtcgttgataacttgcagatgccatctcgaactcgtgcacatgacggcgcaggaacatcccgtggtcaagaagatacacccaatccaccaccggtaccgcccatgctggacaaggctatcactgccttggtcaccgcgaccgctgacaacacccgcttcctatgtgaaatggcgggacagcaacttcagcaacaaggcgggagggcttatctgcagggaccccgcgaaacttcgtacctggatttctcagaaacccgtcccccacttttcatcaaagctgaggatcctctcgaagttgacgaatgggtgcgggtcattgagcagaacctatcggacatcaagtcaaatgggatgaatttaaattggcgtttcgtgaacactacattccagaaggagtgctccatatga

SEQ ID NO: 10413 - DNA, 93 bp, Zea mays
  Peptide Sequence Number=SeqID_53788
atggccgtgatgggttcaacatcagaaaagatgtacctctgccaggatccactattagtaagcattttggcaaacaagagtcttgattattga

SEQ ID NO: 10414 - DNA, 1827 bp, Zea mays
  Peptide Sequence Number=SeqID_53789
atgccttcccatggtgggaagctggtgcgaagtcctgccttcgcacttgatctgcatagccgcgatccggccgcctttgtgcgtgaggcggaggatggggcggtgcggatcattggccggtacgtgccgaggacagagggccagcgtagctgggatattcgcgggtcgaatgaccgcttgaacagggtttttgagttgaatcgtctgccatatggcggttatcccggccaagacgatgtggatcgtggcgggaagaaaccggcggtagagtctggagacgaccccgcgccggcggccgccccgtcctctaagaagaggaaactaggtactgctatgggaggacttggggtttctgatggttttgctagagaattgatgaggacatgcgcggccccggggggaaggatgtcttcgcccgagcttcgggagtcttcggcgcggatgctgagggttaccgggggttggtggcctaagaatgttcctatcccccacgcggccggcgaagacttttttacatctcgcatggttcgtgaatggaaagtgtttccttacgggcggaatattgctgctgttgtgtcggcagtgatggacaaggatcgccagggagctgcacagaagcgccaggcggtcgttaggcttcatgaagccaggccgaagaggcagcggggggctgcgaaggctgctgcccccggcggaggcaagccgccgctggcggcgaagtcggccgtccctgcatccggcaaggcgccggaggctgcggctgccgccggtggttccaagtctgcgaaggctgcaccggcgtccagcagggtgccggaggccgcgaaggcggcccgagagttgctgccgccgggcaagcgcgtcgccgacttcgccaccgacattagcgtggacgattatcttgttgggtcggacgaaggccaacttgttgttgttccgcctgccgcggcgaccacggcggctgccgtggtgccaagggcgaagggtggtgcccttagtgccggcggcgagatgccggcactcactgccgtcagggacgaggcgggtgctgtgtcccgccggctgaaggagatgaaggaggcactgagtcaggcggctgacttcgcagaccgcgcggcgtcgggggccctgacggcagttgtgtctgccgaagtcgagagacttcggacgcaacatgcggacgccgtccgggagaagtcggccaccgacagtaagtgccgcaagctggcggacaaggtggccgcgctggagggggagaagactgacctccggcgccaactggcggaggagaggaaggaggccaatgaggccctcgccaaggcacaggctgcgcaggcggaggccaatttggcgcgggtggagggcattcttgccagggagcgcgtcgagcagttggcggagcggctcagcgttctgcagagccgtgtggagagggccgaggccgcgacgcgcacggaggctgagcggacacgcaaacagcttatggattcataccatgagctgggcgcgcggaccgctaacttcaaagtgccggaccgagagcccggacttcgctgcctggagtgggtacaggaggagttgcaggcgctccccaccatcgtggaggggtttatgtcttatgcttccctggtcacctgcgagggggcgatgaacacgctctctcgcgaagggtgccggtactatgaggtcttcgaccaagctgatgaggatttcgagcgtgatattgtggcggaaccgcccgaattattccaacttaagtgcctaagccccgcctttgaggctggaccacacttaaaggggaataacccgtcgatccctcggatctag

SEQ ID NO: 10415 - DNA, 222 bp, Zea mays
  Peptide Sequence Number=SeqID_53790
atggggaaacctgtcccatcactcctcatgctcctcctcagccgagtgaccgcacttgtacccaccataaccggaattggagaccacgtctcaggtcgcgtgaggggtaaagtctgcgggcaggttcactcaggtatccgcacgttaatccttattccaattttctatctcgtcgacaaccaatccccatggattgttgtccacagaccagcatcattatga

SEQ ID NO: 10416 - DNA, 336 bp, Zea mays
  Peptide Sequence Number=SeqID_53791
atgggcaatgggaaccctattggagccatgatcaaaagatcatcaaacttctcccctctctatctccctaccccgaccatatctcgacttggaactcacagcgaaaagataggatttggagcagagaagcgaccatacacagagccgccgacgaccccaccccctgtgctcgtggccagggtagctccgaccacctccgacaccgacccgcacaccgacgtgaccgtcgcgacctcccggacgtcactaaccaccccgccggagctctactgccgccgggggctttgcgcaatgtcagtgacccaagccaatagtgaaccaagggccgttctgtga

SEQ ID NO: 10417 - DNA, 1011 bp, Zea mays
  Peptide Sequence Number=SeqID_53792
atgtcagaccggtcgccgtcaccgcgggggcagcagcagcagcagcagggacggcagcaccagcaacaacaacgggcgccccgcttccaaggccactggaaggttcatggtcctaaggtgatgctggcgctgaggtggtgccgtcggacccccaggatccgcctgttaccgccgaggcgacgcctttgggtccccaagttccagctggggtccgggggtggcaacgttgccaacggctgttgtagactcggaggcagcgatactgttggttgcaccgtcggtggcaggtgtgggaggcgcgtccggctttgtcccaccgccaagtccggaggctccggaggttatcctcaggtgctgtctcgcgctcaccaggctctccgaaaaaccgaggtggctatccggcgagagtgggaggcgctcgggaccgagcaccagcaccttggcgactggtgcacccaactggaggagcgcaccaagacggtgtcctgccaattcgcctcagagcgggccgagtttgagcaggagcgtgaagacttcatggaggacatccgaaaggtgtctgaccgagaggaagaggtgacccaaaaggcaaaaagtttggccaggaaggaggtacgcttaaaccaaagggaggaggccatcacagcgctccatgataagttgaaagcttataatacggtgctggagaaacagcgggacaagcaggctgtggctgaggtgaagctacagaatctgcagcaggaactccccgacaaggcccacgacattgctcgcgccgaggaaagcctcaagattcttggtgcccgcttggaggctgagggcagcagactttgccggtcggcgatagaatacgtcttgacatgcttccggagtcacgacccggctgccttcttggggccagtcatcgcgggtctagtggccgatactgaagatgctgcctgggagggcgtgcaggacattgtggacgcggtggtcgggcgcttccagcgggatcctactgacgatgagtag

SEQ ID NO: 10418 - DNA, 870 bp, Zea mays
  Peptide Sequence Number=SeqID_53793
atgtggggcccttacggtcgagaggtggtcagggagcgggctgagacggcgaggggtcaggcggcgcgtggcgagagggtggatgacttcggggctttgaacagcgtgctgcctgacccggagccgaacccgacggaggctgcgcccgaggccgccctgcagccgcctccggaaaccgccgaaggcgctcctgatgcccccgcagccactgcagccgacggaggcccgtcgccaactgccgcgccgagggctgaggatcctgtgaaggtggcggcggagtcgacagtggaggagcctgcgacggctgggtcttcgcaggttcaagattttgggcctgcgcacgcaactgctactactaattttttggcggcttcgaccgtggatgatggtaataaatcggatgggtctgcatatgagttttctgactttggtgactctgggagctcggttgagtggactaaggagtcgtcggatgaggacttggactattttgcagccttggatgtagcagcggcggaggcttcgccgcgcgctgcggatgctgaagttgtgcctggtccgagtactgggcgtaggcggcgaagggcggttgcgaagcgtagaatgagtggggcggacagcggtcggcttcgtttgtgtgccttcgcacattcggctatgctcgcgaaggcgttacgtacttggtcagatgtatttgttatgctggactggtgcacatgtagtcggtctttgcgcggacagtttggtgtagtcgttttcgcttttgttacgcttcgtccggctgcgcctttgggcaactgttgcgcggatagacttcgcggaggacttcgatttttcgcacttgttgcgctagcccggctgcacccatag

SEQ ID NO: 10419 - DNA, 447 bp, Zea mays
  Peptide Sequence Number=SeqID_53794
atggcggtagggttcaatcaaggtgcacgaggagctcctctgggtgatgtagaggctatgcgtgcaaggaatcgagaaatggttcagtgggttacccggtccacgtgctccggtgaggttacgaactccggcgagtgtgatcgcactgttccggtggggctggtcctcggctcaagcttgggaaagcttcacggcctctcgaggaagctatccgagggctcggatcgagcggaggtgggcgggagtggtttggccatgggaaggtggccatgcatgagggcgggctttatagccactcgcgggcacgacacgggtgtggacacgggggcggccgagggcacgcgggggcgtgctctgggcgcgttcccgagtgcctacccacgtcgaacacgtggtggtttggttctgccggtgttcaaaggcctgtttggtcaccttagcgtgtag

SEQ ID NO: 10420 - DNA, 564 bp, Zea mays
  Peptide Sequence Number=SeqID_53795
atgggagaattttgttacttcggctatgcagacctagttgcaactcatgaaggttgtggtgtggcgggttgtagtagaccatcccctgaagactatgatcgtgttgtggatgatgtgccaaatgtgcctgatgctcaatctggccccaatttgaccccattaagtcagccaggagatgattgtgggactcatgacctacaaacagattctcctgcgggtgaagtgaccgtccagctcccagcaatcatgacctaccggtcgagagcgaagccaacggcagcagaggcgaactgggatgcagcagaccgtccagggaactgtgggagaagagtcgcgaggagcgagagcggatggtgtagaagttggactgttcgaggccgactgcatgcgccgatgcgcgtcgatgaggccaccgtcgagcgtgccacactgcatcagtcactcgtggtgggaaaggccgagactgccgcgctgggctctttgacagcatccctcagctcaaccatgtgtttcaccataaccgtgcccttgtccgtgccggactggcacgaacacgacccatga

SEQ ID NO: 10421 - DNA, 1047 bp, Zea mays
  Peptide Sequence Number=SeqID_53796
atggccggaatcgctcggtccacgcgcgcaggcgggtgttctcgtcagcggcgagtgtaccggccaaaccacggcgaactggttcaatccaagggcacggtgagcttcacgggtcttaccagggagcgcgccgcgcagttagaggagcggctcagcgccctgcagagccgtgtggagaggaccgaggccgcgacgcgcgcggaggctgagcggactcgcaaacagcttatggattcataccatgagctgggcgcgcggaccggtgacttcgaagtgccggaccgagagcccggacttcgctgcttggagtgggtacaggaggagttgcaggcactccccactattgtggaggggtttatgtcgtatgcctccctggtcacctgcgagggggcgatgaacgcgctctctcgcgaagggtgccggcactttgaggtcttcgaccaagccgatgaggattttgagcgagatatctacaaggttgaggaccctatagtgaaggagtccgccgaagccatctacgaccggatgtggggcccgcacggtcgagaggtggtcagggagcggaccgagacggcgagggctcaggcggcgcgtggcgagagggtggatgatttcggggcgttgaacagcgcgctgcctgacccggagtcgaacccggcggaggcccccgctgcgccgagggctgaagatcctgcgatggtggcggcggaggcgacagcggaggcgacagcggaggctcccgcgacggctaggtcttcgcaggttcaagattttgggcctgcgcacgcaatcgccactactaattttttggcggcttcgaccgtggatggtggtaataaatatgatgggtctgcatctgagttttctgattttgctgactctgggagctcggttgagtggactgaggagtcatcggaggaggacttggactattttgcggccttggatgtggcagcggcggaggcttcaccgcacgctgcggacacagaagatgtgcctggtccgagtactgggcgcaggcggcgaagggcggttgcgaagcgtaga

SEQ ID NO: 10422 - DNA, 531 bp, Zea mays
  Peptide Sequence Number=SeqID_53797
atgcagaacaccgtcgcgaacccttccactgcggccgccgccgctgcggcagggaacggcggcgtccaagcatcgggggctggaggggagcggccggaggacgcgtcgaagcagaacctggcgcaggtgacgagctccatccagaagacgctgggcctgctccaccagctcaacctcaccgtctcctccttcaactctgcctcccagctccccctcctccagcgcctgaatgcgcttgtggcggagctcgacacgatgcagaaactcgccgaggggtgcaacatccaggtgcctatggaggtcgtcaatttgatcgacgatgggaagaaccccgacgagttcactagggacgtgctcaacagctgcatcgtcaaaaaccagatcaccaagggcaagactgacgctttcaagggcctacggaagcatcttcttgaggagcttgaacaagctttccctgaggacgtagaagcatacagggagatacgtgctacttctgctgctgtaagtggacacacgattgatcttgtctga

SEQ ID NO: 10423 - DNA, 828 bp, Zea mays
  Peptide Sequence Number=SeqID_53798
atgaccgcgtcaaaaaaggctggcccctcggaagggttcaacagccgcctcagagcactcgggctccgcgcccactactggtcagaggttcgaaggctggcccctcagaagggttcaacggctgcctcaggccactcgggctccgcgcccactactgatcagggcgccgcctgccctgctccgactgtcgtgccactcgccagagtgaggtcgacagcggctaagtccagcctcaagcgacataggaagctccgcctcgcccgaccccagggttcggccccccgtctcggcctcggaagatggacttcgcctcgcccgaccccagggctcggactcaaccatgacttagaagacgacgaactccgcctcgcccgaccccagggctcggactcagcctcagctccggaagacgatgaactccgcctcgcccgaccccagggctcggactcagcctcggctccggaagacgatggactccgcctcgcccgaccccagggctcggactcagtctcggctccggaagacgacgaactccacctcgcccaaccccagggctcggactcagcctcggctctagaagacgacgaactccgcctcgcccgaccccagggctcggactcagcctcggctctggaagacgacgaactccgcctcgcccgaccccagggctcggactcagcctcggctccggaagacgatggactccgcctcgcccaaccccagggctcggactcaacctcgacctcagaggaatcgccacctcgcccaaactcgggtccggaccggccacgtcgccaggggggccatcattaccctgcccctagctag

SEQ ID NO: 10424 - DNA, 690 bp, Zea mays
  Peptide Sequence Number=SeqID_53799
atggcccccctggcgacgtggccggtcgaggttgagtccgagccctggggttgggcgaggcggagtccatcgtcttccggagccgaggctgagtccgagccctggggtcgggcgaggcggagttcgtcgtcttccagagccgaggctgagtccgagccctggggtcgggcgaggcggagttcgtcgtcttctagagccgaggctgagtccgagccctggggttgggcgaggtggagttcgtcgtcttccggagccgagactgagtccgagccctggggtcgggcgaggcggagtccatcgtcttccggagccgaggctgagtccgagccctggggtcgggcgaggcggagttcatcgtcttccggagctgaggctgagtccgagccctggggtcgggcgaggcggagttcgtcgtcttctaagtcatggttgagtccgagccctggggtcgggcgaggcgaagtccatcttccgaggccgagacggggggccgaaccctggggtcgggcgaggcggagcttcctatgtcgcttgaggctggacttagccgctgtcgacctcactctggcgagtggcacgacagtcggagcagggcaggcggcgctgtattcctgtcgggtcggtcagtggagcggcgaagtgactgcggtcacttcggccctgtcgactgaagagcgcgcgtcaggataa

SEQ ID NO: 10425 - DNA, 984 bp, Zea mays
  Peptide Sequence Number=SeqID_53800
atgccgacctcctcttcttctgctactgctacgccgccggccgacgcctcgtctgaggagacgctgagtactttggtggcggaggagttacgcgccggcgatacggtggattttggtgtgtcgaggatgtcgtcggtccgcgtgcaagatatgcaacggttgggttactttggcggcggagttgctcgtgtcccggggacggaggaagtccccgagccggagggcgagttggttgtgttcgaggcgttcttcgccgccgccaggccgaagaggcagcgaggggctgcgaaggctgctgcccccggcggaggcaagccgccgctggcggcgaagtcggccgtccctgcgtctagcaaggcggcggaagctgcggctggcgccggtggttccaagtttgcgaagactgtgccgccgtccagtagggcgccggaggtcgcgaaggcggcccgagggttgccgtcgccgggcaagcgcgtcgccgacttcgccaccgatattagtgtggacgactatcttggtgggtcggacgaaggccaacttgttattgttgcgcctgccgcggcgaccatggcggctgccgtagtgccgaaggcgaagggcggtgctcttagtgccggaggcgagatgccgacactcgctgctgtcagggacgaggcgggcgctgtgtcccgccgggcggctgacttcgcagaccgcgcggcgtcgggggccctcacggcagttgtgtctgccgaagtcgagagacttcggacgcaacatgctgacgccgtccgggaaaaatcggctgccgacagtaagtgtcgcaagctggcggacaaggtggccgcgctggagggggaaaagactgacctccggcgccaattggtggaggagaggagggaggccaatgaggccctcgccaaggcgcaggctgcgctggcggaggccaatttggcgcgggcggagggcagttgtggcggaactgcccgaattattccaacttaa

SEQ ID NO: 10426 - DNA, 753 bp, Zea mays
  Peptide Sequence Number=SeqID_53801
atggcccgcgcccgcgcctataaagccctcccaggcttcgactgcactcttccgcgcaccctcaaacctcaccggagtttagctcgccgccgtttgcccgtgcgcagcatgtccgcggccgcccaatccctctaccgccgtagaccggccaatagagccattcccaaccccgtccagccctcgaagaagactgtgcacacctccgtgaagctccccgagcgaggaatcggagtttgcttcgccggagaggccagtccacgctcgccggagctctcaaccccgccggagtacgtggaccgggtaatccactcaaccatccttcgattccttgtgcacacggtcactacgttaccccgtgaagctcaccgtgcccttggattgaaccagttcgccgtggtttggccggtacactcgccgccgacgagaacacccgcctgcgcgcgtggaccgagcgattccggccatccccgacgtcaagccgtacctcgacgtgaccgccagagtctccccgagccaaccccacccttcgccggacctccctcgccgccggaggtagccccggatccagcacctgagcctgcaccagaggacctgcctgccactgctttggaaggcaagccccggaatcctgttgagatgaatactagttctctggaggaaatggttgctggagtgacttggtcgtccatcttgccaccgggttggactgtcgagtgggaccctgcctcggctgaggaggagcatgaggagtga

SEQ ID NO: 10427 - DNA, 990 bp, Zea mays
  Peptide Sequence Number=SeqID_53802
atgtcttcgtgctcccttatgcatcgtgtctttctaccttccgagcccccggatgggggatacccgcagtccttctgccttgtcgttggaggaaagcaactccgtgggagttggtacctttcagccatcgttcggcttcaaggattttcatcagtcagcccggctgcacccctccgccggcggtcacccgagacggtgaccaccagcccctgggtggggagaagcaagccgggctgcgatcttggtcccaccctcagcttcaaggatgttcatcatcctcgctggggtggaggccgggctgagccggagctctacctctcgcgtgggtttgtgggtcggcctctccttcggcgttcgaaggagagggcgctcactggccctgcgggcgggtcggacttcgacaacgcggggctggtcgacggcgggcgtcgtcagcctcggcgcgtcgggctcgtcggcttggctcctggtgccccctcctgccggaaggcggttgccgcgccgtgcgcacgggaggaccgccaaagatatcatgcgctgccagggcggcattcgtgttctggggcggtcctgcctttgcaccggtacggcgcctccacgcgggggtcggagtccctcggctcggtcggccttgctgcccgaggcttctcttgcttagttaaaggaacccctcggccgctcttcgatgagccaaagccaggggtagcggtgtcagctcggatagaggcagagttggctcgaaaagaagacttggtcggccggagcctggccgggtcgtccgttagcggggccgacgccggagttgatctgccgaggcctcgggccgggctgatgtcttcgggggacagctggccgaggcctcgggatccttggaccgcgtcgccgtccgaggctaggtcggaccttggcgaaggtgtagttgacgccgagggtgctgctgctcccttcaaccgtccagatccgagcttgcaggattggatcatcttgtag

SEQ ID NO: 10428 - DNA, 1194 bp, Zea mays
  Peptide Sequence Number=SeqID_53803
atggctcgtcttagacacactgcacgtaagtcggtgattcctttcctgccgtctcgacttgcggagcgtcctctgcaccacaccgtgtccggacagtcgagtcacctggagaggctgcaccaccgcctgcgtgaggagcaggaacgccggcgccaacacggagagcagcagggctcttcctcctcaccccagcaggaggtggagaccgtgaggccccgttcctctgtggcccagctggaggcgccccttgttccaccgcgggacgtcccggctgttggaggagctactggaggagaccccggcgacgacgacttagcccacagcacggagtcctctgagccgcaggaggcggaaggatgggtcgcccgacccatcacccgtgacgccgctcgtggttgtcacttccacgacgcactcgacaccctgctgcgccaggctttcgaccggcacacctggtcgatcgagtatcgttgtgtggtctaccagcacagtcgcgggaggtacccggaccgctgggaggctacctgcctagttcgccgtccggaggatgacctccggggtgcggaggctgtttcggagcactattccatctccgagagggacactgcagaggcggctatgcaggatgcagcacgacgtgcactctctcagtactgttctttgttcggtggcgtgaccgacggtcttaaccttcggtactacccccgccgccctactggcagcacagagagtgtggttgtttcacctgttggtgaggctaaccctaggttgagcagcacagtcaacctagtcgcagtgcttaacacggagctggatcactctctggacgagctaagcagggctcgaacggagattgcggagttgcgtgctgagttggcagagcgccatcaccaggagggtggttctcccgctcctgttgggactcagcacccataccgctccccgccacgtggtcaccacacttatggttcccctatgtctgacaacaggcgccgatgcaacaggcgtgctcagctagagcagcatgaccagcaggaggaaaatcagaggcagcctcccccgccacccccgatgtcagtggagcagatgttcttgatgcagacccaggcagtgcaggccattgggcagactctggcagccatgcagcaggctcaacagcaaccccaaccccagttgcaagtgcagatgccctag

SEQ ID NO: 10429 - DNA, 2961 bp, Zea mays
  Peptide Sequence Number=SeqID_53804
atgggggtaatgtcccggcgggttctgcccgcctgcagcagcctttgctacttctgcccatctctgcgggcgcgctctcggcagcctgtcaagcggtacaagaagatcatagcagatatctaccagctgcaaccggatggagagccaaatgatagaaggatcgggaaactctgtgattatgtctcgagaaatccaacacgcataccaaagatcacagagtatcttgaacagagattctataaagatctaaggcatgagaattttacgttggccaaagttgtgccatgcatctataggaaaattctatgttcatgcaaggagctcaggccattgctagccacaagctcattaagcaccattcgcactcttcttgatatgaaagcgcatgatgatctacaagttctgggttgtcttatgcttgttgacttcctgaatggccaggttgatagcacacatatgtttaatttggaaggcctcataccaaaactttgcaaaattggtcacgaattaagagaagatgatgaagggctccgtcttcgatctgcagctcttcaggctcttgcttctatggctccttttcaactagcataccatatcatcaaagtccaatacatgggcgaccactcacacatttcaatggaacttgatgaagttgtctcagtgatcataagctgttacgaggctaatcaaacactctcaataaaagaggtagtcagatttcaagatgatgatgatttggtcattaatgggaacttggctgtgttaccagtgtctggacaaaatagtgccaaagtggcatctgatacaatgtctgcatctgaaaatccagcatactgggcaagggtttgcttgcgaaatatggctaatattgcaaaggaggccacaactgtgcggcgtattcttgaccctcttttccgcctttttgacagccacgactattggtctcctgaaagtgggattgccctttccgttctgcaagaaatgcagaaactgatggacaaatcaggtgcagcaattttcacccatgcttcaacagcaaacatgttgaaatactctattaacatcatccgccccctcatattgccagggcaacatggtcatttgttgttatctttcactataaagcacatagaccataaaagtattgccaagaattctgtcaagcaaatcaatattgtaaaagttgcttcacatcttgcaaggcatgcaaagttgaaggcatcagtgacgatagcaagtgctatcagtgacttaataaagcacttgcgcaaatgtatgcattttgctattgaagcatctaatgcaaatgctgattgtgacaagtggtacagtgcactttatgtggccttggaggagtgcctagtgcagttgacagaaaaggttggggatgttggtcctattcttgatatggttggggcatttcctgaagctttatttcaccagcttctcttagcaatgttgcactcagacaataagacaaggattggttcacatcgtgttctatctaccattgtagcaccttcaatggcgtgtccatggtcggacatcagctttcctatcccaatgaagggtgatgattcacataacttgcatttgttggttctctcagctttctcttctgaggccataatcaatgaaacacggaccaaaaacaagatccaagaatccttgcaagaaaacaacaaatcagaagctatagtggatcctgagaatggatacacacagacagaaccagataaaaggaagtattcaggggggccatgtctaaatgagcattatcgtacagcttttaatgatgaaaacttaaagttcatgaagttgaacgaccaccagattgttctccttctttcatctatttggagtcaagcatctttggatgacaacttacctgcaaattttgaagcaatgggccttgtctacagcattgctttattatgttcaaaaccaaaaagctccagtcatgtgacacgtattcgttgtttccagttggcgttctctctcaggagaaactctcttagccctgaaagtgatttgaagccatctcgtagaaggtgtctgtatacgatggcatcagcgatgctcatcttttcagcaaaaattgctgatctccaccagataattcctcttgtgaaagccgcagcaccagagaaaatggttgatcctcatcttcgcttgatggatgactgccagcttgttaatacctctgcagagtcatctaacagcgagatggtttatggttccgaggaagatgaaagtgatgcactggcttttctttcagccatcaacaagcctgacacagagttaatagaaaccgtgatgtgccacttcagggagaagttcgaaaatttaccagagaaggttaacgggatagaagagcaacttcttcaagagttttccctggatgattcgtttcctcttggtgctccactattcatggagatgccacactcttgttcaatgtatgcagaaaaggatgaagaatgttttgacgaggacactgttccttctgagctagacgatgacgacatcatctttgagcatagtgggtctcaatctgaccggaaaacgtcaggttccatggcttcgtcagatgttctaactgtcaaccaactaatagaatctgttcatgagaccgcaaggcaagttgccaacgttccagttcccgccaaccctgtaccgtacgaccagatgaagagtcagtgcgaagccctggtcatggagaagcaacagaagatgtctgtcctcttgagcttgaagcattcgaggactgactcacatggttcagccggtgtggatgggcttgaaacgaatgagtcttctctgctgtctgagcctgagttacagtcaacaaggaaggggcgcatgcgccgctgcgattcagcgtccagcgaatctgactgttcgttcaggctgccacctgctagcccatatgacaagttcctgaaggcggctggacggtag

SEQ ID NO: 10430 - DNA, 1302 bp, Zea mays
  Peptide Sequence Number=SeqID_53805
atgaacggggaggtggaatgcagcgtgtgccatgcgaaggtgccggtgccgccgccggtgtcgaaagcgtacgacagccaccggagcactgtgtcgtcgcggcaacgtgcgctaaacgtgctcctcgtctccggcgactgcgtccttgccggcctccaggctagacgtctaaaggtgggagacaagccactttttacagtttcaatatttatgcaggctgctcgcaataatgttcttctttcagtacctgcttttctctatgctatcaacaactatttgaagttcataatgcagttatattttaatcctgctagcgtgaaaatgctgagtaatctcaaggaagggctcccccggcgacgcatcggcgacccgctcccaccaatcggcgatctcaccggcgacgaccgcggctggaaggacccccccccccccggcgacatcggcagccccaccagcgacgaccacgactggaagggcccctccagcgacatgctctccgacggcgacccgctccctcccatcggcgaccctagatccaggaaatcaacacccgcacccgcgcagcgagcgaagatacctgtggctgtaggcagtggtggcgccggccgtcggctagggttccgcctagccgcgtgtcgcctgacgggagaacaaggtcgtcgaagggggcctgctgccggctcgtcgaaggtgccctacagaagatccagtggaaggagcccaacaacattgctgcagatcgaggcggattctctgaaagccgtcggagcagcaacgactcccgagggagagggggagaaggcgaggcggtggagcacgcggagggaagtggatgggagagcagtttacaacgaaaaggctcttaaaagccagtttgataccagtatttaccttcagaacttgtttctgtatggttatggtgcgatatttaactttattgggcttgttgtcactgctatcatccaagggcccagtagttttaacattctagaaggccactcaaaggccacgatgtttcttatctgcaacaatgctgcacagggcatattatcatcatttttcttcaagtatgcagatacaattttgaagaagtactcatcaacaattgcgactatcttcaccggagtagcctctgctgtgctgtttggccacacactgacgataaattttgttcttggaatttcaatagtaatcatatctatgcatcagtatctttctaaccaaattaaggacgaagtgcctagcagcaaagttgaaatggctgaagctcatgatcacaggtttgtcatatcatattgttga

SEQ ID NO: 10431 - DNA, 1368 bp, Zea mays
  Peptide Sequence Number=SeqID_53806
atgcaacactctccccctcctctcctcctcgtcgtctatggtcttcgcgttcccaccgccaacaacaccagcgcgcctaggttgctagctcaccatggccttggcatccaccgcaagggcggcagcggcagtggcggcgacggcgattcatcagcaatgcgggggagcgacggccgcgcatacgcagcagcggcgagcccggtgccgcgcggcggctgccagcgtcgccgcggcgtgcgcgccggtgaaggcagtggggccacggcgcggggcgcggagcaccacgggcacggcgcccgtggtggcgggcatgtggcggcagctgcaggggtgcgacgactggcaggggctgctggatccggcggcgggcggcgcacccggtgctgcgcgccgaggtggcgcgctacgggcgagctggtgcacgcgtgctacaaggcgttcgacctggacccggcgtcgcgccggcacctcagctgcaagtacggccgcgggcggctgctggaggaggtgggcatggccggcgccgggtacgagatcacgcgctacgtctacgcggcgtccgacgtggcggtgcccaccatggagccgtccaccagcgggcgcggccgctggatcggctacgtggccgtgtccacggacgagatgacgcggcggctaggcaggcgcgacgtccttgtctcgttccgcggcaccgtgacgcccgccgagtgggtggccaacctcatgagctcgttggagccggcgcgcctggacccctgcgacccgcgcccggacgtcaaggtggagtcggggttcctcagcctctacacctcggtcgacacgacgtgccgcttcggcggcgccgggagctgccgggagcagctcctccgcgaggtgtcgcgcctcgtcgggtcgcgcgccaaggacaggcccgcagcaggcgaggacgtcagcgtcaccctggcgggggcacagcatggggagcgcgctggcgctgctcttcgcgcccgctgcgacgagctgggcgtcaaggcgctgcgcgtggccaacgtccacgaccccatcaccaagctcccgggcatcttcctcaacgaggccacggccggggtgcaggcgctgcgcccgtggcgcgcctcctgctacacccacgtcggcgtggagctgcccctcgacttcttcaggatgggcgacctggccagcgtccacgacctcggcacgtacgtcgcattgctcaagagcggcgacaaggcgggcgcggcctggcgcggcgactgcggcgttctggcgaaggtggtcgagttcgtggggcggcaacgcgcgggcgccttgccgtggcaggacgccgccctgcagatgggcggcctggtgcagactctggggctcatctga

SEQ ID NO: 10432 - DNA, 933 bp, Zea mays
  Peptide Sequence Number=SeqID_53807
atgagtagtggtaataatttaattgttgatgctcatgatttatggaatagaattaaagaaaaatattctatggcaaactgtgatgctcctactccctacattacttgtgatactaaccattcaaagggagaagaacaagaacgatggcacccaaacgatgaatccacctcgtcgacaggtttgttctccactagtgataaatgttttattgctaacaatgacggtggagacgaaagccatgatgaggaggaatatgaggatgatagcgaggatgaatcttcatcatcacaaggtacattttcctatattgcttccactgacattaatgacagggaaaatgagaccgatgatatggaagaagaggagattcgccgtttctacaaccatctcaacaaagcagacaaagctctcctggttaagttgttgagaaggaacaaggaacaaggcgagacgcttctcaggctagaggagactctcatcaaaaccaatgatagcctggagaagatgaccaaagaacatgaggagctaaaatactctcatgggaatttggtccaacgacaactgatcaagccaaggactgaggcaagaagagcttcgaggtaccaagtgcacgggagaaggtcaaggagactgaggaacccaaagccaagggtgaagaagaaggcttgcaaagtcaaggccaaggcagctcagtctggcacaccggactgtccggtggtgcaccggacagtgtccggtggtgcaccggacagtgtccggtgcgccaggctgaactttagcgaactggccgctctcgggaattcaccggcgacgtacgactataattcaccggactgtccggtgtgcaccggactgtccggtgagccaatggtcggccgggccaacggtcggccgcgcgatctgcgcgggacacgtggccgagccaacggctag

SEQ ID NO: 10433 - DNA, 372 bp, Zea mays
  Peptide Sequence Number=SeqID_53808
atgaagcacaacgagttcactacaagaacggagctcaaatcactaacacggatgatcaagtgtgcggagacggagtgtggaagacttagaatgctcaaagtatgcttggattactcctccatgcgcctaggggtcccttttatagccccaaggcagctaggagccattggaggcattcttggaaggcaaatcttgccttctgtcgggtggcgcaccggagagtccggtgcaccaccggacaaccactgttcatgtccggtgcgcgatttccttccattcctggcgcagccgaccgttgcaacttcgggctggttggcacaccagacactgtccggtgcacaccggacagtccggtcacaacagcaaaactga

SEQ ID NO: 10434 - DNA, 393 bp, Zea mays
  Peptide Sequence Number=SeqID_53809
atgggagggttgctcaccttgagtacagactcaggagcgcttgatcaacgacagggacgcagggaaacctcgggtcgacggaggcggggcttcggctgcacggagaggacacccatgagcacggaccgggcaaaccgaggggtgtcccgggttgcgggtgataaggcgaagcttaccgaggcaacgaacgcggcgagtgctcgatggagatcgcagaacgaccgcgagaccacgtctagcggcggcagaactccctggacgcgcgtgcggtgcgaggcgagtgctgagggctgcgagtgtgcgagtgagggaagaggagggcgagcgggtgtttggcagctagataagggccaagatggggatgggcacggcctcagcgtgcgtcgtgggtga

SEQ ID NO: 10435 - DNA, 849 bp, Zea mays
  Peptide Sequence Number=SeqID_53810
atgggggttggcactcttcagtcaccgctcggcttcaaggattttcatcacgcagcccggctgcagtccctcaccaatggtcacccgtggctgctgtcgccggtgctgaagtggtggccgccgctggggaggcttccccttgccgaagcggttgcctctgccgacgagaccgttagtgccacctgcgctctggacctccggctctttggctttaatggctggttctcgtcccccccgcccgaggtggaggtcgttgtcgcactgctggtggagtggtcgccgacgagccacccggagtttgttatcccgcaggccttctggtcgggacaaccgccgagggcgctggcgacgtctaagtctaggtaccatcgttaccccaaactcacttatccgagtgtgagctacctttcgcggaaggtgacgagtgagtcgaaaggcacgaaagtcgttttggcggaaaacttttccgaggaaaattttgacgcagagggggcttctccttttctagacacgaggcgaccgttcgggccagggcccttgcggagggcctggctgtggtcgtcgggtctgcccgagccatggcctcacagcagcgtgcctggaccgaagatatgttttggccgctctgtgactttgtttttgtctccattcttctccttgcatctgaagaaggttgtcctgctatctgcagggttcgagacggctcttaacaagtccatcaagaactgcaaagcgcttgccgaggcgactgagcagaaggaggccgaccgtgtggccatgtccgagaccatctcggctttttgcttagccttcagcctcaacggcgtcccctcgggtagctccccctag

SEQ ID NO: 10436 - DNA, 711 bp, Zea mays
  Peptide Sequence Number=SeqID_53811
atggggtcacgctcctcaaacagcagcaaaaagaaagcaacgcagagaccgggaaaggggatatttcgaaaaaggaaccttcccagcgaaggaaacgggccccgagccctcctactgatcaggggttcgaaggttgtgccctccggggtttggcaaccgccccagagcactcgggctccgtgccctttactgatcaggggttcgaaggttggcccctcggaagggttcgacagccgccccagagcacgcagagtcagggatgaccctgggtacgtccgttacatggccgaggctcgggctatgctcccgaggtaccctaggacatttccgagaccagcgggaacgatttgtaacggaatcccaccagagggaggcatcgagccctcagaccctatcgaatgggtccgggcccggcaaatcacctgcaggacaaaactgagtcacgatctcccacgagttcggcctcgggcgcaacagggagctccgcctcgctcgacctcaggcctcggcctcagcctcggcctccggagaaggtctccgcctcgcccgacctcaggcctcggcctcagcctcggcctcgggagaaggtctccgcctcacccgaccccaagcctcggcctcagtttcggcctcgggaggagtcacgtcctcgcccgacctcggcctcggaccgattacgctacaggggatacatcattaccccactcctag

SEQ ID NO: 10437 - DNA, 201 bp, Zea mays
  Peptide Sequence Number=SeqID_53812
atggcgccgacgctcggctggggtggggtagttgggatttttattgtgtattttatttacatgtttgttgtgatgttaatttttgctatactatgtatgtattgtgttgatgcgagtacacgagcaagctattgtggatctgaggttcagcaggtagaagttgctgagcaagagctcattgaaggcaagttgtgcccttga

SEQ ID NO: 10438 - DNA, 51 bp, Zea mays
  Peptide Sequence Number=SeqID_53813
atggcgaccaacagtccacaagatgcaaagtggattggactgaggctctga

SEQ ID NO: 10439 - DNA, 603 bp, Zea mays
  Peptide Sequence Number=SeqID_53814
atgggcgggggcctcctggcagcagcatccgctctgaggtcatcgctgccgctgttcggccccccgaagcagaagtcgtcgtcgtcgccgcttctggagcgggtgacggcgcgccgttcgtcggtcttctgttgctccgcaggcccccccccatcgagtggggttgttcgtacctgcggaggaaccccttggcccctcttcaatgagccgaggccaggggtagcggtgtcagcatggacagaggcagagttggctcgaaaggaagacttggttggccggagcctggccgggtcgtccgttagcgggaccgacgccggagttgatcttccgaggcctcaggccgggctgatgtcttcgggggacagctggccgaggcctcggggtgaccagccgagccgcctgctcgggccggattctcggagaagaccctggcggcgatggcctgggcatggtgatgacgtcgtccttcagagtggagatcctcggaccgcgtcaccgtccgaggctaggtcggacctcgccgaaggtgttgtcgacgccgagggtgctgctgctcccttcagccgtcaagatccgagcctgcaggatcggattgtcttgtag

SEQ ID NO: 10440 - DNA, 261 bp, Zea mays
  Peptide Sequence Number=SeqID_53815
atgtggggcagtgatggaggggcgccaatggaagcgatcacgggggtgggggcgaggatagcgggggcggggccggacgtgggggcaacctggaatgtcgtggcgagatccgctggcgtatgggcgagatccatgacgggagaaggggcgcggtggaggggactcgggctatttctcgagtacctctccgtaaggacctgttcgttggatgaccacccgggaaaacagtacaaccatgagggtggaatgggacgtccttag

SEQ ID NO: 10441 - DNA, 267 bp, Zea mays
  Peptide Sequence Number=SeqID_53816
atggaggcaaatgaggataacgaggaggaccccgaggagcaccagctccaggcccagcatttcggtggtgggcaacaacagcgcccgcaagcagcagccacgtatcgggagtttctgagcactcagccgtcgttgttcacaaaggctaaggacccgctggacgccgatgtgtggctcaaggttgtgaagtccaagtttccccttctcacgggagcttgccctgatgtcgccaagactcgctttgtcgcccaacagctccggggacct

SEQ ID NO: 10442 - DNA, 165 bp, Zea mays
  Peptide Sequence Number=SeqID_53817
atggggattggttgtctacgggataaaaatttgaataaggattatggtgtggtaccgttcttttggaggacatgggttgctggagtgacttggccgtccatcttgccaccgggttggactgtcgagtgggaccccgcctcggctgaggaggagaatgaggagtga

SEQ ID NO: 10443 - DNA, 723 bp, Zea mays
  Peptide Sequence Number=SeqID_53818
atggagcagaggattacccggtctacgctcgccggcggtcgggtggagtccggtgaccgtggactggcttctccggtgaagcaaactccgattcctcgctcggggagcttcaccgaggtgtgcacagtcttctccgagggttggacagggttgggaaagggttctgttggccggtctacggtggcagggggatcgggcggccgcggacacgccgtgcacgggcaaacgccggtggttttgggctccggtgaggtcgagcgcgtgcgaaggggtacggtcaaggtccctgggtgctttataggcgcgggcgtgggccatggcgccggctgggctttggcgcgacgcggggcacgcggggcgcgcgttgggcgtgctctagcgagccagagcgcgtcgaacacgtggtcgttgctttctgcccttgttcttgcgcctgctgagcagccaaacgtgcgaatcttgccatatggcttgtgtaagatttcttccttgcgcctagggctacctagttcatgtgagttccaagggaagatcgggtctggtttagaagatatggtggcgccaagtcttgtctgtctgcactgttcaacccgagacaaaacaggtgccaactcgtgtcaaacggtcttggcttgggttcaaactcttcaagggggttccttagataatttggctcctttctgttatttagaccctgaggttttggtgtcattagctaggtga

SEQ ID NO: 10444 - DNA, 1419 bp, Zea mays
  Peptide Sequence Number=SeqID_53819
atggcccgcgcccgcgcctataaagcccactcgggcgtcgactgcactcttccgcgcacactcaagcctcaccggagctcagctcaccgccgtttgcccgtgcgcggcgtgtccgcggccacccgagccactgccgcccgtagaccggccagcccagctttccccaaccccgtccaaccctctgagacgagtgtgcacaactcagtgaagctccccgagcgaggaatcgaagcctgcttcgccggagaggccagtccacggtcgccggagttcacaaccccgccggagtacgtggaccgggtaatccgctcaaccattttccgattccttgtacacacagtcactacgttaccccgtgaagctcactgtgcccttggattggaccagatcgtcgtggtttggccggtacactcgccgccgacgaaaacacccgcctgcgcgcgtggaccgagcgactccgaccatccccgccgtcgagccgcacctcgctgtgaccgccagagcctccccgagccaaccccgcccttcgccggacccctcacaccgccgttgacttcccacggatcctcagacgacggaaatgcactgtcccacactgacgggcttgcacgagagggctttccccgcattttgtgggaggtacttcagggggccggatacacgacaccccctcagtacgcggtgcagcagttcgagaagcaccgagtgccccgctgtagggtgaggatgaccttggagcctcatcccctgcagccaggctggcactcattggactccgagtcttttggataccgagctgaggacacgatcgaggcgatcgctctgcacgggttgaccactttctgcggattccatcctttggagctggctacccaccccattggcttgttccccgccgaaagggaggacgacccaatgtggaaggatagggtggagcatgccaaggatatctgggccatctacccaggacaaactgcacacttgaccgtacggtgcatgaatgctctgtaccgtctgcaagtgatgcgcggtgaggcgatgtcccatttgatggcactattggaggcgacaaagatcactttggacaacagggaggagctcgtggttgatttgtccactgaaatggtgcaaaaggacttgcaggtggagcagctatccacggatatccaagagttggaggaattggttggcaccagggagaacaccatcgaggttctcgaggatcagcttattaatactcagcaacagcttgctgaggctaatgagcacctggatatgcatcatcaggagatccaggacatggaggccaacgaggacgtcgacatcaagggaggagaggagcctgcctctagtgtggacactgctggctcagggagaccaccttcccccgagtcgagtgttgcctcgttcgctgactag

SEQ ID NO: 10445 - DNA, 831 bp, Zea mays
  Peptide Sequence Number=SeqID_53820
atgagccaaagatcaagcgtgttcaccttgatccctaactcaaatcctaatggccccattgacaaaaactcagcaaaacctgctagcctccacacacaaacgacaaagggacctgagaggaagagatctctcaacgggatcatggccataatctcaaagatttggggccaatccgcgcttgaactcgacctctctctgcgttgcctcgtgctcgacgctgtgccagacgccagagcgcgcactggcccctcggacctggcggaacttcaccggaaggcgaagatcacccaaaccggacttcggtcgcccgcctccacgcgtggactggacgctccgaatcctcgccgccgacaagctcccccgcctgcgcacgcggaccggccaactccgaccatccccgacaccctcggccacctcaccgaagcaatctcgccgccggaagtgcttagctccgccggttaccctacgccccctttgtactcagtgcagttgtatgaggagcacctggtacctcgttgtcgggtttggctgactttggaggctcatccccttcagccgggttggcgttctcttgattccgagacaattggactcaggacggacgacaccattgaagcagcagccatgaagactctgacgactttctatggctaccatcccctggagatggtgatgcaccccttgggactcttccctgctgagaagaaagatcaccccatgtggtgtaaccgcgtgagccatgtgaaggatgtgtgggcaatgtatcctgacttggttgggagggtcactgttcagtgcatgagtgcgctgtaccgccttcaggccctttag

SEQ ID NO: 10446 - DNA, 672 bp, Zea mays
  Peptide Sequence Number=SeqID_53821
atgagcacgataagggacgtgctgctgcacggcgcgaaggcgaacgacgacaatctacgacggcaggaacggaagacttggtcgaggcgggggggcgagctatggaaagggacgccgcggtccaagcgcaggaagctgggcggagcgcgcgacgcagggagccgagggcaggggaattcgcggcggctacagccgagcaggcaagctgcgcgcagggacaagcaggagcaagggcgcggtgcggccatggggagagggaagagagaactccggccagggagccgagggcagggcgagcgccatggcaggcggccgagccaggggctgggacgcggcactaggaaaccgcgcgggccaaatagggagcagcgcgcgcgaagggagaaagacagggcatgcggcgctggagcagagaggaagaagcagagcgcgtgcattgggaggagatggagtgcggcagagagctccggcgagctggaggagctccgcgagcagagcacgacactggagctgacacagccatggcgagcagaggacgctggccaccggaaatcagagagcggcgcagtccgagcaggggcgccgcggcatgggcgagcgcgccaaggagtagcgcgcgcgacaagcagagaggcgtcgggagcgctgaaggagaggcagggcgcgcgctag

SEQ ID NO: 10447 - DNA, 516 bp, Zea mays
  Peptide Sequence Number=SeqID_53822
atggcgctttcccccctcctccttgcggaaaggggtacccccaagactcctaaatctcagctggtaacccccatcatcacaaagctgcaaaggcctgatgggcgcgatcccggtcaaggctccgaccactcaagagacacgatctcgtcacgcctgagcccagcctcgggcaggaacagtagaccaaggcagattcatgcctcgcccgagggtctcctcaagcaacggacgcaccttcgactcgcccgaggcccagctcgggcaggcttcgcggagaagcaaccttggccggatcgctacgccaaccgaccatatcgcaggagcattcaatgcaaggatcgcctgacaccttatcctgacgcgcgctcttcagtcgacagagccgatgaccgcagtcacttcgccgctccactgaccgacctgacaggaaaacagcgccgcctgtgctgctccgactgctgtgccacccgtcaaggtgaggctgacagccgccaggaccggcctcaggcgccatag

SEQ ID NO: 10448 - DNA, 315 bp, Zea mays
  Peptide Sequence Number=SeqID_53823
atgaccgggaaaaagaccacggcttcctctgacggcggcactccaaagaaagccaaggtggtggtggaggatgaggaagaggcggggttggaggatgaggaagaggcgactgtgacactatccgtggagaaggacgcgctggagtgcgacatctgctgcctacccttccagtccgaagttttcatggcaagtcagattaccatgcatgtatatatacagtacatattgatcggtaggctccagcatgatgttctgctctgtgtaaaatcagtgcaagaacgggcattcgcattttgtgcaaagtgctctgtgtaa

SEQ ID NO: 10449 - DNA, 543 bp, Zea mays
  Peptide Sequence Number=SeqID_53824
atgggaggagatcagattggaggcttcgcatggggacggatcgcaaccgctcgtacacgagtatggctttgggcagcgctgcgcggcgagggggtggctcgtcaagcggacgctgggaggagcagagtgctgagagagaggaagaagacagacagacttttcacctgcgcatgtggagctcggctacggcggcgactcgacggactggatgcgcgcacagagggggctcggaccgccatggccgcagcagcagtttggttgcaactgcgccgatccggagcgggatgcttgagaccgatcgatgcaattcttaaggatctcttggacctatgggttaggacccacacacgctttcgctgtaacactttgatcttgttggttgatgttgatcgcatggtcttcattggggtgcaggataagcatcatggtaaagatcaagggatgacaagggttaaggtgataacagacaaacacaaccaaggatgtattttagacaaaacttgcgaggcatcaaagaagggggagcaaccaatggtgaaatag

SEQ ID NO: 10450 - DNA, 359 bp, Zea mays
  Peptide Sequence Number=SeqID_53825
atggtgtctccggtgagctgcaagcgggtaatccgagtggacgtccgtgccccattcgttgggggtcggctaggggcccagaggcacgcccataagtacctgcggcaactggcgtgccggtcgcttgacgcgtgggcctgggcttccaagctggcgtgtcagaagtcagagaagcgcgtccacctggcgcggttgcatgccacctgcatggctgcccgccccttccgcccgttggtctgggcaaaagtggggggtcgcttcctggttgctcccttccgccggtggtcacccaagacggtgacctccagctcctggatggggagaggcaaaccaggctgtgatcccgccctcagcatcgg

SEQ ID NO: 10451 - DNA, 867 bp, Zea mays
  Peptide Sequence Number=SeqID_53826
atgacgctgtccgagcagctgtccacgcccgacccgctcatccgcgacttcctcaagatcccgcacgacgccgacgccggcgagggtgatagcccctcggccgtcgacgcgcaggggggcggcaggacgaccggctggaagcagctgcgagaccggctccggctccggcgcgcggcgggcgcctggcagaggcgtaagaccggcgcggccgcggcccacgccccggcgaacggcggcggcctcagcaatatcagcagcgctaacaaccgcagcaacaagtacaactacaaccccggcgaggcggaggcggcgttctcccgcaccttctcccgcgcgccgtcgctccgcgcgacgcccacgttctcgcgcgtcgcgtccacccgggtcggccccgcctcctgccgctccagctcaaggcggctctcgacgtacgacttccgcgacgtcgaagagcgacgccacgaggacgaggacgaggacggcgacggggaagaggaagaagacggcgaggacgagggggacgaagaaaagacggcggcgcccgcggcgcagatgtcgctgatggcgctgctggggcagacggacaaccagtgggacgacgatgaggatgaggaggaggagagcggaggcggcgcgtttaagaaaggcggggccggcgccgtgggcgacgaggacgaggacgactgcgacagccgggaggatgagatggtgcacgtgtgctgcgtgtgcatggttcggcacaagggcgccgccttcatcccctgcggccacaccttctgccgcctctgctcccgcgagctctgggtcagccgcggcaactgcccgctctgcaacggcttcatccaggagatcctcgacatcttctga

SEQ ID NO: 10452 - DNA, 114 bp, Zea mays
  Peptide Sequence Number=SeqID_53827
atggcgcaccggacagtccggtgcgccaccggtgcgccaacggtgcgccaccgtgaacagttcactgtccggtgcacaccggacagtccggtgcggtgtccggtgtgccactaa

SEQ ID NO: 10453 - DNA, 789 bp, Zea mays
  Peptide Sequence Number=SeqID_53828
atgactgagctggtccgtgctggttcaggtggcagccggttcatcggggcgccgagcttgagcgacaccagcatagactgggctggcggcggcggcggcaccgacagcgcaagtgaagcgccagcgatggggcgccgtgcaggaccaacaacagatcgagctcccgttgtcacccggtacgtacacaaacaccttccgaccaccaaaaccttcctccgcgaacccaacgcgaccggtgaaagtggaacagcacgcccgcttcagaaaataaaccgtgagctggtgccccctccttcggcagaggacgtgccgtttgcgcaggtgtacaggttcgtcggcgacatgttcgacgcggacgtgccggtcccggtggaagcccacctacagaagctgaaggagatggacgacatcacagccaagacagtcttgctggtgctgcggaacctcgagaacaacctgtcggtgccccagttcgagcgtgtgatggaacttacaagattgtccgatacaagcaaggtcctggtcgggaaggcaattaagctgaacgaagagaaaacagaggccctacagctggaaaaggcatgtgttgtcgcttccctgattcaggatgacatgttacactttaggaaaaaattggctgctacattactattttcagatataaacaagagaaaggggtgtccattatacaagtatgacaaagaagtcgatgctggaagctcctctgatgttcagatattagatagtcccacaaatcctaagaagaggaaaccactttgtgtatcttaa

SEQ ID NO: 10454 - DNA, 141 bp, Zea mays
  Peptide Sequence Number=SeqID_53829
atggccccgtcgtggggagctatcggcgccgcctcacctgtctgcctgagttggggagacgagcaagccactgtggaatctgaggttcaacaagtagaagtagctgagcaggagctcattgaaggcaagttgtgcccttga

SEQ ID NO: 10455 - DNA, 369 bp, Zea mays
  Peptide Sequence Number=SeqID_53830
atggcggcggcactgggtttcctggaggaagaagacgagggccccctagagcgccgagtgggtcttgagcatgcgcgtcacgatgtgggagtccccgggtggcgcggatttcggccatggcgacggcgacatcttggtttcgcccgccacggcacccatcacatcacgctcggtgcccgcgatatgacgaacagggcacaaacgcttggttcctatagccggtcatgtggcaaattctccacgcaagcgaggatcatgcggatgaccaagcgggatccacggattctgttgcaacagcctgatccgaacctcacggatctaagctcacatggggaagaagctactgggcaacacgggaccacgcgctag

SEQ ID NO: 10456 - DNA, 393 bp, Zea mays
  Peptide Sequence Number=SeqID_53831
atgtggtgcaaccgtgtgagccatgtgaaggacgtgtgggctatgtatcccaacttagttgggaggatcactgttcagtgcatgagcgcactgtaccaccttcaggccctgcagagcgacgctatggcacaccttgctaacctccctcagaccactaagttcaccctcgacagccgagaggacttcgtggtcgacctgtcttcagagttggtggagaaggaccaacagtatgcccaggccttcaatgacctatgccagtatgcgggttatcatgctaactctgatgaaaagaagagagaccgcttccgcagaggtctcaacaccaagctgcgtgagcgtctcaacactgttcgggccgatagcttcaacgagttggtcaacctggccatataa

SEQ ID NO: 10457 - DNA, 2000 bp, Zea mays
  Peptide Sequence Number=SeqID_53832
atggggacatgtgtggcccccgggggaaggatgtcttcgcccgagctccgggagtcttcggcgcgaatgttggaggttaccgggggtcgatggccaaagaatcttacgatcccctgggcggagggcgaagacatgtctacgtctcgtatagctcgttgcttgaggattttcccttacgggcagaatattgctgctattatgtcgccagtgatgaacaaggatcgtcaggatgctgcgcagaagcgccgagtggttatcaggctccccgatcctaggcgtgaggcgaagagagcgcgggggagcgagaagtttgctgcccccggtggtagccagccagcgcctgctgcgaaaccggccgcgcccggatccagcaaggtgtcagagagcgtgaaggcagtcgtcgctggcggaaccaagcctgccctgggcgaagctgcgaaggcgcaggagctgccttcgccggggaagcgtgttgccgacttcggcacgaacattagagtggacgactattttttgggtggcgctttctgcgcgagcggcgagattccgtcggccgctgctgtcaaggacgtggtgagctccatgtcgtgccggctgagggaggcatcgcagcagctaagtgagcacgcggatgccatccgggagaagtcagatgcggagagcaaaaaccacagactggaggagaaggtggccgccttggaggccgagaagacggacctccggcgccagctggtggaggaaaggagggaggcgaaccaggccatcgccgaggcgcaggctgcgcaggcggaggccaaagtggcacgggcggagggaagtctcaccagccaacgtgccgaggagtgggaggtgaagttcaacgctctgcgcggccgcgtggacaaggccgaggcctctacgcgctcggaggttgagcggacgctcgcgcagctcgtggactcgtaccgcgagctgggtgcgcggactgctgacttcgaggtgcccgaccgagaggcgggccttcgcttcctcgaatggttgcaggaggagttgctggtactcccgaccatcatggagggtttcatgtccttttcctccctcgtcacctgcgagggggccatgaatgcgctgtcttgcgagggctgcagacactacgaggtcttcgagcgatcagacgagagctttgaacgcgagatcttcaaggccgaagaccctgcagtgaagcagtcagcgggggcactttttgataggatgtggggggcgcatggtcgggaggctgtcagggagcgatccgaccgggcgagagagcaggtgaagatggagcatgccgaggacgtcgaggacctcggaggtctagtcggcgcgccgctcgaggctgcggaggtcaaaccggtgctgccctcggatgccggtgaaggcccctcggccgcgcccgtgcctgctatggccggcaaagaccctgcgtcggcccctacgccgacggtcgaaggagccccggaggtggtggcggagccggcggtcgaaggccccacggccgcggctatgccttcgcagggttttgggcctgcgcacgcaaccgcttctgacaatgctaattttgtggcggcttcgaccgtggttgctgaaaatgattcggatgattccgtgtctatgttttttgagtctgatgattctgggagttcggttgtgtggacggaggagtcttcggatgaggacttagattattttgcggccttagatgtggctgcggcggaggcttctccgtgtgtgatggatgctaaagttcttcctggtacgagtgctgggcgtaggcggcgaagggcggtggcgaagcgtagagtgagtgaggtggagagtggtcgtcttcgtgtggacggggctggcaagcaggaattgttgtcctcgccggttggggcgagtgtgggtgagggggagttgcaaaatctttttgagggtgaggagctgaggataatgctgtttaactacagggagatgggtatcatcccaaaggttgaaccaat

SEQ ID NO: 10458 - DNA, 72 bp, Zea mays
  Peptide Sequence Number=SeqID_53833
atggccccgtcgtggggagctatcggcgccgccgcacctgtcggcctgagttggggaggatctggatcatag

SEQ ID NO: 10459 - DNA, 885 bp, Zea mays
  Peptide Sequence Number=SeqID_53834
atggcttctcacgaatcctcggaaggagggaactcacattcccacacggacggacttgcacacgagagctttccccgcattttgtgggaggtactgcagggagctgggtatacgacgcctccccagtatgtggtgcagttgttcgaggagcaccgggtaccccgctgtagggtgaggatgaccttggagcctcatcccttgcagccgggctggcgttcgttggactctgagtctttcgggtttagggttgaagataccatcgagtccattgctctccacgggctgacaaccttttgtggctttcaccccttggagctgtcaactcatcccattggcatgttccctgctgaaaaggaggacgacccaatgtggaaggatcgagtggagcatgccaaggatgtgtgggctctttacccagggcagactgctcatctgacagtgcgatgcatgaatgccctgtatcgtctacaagcagtgcgaggtgaggcaatggcacaactgatgggattggtggagtctaccaagatcaccctagataatagggaggacctggtggtagacctgtccaccgaattggtggaaaaggacctccaggtggagcagatggccacccaaatccaagagcttgaggagcaagtaggggccaaagagaacaccatcgaggttctcgaggatcagctcctgactacgcaacaacaacttgaggaagccaaccagcacttggatatgcaccatcaggaaattcaagacatggaggcagaaggagccgatgaggatgtcgacatcgagggaggagaggagccggagcttgcatccaatttggacactgctggctcaggaagaccaccttcccccgagtctagtgttgccttgtttgcccattag

SEQ ID NO: 10460 - DNA, 828 bp, Zea mays
  Peptide Sequence Number=SeqID_53835
atgggcccgccccgctccgcggacctcgccgtcggcgtcgacacgtcgcggctacgacgctccgggaaggtggtcctatggtggcgcggcgggggccggttccccgcgagggccgacggcgcgttccgctccctcgtctccggggatgacttctcctgcgccgtccaggccaacgcgtctgccgccgtccgctgctggggctcgcagggtagcgctgtgcaggcggtgcccggtggcattaacctcgaccgcatgccgctccctggccaccaacctatcaacggggcctgctgcatcgcctccacctccggtctcgtgtacaatagcgataagattgatgaaattatgcatcataggcaaaatttgtttgaagattgggagaatacaattccactggaatatagcgaagaatgcagctgggctcccatctttgtgagacagtcaaatttcaagttacctgctgatccgtccactcctattatcatgattggtcctgggacagggctggctccttttagaggcttcttgcaggaaaggttagcattgaaacaatctggggcagaattgggcacttcaatccttttctttggatgcaggaaccgtaatatggcgcagaagcaggagctcgcacggcaggtggaagtgtggttccagaacacacatgttcagataacacacatgttcatgctcatgctgaccccacacaggttcatatttgagccaagagctgattggtttggtgcagaagatgatcttttttcttacattctgatactcatgttctgtttcaccagagttgacaaaagaccccgaactctattgccctaa

SEQ ID NO: 10461 - DNA, 228 bp, Zea mays
  Peptide Sequence Number=SeqID_53836
atggggacccctctggcggattctttgccgagtgctgtcaggcagacactcggcaaagctcgtgcttaccaacgcttgcttagttttttagacttcctaagcttcggttttaaggacgcatttttgccatttccgaagatgtctcaagacaaaaaagttgctgctgagacaaagctgagcgaagaggagaagctccttgaggagaagactgctggatttgttgagtga

SEQ ID NO: 10462 - DNA, 1488 bp, Zea mays
  Peptide Sequence Number=SeqID_53837
atggcgaggtgcccaaggcgctttgcaacaaggtcgcgatctcgtcccttttcgcgttcaccaacccgtagcttccgaggacttgtgacctcccatctcgagccccctccctcctccgtcggtccagtagcttgcgccgtggattgggtgcccaactacgacaattggctatccgcacccgtcgcccctacttccctgtgtccctggtcctcaagccacagtaaccttctactaacagggcacgccgtggaactccttgcgctgcccccacaccgtcgctgtcgcatgctcctcttagtcgctaccgctcgagcgctccgcctcggcatgtcgggtgtaccggatgaagaagcagtcacgatcgtgggaaagacatcggactggatgacaaggttgatgtcagcctaccgcctgagtgtgttgacaatagcggagaggaagatggtggagggccggaggagtgaggatggtggtcgccgcgagcgggaggaggatggtgcggccgtagggtgccctatggcagtgctggtcatggctagactggaggcgacgacggagggaggagcatggctgggtgagtggtggatcgatccgattcagttgagttggggaaagggagagaacacagtacacgcgacggtcgctgcttcgtttgtcggctcacccatccatatccagtgttgttctgacctgcctttgcttcccttgctggttgacgcgccatcatcgcatgaagaatgtggtacatccatcagccgagaatcattccaggaggaagtgaagaacctaaacccaaaggttgtgatgtttggtgataatgttcctcaagagagagctgaaagcgctaaggaggctgcaagaacatgcgatgcacttctagccatgcttataacaaaagttttaaatatgcagcatgggaaccatttagagaattgtttcgtagatgcttataacaaaagatattttgaggactcaggcttgaatattacatgtcagggcttactcttccaatcaaacgcactaaacaaagaaaatggcaagcttggccctaccactgctctttttaaggctgaaatgccctggttagcccaaagagaaaatctctcggagaaacaaagagttaagagtcttcaaaacggtgaaaggaactttggtggattgcgagagagctggatagtgatcttttttgttttggttactttgcctctgttctcatttgcctctgttctcatgcttatgcttccaattgttgaacaagtattccttcatttctgcagtcgcatgtatcagagatactgtgagcacaacaattggaagtttaagtcaatttcttggtcatatatatcgaccttaaaacaacaagatctggtggagaagggcatcttcgacatttatgaggacgtcgagaagctgttgcaggcattgtccaaggaggaggaggtcgtgcgggtgtggcctggtcaccttctgcgccaacgtaatacgtga

SEQ ID NO: 10463 - DNA, 693 bp, Zea mays
  Peptide Sequence Number=SeqID_53838
atggcgggcagcctttgccggtccgtggatctgcaggcgtggcgcagggggtgttggctggtgcgcgatgggatttgggagcagcaaagcgagtttaagagaccgaatgggagcaggaaggggaggagggggaggagcctgctgccactaccgagctcctcctgcttctgtggctccacgacgccgtgcgaaggcgacgctaccgcagcagcggtggacttcgaggtgagggccttcccactcggtttcgtttcccttgcggtgcttcaaatctgtgtcacggcacaagctagagcagctcatcaggctaggagaaatctgatagaatctgaagattctagcttcaggagctcctacagaaggatggggtctcgtgaaccttttgaaggcaatgtccggttgtctgctatgtccatgattaagaatgctctagctggattcaacacctcccttgtctgttatggccagattggcaccgagaagacatacaccatgttgggccctctcggcaccatggttgacagtggctctaaccatgctaactgcggcgtcgttcctcgggttgtccagaaacgattctctcggatccaacgagaacgagaagacgagttagactttgtcgaagccctcttcgctagtggaggtatcaaccatcactcgtcactgtaccccgatggtgatcggcgatcgtga

SEQ ID NO: 10464 - DNA, 93 bp, Zea mays
  Peptide Sequence Number=SeqID_53839
atgacgaaggttgatgctttgccaaagattgtggaattttattccgagtccgaagagttggttaaatcactacctctaagctatgttaggtaa

SEQ ID NO: 10465 - DNA, 511 bp, Zea mays
  Peptide Sequence Number=SeqID_53840
gatggggaggctccgctctgctgaatgggagatgaatctgttcaaggtggcgaagtttggcttcgcacatattggcaaacgtttctgcaaggtcagagaggtgatcatcattgtttctgcttgcaacaactatgttgttgacatatgtgaaaatgttgcgacccatctggctcttttcttgattttggttctccttgaaaatgtgtaccctacattttccatgccttccgagctacgctctagtcagaatgtgccaaatgggcgtattgctgggtcggtgctcagactacgttcgatgattgcgcgactgactccgatgaggtctagggcagaccatggccttggtcatcttctctttgaccgggcgagggtcgctagggtcttcgctgtcgggggtaaggtagtgtatgttccgctggccgggaacaaagtctatctcaatgtttctaggaacctgttggtctctgtatatggttatcacccccttggggcctgggatcttcatgcacag

SEQ ID NO: 10466 - DNA, 1962 bp, Zea mays
  Peptide Sequence Number=SeqID_53841
atggacaaggatcgccagggggctgcccaaaaacggcaggcggcgatcaggattgttgacgccaggccaaagaggcaaaagcgggggtcggcgacggctgcggcccccggcggagggaaaccgccgctggcggcgaagtcaggcgtccctgcatctagtaaggcgccagaggctgcggcgggcgccggaggctccaagccggcgaaggctgtgccgccgctcagcagggtggcggaggccgcgaaggcggcccgagcgttgctgccggcaggcaagcatgtcgccgacttcgccaccgatatttgcgtggatgactatcttggtgggtcggacgagggccagcttgctacagttgcgcctgacgcggcggtcgcgatggctgccacagtgccgaaggcaaggggcgaggctcttggctccggaggcgaggcggcggccctcgcggttgtcagggacgaggcggatgcagcggtccgccggctgaaggaggtgtcggaggcgctgagtcaggtggctgacttcgccagccgtactgcgtcgggggccctcacgacagctgtttctgccgaagtcgagaggcttcggacgcaacatgctgacgctgtccgtgagaaatcagcctccgacagcaagtgccgtaaactggcggacaaggtggccgcgttggagagggagaaggctgacctccgccgccaactggcggcggagaggagggaagccaacgaggccgtcgccaaggagcaggctgcgcaggcggaggccaagctggcgcgggcggagggcaatcttgccaaggagctcgccgaacatctgcaagagcggctcaccgccctggagagccgcgcgaaggggccgaggccgcgatgcatgcggaggccgaacggacgcgcacgcagcttatggatacatatctgggtgcgggaggagctgctggaactcccagccgtcgcgggggggttgatgtcgtacgcctccctggtcacctgcgagggggcgatgaacgcgctctcccacgaagggtgccggcacttcgaggccttcgaccaggcggatgaagattttgagcgagatatctataaggtcgaagaccccgtagtgaaggaatccaccggggccctttatgaccggatgtggggtctatacggtcgtgaggtggtcagggagcgggcggaggcggcgatggctcaggcgttgcgtggcgagcgggtggacgacctcggggcgctgaacagtgcgctgcctgacccggagccgacccctgcggaggccgcgcccggggtcgccctggagccaaccccggagaccgcccccacacctgctgcagccggcaaagacctgcccccaaaggtggacgaaggcgcccctgatgccctcgcagctgctgtgccgagtgctggagatcccgcggtggaggtggtggaaacaacagcaggaacggcggcggagccagcggccgaggctcccgcagcgtcagggccttcgcaggttcaagattttgggcctgcgcacgcaaccgctactgctaaatttttggcggcttcgaccgcggaaggtggtaatgaatgtggtggatctgggtctgaattttctgagttttctgatgttgcttattctgggagctcggttgagtggactgagtcatcggaggaggatttggactatttcgcggctttagatgtggctgcggcggagacctcaccgcatactgcgggcgcgcaagatgtgccgagtcccagcaccgggcgccgacggcgaagggcggttgcaaagcgtagagttagtacggaggaagggtctcggcttcgtgtgagtagggctggtcggcaggagctgttgtctttgtcggccgccgcgagtacaggggaaggggaactgcggagtctttttgcgggtgaggagcttaggataatgttatttaattatagggagatgggaattattcctaaggttgagccgatgtag

SEQ ID NO: 10467 - DNA, 138 bp, Zea mays
  Peptide Sequence Number=SeqID_53842
atggcgatatcacaagctcttcatggatatgtgacgatggttcgggttacagtttttccatttcaccccgttcgttgcagctattgctacagtacttttagagagaagaaaattgcagtcgcagttgcaaaccaataa

SEQ ID NO: 10468 - DNA, 219 bp, Zea mays
  Peptide Sequence Number=SeqID_53843
atggccgaagctctggcggcaatggcgggcggaattaagctcgctggagctaaggagacggggctggccggtgaagagatatggagccaggaaatccgagaaaccctaggtgacactggggtgtcacatccttccccccttaaaggaatctcgtcccgagattcgggccagagtcctcccagggtgaagcgaagggtgagacttataggaaatgggtga

SEQ ID NO: 10469 - DNA, 156 bp, Zea mays
  Peptide Sequence Number=SeqID_53844
atgcggtatactggcgagtgggcccaatccgcagcgaccgataatgaagaggctggcgtgcgcgcttggtcttgggccgcgcagaggcaccctgagacatttcttcagctgagatacatgaaatacatcatgaacatccgcaagatgatccggtaa

SEQ ID NO: 10470 - DNA, 753 bp, Zea mays
  Peptide Sequence Number=SeqID_53845
atggactcataccacgagctaggcgcgcggaccgctgactttgaagtccctaaccgagagtcaggccttcgttgcctcgagtggttgcaagaggagttactggcgctcccgaccattgtggagggatttatgtcctatgcctccctggtcacctgcgaaggggcgatgaacgcgctgtcccgcgaagggtgccgtcactatgaggtcttcgaccgatctgatgaggatttcgaatgcgagatttacaaggttgaggaccctgtggtgaaggaatccgctggagccctctttgatcggatgtgggggcccccccggtcgggaggtggtcagggagcggcggtgcgtgacgagaaagtggatgactttggggctttgaacagcgcgcggcctgaggcgaagtcgaaaccggtggcggctgggcccgaggccgctccggcgctgcccccagaaaccgtcgaaggtgctcctgatgcccccgcagccactacggccggcggtggctcgtcgccaaccgctgcgccgagggctgaggatcccccgaagacggcggcggagccggcagcggaggatcccgcggcggctgggtcttcgcaggttcaagattttgggcctgcgcacgcaacctctactgctaattttttggcggctttgaccgtggatgatgggaatgaatcggacgaatctgcgtctaagttttctgattttggtgactctgggagttcggttgagtggactgaaggagtcgtcggatga

SEQ ID NO: 10471 - DNA, 786 bp, Zea mays
  Peptide Sequence Number=SeqID_53846
atgaggtgccgcctcctacttggccatgcctaccccgcctcctcctccgtcggcggggaaggtgatgggacagacccggatgttgctcttccgccacgtggggaagacgtcgtcgattccgccaccggcgggcgggctgacggccgccattgttgtcgtcgcgcggcggaggaaggagtatcatgtctagctgccgtcgagggacatgaactcaagactcctgaaacggagcatcatcccgggttggagaggttgctggagactacccatccggagcataacgggaagctgttcgtcaacacgcagcaggcgcctacctggcgcgccaactctcggtgtttcgaccccagggggtccctggaccgacgacccagggtcgggcgaggcggtgactcctccgaggttgaagctgagtccggaccctggggtcgggcgaggcggagaccgtcatccgaggtcgaggctgagtccgagccctggggtcgggcgaggcggagtccatcgtccgaggtcgaggctgagtctgagccctggggtcgggcgaggcggagtccgtcgtccggcgtcgaggttgagtccgagccctggggtcaggcgaggcggagtccgtcgtccggcgtcgaggttgagcccgagctctggggtcgggcgaggcggagcttcctatggcgcccgaggctggacttagctgctgtcagcctcactttgtcgagtggcacagcagtcggagtagggcaggcgacacaatgtattcctgtcaggtcagtcagtggagcagcgaagtga

SEQ ID NO: 10472 - DNA, 873 bp, Zea mays
  Peptide Sequence Number=SeqID_53847
atgaacatccttgaagctgagggaggggcagaggccgcagcccggcttgcttctccccaccatcaaactggtgccgccgcggactgggtcttcaccaacacgctccaaggtccccccctacgacacgggggttgggtcccacgtgtcatgcaagctggcccaggacagaaggagccaaaccgctgcgcgtggagcgcacaactgcccagcggttacaagcactcctccactttcacccagaccagcgggcctacacgtcatgaaaccgacgcgccggttactacgtgcaagaaattgcaccgccgcctgcgccagtaccgcgccttctcgactgcggaaccggtgccgcgacttgaggcgaccctgggcacggcccaacagtgccaaccgagcacatcggtcacgggtcagtcagtcgcgggagaaggcgcgacggtcgatatggccaaaagtgggccggcagtaatggcggcggcaggcgggcggaagcagcagtcaagtcgtctgcaggctcacgtcccctccttggatagcgagagagccctctcccacggcgtgaagacgacgcgcctgtgtttcgttcctcgaacagctcgcgcacgcacaacggccaccccgctaaccactcgtcccgtcgcattaactctgcggcaggacaggcggcacctttggcaggcgaagcaggcaacacttcacctccgccataatgaccgcgtcaaaaaagggaccgagaaaggggatactccgaaagggatccttctccacgaaggaagcgggccccgagccctcctactgatcagaggttcgaaggctcgcccctcggaagggttcgacagccgcctcagagcactcgggctccgcgcctactactaa

SEQ ID NO: 10473 - DNA, 393 bp, Zea mays
  Peptide Sequence Number=SeqID_53848
atgaggagaaaacatggtattacactcaaaatacctagatgttcaagccccgacagccgcaatgaacaagacaccggcactcaaggcagcagcgacaaagacctccgctctgggcggccaaacagcagcaacgatgacctcagggcagacgctgctgcgacaaggccctcgcccacgtccccactcgaggggcaaggacaagctaccaaggccgtagagccggaggtcagtccgcgggtggcaccgactatctcgtcggcggagaaacctcttccagctgcctcggtgggaggtggcaccggaagcagcaccgaagccactcaggccggagagccagacacgcggcagctgccagcgccatggacggtgaacgcccttccccccgatcactga

SEQ ID NO: 10474 - DNA, 1902 bp, Zea mays
  Peptide Sequence Number=SeqID_53849
atgtggattcatcaagtccagccagaggatttcgtcttgattctacctgatgaagaaactgcctcaagggtgcttaatgatggcaaggcatatagggggcctcatttcagtttgaagttcaagcgctggtcgaggtttactcatgcatcttcgacgatcatgtctggtatggtggaggttgagattagaggaatcccagagcacgcttggtttcgttctacggcagaaaacatcttgagagactcttgctggatttcggacgtgcatcctgatactttgcaaaagaaagattactcagcctttcgggtcagtgcttggtgttttgatcctggaagactacaccgtgatatggaccttctcatcgtcgagcctggattgcacgcacttgagaagagatgcctcacttacaagatcagtgtgagcgctaccctgtcagaactatctgcggcggacctggggcctccaccgcccccacctccggcgtacggcaggagacctgatggtgatggcggcggcggcgaggaccaggacccccagtctcgtcgttcgaacgggtccctgttccagaggcgaccggttcatcttcgcctgggcccgcagctgccgtcaggacgcggtgctgcaactttggcgcctcgggcggtgtttcccgcgccgtccctgttcctgcggcgatcggttcatcttcgcctggacccgcagatgtcgttgggacgcggcgctgcaaccctggcgcctcgggttgcgcttccagcgccgtcaacgacctcgggaagggaaacagcatatccggtgagagatcctgatcgagatgcgctgccttctttgcgcattgatgagacaccggtttccgaggagccccaggaagacagagagactaccgtgacagttatggtgggacagatctccccggggaagataaacagtccccggattgaatgcgacatgactgttggaacgtcgtctgagatggtgggctcaccccggaacctgattgggccgcctgagatggcctggaatgcctcggtctcgccccttcggccaactgggccgcttgagacatggctcccaaggcctgtctcgccccagccttgcctgacgctagagacgaggcttccagcgccagtctcgccccactgtctacctgggctcctgaacacgacgatgcctggggctgtctcgccccacattcgagcagggatgcttgagatcgtgccttctgtgcatgtctcgccccggcctcgagttgggacgccagagatgaccccagatgatgtcttgccaattgaagatactaggacactgaagatggccttgcctgcgcctgtctcacctcagcatccgcctgggtcgcttgagacagctgcatccttgcagacagagccaactagaatgctgaaggtctattaccgcagagggtcaaaagcaagtcaatttcacgacggccaacaagatggaacaggaagggagttgttggcaacagagaatgggcatacaactgatccaagacctgataccctcacagccatgggtgctccgctgtctgcgacaagaaaagaagagttcctcaacaaaatctgtagaagacctgacgcttgtctgctgataccaaataaaaacagcaagaaagcaactcctccctctccaacaacacatgctgctgcgccaagacgaagccgacgtgtcgctggagctggattggaattcagcatgcaagattggggtggcagggccaccaaaaaagccatgaaagccctgcagattattactgaagatgaaggcatcagtcaggaagccctcaaggcttatgcagagcttttcaagcacccactttctcagctccaggtggaggccttgtcagcccttttcggttggcccacgccaccagaagggcctgtttga

SEQ ID NO: 10475 - DNA, 234 bp, Zea mays
  Peptide Sequence Number=SeqID_53850
atgggaattttgggaaaactggatattgtacaactaaaacctaaagatgtaattaaaaattgtaagttcattcaaaaccccaaaaatgaagactgtaatctcgctgacggggagtacatcctcgttctggagcaaggagttgctcaggaggtagcccacgagccagcaccagagcctgccatcgaggatctgcctaccccagctttggaaggcaagccccggttttatgcataa

SEQ ID NO: 10476 - DNA, 381 bp, Zea mays
  Peptide Sequence Number=SeqID_53851
atggtcccaacactgccaaaggtgcaaaaggcttctgctgcaactcccaagaagaggagaatggccaacgtgctggatgatgtgctggaaactacaaaggttttaagccctgctgctacaaagaaagttgctgaaactacaaaaacgcaggccgaagccaaaactaggcaagcagaaaccaaagctgcgcaagctcaaactaaagctgaagctgggccttcagtgcccaccgagatggagcttgttgatcctaaggaaaaacgacagagcggattgcatctgaaaagatcgaagctcctgctcccgaagcttcgaacaaaagcactgactacatcatttgtcatgcttcgggaaaagaactatcccaagaagaaatgctag

SEQ ID NO: 10477 - DNA, 477 bp, Zea mays
  Peptide Sequence Number=SeqID_53852
atgggcatgtgtacagctggccgggccctattgcgtgatagttctgggagaaggcttacttcgggttcattgatagcaatactgtcgcggaccataattaggggtaccctcaaggctcctaattctcagctgggtgaggccgacaggcagtcaggcccgacctcaggcaccataggaagctccgcttcgcccgacccagggctcggactcgggctcagccctggaagacggcgaactccgctccgcccgacccagggctcggacttgggctcagccccggaagatgacgaactccgctccacccgacccagggctcggactcgggctcaaccccggaagacggcgaactccgctccgcccgacccagggctcggactcgggctaagccccggaagacgacgaactccgcttcgcccgaccccagggctcggactcagccctggcctcagccgacggtctccagctcgcccgacctag

SEQ ID NO: 10478 - DNA, 435 bp, Zea mays
  Peptide Sequence Number=SeqID_53853
atgaacgacggcgcgaagaagcgggacgtgtcgagcaactccatgaacgtggcatgcaggaacacgagcctccttggaccgacgcgccttggcggtagctatcctactgcggcatggaggggggaaaggaacgctggggtaggagacaatgacaacgacgaccaaagtggtgaggcaaaggacgaggctgaaccgtgccacagaagcagcctaggcgcgagactcggacgactgtgctgtcatggggaaaagaacgctggggtaggagacaatgacaacgacgaccaaagtggtgaggcaaggacgaggctgaaccgtgccacagaagcagctgttgacgccttttcggagcgccaaatactcaagaagaaccggtggcggggcggactgtccgcggcctggggccggacggtccgcggcctggtgcgcagctag

SEQ ID NO: 10479 - DNA, 444 bp, Zea mays
  Peptide Sequence Number=SeqID_53854
atgcccgtgcgcgccccccgcgtgccccgcgtcgcgccaaagcccagccggcgccatggccccgcgccagcgccctataaagcccccagggaccttgaccgtacccctccgcacgcgcttgacctcaccggagccccaaaccaccggcgtttgcccgtgcccggcgtgcccgcggccgcccgatccccctgccaccgtagaccggccaaccggacccttcccaaccccgtacaacccttggagaagactgagcacacctcggtgaagctccccgagcgaggaatcggagtttgcttcgccggagaggccagtccacggtcgccggactccacccgaccgccggcgagcataggccgggtaatcctctgctccattcttcgattccttgtgcacatagcctctacgtcaccccgtgaagctcactgtgccattggattgaactag

SEQ ID NO: 10480 - DNA, 300 bp, Zea mays
  Peptide Sequence Number=SeqID_53855
atggagaggacgaagggcgaccgtgccagtcgtcacgcgtttgtgatgcgggactggcggacttcgtcggggtctggccttcgtcttgcaatggagaggacgaagggtgaccgcgccagctatcacgtgttcattgatgtggcgacgcgacgaaggcttcacacgaagggtagcgtcttcgccttcgccccaacatttgccctccgagggaccagttcgactgagtcatctggtgccgaagacgtcgctagatggtggagacgctgccctcactcgaagtggtcccgcggggatttttga

SEQ ID NO: 10481 - DNA, 727 bp, Zea mays
  Peptide Sequence Number=SeqID_53856
aagtcagatggaggttcagtgccaaaccagcttttgccagaatgaagatggtttccccaatttgctgagagcatgcatagtccgcctcggaatcaggagccagccacagtatgatggtcatgaattcatcaagcatggctcagagaagtgtgtcatgacggtatacattggatccagtccacaccatgtggaatggagtgtcactgctgctgggcacagattcaaagacacctgccaagtcgacgcctgcaaggcattgagggccctgtgtcagatctatgaagaagaattgcttgaggacgaccccacagtcgtgtacctcactgcatacctgctcaccctagatgcacaatatgtgtcggggaccataattaggggtaccctcaaggcccctaaatctcagctgccgaccccggaggatctacgtctcgcccgaggacccccctacggcaacgaacccaccttcggctcgcccgaggcccagtcttcaccaagaagcaaccttgaccaaatcgccacgccaaccgaccaaatcgcaggggcatttaatgcaaagggctcggactcgggctcagccccggaagacgacgaactccgctccgcccgaccccagggctcggactcgggctcagccccggaagacgacgaactccgctccgcccgaccccagggctcggactcgggctcagccccggaagacgacgaactccgctccgcccgaccctag

SEQ ID NO: 10482 - DNA, 522 bp, Zea mays
  Peptide Sequence Number=SeqID_53857
atggcgcttcacgtctggcgcctccttggagaggctctccaggtcggcgatgagggcctcggattcggcgagggcctcggcgtactccacgcactccacgtcgcattcgtacgcgtgtcgaggtggaaaaagagggggcgcgagcaggaagatgggcttggccaccaagaagggctgcaggtcgtcgtgtccatggctgaggagaggggcgagatcagctacggcgtggagaaagggctagagcagaggatgggcgagctcgactggggcgctcggggaagcggtgccaaggccgacgctaggaatggcgatgcagcggcgctggccaccggcgaggacgcggccgggtggaggtccgagcaggggacggatgtcgtggcaaagctggaggcgagggcttggggatccgagtggagaggatggtgtgctctgctgctgggcggagagggcggctggaagatgagcacaggtgagcggcgtcgtagggataaggagacggctggcttgaagatggatacgtga

SEQ ID NO: 10483 - DNA, 1095 bp, Zea mays
  Peptide Sequence Number=SeqID_53858
atgcaggcggcatgcaaccgcaccaagggggcgcaccctttcgacttcgacgcgtccagcatggcagcccaggcccacacgtcatgtaaccggcgcgccggttgctacgtgcaagagactgcaccgccactcgcgccactaccgtgcctcctcgactgcggaaccagtaccgcggctcgaggcaaccctgcgcatgacccaacagtgccaactaggcacatcggtcacgggtcagtcagccacgggagaaggcgcgacggtcgatacggccagaaatgggccgacaataatggcagtggcaggcgggcggaagcagcgggcaggcggcacctttcgcaggcgaagcaggcgacgcttcacctctgccataatgaccgcgtcaaaaaagggaccgggaaaggggataccccgaaagggatccttctccacgaaggaaacgggccccgagcccccctactgatcagaggttcgaaggctggcccctcggaagggttcaacagccgcctcagagcactcgggctccgcgcccactactggcagaggctggcccccgaagagttcgacagccgccttagacgcagagcgagggatgaccctgggtacgttcgatacataaccaaggctcgggctacgctcccgagggccccctcaagcaacggacacaccttcggctcgcccgagacccagtcttcggtaagaagcaaccttggccagatcgccacaccgaccaaccttggccaaggctcggactctgcctcggccccggaagacgacgaactccgcctcgcccgaccccagggctcggactcggcctcggctccggaagacaacgaactctgcctcacccgaccccagggctcggacttgacctcggctccagaagacgatgaactccgcctcgcccgaccccagggctcagactcagccctggcctcagccgacggtctccgcctcgcccgacccggggctcggactcgacctcgacctcaggaagacagactcgacctcgacctcggaggagcctccgcctcgcccgacccagggctcggaccgaccacgtcacaggggggccatcattaccctacccctagctag

SEQ ID NO: 10484 - DNA, 213 bp, Zea mays
  Peptide Sequence Number=SeqID_53859
atgggagacccagtctcaggtagcgtgaggggtaaagtccgcgctcggcttcactcaggcatcctccctggatccaagtctatagaccatcatagatcccgttatcaagatgaatacaaatcaattcctgacctcgcgcgagtactagaaaaatcactcgacttctaccgagatcctgatttagcaaagcagctactggacctagtatactag

SEQ ID NO: 10485 - DNA, 567 bp, Zea mays
  Peptide Sequence Number=SeqID_53860
atggctccaggaattaggttcagcaagagagtgagggcaggtccacaactagaggagcaatcttcaaaaaggcttcactctacagagacagatggccacaatgtacaagaaccaatagatggtaatgatgacataccaaacagccctactacacctagacttgctgatcatttcagcagagttgcagaggaagccatggcatctgctgctcatgacagtacggtgatgctgaacgcaacagtcgtactacacctggacttgctgatcatttcagcagagctgaagaggaagacatggcatctgctgctcatgacagtacagcgagcaccaaggagacccagggcagcaactaagggaaaacaactggacaggatgactaaagttatgcaaaggagactgcccatagctgttgaggaaggcaaaaaaaggccacatgaatctgttcaagctgccaagtttgcatcagaggctggcatcattattcgggaaaccatgcctatcctaactcgttggaaagattacaaggacgaccagaaatactacaacagctttgtgtcacagctaaat

SEQ ID NO: 10486 - DNA, 102 bp, Zea mays
  Peptide Sequence Number=SeqID_53861
atggcgggcggtggcgcggcgtgcttgaggcgaagtctggtgaactttggctcgggcaggactgagagcgtgcggggagtgtcctctcagcaaccctattag

SEQ ID NO: 10487 - DNA, 489 bp, Zea mays
  Peptide Sequence Number=SeqID_53862
atgtcctctacagatgattacaatcataacacaggtgtttcttctcacaggaccttcggcgacgaagcagacccccaacaggagtgtgcgcgcgatagctgccgcattgctgaactatcagcagaagttactcacctgcagcaggaaattacagaacacgatacagccattgactgggctgtaaactcacgctctttctcttgggattgtgaatccaaagctctagctcgagtagcaaaacttagcgcatccctggaaaacctgcaagcgaattgcaacaccctacatgaagaggtgcacgtgttgtatgatcggctgaccccgaacgtgccaccagaagttgcagcaatgggagctggaccatctggaacaacaaatggaggatcttatggggagctggacctttttggggcccctccttccatgaatcttgtagatgaacggtctcttgaagcgggaagtggagcagctaaggacgaagaagattag

SEQ ID NO: 10488 - DNA, 177 bp, Zea mays
  Peptide Sequence Number=SeqID_53863
atggggaagcctgtcccgtcactcctcatgctcctcctcagccgagtgaccgcacttgtacccacgataaccggaatgggagaccacgtctcaggtcgcgtgaggggcaaagtctactgccaggttcaatcaggtaataacatgcttctgtgccaaaaatcacagaaggttacttag

SEQ ID NO: 10489 - DNA, 453 bp, Zea mays
  Peptide Sequence Number=SeqID_53864
atggcccgtttcctgaaagggctaagaccagaactcaagaccatcctcgccagccaagatttcctcagcttctcgcacctctccaacaaagccatacaagtggaaatggcaaaagaagaagaaaaagggcacctcaagtggaaattccaagccccctcggttgcaagcaaccaaccgccagcaaatgcctgttggtactgcggagaccccagtcacttcaagaataactgcccccagttgaaggcacccagacctacctactccaactcggtgaatggccccaagaatacctcggcacctgcctccaaggcactcccctccaacaatcagcagagcaggacccagtatcagggcagagcacgagttaatcacgtcgatgctcaagaggcccagcaagctccaggagtagtgctcgttttgtggaaaagcatggcatcccttctacacccctag

SEQ ID NO: 10490 - DNA, 87 bp, Zea mays
  Peptide Sequence Number=SeqID_53865
gaacatgaatacattgacttgaaaaggaaggatgctgaaaacttatcggaggacccacgagacctagaccttaacctgaagctataa

SEQ ID NO: 10491 - DNA, 1338 bp, Zea mays
  Peptide Sequence Number=SeqID_53866
atgcgcgcgccctcccgtgtggtcggcctcgggcgcgtcaccggtgacgaaaatttggttcggaccattaatcggattcctcaacgtcttggagtccaattctctgctagccatggaggatcattgactggcaccacagtatactttcatgaaagggcatctacgttatctgttaatactattaccactacagaaaaacagactgcaaatggaacatctgaaggcgcaattttcagaaaaggactttccagtatttacgaaaggtcttcctatcttttacatggcttcatgctggtacgaagattggcattcagtgtgcgagatctgtggaatctattttcaagtgaagtacacgccaaactaaccaggatcttacatcgtttctggacaacactacagggatcttgtgaagacataggatggttgcaaagaactcgggcatcacttcgttcagttgatgggacaggcctttttagcaaccacagtccactttacttcaccaatacgaaacgattcttttcaaaaatgggattggcttgccatattgcgaaaattcatagcgaggcgtcagtggagaagaacgcgtgggaactgaaacagtacattgaggagctctactgggggtctggtaagcaggttctgctccttggtcatagcaaaggtggagttgatgcagctgcagctctttccttgtactggtctgagctcaagggtaaggttgctggcctggcgttggttcagagcccatatggtggcaccccggtcgcctccgatatccttcgagaaggccagatcgctgataaggagacaaggaggatcatggagctcatcggcgacatcagggccttggaggacctcacgtatgccaagagaaaggacttcatctcccagcacaaactccccatcgatgagctgccgatcatctccttccacaccgaagccagcaccgcgcccacagcgctcgcgtcgctgacccgtgtcgcccaagccgagctcctcccatggctacccctgccacggttcttcctgtctgcatccgagtttgtcgagtcaatgctcgcctctctgaaggtccccgtggttgcgcctgtgtctgcagccatggcggtgacagccctccacctgcggctgcgctatggggagaggagcgacgggctggtgacacggcgcgacgccgaggtgcctgggtcagtggtagttagacccgagaggaggctggaccacgcgtggatggtgtactccacgctgaagatgggcagcgctgaggccgatgcgagcgagatgtgcgaggctctgctggccatgctcgttgagattggcaggaagaaattttgctga

SEQ ID NO: 10492 - DNA, 561 bp, Zea mays
  Peptide Sequence Number=SeqID_53867
atgaactttcagaagaagcatcagacagctagtgagcagcctgatgcattcagtaagagctctgatggaggtgcaaaaaatgcacctatctcaattagtatggatgatggttcaaccggtgaaaatgaggatgttgcatcaaatgcagtggttgtgccatatcaagtcccagctcaagtttctggacctcctaccgtaactaatgcaccaaattttcacccggctagtgtgatggcggtcatttcggcggaccgttcggcggtcatttcggcggaccgttcggctccccgccctcccgccttccctgcatgcccttccgcctcccccgcccatcgctccggtaacggcgcccgccccaccctccccgcaccacctagcccctcgccggcgctcaccccgactccggcgaccacttccccctccccctcccgtgtggcgactttgtctcccgcggcttgtccgttctcccccgctgggcgttccaaggcgcagcggtgggcgtcttcctgcctcaccaacccgtcctcatcggccttgggcgttggtgccgttggaagctga

SEQ ID NO: 10493 - DNA, 384 bp, Zea mays
  Peptide Sequence Number=SeqID_53868
atgagcaagaatacaagagacacaagatttatcccgaggttcggtcacaccaccaaggcgccctacttcctcgttgaggcgcccacaaagagccgggtctctttcaaccctaatcctccctttgccgaccacaaaggaagatctcggttcactaacctactcagccggagactcgaccggtttcaaaaccggttgagccgggaaaaaatccggttgaaccggttttcccaaaagttctgcaacgacttttctgacaactctgactgtcagacagaacagagcagggatggcagaggaacagtcccaaaaccggttgaaccggtttcaggaccggttgaaccggtttccagggctaaaaaccaagttttgaatattttgaagtga

SEQ ID NO: 10494 - DNA, 75 bp, Zea mays
  Peptide Sequence Number=SeqID_53869
atggaacaccatcgacttgagaagcaagaggccggtcaaaggagacttgaagatcaagatttgaactgcaagtga

SEQ ID NO: 10495 - DNA, 384 bp, Zea mays
  Peptide Sequence Number=SeqID_53870
atgagcaagaatacaagagacacaagatttatcccgaggttcggtcacaccaccaaggtgccctacttcctcgttgaggcgcccacaaagagccgggtctctttcaaccctaatcctccctttgccgaccacaaaggaagatctcggttcactaacctactcagccggagactcgaccggtttcaaaaccggttgagccgggaaaaaatccggttgaaccggttttcccaaaagttctgcaacgacttttctgacaactctgactgtcagacacaacagagcagggatggcagaggaacagtcccaaaaccggttgaaccggtttcaggaccggttgaaccggtttccagggctaaaaaccaagttttgaatattttgaagtga

SEQ ID NO: 10496 - DNA, 2010 bp, Zea mays
  Peptide Sequence Number=SeqID_53871
atgggaggaattggggtgtctgatagttttgctagagagttaatgaggacgtgtgcggccccgggggagaggatgtcttcgcccgagctccgagagtcctcggctcggatgctgagggttaccgggggctgctggcctagaaaagttcctgtcccctgcgcggctgaggaagactgtcttacgtctcgtatggctcgtcagtggagagtttttccttacgggcgaaatatcggtgctgttgtgtgggcagtgatggacaaggatcgccaaggggcggcgcaaaaacgccaggcgaccgtcaggattcatgatgcccggccgaaaaggcagcggggagcggcgaaggctgcggcctccagcggaggcaaaccgccgctggcggcgaaggcgggcgcctctgcacctggcaaggcgccggagacaacggcgggcgccggggtctccaaactgacgaaggtggtgccgccggccagcggagtggcggaggctgcgaaggcggccagaacgttgccgccgccgggcaagcgcgttgccgacttcggcaccgatatcagtgtggacgattatcttggggggtcggacgaaggccggcctgctgtggttgcgcctgccgcggcaattgcgacggctgcgctgtcgtcgaaggcgaggggcgggacccttggcgccggaggcgaggtgtcggccctcgcgttggtcagagacgaggctggcgcggcgacccgccggctgaaaggagtgacggaggcgctgagtcaggcgacggaggcgctgagtcaggtggctgacttcaccagccgtactgcgtcgggggcgcttacggcagccttatctgccgaagtcgagagacttcggacgcaacatgctgccgctgtccgtgagaagtcggcctccgacagcaagtgtcgtaaactggcggacaaggtggccgccctggaggaggaaaaggctgacctccggcgccagctggcgggggagaggagggaggccaacgaggtcgtcgccaaggagcaggccgcgcaggcggaggctaggctggcacgggcggaggccaatcttgccaaggacctcgccgaagacctgcgggggcggctcaccgctctggagagccacgcgaagggggccgaagccgcggcgcgaacggaggccgaacggacgcgcacacagcttatggccacataccgcgagctgggtgcgcggaccggtgacttcgtggtgccggagcgagaggccgggctccgctgcttggaatgggtgcaagaggagctgcaggagctcccccactgtcttgggtgggttaatgtcgttcggctccctgggtgccagcactatgaggccttcgaccaggcagatgaagactttgggcgagatatctataaggtcgaagaccccgtggtgaaggagtccgccggtgccctctatgaccggatgtggggtctgtatggtggtgatgtggtcagggagcgggcggaggctgcgagagctcaggcggagcgaggcgaacgggtggacgatttcggagcgctgaacgacgccctgcctgacccggagccggccccggagaccacggaagatgcaccaggcgcccccacatctgctgcgacagttgaggacctgcccctgaaggtggccgaaggcgctcccgatgccctcgcagcagctgcgccgaccgtcgaagatccggcggcggaggcggttgaaacaatggcggaagtggcggcggagacaacggcggaggcacccgcagcgtcagggccctcgcaggttcaagattttgggcctgcgcacgcaaccactgctactgagtttttggcggcctcgaccgcggaaggtggtaatcaatatagtgggtctgcatctgagttttttgactttgctgactccgggagctcggttgagtggactgaggagtcgtcggaagaaaatttggattattttgcggccttggacgtggctgcggcggaggcctcgccacaccgccgcggacgcgtcggacgtgccaggccctag

SEQ ID NO: 10497 - DNA, 69 bp, Zea mays
  Peptide Sequence Number=SeqID_53872
atgggcaagagggggagcgagggtgatgttggagactttgatggagaatttatcgacgaagaattctaa

SEQ ID NO: 10498 - DNA, 696 bp, Zea mays
  Peptide Sequence Number=SeqID_53873
atggagcttgacggagggacagctgttggaacagttgtgctcttgctgacgtctccctgctttcgccgagcgtcgtggaggctcctccgagggcgaggtcgagtccgtcctgcaagacagaggcagagtccgagccctgggtcgggcaaggcggagatcgttcggcagaggccgaggcggagtccgagccctgggtcgggcgaggcggaggtcgtcatcttccgggaacttagcccgagtccgagccctgggtcgggtggagcggagttcgccgtcttccggggccttagcccaagtccgagccctgggtcgggcggagcggagttcgccgtcttccggggccttagcccaagtccgagccctgggtcgggcggagcggagttcgccgtcttccgaggccttggcccaagtccgagccctgggtcgggcggagcctcctatggcacttctggcgaagtctggtcgcccgtcggtcttaccttttgcgttgaaggccccagggatttggtcggttggcacggtgatttagtcagggttacttcttatcgaaggcagggcctcgggcgagccggtgatgcgtctgccgtgaaagaggagacctcaggcgagacggagtcatctcaaggttggctgccctcgcccgaggctaggctcgggcgtggcgtgatcaagtcgctcgtatggactgatccctga

SEQ ID NO: 10499 - DNA, 495 bp, Zea mays
  Peptide Sequence Number=SeqID_53874
atgacggtggcaggcgcgcgagagcagcggtcacgccatctgccaagctcatgtcccatccggaggcagcaagagaaccccctctcacggcgtgaagacgacgcgcccgtgacccgtacctcgaacggctcgcgcacgcgcaacggcaacctcgccaactactcaccccggcgcattaactccgcggctcgacggacagcgctacgggcggaagcggctggcgacgtttcgccttcgccaaaacggccgcgccaaaaaaggggttcgaaggctggccccccgaggggttcaacagccgccttagatcgcgtgcgcccgacacccactactggtcaggggttcgaaggtcggcccccgaaaggttccacgaccgcctcaggctactcgggctccgtgccccctactgatcaggggttcgaaggctggcctgtcgaagggttcacagtcgccccagacgccgagcgagggatgaccaggggtacgttcgatacataa

SEQ ID NO: 10500 - DNA, 804 bp, Zea mays
  Peptide Sequence Number=SeqID_53875
atgtctccttcctcccctatgcatcgtgtctctccatcttccaagcccccggatgggggaaaccgccgtctttttgctccatcgttggaggaacgcaactccgtgggagttggtacctttcagccatcgttcggcttcaaggattttcatcatgcagcccggctgcacccctccaccggcggtcccaccctcagcttcaaggatgttcatcatcctcgctggggtgggtgccagactgagccggcgctctacctcccgcgcgggtccgtgggtcaccctcccccactacattcgtgggagagggtacccactggtcctgcggacggcccggacttcgacaacgtgggatggatcggcgacgaacgtcatcacctccaacgtgtcgggtccgctggctcggctccggcggcctcttctgtcggggggcggctgccgcgccgtgtacacgggaggtccaccctagacgccgcacgtcgcgagggcggtgctcgtgttctggggtggccctgcttttgcaccaaggcggcgccgttgcgcgggggccggtgccccactcatcggggaggatttgagtggggatctgccggtaggctggtggctcctggcgccagtgccgaggtgggggtggctcgagaagtccccgtcagcgacgggatcaccgccaccatcggcgcttcgggccttcggctctttgtacttgtcctcgcccctggggtggcgttatgggcgagggcaagacagcagctgtgccctctcctgaggcccgcgccgctacggggggaggaaccggagttccgtttgtaa

SEQ ID NO: 10501 - DNA, 696 bp, Zea mays
  Peptide Sequence Number=SeqID_53876
atggagcttgacggagggacagctgttggaacagctatgctcttgctgacgtctccctgctttcgccgggcgtcgtggaggctcctccgagggcgaggtcgagtccgtcctgcaagacagaggcagagtccgagccctgggtcgggcgaggcggagatcgttcggcagaggccgaggcggagtccgagccctgggtcgggcgaggcggaggtcgtcatcttctgggaacttagcccgagtccgagccctgggtcgggcggagcggagttcgccgtcttccggggccttatcccaagtccgagccctgggtcgggcggagcggagttcgccgtcttccggggccttagcccaagtccgagccctgggtcgggcggagcggagttcgccgtcttccggggccttggcccaagtccgagccctgggtcgggcggagcctcctatggcacttctggcgaagtctggtcgcccgtcggtcttaccttttgcgttgaaggccccagggatttggtcggttggcacggtgatttagtcagggttacttcttatcgaaggcggggcctcgggcgagccggtgatgcgtctgccgtgaaagaggagacctcaggcgagacggagtcatctcaaggtcggctgccctcgcccgaggctaggctcgggcgtggcgtgatcaagtcgctcgtatggactgatccctga

SEQ ID NO: 10502 - DNA, 96 bp, Zea mays
  Peptide Sequence Number=SeqID_53877
atgtcgacctggcacgacccgaaacaggcccggtccagcatggcccaacagcaaacggaccggcacggtaaaactcacccttttgagaaaccctag

SEQ ID NO: 10503 - DNA, 477 bp, Zea mays
  Peptide Sequence Number=SeqID_53878
atgaatcattgggaatgcgctcatcagtccgccatgttcacggtcgccgtggctagaacaaaccttgtgaccattagtgaaattgtgttgggggaaatggtcggggtggatccaatttcgtgtccgccgctcgggagcgccggtcatggccccgttcggccagtctgcaaactcgccggagcctccccatgctcaccgccgtcgtggacctccccctgtgaaaaattagaactacagggtcttttctgcaaacagtcagcgactcagtgcaacagtgaccgaacccatctccagttagtcaaaaccccaaggacccttctgcaagaaaacgaagaagagatcgaagtaactgaagagaagacaccaccaccttcggaatctcaggccggaaattgtttctactttgatatctgcgggtccgagcctgactcacctatcaacgaaggcaagccccggtgcatttgccaccttccttga

SEQ ID NO: 10504 - DNA, 84 bp, Zea mays
  Peptide Sequence Number=SeqID_53879
atgtcggttagcgactctcgtaaagaagaaggcgtcgaggcagatctccaggagttccaggacttcggcgagttcgaggattag

SEQ ID NO: 10505 - DNA, 876 bp, Zea mays
  Peptide Sequence Number=SeqID_53880
atgacttctcacggatcctcggaaggagggaacgcactttcccacacggacggacttgcacgcgagggttttccccgtatcttgtgggaggtacttcagggagcaggttacacgacgcctccccagtacacggtgcagctgttcgagaagcaccgggtgccccgctgtagggtgaggatgaccctagagcctcatcccctacagccaggctggcgttcgttggactccgagtctttcggatatcgggctgaggatactatcgaggccattgctctccacgggctgaccaccttctgtggttttcaccccttggagctgtctactcatcccattggcttgttccccgctgaaaaggaggacgacccaatgtgggaagaccgagtggagcatgccaaggatatatgggctctttacccagggcagaccgctcacttgacggtgcgatgcatggatgctctgtatcgtctgcaagtgacgcgaggagaggcaatgtctcatctaatggcattgttggaggctaccaagatcaccttagataacatagaggaacttgtggtagacttatccactgagatggtggaaaaggacctacatgtggaacagatgtccaacgagatccaggagcttgaggagctagtgggaaccagggagaacaccattgaggttctcgaggatcagttaatcaacactcagcaacaacttgcggaagctaaccaacatttggatatgcaccaccaggacatccaggacatggaggccaacgaggatgttgacatcgagggaggagaggagccggagcctgcatccatcttggacactgctggctcagggagaccaccttcccccaagtcgagtgttgccttgtttgctcactag

SEQ ID NO: 10506 - DNA, 606 bp, Zea mays
  Peptide Sequence Number=SeqID_53881
atgccccctgcaccaccacagggcctcccggctgctggaggagaccctgacggagaccgagacgacgatgacgctggtggcagtttgagccacggcacagagctctcggaggagcctgagccgaagggatggatcgctagacccatcactcgtgacgccgctcgcgggtgccacttccacgacgctctcaacaccatgctgtgtcgggccttcgaccgacacacttggtccatcgagtaccattgtgtgtattgctcgttgttcagcggggtagctgatggcctcgacctgaagtactaccctagccgttcgaccggcagtgctggaggtgtgattgtctcaccagttggtgagggcaatcctaggctgaatagcatggtcaacctagccgtcgtgctcaacacagagttggaccacgcccttgacgagttgggcaaggtttgggtggaggttgcggaagtgcatgttgagtgcgcagcacaccactatctggatggtggttctcctgtccctgtcgggattcaacacccttaccgttcaccgccccgtggtcgcttcgactatggtaccccagactacaaaacccgaatagatttggatccatag

SEQ ID NO: 10507 - DNA, 81 bp, Zea mays
  Peptide Sequence Number=SeqID_53882
atgagtttctatgcaaaacagctaaacaaggaaatgtgcaagggggcagtgttggctgattcagtaaattcagaggactga

SEQ ID NO: 10508 - DNA, 462 bp, Zea mays
  Peptide Sequence Number=SeqID_53883
atgccccttagtgaagatgtcagcgaactgcaacgtggtggggacgctgagaacccgaacgtcgtcgacggtgacacactcgcggacgaagtgcaggtcgatctccatatgcttcatgcactgatgttgcacgagattggtagagaggtagaccgtgctgacattgtcgcagtagacgagggtgccacattgaagggggatgtggagctcctggaggagctggtgcagcaagaaggcctctgccaagccgttgagcacatatcccagctatggacgagcggtgtcgacaaagccagtgggctggctgcagtagacaatctccatcagagtgcaatggaggaaggcattattgacgttgagctgatggatcgcctagtaccgagagagggcgagggagaggaagactcacacggtggcaaacttgacaacggggctaaaggtctcatctggggcgttgggtga

SEQ ID NO: 10509 - DNA, 468 bp, Zea mays
  Peptide Sequence Number=SeqID_53884
atggcggcacaggcaagatcatggcgtcgacttccgttttccatgcgcgcccatgatgctgttgagcatccatttggccagggagcgcgcggcgaagtggaagccgcaccctggcgtgtgggccccaggccgcggcggctgggcgaggctgggagcgctgctggatctaacccccttaacaggaatcttgcccccgagattcaagaagaagctagcaagaaaacgagatgcttgagaccgatcgatgcaattcttgaggatctcttggacatgtgggttaggacccacacacgcttccgttgcgccactttgatcttgctggtcgatgttgatcacattgtcttcattgggaggttggaggatgccaactggacaggtgcaagaggaaagggtatagatagaaaagatggtggcctttccttacaaaggggaaactacactaaggccatcgaaagtcaaggggaatga

SEQ ID NO: 10510 - DNA, 1227 bp, Zea mays
  Peptide Sequence Number=SeqID_53885
atggctctagagcgttcggttgggtattcgggtagagtggaagcggcaagggctacgcttgatcaggtcagagtggaagacatagacactaatgtagctgtcctacaggatttaatagttcaggtgaatctgaaactaaaactgtggcacatggcagaatctaaacttcccattgaattattgtaccaaatagcagtgcatattttcagcatgtgtcatccaggaaatagacaaaaggttgctcgctttggctgggtgggaagagcccttcaagtcttatgtcttcttgttatgtttcctctacatggcttacagaatttcctattcagcactagggaagagcattctcctatgaagataattgattttggtctctcagactttataagaccagtatttcttgctgctgatcagtgccctataggctatagcttgaagatggttgaactggaactattacgtttcctttgtgagaggattgttaagagagaaaaagtgaagaaaatcctattcagcactagggaagagcattctcctatgaagataattgattttggtctctcagattttataagaccagatgaaaggcttaatgacattgttggaagtgcatactatgttgctccagaagtcttgcataggtcatatagcacaaaagcagacatgtggagcattggtgttatcacttatatattgctgtgtgtagttgggagaggtgatctttgcatgagtccagtagaatttgaaccttctgtaagtgaagatttagtactggagaagaaatatgaaaatgggcagcatgatgtcagaggcacacatcatcacagaaccagcatgaaacctgaaaaaccaattgacttgcttaggaaagttgatggcgataatatgtgtgctgactgtggtgcttcagaacctgattgggcatcattataccttggcgcacttctatgcatagagtgttctgaggtgcacagaaatcttggagtgcatatatcaaaggtaacaaactctcaacattgtttcttttgcagtgctgatggatcagacacatcacagtacctctctgttagcaagcctaaacacaaagatgtattctctgccaaggagaagtttattcatgccaaggattccggctctcatcaagtgactcctccccctcacgctgactttgcgaacagatgtctcaattctagtggtggagctacgaacaacaatccgatgttctga

SEQ ID NO: 10511 - DNA, 1017 bp, Zea mays
  Peptide Sequence Number=SeqID_53886
atggccgtgatgggttcaacatcagaaaagatgtacctctgtcaggaccttgtcgatgtaggcttgatgatcgaggaccttttaactggtcacatgcctcatcatgggaagcagcaaatttttgttgcttctgttccaaggtggtgcctaaagaagaaagtcaagactgaagcctcgggagaaaggttgtctgaggtccgatggacaaggacaactgtaggtgggcctaatgacttgggaggttctgtcacagctgatatgccgttgcgcacaaggaaatccgcgcgcaagtccactgggccgattggcgtgcctcgccatcatctagctccaaggcatgaggatagcagcagccgcagcaatgatcccattggagatctagaagctcaggtggagcaacttcgaacggaattacgtcatagaaacagtgtgtgggtcgaggatggtcagcgcataaatgaattaagaactgacatccgacctctgcaagacaagcttgccaaacgagatttggcactcgactgggccgtcaactcatattccattgcttgggaccgagatgccaaagctcgagcccatgtggaggagcttagcacgaccgttgataacttgcagaccctgtcagaatgggagctggcccttctggaacagcagatgtcatctcgaactcgtgcacatgacggcgcgggaacataccgtggtcaagatgatacacccaatccaccactggtaccgcccacgctggccgaggctatcgccgccttggtcaccgcgactgctgacaacacccacttcctatgtgaaatggtgggacagcaacttcaacaacaaggcaggagagcttatccgcaaggaccccgcaaaacttcgcatttggatttattggaaacttgtcccccactattcgtcaaagctgaagatcccctcgaagctgacgaatggattcaggttattgagcagaagtttggactcatccgatgcacggagacccagaagccattatttgcggctcagtag

SEQ ID NO: 10512 - DNA, 381 bp, Zea mays
  Peptide Sequence Number=SeqID_53887
atgaagatccaaaagcaagtcatggaggtggtggtacagcggttggtagttgcctctcgccctgtagaggaaaactatgatcgtggtgtcaaggtcgtgacaaccatgtctgatgctcaatatgcccccaatatgatcccattaagtgagcccgcaaatgattgtggcacgcatgacctccagctagattcttctaagggtgtccctttggcacataccccttgcagagacattcctgatattgtggttgatcctacgatcagaacacgtgtccaattcggagatggaattattgcctccaatagtcttgactttaggaatgaagaggagccttatgcctttgctatggccgttgattcaattggctgggatgatctttag

SEQ ID NO: 10513 - DNA, 906 bp, Zea mays
  Peptide Sequence Number=SeqID_53888
atggagagtcatgatctccgggaagaaagggaatcacggcttgtgggtaaagtggcaatgagatgggtggtttttggtattgactctggtaatgcgtccgcttcgccgtccagtgaccggtcagtccagcacttggagagactgcaccaccgcctccatgaggagcaggagcgtcgacgaaaggagctggagcagcagggctcttctttctcgctccagaaggagatagagtctgtgaggagctgctcccctgtgctccccctggaggcgccccctacaccaccactgagcgccctagcccctggagtagctgctggaggagacctagacgacggaggtggcgacagcagctcaagccacgacaccgacttttctgctgaccaggagccggaaggatgggttgctcgatccatcactcgtgatgctgctcgcagcacagtcgcgaggtctacccggaccgctaggaggcgacctgcttggtgcgcagtccggagaacagtctttggggtgctgaggtctgctcagagcactattccatctctgagcgagactcagctgaggcggccatgcaagatgtcgcacgacgtgcgctttcgcactactgctcagtgctcggtgggcataggaggcgtgattgtctcacctgttggtgaggacaatcctaggttgagcagcacagtcaacctagtcgccgtgctaaacacggagctggatcatgcactagatgagctgagtagggctcgtgctgagatcgccgagctgcgggctgagcatgcggagcgtcgtcacctggatgatggctcccccgctcccgtagggactcagcacccgtaccgctcacctcagcatggacaccagtcttatggcaaccccgactgcaagaccaagataaatttagaaccatag

SEQ ID NO: 10514 - DNA, 660 bp, Zea mays
  Peptide Sequence Number=SeqID_53889
atgacgcctccgcagtacgcggtgcagctattcgagaagcaccgagtgccccgctatagggtgaggatgaccttggagcctcatcccctacagccaggctggcgttcgctggactctgagtcttttggatacagggctgaggatactatggaggcaattgctcttcacggactgaccaccttctgcggattccaccccttggagctgtccactcaccccattggtttgttccctgtggaaaaggaggacgacccatgtggaaggatcgagtggagcatgccaaggatatatgggctatctatccatgcaaccaagatcactttggataacagagaggaacttgtggtagacttgtgcactgagatggtggaaaaagacctacaagtggaacaattgtccaatgagatccaagagcttgaggagttagtgggaactagggagaacaccatcgaggttctcgaggatcaattgatcaacacccagcagcagcttgcagaggctaaccagcacctggatatgcatcaccatgagatccaggacatggaggccaacgaggatgtcgatatcgagggaggagaggagcctgcctccagcttggacactgctggctcagggagaccaccttcccccgagtcgagcgttgcctcgtttgcccattag

SEQ ID NO: 10515 - DNA, 72 bp, Zea mays
  Peptide Sequence Number=SeqID_53890
atggggaagcatgtcccatcactcctcatgctcctcctcagccgagcagcatggatcaagcagtctcattag

SEQ ID NO: 10516 - DNA, 498 bp, Zea mays
  Peptide Sequence Number=SeqID_53891
atggtgcagagggttacccggtccacgtgctccggcggtttcacaaactccgacgagcgtgattgcactattccggtggggctggtcctcggctcaagctcgggcaagcttcacggcctccctggggagctatccgagggctcggatcgagcggaggtgggcgggaaagggtttggccacgatggtttccctagggtggctctggcgggtcgcggggaggtcgccaaagctgcgggcgagctcgggaaagttaggcgcggcgtggaggaggcaacggggaagatggccgtgcatgagggagagctttatagccactcgcgggcacggcatgagcgtgggcacgggggcggccaagggcgcgcacgggggttgcattcgatagattgcaacctcgcggacggagagtacatcctcgtgccagagcaaggagttgctcaggaggtagccccggatccagcaccagagcctgcccagaggatctgcctgccccagccttag

SEQ ID NO: 10517 - DNA, 171 bp, Zea mays
  Peptide Sequence Number=SeqID_53892
atggggaagcctgtcccatcactcctcatgctcctccttagccgagtgactgcacttgtacccaccataaccggaatgggagaccacgtctcaggtcgcgtgaggggcaaagtacgctgccaggttcacacagaaattaatagcaattatgccttagtgcagaaaaactaa

SEQ ID NO: 10518 - DNA, 1029 bp, Zea mays
  Peptide Sequence Number=SeqID_53893
atgccttcacactcccctcatgttgcgcccttccaccttccgagcccccggatggggagcgcccgcgttgccttcgtcttgttgttggaggagcgcaacctcatggaggatggtgaccaccagttcgatggtggggagaagcaagccgggctgtggcctctgccccgccctcagcttcaaggatcttcatcagacttgctggggaggagggcggggcaaatcggggcctgcctccgcgtgggccggcaggtggctgtcgtcgtcggtgcggaggtggtggcagccagaggaggtttctccgccgacgagatcgtcggcgccacctgggtcggacatcggctcttcggccttgacggcttgtcctcgcccctcgtgtggggacgtgggcgagggccttccagcagcagcgtttgccctgaggccatcgctgcagttgtcttgccgtccgagacggaggtcgttgtcgctgctgcagtggtcggctgcgagccaactggaaaccctcggctgctctgcgatgagccggagccggaggcagtggtgtcagcatggacagaggcggagtcggctcgagagaaggcttcgtcggctcgggagcacgtggcttccctggccgaggaggaccaacctcggagtcatgctgccgaggccgtgagccgggctgatgtcctcaggggacagctggctgaggttacggagcggccggtcgaggtggagatctttccgctcgcatcgccatccgaggccgggccagattccgccgaaggtggaaacgacgccgagggtgctgttgctccctctgtcgatgacttgttcgtcggtagcagaattgcttatccgagcgaaagttacttttcgcggaaggtgatgagtgagaaccctcggctgctctgcgatgagccggagccggaggcagtggtgtcagcgtggacagaggcggagtcggctcgagaggaggcttcgtcggctcgggagcacgtggcttccctggtcgaggaggtgcagcagcggcggctggagcttggctag

SEQ ID NO: 10519 - DNA, 873 bp, Zea mays
  Peptide Sequence Number=SeqID_53894
atggatgaaggaaccaccctcggtggtctggagtctgaggacgacgccaagctgagccacgggattctcaccgttctttctagtctatgggaccgaggctatcttgcccacagacttagaatacggtttcccgaggacaagggcgtacgacgaccaaagcaactagaccagccgagaagacttactagaccagctggaagaggctcgggacatggccttactacactcggcgcggtatcagcagtctctgcgacgctaccacgcccgagggaacgattttcatgccttctcgactatatcgataacagaatcctgcgaacgagtaagagtgcacgtaagcggcgaggccgaccgagccgagggactcctatgcctccaggatacggatacctcactcatcaccttccgcgaaaagtaactctcgctcggataagcaattctgctatcgacgaacaagtcctgatactcgaaacaagaggaaaggaaacacaactttataaacatgacaataagatgtttgggcctcggcggccgcaacaagcatacacatactacagacaaactgttcctgcaggttcaaacatcgacagagggagcaacaacaccctcggcgtcgtttccaccttcgacggaatctggcccggcctcggatggcgacgcgagcggaaggatctccacctcgaaggaggacgccagtaccacgcttgggccatcgtagccaaggtctccgttcagacatcgacagagggagcaacagcaccctcggcgtcgtttccaccttcggcggaatctggcccggcctcggatggcgatgcgagcggaaagatctccacctcgaaggaggacgccagcaccacgcttgggccattgtag

SEQ ID NO: 10520 - DNA, 209 bp, Zea mays
  Peptide Sequence Number=SeqID_53895
actgtaaccttgctgacggagagtacgtccttgtgccggagcaaggagctgctcaggaggtagccccggatccagccccagagtctgcaccagaggacctgcctgccactgctttggaaggcaagccccggaatcctgttgagatgaatactagtatgctaggtcgagtagctgctttcttaagtaggatctcggtagaagtcgagtga

SEQ ID NO: 10521 - DNA, 624 bp, Zea mays
  Peptide Sequence Number=SeqID_53896
atggagcagcagaacaccaacagcaaggagggcgtggaggtgctgcagcaggccccgttccacgaggatgccaagcttggcaagggccacttcacttccaaagtttatcatctgcaaagaatccactgtcaggaaagaaagaaaaaaaatgagaaggcgcacggtttgagcggcgagcagttagccgcgagagaagtcgagatcatcgacatcgcttccgtgtcgcgggactactggagcaaggcgatcggcgctccgagcgtcgacctgactgccttcaagtcacagcggacagaacgaggccctcttctcaagggatggatggactcgtgccatccggtgatgaccacgtacaagctggtgaccatggacgctcccatatggggcctcggcgaacgcctggaagactgcatcattgcgggggagagggcgttgttcttggcatgccaccggctgtgcttcgcgtggatcgacgagtggtacggcatgaccgtggagcagatccgcgagatggagcggcagacggacatgctgctcaagaagacgctgaagaaggccgggagcaataagcacgagggcaacacgaagacgctcaaagacgagctagtggccgtggggagctag

SEQ ID NO: 10522 - DNA, 510 bp, Zea mays
  Peptide Sequence Number=SeqID_53897
atgccattacaaacggaactccggttccactcccgtgggtatgaacaacctccacatcggagggcctgcgggacgacaaactccgggtggctcgccgccgaccactacagcagcgtcaacgaccttcgtctcggacggcaagacagccacagcgacggcctcaaggcaaacgctgccgctggaggtccctcgcccacgtccccacacgaggggcgaggacaagccgccaaggccaaagagccggaggtccgaccgcaggtggtgccgacgatctcgtcggcggagaaaccttctctggttgccaccacctcagcactgacgacggcagccacctgcctaccagcaccgcaccagcgagtgccggccgccccaaagcgcaccggcaggtcctcactcccgtcctcgccgcaagaacgagaacgggaccgtctcagaacacgagtaccgccctcgcggcgtacgacgtgttatgagaccctctggtgcggccagccacagtcgcccggatag

SEQ ID NO: 10523 - DNA, 234 bp, Zea mays
  Peptide Sequence Number=SeqID_53898
atgcaggtggcatgcaaccgccccacggagacgcaccccttcgacttcgacgcatccagcatggaggcccaggcccacatgtcatggactaggaaagggaatatttcgaaagggatccttctccgcgaaggaagcgggccccgagccctcctactgatcaggggttcgaaggctggcccctcggaagggttcgacagccgcctcagagcactcgggctccgcacccactactga

SEQ ID NO: 10524 - DNA, 120 bp, Zea mays
  Peptide Sequence Number=SeqID_53899
atgagcgacgccaacgcgagcgcctcctaccagtggtgtttgttcggggtttccaatggtagctacgagcacatttgtttgacaggtcgcaggttcaaatcccattatggccacatttga

SEQ ID NO: 10525 - DNA, 252 bp, Zea mays
  Peptide Sequence Number=SeqID_53900
atgaaggatgccaagcccatcaagacacccatgggaaccaatgggcatctcgacctcgacacgggagtgtttcgagaccggggggtccctaggccgacgagtgaatgtcgccgcgtgccccagctcagatgggtcgacgcgaggctgagcgcgaaggggggaagtgaggtggccggagaccggcgtgagagaggtggaaatcccgcggccttcgtgttcatcccgcgcccaggtcgggtgcgcttgcagtag

SEQ ID NO: 10526 - DNA, 822 bp, Zea mays
  Peptide Sequence Number=SeqID_53901
atgaacaaaaacactggcattcatagtgccattacaaacggaactccagttccgtccccgcgggacagacgcggccgccggaaggctctcattcgtgttcccgctcaagggacgcgaaccagccatcaaagccaaagagcgggccgctccgaagcgcaccggcaggtcctcgttcccgtcctcgccacgaaagcgaggaagagggcggaatgttgcatcctagctgggcagcaacagttcgccttccccggcatggctggaggacgcctcctctgcagagctggaggatggttgccaccaccagcgggcgaaaggacgggcagccatgcaggcggcatgcaaccgcgccaagtgggcgcacttcttcgacttccaacacgcccagcatggaggcccaggcccacgcgtcatgcaaccggcgcgccggatgctgcgtgcgagcaactgcaccaccgcccgcgccactaccgcgcctcctcgactgcggaaccaataccgcgactcgaggcgacccagcgcacgacccagcagcgccagcctggcgtgacggtcaatgcggccaaaaatgggccggcagtaatggcggtggcaggcgggcaggagcagcggtcacgtcgtcagccaagcttacgtcccatccgggggcagcgagagaatcctctctcacagcgtgaagacgacgcgcccgtgttccgttcctcgaacggcccgcgcacgcgcaatggccgccccgcgaaccactcgccctgtcgcattaactccgcggcgggacaggcggcgcctctggcaggggaagcgagcgacgcttcgccttcgccataa

SEQ ID NO: 10527 - DNA, 330 bp, Zea mays
  Peptide Sequence Number=SeqID_53902
atgcggatgaggagctcgtcacagctgctcgagaccctgatggtctgctgctgttgcctttcaataagaaagctggctgaaaagctgagtgtttggcagtccgtagcagcttttggtgaccagaagccgcgagaagctgaaacaaacaggcacatatggcgtgccgagtctctaaaatttctccatcgcctagacagcaagttgcacgctcttgtaagtagttggaaggtggaaaacttggatgccaatgaatgtggggtggatggcgatccgcaacccgttgaccttagcctcgtactcagccactttgttggacgccaggaaatgtag

SEQ ID NO: 10528 - DNA, 462 bp, Zea mays
  Peptide Sequence Number=SeqID_53903
atgggcaagagcaagaagggtggtagttcttcgcatcactccggcgacaaacggaagcgtgagccgactcctccctcggaggacttcggcgactcggagtactcggaggatgagttctcctccgagtccgagggctcaccggtccctgcctctcccccagcgtcgtctgatgactcagacgaccaggggctcgccgcagaggtgtggacctacattcgggccatcgagcgcgccgggctcgcgggctcggatgagtcgaagtactcctcggacgaggagaactcctcggactcgtccgaggagggcggcggcggtgatggtggtgacggcgacgacgacggaggcgatggtgatggaagcgaaggcgacggcaagggcggtgacggcggcggcaaaggtggcagcggcggcggcggcagcagcaggggcagcagcaggggcagcagcaaggccagtggctag

SEQ ID NO: 10529 - DNA, 216 bp, Zea mays
  Peptide Sequence Number=SeqID_53904
atgcagcgccgccgtctgcctgtcttccccaagaccccgacggtgccctcggccctcaccctgtctggccgtcttccccgagaccccgacagcgccgccatctgcccgtctgccctgttcggtggctgtccggcgtccactcgcccatcgccggtcggcggctcgcctccatggaagcccaagaaccggatgggcgccgtctgcccgtttgtttaa

SEQ ID NO: 10530 - DNA, 2493 bp, Zea mays
  Peptide Sequence Number=SeqID_53905
atgtacgtggtcaagagggacggccgccaggagacggtgcacttcgacaagatcacggcgcgcctcaagaagctcagctacggcctcagccaggaccactgcgacccggtgctcgtcgcgcagaaggtctgtgcgggggtctacaagggcgtcaccaccagccagctcgacgagctcgccgccgagaccgccgcggccatgaccgcgtcccaccccgactacgcctcgctggcggcgaggattgctgtgtcgaacctgcacaagaacacaaagaagtccttctcggagacgattaaggacatgtacatgcacttcaacaagagatccgggctgatggcccctcttgtcgctgaagatgtttatgaaatcatcatgaagaatgctgctcgcttggacagtgagataatttatgatagggatttcgactacgactactttggcttcaaaactctggagaggtcttacctgttgaagcttgatggtaaggtcgttgaaaggccgcagcacatgttaatgagggtttcactggggatacacaaggaagacatcgagtctgccatcaggacgtaccatctgatgtcccagcgctggtttactcatgcttcaccgacgcttttcaatgctggcacgccgaggccccaattaagcagctgttttcttatatgcatgaaagatgacagcattgagggaatctatgaaaccctgaaagagtgtgctgtaataagcaaatctgctggaggaattggtgtctcagttcataatatccgtgctactgggagttatattcgaggaacaaatggatcatcaaatggaattgttcctatgttacgtgtctttaatgatactgctcgctatgttgatcagggtggtggcaaaagaaagggtgcatttgctgtatacttggagccttggcatgctgatatttttgagttccttgatctgagaaagaaccatgggaaggaggaaaatcgtgcaagggatcttttctatgcgctatgggttcctgatttattcatgcaaagagtccagaataatggagaatggtcattattttgccctaatgaagctccagggttggctgattcctggggtgaggagtttgataatttgtacaagaaatatgagagccaaggcaaggcaaagaaagttgttccggcacagaccctttggtttgacattttgaaggcacagatagagactggtacaccatatatgctttataaggatacttgcaataggaaaagtaaccagcagaatctgggcacaattaaatcgtcaaacctgtgcactgaaataattgagtttacaagccctactgagaccgctgtctgcaacctagcatctattgctttacctcgttttgttcgggaaaaggatgttccgttggagtcccatccatctaagcttgtgggtagcagtgattcaaaaaatagatattttgattttgagaagctagctgaggttacctcaactgttacttacaatcttaacaaaattatcgatattaattactatcctgttgagacagcaaagaggtcaaacatgcgtcacaggccaattggcataggtgttcaaggcctggcagatactttcatattactgggcatgccgtttgattcaccagaggctcaacagttgaataaggatatattcgaaactatctactatcatgctctgaaagcttctgctgaacttgctgctaaagaaggtccctatgaaacatatgaagggagccctgtcagcaagggcattctccaacctgacatgtgggatgtagtgccatctaacagatggaactggccatctctaagggagaccatttcaaaagttgggataagaaattctcttcttgttgctccaatgcccactgcttccactagtcagattcttggcaacaatgagtgttttgaaccctacacgtctaatatatacagtcgacgtgttctaagtggggaatttgttgtggtcaacaagcatcttcttcatgatctgactgaaatgggcatttggactcctactttgaaaaaccagataatatacgacgacggttctgtccagaagatagcagaaatcccggacgatcttaaagcaatctacaaaactgtttgggagatcaagcagaaaactttagttgacatggcggtcgaccgcggatgctacatcgaccaaagccagagcctcaatgtccacatggagcaagcaaactttgggaagctgacgtctcttcacttccatgcttggtccaagggcctgaaaactggaatgtactatctacgcacacgagctgctgctgatgcgatcaagttcacagtggataccacgcttctgaaggagaatgggaacggggttactagggacacggctcaccatgaacaccacttgcacacgcaggttagcgatggaaagcccgcggaggaagacgtagacgctaaaatggcacagatggtctgttctttgaacaaccgggaagagtgcctggcgtgtggaagctag

SEQ ID NO: 10531 - DNA, 936 bp, Zea mays
  Peptide Sequence Number=SeqID_53906
atggcgatggtcccggtccaggggcggctgaccactagtgggagcgctgtagagggccgaggcaggagtgggtgcctcattcgccatggtgagctcctcgaggagaagctcgttccgcacggcgtggaaggtggggaagggcacgctcctcttgatgagagccttcaggtggccgtagcgggggctgaggccacgcaggaggttcagcaccagggtacgatcggcaactggctcgccgagatcacggagagagtcagccaggcccttcatcgggcggcagtattctcccacggagaggtctccctgagagaacaggtggaactgggcgtcgaggtggagcgcccgcgcatcccgattcccgaggaactggtcctcgagagcgagccacgcctggcgagcagtgtccgcctgatcgcggatgatgtcctgcagctcaacggtgatggtgccgtggagccacgagaggacaacgctgtccatgaggcaccaggagcgaggcggtggagcgtcgtggtcgacgaggacgtgatcgtcgaggacgaaccgccgcagcgtgaggaggacctgtcctcgccagcgggggtagtgggaagacgccggatccaacaccacggacacgagggcccggatgttgtgcagaccagcggcctgagcgtggagagcagcgatgaggtcggcgtcgaggtcggagtcgcgggggtcctccgggggttccacaggggcgaccggcgggcgaccgaggaggcgctgcgtggtggccatctgggtggtcagagcggcacccagggcacgctctcgctccagggcgagggaggcggcgcgctcgcgctcccgcgaggccgtcacagcggcctggatctccgcgagggtgtcgacgagcggggaggcgacggtgggaagtgcggagggcgtgacggcgtggctccaggtgggtga

SEQ ID NO: 10532 - DNA, 1491 bp, Zea mays
  Peptide Sequence Number=SeqID_53907
atgggggtttggccgaaatcgcgcggagtctacggcggcggatttgccgcggttctgttgggatccgaaggggggacgctgaagctgacaaggtggggtccatgcgtcggtgtcagagccgtccggttgtgcggaggagcggaggtcccagaagctgagaagtgggccccacatgtcggcatgagaagtgagtgcgcactgggctgtgtgggggaaaggatggagtgggccgcgcagatttggcccatccggtcatgggggccgtcgaaaagttccgttgctctgccggagtcgggagagtcgatgtacgccgccgcccgcgtggaggtggaagcggatcggaagaaggaaaaggtggatgagacggagaggatggcaagggagaagaaaaatacacatgaaaaggagcagattcgcaaggtggtgatggggaagcggaagcggaacgaggatgagttggggatggaagagaagcagatgatcgcggagaaagagaaagaggagaaggtgaagaagggcaatggaggaggaattctgactaccaaacttttctcagagctctacatatccgagctcactgccaaggcgatcagagagatgaactacagccacctcaccgagattcaagctagatcaataccgcatcttatgctaggaaatgatgtgctgggttcagccaaaacaggatcagggaagacccttgccttccttataccagccattgaactgctgcacaaagcgtccttcatgccaaggaacgggactggagttattgtagtttgcccaacaagggagcttgctatgcaggttgttgaatttgcgaattttacgtttgggcaaaatgaagaaagacaaaagaaacttgtttatgttggagttgatgattctaaattaaagcctactgttgagggcttgcagcagggttactgtgtcattcctagcgagaaaaggtttctggttctgtatgctttcctaagaaggatgcagcttaggaaggaggatctgaaggtcatggagaaaaatggcatcttattatgcacaaacgtggcagctcgtgggcttgatattcctgatgtggactatattgtgcaatttgatcctccagatgacccaaaggccgccaaaatttctctgactgaatatgttttcagtgaaaagcacgtgccaaaatcgcaatcacaacttgaggacgttgtcggtgggaattacttcttaaaccagtcagcgaaggaagcctacaggtcctaccttttgtcgtacaactcgcattctatgaaagacatttttgatgtccatcaacttgatctcaagaaagttgctgcatccttctgtttcaagaaccctcctaaagtgaatctggacctggacagtagctcatcaaaacatcgaaagatgaggaaagcggacggtgcaaataggcatggaattggtccttcgaccccctacggaaggagcggccgttacggttccaggcagttggcaagattctag

SEQ ID NO: 10533 - DNA, 195 bp, Zea mays
  Peptide Sequence Number=SeqID_53908
atgtgggcaaccaacctgcagcttctgttgattcggcaagccattcacaagcttcttggcctcagctcccaccgccaccaccactacaacctacttattcccgaagccagcagccagaagggcgccagcactcccaacaacaacaatgaaatatatcttcctcacagatttacgaagctcaaaagtcattcctaa

SEQ ID NO: 10534 - DNA, 756 bp, Zea mays
  Peptide Sequence Number=SeqID_53909
atgtccggtggaaaacaagaagatggaaaatacaagcacattgtggatctcacggaaacaacatttgggctgagagcaaattctgtacagcgggagccagagctccaaaaattatgggacgataatcaggttctgaaaagtgtttctgaaaggaacactgggactgcttttgttctccacgatggccctccctatgctaatggtgatcttcacatgggccatgcgctcaataaaatcctcagaactacagaatccaccttgcttactctgcaaatctgggctgccagtgttgatatccagatgtttgagatcttgttatgcgttggaagtaaagcagatcttgtacctggtcatagcgtgcagaacatagaatatattgaggcatgtgcttctaatgctgactttgataagtttagatcagtggatggtgatagccaaggcttagagcgactctttggagctctttctgcacatatgtggcctggaatgattctgaaatctggaaacagaataactgccccattcttggttgaaaaacaagaatctaaagatgatgaatccaactatgatttggagtacgacgttttatctcatggatttgatgaccattggaaatttgttggtgagacaagtacatccagaagatttgagagatcaaatgaggctgatggtgcacagaagcacacacatcaagtcgtgaaggccagtattgactcttcaacatccaaccctctcccgagtaacacgcccacataa

SEQ ID NO: 10535 - DNA, 474 bp, Zea mays
  Peptide Sequence Number=SeqID_53910
atggcgcgcgcggcggtatgggcatactgcccgctgtctgattggacaggcacgccgcctgtagggtggcctggtcatcgcctgccagcggagtggacggggcacattaaatgtcgaggcggcacatcgcctgtcagcagggcggacaggcggcgcgtcttttccgtaataaatgtagagatcgcgtggcccagaggccttatgtcaggctccgcccgctggcttacgtcacgggcaataggccacgtggcaacatcaggtctccgcctgagcggggagcggaagcgcactggacaaagccctgacaagtgtctgcgccggacccctgatgatcccgatggccaaacaaggaatatactgcctatccttttatgccaccacgtcatcgacaatgccacgcctgggttggaagaagccaaacaaccgaccatgaacatcgctattgcgcgcgggacaaaaaccttcatactgtag

SEQ ID NO: 10536 - DNA, 348 bp, Zea mays
  Peptide Sequence Number=SeqID_53911
atgcagtacaatggatcaagcagtctcattagctgcgagaagcagacgattcaaatcgagtttttatccttgcaagtgaccgcacttgtacccaccataaccggaatgggagacctcgtctcaggtcgcgtgaagggatatgtctgcgggcaggctctggtgctggatctggggctacctcctgagcagctccttgctccggcacgaggacatactctccgtcagcaaggttacagtctatcgaatgcaatgaacaggcgggtgttctcgtcggcggcgggtgtgccggccaaatcacggcgatctggttcaatccaagggcacggtgagcttcacggggtgacgtag

SEQ ID NO: 10537 - DNA, 549 bp, Zea mays
  Peptide Sequence Number=SeqID_53912
atgacttcccacggatcctcagaggacggaaatgcactgtcccacactgacgggattgcacgagagggctttccccgcattttgtgggaggtacttcagggggccggatacacgacaccccctcagtactcggtgcagcagttcgagaagcaccgagtgccccgctgtgatgtcccatctgatggcactattggaggcgacaaagattacttggacaacagggaggatctcgtggttgatttgtccactgaaatggtggaaaaggacttgcaggtggagcagctatccactgatatccaagagttggaggaattagtgggcaccagggagaacaccatcgaggttctcgaggatcagctcattaacactcaacagcagcttgccgaggctaatgagcacttggatatgcatcaccaggagatccaggatatggaggccaacgaggacgtcgacatcgagggaggagaggagcctgcctctagtgtggacactgctggctcagggagaccaccttcccccgagtcgagtgttgcctcgttcgcccactag

SEQ ID NO: 10538 - DNA, 1110 bp, Zea mays
  Peptide Sequence Number=SeqID_53913
atgtcgttggattccgaccattggagttttgacttctgggcccgcctggatgtccggtgcacaccggacatgtactgttcaatgtccggtgcgccatcgctgcgttttcccgaggctggcgagttccggaggccgctcttccttggagcatcggacactgtccggtgtacaccgaacagtccggtgaattatagcggagtgcctctggaaattcccgaaggtggcaagtttgagttggagtcctctggtgcactggacactgtccggtggtgcaccggacactgtccggtgtacaccggacagtctggtgccccagaccagagccctacaggctactataagggatgggagttcttccctatttcctctaagattgatcagttcgagaagcatcgagtgccccgctgtagggtgaggatgaccctggagcctcattccctacagccaggctggcgttcgctggactctgagtcctttggataccgggctgaggatacgatcgaggcaattgctcttcatggactgaccaccttctgcgaattccaccccttggagttgtccactcaccccattggcttgttccctgctgagaaggaggacgacccaatgtggaaggaccgagtggagcatgccaaggacatctgggctatctacccaggtcagactgctcacttgacagtgcggtgcatgaatgccctgtaccgtctgcaagtgatgcgtggtgaggcaatgtcccatctgatggcattgttggaggcaactaagatcaccctggataacagagaggagcttgtggttgacttgtccacggagatggtggaaaaggacttacaggtggaacaacggtcaaatgagatccaagagcttgaggaattagtggggaccagggagaacaccatcgaggttctcaaggaccagcttatcaacactcagcagcagcttgcggaggctaacgagcacatggacatgcatcaccaggagatccaggacatggaggccaacaaggatgtcgacatcgagggaggagaggagcctacctccagcttggacactactggctcagggagacccccttcccccgagtcgagtgttgcctcgttcgctcactag

SEQ ID NO: 10539 - DNA, 354 bp, Zea mays
  Peptide Sequence Number=SeqID_53914
atgggcagaggaactatcggtgcaatggtgtgcatttccaaatgcagcagatattgcatttatttcaagaaatgcacgaatgtgctactgacaataacccattctaaaaagaacttgagctatgcgcttgcttttggacttagcagacccggttgctccactgttattttggggagattttcatttatactaaatgatgatgcaagtgcctcctactcaaactggtgttctgaaggcttcagaatgactgatggctattcgaaaaggttcttcgtcaaacacttactgcatctgaatcacattaatgagaaaatcggagcatttgttcgatcctcattggaagtaaatatttga

SEQ ID NO: 10540 - DNA, 642 bp, Zea mays
  Peptide Sequence Number=SeqID_53915
atggcatctggctcgcgtcagtgcccatcggtgcagggcacaccaggccgggacaaacgaccgttgttgtgtgatcctacccgcgacagtgcctcggtcgctgcccttgagacgacacatgttggtcttgctactggtcacaacactcagtcggctgcaggcctcgaggggggtgttaatgccatgttcggcgccatgaacatcacgggcagcgacgctgcgcaggatgggcgtcttcgcgtgcagagcccgataggcgctccattcctggacgctactggagtctggagtgtaacagaaatgccagacctgctcatggggcccgctccctttgttctgtgccgcgatgtcgaggaacgttgtggcctcgttgctgatcgaggagccgccgccggcgaggtcggagagggagcggatggtgatgaagggggcgtcgtgctggtgagcgaagagggccacgacatcgctcttcatctccacgaggtgccttcaggctgcgtgttgcaagatatccccaatggctgcaagggttatgttgtgtaccttgtccgtgtgagacgtggtggtaggaagaggcttttgcccaagtgtattgtctatggcaagccaaagcaccagggtatcacccaactcaagttgtag

SEQ ID NO: 10541 - DNA, 474 bp, Zea mays
  Peptide Sequence Number=SeqID_53916
atggtcgcctttcaagggggtcaccctccttttaaaggcgactctccctacttgcgtccccagccgtcgtgggctaagtcttctccaacacactccaaggtcctccccctatggcgcgggggctgggtcccacacatcatgcaagctggcccagagcagaagaagtcaaaccgccgtgcgcggtgcatgcaaccgcccagcggttacaagcggccctccacttttgcccagaccagcgggcgaaagggcgggggaagcgagcgacgcttcgccttcgccataatgaccgcgtcaaaaaaggctccgagcctccctactgatcagaggttcgaaggctggcccctcagaagggttcaacagccgcctcagagcgcatgggctccacacccactactggtcagaggttcgaaggccggcccctcggaagggttcaacgaccgcctcaggctactcgggctccgcgcccactactga

SEQ ID NO: 10542 - DNA, 387 bp, Zea mays
  Peptide Sequence Number=SeqID_53917
atggaggatgaggaagagtcggggttggaggatgaggaagaggcgactgtgacactatccatggagaaggacgcgttggagtgcgacatctgctgcctacccttccagtccgaagttttcatggcaagctttgagctcttttctactagtgacggccacggcgcccagcagcaccacgaccgcaagcaccatgaacagcaccaccgccgcccactccgccgcgcccgaccggtgcctcctgaagctgtaccgacgcggacgctgaggctcctcctcgcgccccctccacgaccgccaatccgccggctggagagtgccgcggcggcgggggctctcctgctcacgggcgcctcctcgcacgcccgagggaaccgccgccgccgctaa

SEQ ID NO: 10543 - DNA, 888 bp, Zea mays
  Peptide Sequence Number=SeqID_53918
atggccggctgggccacgggactcgcgcgcgcacaggaggcggctggcttgctagagcatggacggcgacgcgacacaccacggcgtggctgggcaagcgcgctgggcgggggtgctggcacggctgggccatgcccgcgaccaaggagaaggggaggaggggcgagtgagcgcaggaactcggacagcaaagatagagtacaaacagagcgagctccaacggacgatggggcgccaaagcggcttcgaaaggtggacgagggcgcgcatctggcgattactggggcgagggacgagacaacgaccgctggggacttgggaaatgaaggagagaagagaaggggaagtgtagatgctcggataaggcagtgtggatgcgtacgtcgggttcctcagcgtcgtggacgagatcgtggcgtcggttccgtcttccacgcgcgcacgaagagcgggggtgtggcggcggctgagcgtgtgcgacgcgcaactgggcgagcgacggcgcgaggcagcggctgcacgcgctcggcgaggcgctgggcgaacggctgcgtgcggggccacggcggggtgggccagctgggcgtggcggctgcgggcgcgagcggcggcgcgcagggcgcggggctgcgtgcgcgcgaggccgtcgcacggctgggctggggggaaatgggccgcgcgctagggttgggggcgcgcctgggcagcacgactaggccgcggagcgcggagtggggccgcgggcgtgatggggctgggggagcagcgcagtgcgcgctgggctgcgagcgcgatggggctgccaagtcgagcaggccggggcgcaggggtgggccagggggagggcgctgggccgcgcggctggggggcgccgaatatagtttttga

SEQ ID NO: 10544 - DNA, 516 bp, Zea mays
  Peptide Sequence Number=SeqID_53919
atgccgcatcgggccgccaggcttggccgcgccatggccggctgggccacgggactcgcgcgcacaggaggcggctggcttgctagagcatggacggcgacgcgacacaccacggcgtggctgggcaagcgcgctgggcaggggtgctggcacggctgggccatgcccgcgaccaaggagaaggggaggaggggcgagtgggcgcaggaactcggcgaccggagcaccgtcatgcctgctctatggccactagcgccgaacctcggccgagggccctgctgcaccgcgcccagctcgccgagcgctgccgcgttcgtgtcgttggtgctcacctcaccgttcatctcttcatcctcctcggaagaagacgaccgcgcatacgaacggaaccgccacggggaaactcggcccgaggatgtcggtcgcctggtggggcccaacggcgaggcctactttcccacgctgcaaagacccgcatcgggcagggaagcgtcgcgcagggctaggccaggctag

SEQ ID NO: 10545 - DNA, 668 bp, Zea mays
  Peptide Sequence Number=SeqID_53920
atggccgccgcgcaggggcaagcttcgccggggatcgagcaccggccgtgcgttcacggcgaccgtggacggcgggacgagctcggcacggcggaactccagacgcaggagcaggggcggttgcgagcatcagggagaggaaaaatggggcggggctgcgggtcggacgcgcagccacggctggagagccgccatgagcgcacgcaggagccgggaagccgtggccagggctggacagcagcggggctgttgccggggatggtcacaatgccgcatcgggccgccaggcttggccgcgccatggccggctgggccacgggactcgcgcgcgcacaggaggcggctggcttgctagagcatggacggcgacgcgacataccacggcgtggctgggcaagcgcgctgggcgggggtgctggcacggctgggccatgcccgcgaccaaggagaaggggaggaggggcgagtgggcgcaggaactcggacagcaaagatagagtacaaacagagcgagctccaacggacgatggggcgccaaagcggcttcgaaaggtggacgagggcgcgcatctggcgattactggggcgagggacgagacaacgaccgctggggacttgggaaatgaaggagagaagagaaggggaagtgtagatgctcggataaggca

SEQ ID NO: 10546 - DNA, 534 bp, Zea mays
  Peptide Sequence Number=SeqID_53921
atgggcatcgccgcccttcttcttgtagtacctcttcttctcctttcttctccccttcttgtcgtcgcccctttgtcacacccggatttcggggcaccaagacccgggcgcaaacataatcaccaggaatcccttgcaggaccgccatcgcagcaaaatcctcccgagggcctccctacactgaccactcccctactgcccttgccccttttgggtatcgacgacgacggctccacctctgtacttcggcgagcaccacgcccggcgctacggtgttctaatttgaaaggggcatgtgccacgcgattcctggatgaggacgaagcaggtagtggatttcttaccgagaatgaagaggccgacagggctgtccacacgagcagtgcgattcacggcgaatcacagggcggcggcgatgaggttgtcgcgaccccatggacagggagtggcacaacaacgggtgcatgggggaagttggcggggatctacacaaggagcacggggcaagcttgtcgtcgacgcagtggaatttga

SEQ ID NO: 10547 - DNA, 825 bp, Zea mays
  Peptide Sequence Number=SeqID_53922
atggcggtcgtggctctcggttcgtcaatggtggccaagggactagggagacaaggatttatactcctgatgaagaaaatcccgcggacatctcgcgatttgaacaaacggaactcgacgcagggaggggatttcgcccgccaggatcacctattcaccaccccccctctaggtgctctcacgaccgccttaagctggacggcgggcggctcagacttgaaaccaaactcgaggaacgcgctagcccacaagtggtcagagtataccaaggggtttccagtcctcatcacaccattcactgctgcagtcgtaggcaccaaacctctcctgatcttgccgaagagctacgtgataggatggaactggatccaggagcacgacagcgggggacacgaggagcaccaggagcacggtgacgaagacgaccccgcccccgtcgccgagccccgtgaggtccgcggcgaggaggtacagcgcgattgccacgacgagcgagttgatcgcttggtgtttggctgtgtgtcccgaggaggaggaggtacggaaggggcggtggaggcatggggaggttcgccgtggagtggatctacaggcaggaggggttgcggcagcccacaagacgagaggaggagttcttggacgatggaggcgaaggttgttgagagcgagcgtagcgggtggtggtggcgagatattcacacgcatgctgctgctggcggcgattcgtacggggagggaggtcggttggcggatcagatggcgggggattcgccacgggcgagagggaatcgcggcgaggggtgggcggggtgtgcgtgcgcctga

SEQ ID NO: 10548 - DNA, 489 bp, Zea mays
  Peptide Sequence Number=SeqID_53923
atggcccaaggcacatttccctttcaggtcgacatggtcctcttcatcaagaagacggcgttgcccctcgcggtcgactcctccatgtcgctcgcggtgcggctcggctctggagctgctcaaggtgtgcacgaatgtcctggaggaggtggagaagtcctacgcgtcgcggatgcaggactagagccacgggaggtgacgctgctcaaggcgacgctgttggagacgagggcgaagctgctgctccacggtgggctgttcgacacgggcgaggagttgtgcaggccctgcattagcatccggactgtcatgctcggccacggccacgcccagacgctagctgctcaggagacgctggcaaagttggtcagagcaggtgccatatcttcgttcgtctccatggacaacacaacgacaaatctgctcttcacgcattctgatgaggacgacaatgaggtgttgatctggcgatctgccacctactattga

SEQ ID NO: 10549 - DNA, 576 bp, Zea mays
  Peptide Sequence Number=SeqID_53924
ccgccgggcccaccagtcgggttccttcttcctcgcaaccaccccctccactcgcaggccgccaatcatgttgagccccacgacacgcacaagaagccacccagtctagcgcacgtcgagtacctctacggatcgagctctcctctaatggcgtcgttgctccgtccttggaactgctccctgggcgcggccgactttcttccccctgttagccgacccgctcccaaccccactttctgcgcgcgcccgagcccagttcggccgggacctcgctgtcccaatcgcggcaaggaggcctgcgcgcggctgagccctcctgtgcgcgcgagccctatagcttggctgaccggggcccccttgctgcgcgcgcgctctaccgagctgtggccatggcgtccagccaagaaccgcccctgcccatgcgttcctccggtgaagtgcccccttgccgacggccatgcctctcctccactcgccatggccacctgctactctgcgtcctaccgttctgtgcagcagggcagcaggagagcagaccctccccctgcagctgttggtcgtgccctctccgtgtaa

SEQ ID NO: 10550 - DNA, 705 bp, Zea mays
  Peptide Sequence Number=SeqID_53925
atggaaggccggcgccgctccgaaacctccgcgcacacccatgcggccgtgctgtccctgtgctctgctctctatggaaggcctgcggcactccgaaacctccacgcacacccgcgcagccacgccatccccgcgctctgctctccatggaaggccggcgccgccatcccacgcccgatttgctctccatggaaggccgtccccgcgatctgctgtccatggagagcacggcctcaggccttccgaaatctacaccccacccccgcgaccgcgcgatccactcccccatgcccgatctgctctccaacatacaccatccgcgtgatccatggacagcagacagtccccgcgccttcccgatcggcttcgcccacacaatccacgcacctctgcgccccgtccggcagtgcctcagtggagatggtggatgacgacggtggatctcgtctggttcggatcgtcgtcgccagccagtgtggatctcggctctcaacgaatttcatggggttgttcgtaacatctgacaagatctgtggtggctgtttaggtgctggatccgtagtggcggcggcggccatggacaagagcatgctcggcgacctggatgacctccccgaggaggacaagatgtggatggccgccatgatcgaccagctccagatccgcgataggttcgtgccataccaactcgagccctcgcgctag

SEQ ID NO: 10551 - DNA, 945 bp, Zea mays
  Peptide Sequence Number=SeqID_53926
atggcgcttcctgttgatgtggctggcctgcgccctaggttgggcgacgtggaggctcctctgaagccgaggtcgagtctgtcttccatggccgaggccgagtccgagccccttggtcgggcgaggcggaggtcgttcggtagaggccagggcggagtccgagccctggggtcgggcgaagcggaagcggagttcgccgtcttccgggacttagcccgagtccgagccctgggtcgggcggagcggagacttagcccgagtccgagccctgggtcgggcggagcggagttcgccgtcttccgggacttagcccgagtcccgagccctgggtcgggcggagcggagttcgccatcttccgggacttagcccgagtccgagccctgggtcgggcggagcggaggcctgactgcctgtcagtctcactctgtcaagtggcacttcagtcggagtggcgcaagcggcgctatccttctgtcaggccgctttatgctgatgggggttaccagctgagaattaggagtcttgaggctagtctggttgttccctcatgcgaactggccgtagcccgggtgtacggtcggggcccaagttctcgggctggtatgttgacgctgtcaacggttcggccggagccgggtttgcgagagcagcccccgagcctctgcatagggcgagagggcgatcagggacagactcggctttttgcatacgcccctgcgtcgcctttccgcaaggaggagggggggaaagcgccatgttaccctcgatgggcgccgaacatggtgtctccggtgagctgcaaacgggtaatccgagtggacgtccgtgccccgttcgttaggggtcggctaggggcccagaggcacgcccaaaagtacctgcgggtgatttgccggacccggtcccctggcgacggggtccgagggctcgatgcctccctctga

SEQ ID NO: 10552 - DNA, 798 bp, Zea mays
  Peptide Sequence Number=SeqID_53927
atggccgccccctccctcagccgtggcgggtgccgccgccacctcactcttgtgctcgccgagctcgcccttagccctgtcgtcccccttcctgctgaggccaacaccccatcccctcgcccttccctgctcgacagccccatccctggtcttccaaggctgcgccctcacctccttcccatgggagcaaattgggaattagaacagcaaatgagtaactccagagagctgtctcttttgaggttttattttgaccaggttggaatggctgctacactagcttcagtctgttcagtcccattgacttcagtactgcttctctttgagctgacaaaggattacaggattttgcttcctctcatgatcggtcctgaccatattgaagctttgtatcagtatgccaaatttcagtttgagtgtggtaactactcaggggctgctgattacctttaccagtatggtgctttgtgcacaaacagtgagcgaaataacttctcatcacctctgaatcagctccagaacaggatatggctgatgcattgggctctgttcatcttctttaaccatatcaggtacttgaatgctatacagacaaatgcacaccatcttattaggtatctagctacttcagttgttgtcaacaaaaggagaaggaatatgcttaaagagttgattaagctcatttctattttattatcatggaaaaatagaaatgatatcaagttacaaatgtaccttcggtttgaaagaaggcaaaagtacaagcgtgacgcaaaagcaaatgccaagtcagcgtga

SEQ ID NO: 10553 - DNA, 507 bp, Zea mays
  Peptide Sequence Number=SeqID_53928
atgggacctcgggaacaggaaggtccgggctattttctgagggaggccaagaggaaggtgctggaggctaagaagaagaagaaggcgtcagcagcctcgggtggcaatgctgcttacctgggcgggtttgcaatgcagaatgacccgccagagcagctcaaattgaggggttaccatatggtagctggcgcagtggacattgctatgttccggaaggcgacattggatgatatcaggtggttccgagaggcagtgatggagatcggcgaggaggatgatgaggatgaggatgagaaatgtgagaaggaaaatgacgggtactggaggatatcatattgttcacacttcacatctggccattcatggcgtcccatagaagctttgacactccatcggatgcgtgctattcttatcaaagctcgtgatgttgctaggagcagtgctcagaatagcttgtctgaaaggaataatttgaaggctatgggtcactacggtctcaaagggtag

SEQ ID NO: 10554 - DNA, 764 bp, Zea mays
  Peptide Sequence Number=SeqID_53929
atgccccttataagaacttacaacgttgactcagacctttatggactaaaaggggtccctcgctcagttctccaggtattatgtaaagaatttaatattaaagccaacactaaaaatgatgacatgagacaagctctttccttaagagctcaatttgatattaaagtaatgatggcattgcaggatgcgctgggggctaattctgtttctaagagagtgaaatctgaaaagcttaataatggtgatctcattataagtgcgaagaggactaataccgatgaagatattttaaccaaagcgcagcgattggcagcaaagcgtaatctggaattaagtgagtcttccttcatctccctttccccggaagtaatcatttccaattgtgaaaagattgggatttctcttagtagttctgaaaatgaagtgttacaatcggtggttgctattaaaaatattgagattgatagactcacggttgctccttcttcctatagcagaaatcttttaagtgatgctgaggaagcagagtttgatgttgtgttatctcacactgctgataggtgggatgatgagtctgaattgaccactttagatagatgttgtgagctttctgttgcgccgcgtagaaagaaatcgaacaaggctttctcaaatagaaagtgcgtcgatttcctctggcaccttatgccacctagaggaagatcaggagggatgttgttaggggttaatccgggggtttatgacattggagctattgatgaaag

SEQ ID NO: 10555 - DNA, 489 bp, Zea mays
  Peptide Sequence Number=SeqID_53930
atgtctgggatgcttttgactacagaaatggcttttaaatgtgcacgagggcttcctcctgaggccgcagctgtgccaattgttaaaagtacaatactaatacccttcccacccatcctaacacaaggtctcaaatcctcagttgtacatgaagcaaatgaagcaaaaggattgagagatgatacaacttgcattgtcattgacataatatcaccagagaaaccaaaacgcactatacaatctcaaagaacgccaggaaaaggccttgtgcttctaaaaaaattctttttaaggaaaacaacatctgactcgttgtctctcccttataagaataattatcctgagccagatttggaggaggtctttgaggacggatgcccatccctatcaaggaggtatcattggaattcagtcttcagtttgacaaataacgacttagtagcaccaaaaaaagagggggtcatgattccacagtctgttaagttatga

SEQ ID NO: 10556 - DNA, 2040 bp, Zea mays
  Peptide Sequence Number=SeqID_53931
atgccgcgcacgaagaatgtgtcggcgccaggggaggagatgacgaggaccctcctcgcccctttaggcaggtcaagggaaagaccgtgtatttggagcagcaggaaggccgcaagaagcggcgtatggatagagcagcaagccgcggcagcagcagccgcagccgctgagcaggcagagcaaggagatcagctgcggatttcttcagatcagattgcttaccgagttcgtcgtcacgcctctcgtcctcgctcctccgctcctaccactccctccactgctaccactctaccacccactttgcccgctcccgtcactcctacgacatccatcacctcagccatacccaccacctccactactccagcttccactgctccttctgctcccctttgtgctccacctatcccacctgctcgcttccgggagcgtgatgagactgaggtgcgaccacttgctgcggatcccaggttgtttgatcttcagcgtgctatagcggcacgggtatgtcggttcagatacgtacccgtggagtcttggttacctgcacagagagaccctgcagcggcagatccattcagcactaggattcaggagtctttctacagagcacagttgttagctcagattgctctgcgagcgcaccggcttttggatctccctaccttcctgctagccgccggtgccgactctgaggttcacctctcctatctgtctggacttctcgctcttttgactaccagcggaagatatgttgaggaatgggtccgagttttctatgctactgtttggatcgaccctgatcaccactggttgagattccgatttgagcgagaggatgttaccatacatgccagtcagattcgtcaggtgtttggattcaacgagtcatcgactcgtcttcacagcatgtgctatggcacttcttaccctcctcgtcgccctcacggcggagttgctcctggtacaactcacgtcgcggctttgttccgaccacccttctcagatgggtcgcgacgttctccggcagacttcaccacagcggccaggtttctatatcaactcatgagacgaacgcttctgccatggatgggttacagggaggctgccactcatattcaactttggctccttggtgccctagtttctcactcagagtttgatgtcatggattttctcatttgtgagatcgaggacaccatactggatgctccagaggatcctgtgccggcacctgctctagtgattgatactcaggccgaggataccacttttcaccagtttgagactcaggacgcagcagtccatgatgatgatgatgactttggggttccacctccgcctccgcctcctatgcctccacgctcacatgatcatgaggctggtagttctagtgctacccctgctgcccctcctgccattgaccctgctcttgttgcgatcctccagactcttactcagcagcaggctcacttggcagccgagcaggcccgtcaggcaacgacccagcagcagatgtccgagagaatgctctcgatgcttcagacgattcaggacaggcaggatactttgcagcagcagcttattcaggaccgggctgagaacggggcattcatgactctcatgcttcagcatactggtgtatcgattcccccagttcagtcagcaccgcctccacctcttcaggctcctgttgtgccagctattcggctaggaccccctcttcctactcttggtccttcatcctctccgctctggccggtcaccctggttttcacgtcgccggtcattggctccgtcagctcccagccgccagtgccaccagcttctgctgttaccactgccgctgtggcggtgtctgtgacttcttcggctccggcagctcctgcagcgcagcttccgtctgagtcagtaccagctctagcttctacagcagatcctggatccgagactgactctgacccgcatctagcgatcgctctactgcctcgaccgcgatcggatgcgcccccgccacctcctccctcttctgatgtgtag

SEQ ID NO: 10557 - DNA, 288 bp, Zea mays
  Peptide Sequence Number=SeqID_53932
atggcgcgcgctggaatcagcagggtcgacgatgtcgaagcagcgaaatcagcagggtcgacgaggcagaagatcacgagcagtcgcgtgaagacgcttcccaaaaaccttattcgctctctcccggtgcaggatctagaagacgaagggttccggagccctgctctcctgatcgcagatgcacctctgcggtcgggacgaagagaactaaaaggcgactcagctatgaagagaggcgaaagcgaaactgggatgatctggaggctggctgccgggctccttttatag

SEQ ID NO: 10558 - DNA, 530 bp, Zea mays
  Peptide Sequence Number=SeqID_53933
aagatgcagagaagcgcaaccgtcagtggaaagtggatctcaccacagctcaagcccgtgcaactgccttggagagtcgtgaagtcattgctgttgaagccctgaagcaagccaaggatgagcatgtccagaagctgatggaggcctacttggtaacccataaccaacgtagagccctgcggatccaagagcccgcttcatccaacccagttcaacccaggagagtagaagactcccagattcttaaagtctcccctaaggctatgggtaagcaagagcaccacgagtcctcccaagatcccccgccagagttgtttgagcccctcgccatgaagaagattccaacaccctcccttgaggtcaaagaacaagctgcaagcaccccgccagcaccgccgccctcagaggagctacaagagccagtctcgcttgaagaagagttcgaccctgttctgccatctcagtcgccgccagaagaactcatcaacatcagctccctgttgacccatccaggagatatctcagattga

SEQ ID NO: 10559 - DNA, 564 bp, Zea mays
  Peptide Sequence Number=SeqID_53934
atgtggctaacttttctacctaagattatccctgagaaatgcaagtatcaagttttatccaccaaggtcgaaatacgccttgcaaaagctgagcaggtgacatggacaaccctggattatagtggaagaccaaaggctattccccagaagataagcacgccagatgttgagacgagagcgaaactcgatgaaaacactcgacaacagccccttggtgaagatgtcggcgaactgcaacgtggtggggattatgaggacccgaacgtcaccagcggcgacatgctcgcggacgaagtgccggtcgatctccacgtgcttcgtgcgctgatgctgcacggaattggaggagagatagaccgtgctgatgttgtcgcagtagacgagggcggcatgctagagggggctgtggagcttctggagaagctggcgcagccaggaggcctcggccacgccgttggccacagtgcggtactgcggtactcggcttcagcgctggagcgagagacgacaggctggcgcttggcggcccaggagacgaggttggcgcccaagaatacgacataa

SEQ ID NO: 10560 - DNA, 383 bp, Zea mays
  Peptide Sequence Number=SeqID_53935
atgccccccaacaaccacccgtgtcccgccccaaacccccgctgccatgcgcgcaaccgcccccgaccatgcgcgcagcctggtggggctcgggctcggtggcatggtgggcgctggcgtgttcgtgaccacgggccggcgccgcccgcctctacgcggggcccgggctcgtcgtgtcctacgccattgtcggcctctgcgcgctgctcttcgccttctgcgtacgactccgtggacatgggcgacggcgagctggtggtcctcgacagccgcggcgtgctcccttgcttcctcatcatctgcaaggatgctggatcccgggaagccatctttcacccccagcaaagggaagcccaatttggtcatgttcgtcggcttgtagg

SEQ ID NO: 10561 - DNA, 531 bp, Zea mays
  Peptide Sequence Number=SeqID_53936
atgaacgaccctaatagcaatgtgctcctgaacgaaatgaagatcgatctcaacatgcttcgtgcactggtgctagacagggttgacagagaggtagatgggactgatgttgttgtagtagacaaatgtactcctggtgagggggctatgaagctcctagaggagttggtgcagccagctcgcctcagccactccattagcaacaacccgatactcagcctcagcactagagcaggagatcacgggctgacgcttggaggaataggagatgaggttgtccctaaggaacatcgcatagccagagtcctagatatggttggcaaggagggccttgtactccataacgtgacgctagtgaagattggtgagggtgctatgaacataagacaacattggggagacagacaaagaggatgtcgtggagagtacaaggcgaatgacagggtgaagaaccccaatggcttgtcgaatcatcatctggtggatgtggtgagggtcatggtgaaaaagaggaggatgatagatgtctag

SEQ ID NO: 10562 - DNA, 342 bp, Zea mays
  Peptide Sequence Number=SeqID_53937
atggcacccaaaagagctaattcgaagacagccccatccgtcgacgaagcagcgaaggcagcactgctagctaagaaaaagggcaaggccctcgccgacaacacccaccaaggagctggcgaagacgaagcacatagtaagagacagcgcaacaatcaacacactccagaaggcaccctccgcacctgtagctccgaagggcagccacaagtgccacccccaggcttcgctccaccagagggcgaggacgcagcagaggacggcgaggtcctcgacgtctctgtagaagaacagctacagctatgggccatgcgcctcaaaaaccgcaacctccagaagtag

SEQ ID NO: 10563 - DNA, 282 bp, Zea mays
  Peptide Sequence Number=SeqID_53938
atgggggaaccggacaacacccagccgagctaccggggagaccccgttcttcctggtctacggggccgaagcctgccttccccccgtaaatcatcatgggctccccacgggtccaggctttcgatgagtctatgcaggaacagctgcggcgtgaagacatggacttcatcgacgagcgcagatggcaagcggcaatccaaaatgcgcggtacaaccaagcgctaccaccaatggttcgtgcataataggaagctcagggtcagggacctagtcttgaggtag

SEQ ID NO: 10564 - DNA, 221 bp, Zea mays
  Peptide Sequence Number=SeqID_53939
ccgaagctgcttcttcgtgtgagaccttcggcgcaccgaagcacgaccccaacaggaagtttccctggcaacgtacgagtgatgatgagtacagtgcacctcgcagcacgggcgtactgtctgccaacggaatggacaggcacgccgcctgcgggacggggccgcgcaacccggaggccttacgtcaggctctgctcgccggcttatgtcacgcgcagtag

SEQ ID NO: 10565 - DNA, 339 bp, Zea mays
  Peptide Sequence Number=SeqID_53940
atgacgcaccaagcaggtcgcctcccagcggtccgagtagaccccgcgactatgctggtagaccacacaacgatactcgatagaccaagcggtggtgcagcctctccaagtgactggactgtccggccatgggacgacgaagcggacgctccgcgagacgagagggttagcggtcctacagtcagcacggctctgataccacttatgtcacacccggttttagaaggcaaaccgaatgcgaaccatgtacgtgccaggatcagcaattcacgtacacagcagttacataacatggacatcatcacacagtgctcaaatagtattaaaaagggaaaatag

SEQ ID NO: 10566 - DNA, 2049 bp, Zea mays
  Peptide Sequence Number=SeqID_53941
atgaacggaggcagccggcggcagcggtactcctcagagcagctcctcttcgacgtccccgccaatgccggtgccggccggtgggcgcagcagcgtggcggggtgcgtcgcggggacggggagatcttcgtgtcggtggagcccgcgacgccggcgcggctgtgcggaggggacgccgcggccggggactcgccgggacagaggcagcagctcagtcccgggttgctcgacctccatgcgttcgacaccgagcttattcccgattttcaagtaccaggaatctatgatggtgcccaaaagtttggctatggaggaggtctagatgaatctgatatgagattcacatcaaacaagatgatgagcaagtctactatttttcctgatggtaactatctgaaggccttcactgagaaagaaaaggcagcacctgtcgcgaaaatcaaagtggtggtgcgcaaaagaccacttaacaaaaaggaagtatcaaagaaggaagaagatattgtagacattgaacaaagatcaaactctttgactgtccatgaaactaaacttaaggttgaccttactgaatacgtcgaaaagcatgagtttgtattcgatgctgtcttagatgaagatgtttcaaatgatgaggtttatcgtgaaacagtggagcctgtagttcctgcaatttttaatcgaactaaggcaacttgttttgcttatggacaaaccggtagtggaaagacttataccatgcgcccccttcctcttaaggcttcccaagatgtcttgaggttaatgcaccatacctatcgaaaccagggatttcagttgtatgttagcttctttgagatatatggtggcaaattatttgaccttctcaacgataggagcaaactttgcatgagagaggatggaaagcaaaaggtttgtattgttggtttgcaagagtatagagtgtccgatatagagactatcaaggagttgattgaaaaaggcagtgctaccagaagtactggcacaaccggtgcaaatgaagagtcctcaaggtctcatgccattcttcagcttgccattaaacgccgtgtggatggcaatgactcgaaaccacccagaccagtcggcaagttgtcatttattgaccttgctggcagcgagcgtggtgctgatacaactgacaatgataaacaaacaagaatcgagggtgctgagatcaataaaagtttgcttgccctaaaggaatgcattagagcgcttgataatgatcagactcacatacctttccgaggtagcaaattaactgaagtgctgcgtgactcattcattggagactcacgcactgtcatgatatcctgcatttctcctagttctggctcttgcgagcatactctgaacacattgagatatgctgacagagtgaagagtttgtcaaaaggaagcaacgccaagaaagacgtgtctttggcagtgcctttaagagagtcgaactcttccccactgccttcagttgtaccctcattctctgcatctgaggtgatgaacgatatcaccgggagaagcaatttcggttggcccaagcagcagtatgttaaagaacagcctgctccaacatttgttgaacgaatgcccaaggcaaaggatgcggtggagttcacatcatcaaatatagctgaagtaccagatataatgtaccagctgggaaggcagccatcaaggaaagatgtcactttggcgaacaatatgagaaattccgttgcttacccaactagaagggttgaaccagatgatgatgatgagcatctaaataatcttctccaggaagaggaagaattggttagtgctcataggaagcaggttgaggagactctggacatcctgaaagaggaaatgaacatattaggcgacgcggatcagcctggcttccaactcgatgactacatcacaagactaagcagtatgctctcgcagaaggcggctgtgatcgtggacctacaggctcgtctggagcagtttcagaggcttttgaacgagaacaatgtgctgctatatgctcagagcccttga

SEQ ID NO: 10567 - DNA, 516 bp, Zea mays
  Peptide Sequence Number=SeqID_53942
atgtccggtgtgccaccggacagtgtccggtgcaccaggaccgtacagggtccaacgagccactctcgggtttcctcgggcgcactccgctataattcaccggactgtccggtgcaccagcggagcaatggctccttcgcacaacggttgactgcaaaagctgaagaacataggaacaatgtgcaactgtgcgtgaaagagtcaaagcgcagagtcagaggcgcatcggacagtgaacagtgcatgtccggtgtggcaccggactgtccgatggcgcaagaagacaaagcctccaacggtcgacagctcccgaaccctaacagttgggtgacgtggctgacacaccagacagtgtccagtggcgcaccggactgtccggtgcgcccatcgatagcagccctccccaacggcttgttggtggttgagggctataaatacccccaaccaccaccacctcaagcatccaagaattctgagtctcacattcattacaagagctctagcattcactcctag

SEQ ID NO: 10568 - DNA, 315 bp, Zea mays
  Peptide Sequence Number=SeqID_53943
atggaggtccagctccagccactggcactatacaagcggagggcagagatcgcggttgctgccgttgcaagccatacagcgcaggtcagctcaccgtcggagtcggagactgcagcagtcgagtcgagccgtgtctcccggctccccggtcgacaacgccatcagctgtcagctagcttcctcctcagctgcctctgcctgagatgcacgctggggctggggctgggtgtgggcgagcgcgggcaaaagccccgcctcggattcgccgctggtgctgacgacacgacgcacggcactgcacggcacaagtcgtag

SEQ ID NO: 10569 - DNA, 912 bp, Zea mays
  Peptide Sequence Number=SeqID_53944
atggggtgcacctgtgttgccttcgtcttgctgctgttggaggagcgcgaccccgcgggggttggcgcttcttcagtcatcgctcggcttcaagggttttcatcatgcagcccggctgcagtccctcaccaatggtcatccgtagggatgatcaccagccttgtggtggggagaagcaagccgggctgcggcctctgcccctccctcagattcaaggatgttcatccgggctggggaggagggcgcatcgagttggggcctgcctccgcgcgagccggtgacccgcttcttcctctgacattcgggggagaagggcatcctccagctctgcggaggaggcgtcctccagccatgtgggggaaggcgaactgctgctgcctgactagggtgcagctgtctgtcctccatccgggtgacggtcgcgccgtgcgcaggcggctgctgtcgccggacctttggccgctctacgatgagctgaagccggaggcagcggtgtcggcgtggacagaggcggagttggctcgaaaagaggcttcgtcggcccgggagcatgtggcttcccaggccgaggaggtgcaacagcggcggctggagctcggccaggtcatccgcgagtgggaccaaccccggagtcacgctgctgaggccgtgagccgggctgaggtcctcgggggacagctggctgaggctacggagcggccagccgaggtgtccgctcaggccgataccctggcgaagaccctggctgtgagggcccaagtgtggtgctggcgtcctccttcaaggtggagatccttccgcccgtgtcgccgtctgaggccgggccagattccgccgagggtggatatgacgccgagggtgctgctgctccccctgcctatgtctgaacctgcaggaacagtttgtctgtag

SEQ ID NO: 10570 - DNA, 402 bp, Zea mays
  Peptide Sequence Number=SeqID_53945
atggccgccccgcgaatcgcccgtctcgtcgcattaactcctcggcagggcaagcgacacctttggcaggcaaagcgggcgtcgcttcacctccgccatgatgaccgcgtcaaaataagatcttgtaatgtgttggaggtggaaaacttggatgccattgaatgtggggtggttggggtacggtatttatacccccaaccaccaaaaatggccgttggaaggctgctgtcgcatggcgcaccagacaatccgggatcgggaaaggggatatttcgaaaaggatccttctcagcgaaggaaacgggcccccgagccctcctactgatcaggggttcgaaggctgacccctcggaagggttcgacagccgccccagagcactcgggctccgcgcccattactga

SEQ ID NO: 10571 - DNA, 207 bp, Zea mays
  Peptide Sequence Number=SeqID_53946
atggaacacaaggggggaatgcggcttgtattatctcgcaccggggctaagaagtgcctgagccctttagaagcacagctggcgaatgcaaagattcttcgaaaaaactttgtggttgatctattaagctatgaggacaattcgtgccgatatatcatccctgcaaacatacaacagcgacttatcgatatcgttaaaaatgattag

SEQ ID NO: 10572 - DNA, 331 bp, Zea mays
  Peptide Sequence Number=SeqID_53947
atggctaagctgaacttcaacttcaactggggtccaggcaagttcaaccggggtccagagaggttcaaccggggtccaagaaaagttcagccggggtattttttccggacctctctgctttggtactacatcgagttctttgtggattcattactcttggagcttctagctcctagacgactaggtgtctcttatgttgatcctagggcaatagatcttgccatgagaatcgccgaaaggatgttcctcaaaatgaaggaagatgaggcgaagaacaaaattgaagaaaatgatcgatggagaccaaacgacgaatccacctcttcacaag

SEQ ID NO: 10573 - DNA, 429 bp, Zea mays
  Peptide Sequence Number=SeqID_53948
atgtcccccgttggggtgccggcgtcgtcgactcactctggaccgacagccgacaaggagggtggcggggcaaacccggatgctgctcttccgccacgggggaagacgtcgtcgagttcgccgcctccgggcgagctgacgaccgtcgttgatgctgtcgcgctgcggggggaggagtaccatgtcgtagatgccgtcgagggacatgaactcgagactcccgaagcggagcaacgtcccgggctgaataggttgctgaagactacccgtctggaactcaacgggaaggtgttcgttaacacgcagcaggtccctacctggcgcgccaactgtcagcgtttcggacccgagggacccttaactgagccgaccagtgaatttatcgctgcgtgtccctgcctagatgggttggcgctgaaagtcgcctag

SEQ ID NO: 10574 - DNA, 1514 bp, Zea mays
  Peptide Sequence Number=SeqID_53949
atcttgagaacacccagcccaggccccgtcacgcgcagctcaagatccaccgcgcccagcgccacgcggcagggcccgtccccacgccgacgtcggatccaggtgaagaacgaggcgtccacagcggctcggcgtccagaaaggggaagaacgaggtgagcgctgtggggaagaagaatggaggcgaaccactggggagcaaagtgaaaagtagaaaggggaagaacctcaccgtgcttggaggagacgagagccagatccaggtgcggcggcgagcaagtgagagccagatccaggtccggcggcgagcaagtgagtttcggactttcggtgctgccgcggcgcggcctgctaatttggcggcttgcatacctccctccccctctgctctggacaggtgttgcttcccggaggtttccgctgccgctgcgtgccggtgccgcgggcaggcgcaggaggctctcggctgtttccttagcgtgccatcgtccatggaggcgaagcagcgcccgcggcacggcgaggagaggaggccgccggcgacggacaacggcggcggcggcggcgaggagtacgacccatggacggcgtggctctacaagccgcacaccatctcggtgctcctcgtcggcgcctgccttctcatctgggcaagtggagcactcgatcctgaaggcgctgctgctcacagtagcttgacatcaatcaagaggggtgtctgggctatgattgcagccttccttgcctactgcacgcttcaggcaccttcaacgatacttattaggccccatcctgctgtctggcgcctggtacatggactggctgtcgtttacctcgttgctcttaccttcctccttttccagaatcgtgacgatgctcgccagttcatgaaacaccttcaccctgatcttggagttggtatttgggcaggaatgcacacagtccgttactttgatggcaaaacatatgaatgggtcggactgagccgccaacgaagcatcatgggtaaggtgaaaagatcgctgagccagttcacccctgctcaatgggacaaggatcagtggcatcctttcatggggccactgcggttcatccaagttctgttcctctgtgttgtcttcatgaccgtggagcttaacacattcttccttaagttttgcctgtggatccctccaaggaatcccttagtcgtgtacagattgatcctctggtggctgattgccatcccaaccatccgcgagtacaactcctacttacaagacagcaaaccggcgaagaaggttggagccttctgttggctctctctggctatatgcatagtggagctgcttatctgcatgaagtttgggcatgagtcacgagatggaaataccctcactcggcggctggattgtgagactgaaagtgtttctcgcgtgtaccgagtgacaggggtgctcctctatttaacctctcgcagagggaagctgaaggagaaaggtcgtcgtgtcacgccaagagtcggccagctctag

SEQ ID NO: 10575 - DNA, 411 bp, Zea mays
  Peptide Sequence Number=SeqID_53950
atgagtaaaggaaacgagaagattgagaggaccattgtgtgggatgaggatcaaagcaagtttatgcttggttggtttactgacttcataaaagaacaacatgctggttttaagattaaaaaacaacaccactgcaagtgtgctgaggcattgaacagacaattcaatatgggggtcactgctactcaagttgaaagacattacaggcattataaagagaattggaagtttgttgctgcagccttaagcaagagtggtaacacttttgacacaacaaggtctatggtagtcatatctgaatcagagaaatctaacctaaaggatagggcaacgaggctcctttctaagcctatcaagtttttcaatgaaatgcaagagtgtttattaacagcagtgctgatggctctctag

SEQ ID NO: 10576 - DNA, 591 bp, Zea mays
  Peptide Sequence Number=SeqID_53951
atgaaggcgtttatgatgattctgatcatggttttgttcaatggtaccctggaacggagccccctcgacgttcctgcccatcgaccacctctccaatcttctctgcgcatctactgttcattggcgggtactattgcgccacctccacagcagctccaatccctcatcgatctagaaccatacatctggtatcggctagcttgggtttcgacccgatcacatggcttctgctaccaatttcacggcatcgtcctggcaactggcgtccctatctccatgggctacgccgcataccaccttcgtcacgccgtcctggcaaccgtcatccccatctccatgggctgcgtcccatgccaccttcgtcacgtcatcctagcaaccggcgtcaccatttccataggaagcaccgcctaccaattttgtcacatcctggatgccggcgtgcccatctccaggggtagctccaaatttcgtcacatcatctttgctgacggcgtctacgtccccatgggcaacgccactagggccagccacggctcaacaatcactagctccatcaatgggggacttgtgggccaacataagggatga

SEQ ID NO: 10577 - DNA, 450 bp, Zea mays
  Peptide Sequence Number=SeqID_53952
atggcagcgaccggcgcagaagcaggaacggcgcagatccagatctgtggaggcgacagacgacacagaaatcgacggcgcagatctggttctgcagcccttgtggcgtgcagcaggcagacaactgcagaggtacggcaggaatcgacggcgcagatccggttccgcagcccttgcggcgtgcagcagttgcggcgtgcagcaggcagcaactgcagaggtgcggcagggcgcagaacccaggcgcagcaggcaaataggcaacaggttattgaattggctaaggttggtgtcattggaaatttggttcattcatcaccaaagatcaagaaggaggttcttaatgcaggggcactgcaacctgtgattggattattaaggatgagtaatctgttggtgcaaccacaaccccttatattgcatatttttagtattagggatcagacttga

SEQ ID NO: 10578 - DNA, 285 bp, Zea mays
  Peptide Sequence Number=SeqID_53953
atggacggctacgtagacccctacgaggaggtcgtggccgaggacgactctgacaaccctgacgaggacgactcagatgcggagagcaactacaaggataagtcgttcgacctcctcaagtccaacaagcaccgggtgcgcaacccggatgacaccttccatggccccttctacccctgcaagaagagcaggggtacaagagcaaggacctcctccagcaggctcccaacgacattgatgtctccaacaagcatcgacatcacggctgcaaatggtttgctttga

SEQ ID NO: 10579 - DNA, 1275 bp, Zea mays
  Peptide Sequence Number=SeqID_53954
atggcccaagaacgttcctatcccccgcgcggctggcgaagactttttacgtctcgcatggctcgtgacttgagagtgtttccttacgggcggaatattgctgctgttgtgtcggcagtgatgaacaaggatcgccaggatgctgcgcaaaagcgtcgggcggtcatcaggctccccgaggctaggccaaagagggcgcggtggactgcgaaggctaccgtccccagcggtagccagcggatgctggctgcgaagccagacgcctctgggtccagcaaggtgccggagagcgcgaaggcggtcggcgccggcggaaccaagtctgccccggacggagctgcgaaggtccgggaactgccttcgccggggaaacgcgttgccgacttccgcacaaatatcagtgtggacgactatatcgtcgggtcgggcgaggggcaacttgttgttgtcccgcctgcggtggcaaccacggcgtctaccgcggtgcttggggtgaagggtggagctttcagcgctggcggcgagatttcggcggccactgccgtcaaggacgaagcgggcactgtgtcccaccggctgagggaggcgtcgcagcagctggcgcagcagctgagtcaagcggccgacttcgccgaccgcgtggcatcgggtgctcttaccgcagacgtggctgccgaagtcgagagacttcgggcgcagcacgcggacgccgtctgggagaagtcggctgcagagagcaaaagtcgcaggctggcagagaaggtggtcgccctggagggcgagaggacggacctccggcgccagctggtggaggaaaggatggaggccaaccaggccatcgccaaggcgcaagcggcgcaggcgcaggccaaattggcgcgggcggaggggagtctcgccagccagcgcgccgaggaatgggaggtgcggttcaacgctctgcaggcccgcatggagagggtcgaggcctctacgcgctcggaagttgagcggacgcgcaaacagctcgtggactcataccgcgagctgggtgcgcggactgctgacttcgaggtgcccgaccgggaggcgggccttcgcttcctcgagtggctgcaagaggaattgttggcactcccgaccatcatggagggcttcatgtcctttgcctccctcgtcacctgcgaaggggccatgaatgcgctgtcccgcgagaggtgcaatcactatgagggcttcgaccgatcgatgaagactatgggagcgagatttttaaggtcgaagaccctgtggtga

SEQ ID NO: 10580 - DNA, 447 bp, Zea mays
  Peptide Sequence Number=SeqID_53955
atgggcgaggtggagcaggtcgtcgtcctagatgtcgccgaggacatccggttgtcgcttgctcatggcgtcaggctggttgcttcctcaaagcgagcggtgcatcaactatttatctacgtcctggataatcgaattgctttgccgtggaagcaggagaagtgtaaaaagcactatttcctaacaatatgttatttcccagattactatgattcgttggcatgcccctcacttttaactttctttcaggctgcaattgagtacattcattctttatcaagggcacagcctgctcgttctctcaatggtgctggcctttgtcctgctagtagatcacttagcacccaggccaccactacgtcaagcacaccacagttgaaagcacaccccatgtcaagcagccaggccgccactatgttaagcaaaacagaagacgggaagaactga

SEQ ID NO: 10581 - DNA, 231 bp, Zea mays
  Peptide Sequence Number=SeqID_53956
atggaatcctcctcaagcaatggtagcaatgtgccactgcctgcatctcaacaccctctacatgtgacagatgcagatgaggaggacaagagtgtaaagcagcttaacgagtgtgccacaatatatctatctctccaggactgcctcattgagtcaaaccgcaactggaagtttccagagcttgaaaggcatcaaaagtatgttctatctattaccatcaggagaaagtga

SEQ ID NO: 10582 - DNA, 252 bp, Zea mays
  Peptide Sequence Number=SeqID_53957
atggtgatctcgtgctccgccgcaagaccaccgacggccatctggatctccgccgctgatagaagatcggacggtccaggatggcccgtaccccttcggcctggccgtcttccaaaagagcccctcaccttatgcaaaatcaacctgccatcctgtgcggagttctctgtgtctgggggattttacgtgttagcccccgagttttcggaaaatagtggccgccgtccagagtctgggaatttcaggaaataa

SEQ ID NO: 10583 - DNA, 858 bp, Zea mays
  Peptide Sequence Number=SeqID_53958
atgcggatgtggcatgtccttcgcggcgcaattgtcgctcttgtaaccgtcgtgctcctctctatgctgggaccagggagcaatgaccgagtcgttgaggttgaggggtcctcctcctcctccatggcggacgtgtacaaaggcgagctcacgccgctgaagaggcacattgccttcttcgactgcaataaggacgacgccatctacccctccgagacataccaagggattgatgtcataatttatgccatacaagacaacattgtcaggccgaacttgaacattgggatggacctttggactgattctccagttaaagcagagacctctggacagggtgaaataaatgctgcgacgcattcccatcatggcagcactttgtcgatgatggatgagcgagaactgaaaagggagagaagaaagcaatctaacagagagtcagcgaggagatcaaggctacgcaagcagcaagaatgtgaggaactagcgcagaaggtaactgacctgaccgtcgtcaacggcatgctcagatcagaactcgacgagcttaagaaggcctgtgaagacatggaagcagtgaccagcatggaagatggagcagagctgagcatgactggcgagctggagggcagcgagcagggagggcacggagggggcgagctcgaacctccctggtggctggcgctagaggaagatggggaggggatggagaagatgaggtgcgttcaagagatagggctgggcggacggctgagtgagcagtgggcagtggcggcggcacccgccatggctgaggaagggggtgggagaagtgacggcggctgcgcgcgtagaatagggtttcgtttgtttgtttag

SEQ ID NO: 10584 - DNA, 588 bp, Zea mays
  Peptide Sequence Number=SeqID_53959
atggaggttgtaggaggccgagatcacacgacgacgccgatgatgacaaaggccgagaggagagaaggatctatagagaaacagggagcggaagttggaggagccttgcctcggaggaaagaggaaggaactcggaacagagatgctctagctccaagccccctcaaagcggtgtggtgtgtcagcgacgtagcgggcgatagagaggacgaggtggaaaggaatcgagggcagtttcaatttcgatcagtggaaactgacgctgtctgcggatgcgttgttggtgtggctgccgtgccacggggagccgccggggctgggctgcgtctgcgcccgccggacgagaccggatcggagccggggtcgccgtgtcgtcgggggtcctcgcccgcgtgccgtcgtggctgcccgcccgcgcatcggcggggcgcttgccagcgtgctgttgagggccacgccgcgcttgtgcacaggccgcgacggccgcgcgcaagccgtgcccaccgggggtggccgctgctagggccgcgccaccaggggatctcacgcccgcccacgccggaggagtctagatctgagccgccatga

SEQ ID NO: 10585 - DNA, 408 bp, Zea mays
  Peptide Sequence Number=SeqID_53960
atgagattcttacccccagcttccatatgcaagcaaattaacagtgttctgacttactttttccattatacttatcctggagatgataaggaggaatgtcttattggaacctggtttgggaaaaagagtattgaggaggataggctaatagcagtttcacttgcaagcaagatggttgaatctgctaagtttcaggctgtccaggcgcgcttttatgaggggaaagaaccgattcaattctttgtgattatcaatcagtgcggaagtgatgtcgttgtggtgcttttgaacctattattagaatgcatgagtcaaactcgccttcagtctagtggcgttgtactcccatttcaacaaactgtaaatgatctagttgtgaatgatattataattgtgatgcttttgtga

SEQ ID NO: 10586 - DNA, 420 bp, Zea mays
  Peptide Sequence Number=SeqID_53961
atgggcgggggcctcctggcagcagcatccgccctgaggtcagtgctgctgctgttcgcccccccggagcagaagtcgtcgtcgtcgccgctgctggagcagcatgaacagaggcagagttggctcgaaaatgagaacctggttggccggagcctagccgggttgtccgtcagcgggaccgacgccggagttgatcagccgaggcctcggatcgggccggtgcccttggaagatggttggccgatgcccatgggtaaccggccgagcctcctgctcgggccggattcccggagaagtccctggaccacgtcgccgtccgaggcttggtcggacctcgctgaaggtgtcgtcgatgccgagggtgctacagcccccttccagcgtgaagacccgagcctgcaggatcagattgtcttgtag

SEQ ID NO: 10587 - DNA, 537 bp, Zea mays
  Peptide Sequence Number=SeqID_53962
atggccgccctgccaaccactcgccccgtcgcattaactccgcggcgggacaggcggcgcttctggcaggagaagcgggcgacgcttcgccttcgccgtaataaccgcgccaaaaaaggggttcgaaggctggcccccgaagggttcacagtcgcctcagacgccgagcgagggatgaccagggggctcggactcgggctaggccccggaagacggcgaactccgctccgcccgacccagggctcggactcgggcccagccccagaagacgacgaactccgcttcgcccgaccccagggctcagactccgccctggcctctgccgaacgacctccgcctcgcccgacccaggggctcgggctcggcctcggccatggaagacagactcgacctcggcttcggaggagcctccacgtcgcccgacctagggcgcaggccagccacgtcaacaggaagcgccatcatcaccctaccccgagccgactcgggccgcagagaacaagaccggtgtcccatctggccagctccgccagatag

SEQ ID NO: 10588 - DNA, 84 bp, Zea mays
  Peptide Sequence Number=SeqID_53963
atgacggatgcagagcaggaggagatgaggaaatgcagttgggagagttacgacgacaaaggagagagattggatgtggcgtaa

SEQ ID NO: 10589 - DNA, 1167 bp, Zea mays
  Peptide Sequence Number=SeqID_53964
atgcagtcggcatgcaaccgcgccaagtgggcttaccccttcgactccaacgcgcccagcatggaggcccaggcccacacgtcatgcaaccagcgcgccggttgctacgtgcgagcaactgcaccgcccctcgcgccactaccacgcctcctcgactgcggaaccagtaccgcgactcgaggcaaccctgcgtatgacccaacagtgccagccaggcgcatcggtcatgggccagtcagccgagggagaaggcgcgacattcgatgcggccaaaaatgggccggcagtaatggcggtggcaggcgggcggaagcagcggtcacgtcgtcagccaagctcacgtcccctcatgggacagcgagagaaccctctcccacggagaagcgggcgacgcttcgccttcgccataacgaccgcgtcaaaaaagccccggaagacgatgaactccgcttcgcccgaccccagggctcggactcgggctcagccccggaagacgacgaactccgcttcgcccgaccccagggctcggactcgggctcagccccggaagacgacgaactccgctttgctcgaccccagggctcaaactcgggctcagccccggaagacgacgaactccgcttcacccgaccccagggcttggactcgggctcagccccggaagacgacgaactctgcttcgctcgaccccagggctcggactcgggctcagccccggaagacgacgaactccgcttcgcccgaccccagggctcggactcgggctcagccctggaagacgacgaactccgcttcgcccgaccccagggctcgaactcagccctggcctcagccgacggtctccgcctcgcccgacccaggggctcggactcgacctcggccttggaagacagactcgacctcgaccttggaggagcctccacctcgcccgacccagggctcggaccgaccacgtcacaggaggcgccatcattaccctaccccaagctaactcaggctacggggaacaagaccggcgtcccatctggctcgccccggctccagcgctcctccgacggccacgacaccacaagaaccgggtgccaaaacctctccggctgccacgatggcatggccctcttacagagggttggccgcgcggggaaggacgggacggcgctcgcgtaa

SEQ ID NO: 10590 - DNA, 114 bp, Zea mays
  Peptide Sequence Number=SeqID_53965
atggagctctccctctcctacccgagccctctccctcactcctcgcgccctctctctccctcgctgatgaattttaatgtttatttagaagttataatcaaaaggttcatttag

SEQ ID NO: 10591 - DNA, 879 bp, Zea mays
  Peptide Sequence Number=SeqID_53966
atgaaccccaggagcatgcctcaggggactccgaagacacacttctcgggattgagtttcacgcctttcgctctcagacacttgaatgtcgtctcaaggtcggagaggaggtcagaggctttcctcgtcttgacaacgatgtcatcgacccatcagcttgtggacctcctcgcctatggacctgcgcttctcttcatcaaagcggcgcaggaaagcagcgccgcctgccccgctatgactgttgtgccacccgccagggtgaggctgacagcagttgagtccagcctcaagcgccacaggaagctccgcctcgcccgaccttgggcctcggcctcaggagaagtctccgcctcgcccgaccccagggctcggcccctgcctcggcctcggaagatggacttcgcctcgtccgaccccagggctaggcctcgacctcgacctcagaaggtggtctccgcctcgcccgaccctagggcccagcctcaacctcgacctcggaaggtggtctccacctcgcccgaccctagggcccagcctcaacctcgacctcgggacaaatcgcgtcctcacccgaccccggcctcggcctcaggaggagtctccgcctcgcccaaccttgggctcggaccgaccacgccgcagggggtacatcattaccctacccctagccagctcaggctacgggggaacgagaccggcgtcccatctaggctcgccccggtaacaagtaatgatggctccacgcgtgcgtccatgacgacggtggctctcagcccctttcggaagcaaggagacgtcagcaaggtcccgacagccccgacagctgtgcttctacagggctcaaacgctcctttgacggccacgacaccatgtacatag

SEQ ID NO: 10592 - DNA, 2076 bp, Zea mays
  Peptide Sequence Number=SeqID_53967
atgccacgcacgaagaatgtgtcggcgtcagggggtggcgatgatgaggaccctcgtcgccccttcaggcaggtgaagggcaagactgtctatttggagcagcaggaaggtcgcaagaagcggcgtacggacagagaggcccgtgcagcggcagcagctgcagcagccgctgcgcaggccgcacttggagatcagtcgcatgttccatccgatcagattgcattctgtgctcgtcgtctcgtctcccggcctcgctcctccactcacacctccgcttccactccgccacccactctgcctgctcccgtcactcctattgctccatccacctccacagccatacccactacctccactacgccagcttccactgcttcccctgctcccgctcccgcttcagctcctcctgtccctccacctcgcttccgggagcgtgatgagactgaggtacgtcctctggtttcggatcctcgtctgtttgatcttcagcgtgctaatgcagcacgggtacgtcggttcaggtacgtacccgtggagtcctggctaccagctcagagagacccagcagcaggtgttcttttcagcacacggattcaggagtcattcttcagggctcagatgtctgctcagatagcgctgcgagtgcaccgccttttggatcttccagcttttctgcttgcagccggtgctgagtctgaggcgcatctcacctatctgcctggcctcctgacccttctgactatcagcggcagatatgttgaggagtgggtccgcgtcttctacgcctctgtttggattgacccggatcatcactggatgaggttccgctttgagcgcgaggatgtcacgatcactgccagtcagatccgacagctatttggattccctgagtcgacgacttgccttcacagcctctgctacggcacttctgatcctcctcgtcgccctcacggcagtgtggctccagggacagctcacgtcgcggctctgttccgcccgcctttcacagatgggtcgcgacgttcaccagcagacttcactacagcagcgaagttcttatatgagctcatcagacagacactcctaccgaggatgggatacagggaggctaccacccatattcagctttggctccttggtgccctggtatcccactctgagtttgatgttgtggacttcctgatttgtgagattgaggacaccgttctggatgggattcgtgctcgtcggcagttaccctatgctcactacttgtgccacatctttgcgcagctgattcagtcgcctcgttttcagagcacccttgaggcctcacgccttgccgaggatgcagctcttcgtcagtttgacactcagggtacagcagctgatgatgatgatgatgatgatgatgattttgggattcctcctccgcctccgcctcctatgcctccacgctcacatgatcatgaggctgggagttctagtgctgcccctgctactcctcaggctatggaccctgctcttgcttcgattctccagactctcactcagcagcaggctcacctggcagccgagcaggcccgtttatccgagaggatgctctcgatgtttcagaacatgcaggacaggcaggatgcacttcagcagcagcttattcaggatagggcagagaatagggcattcatggctctcatgcttcagcattctggtatctcagcacctccggttcagtctgctctgcctcctccgcttcacgctccagtggtgccatcgattttgtctggaccccctgttgatacctctccgctccggccggtcaccttggcgttcacttctccggttctcagctctgtttgtccgcagctgccagtgccaccagcatctgctgttaccactaccgctgtggcagtatctgtgaccgcttctgttccggtagctcctgcagcacggcctccgtccgagtcagtaccagctccagcttctaccgcagatcctggatccgagactgactctgaccctccgccagcgttcgctctgctacctcgccctcgaccggatgcgcccccgccgcctcctcctgcttcaggtgtttag

SEQ ID NO: 10593 - DNA, 774 bp, Zea mays
  Peptide Sequence Number=SeqID_53968
atgggtgacgaaagaatggactgcggcgtggcgactgcccccagtccccactccccaccagcccagcccccggtgagggagtggaggggagggacacgaaggcgcaaaaggctgctggaccggacctcgatgaggaatgcgggaagcgggatgcatgtactgctcggctcgcctcggctttggctctgccgtgccgccgccctctttcttcttactccttcctttctcccacgcgccactgttatgcggttagtgtttgggctgagcagacggatccactgggccaaaatgctgcttatttttcgaatgggccgttcgtttgtgttggacctctgctcgaggccattctcgggtggagaggctgtcaagaatcgcccaaggccgagtcctgacgggagatgcagtcacgactcgtccgagaacaacctcgggagacacaagcacgactcccccgaggccatgcctagatgggacaaccaaccacgactcttccgtggccaccctcggacaggacaagcagacacgactcacccaaggacaaccccgagcggtactggcagtaacgactcgcctgaggcaaccccgggcgagaaaggcagcaatgattcgcccgagggcaaccctgggtgggagaggcagtcacgattcactcgaggccatcctcgggggggagaggcaatcatgactcgcctgaggccacccttaggcgggagacacaatcacgactcgtccaaggccaagcctaagcgggacaggcagccacgactcgcctga

SEQ ID NO: 10594 - DNA, 2016 bp, Zea mays
  Peptide Sequence Number=SeqID_53969
atgccgttcggccacacgcggctcgatgtccggcgtccgccgcagtcgtcctacctctgctgctccacaaccaccgtcgccgtattcgtcgcgctctgcctggtggctgtgtggatggcgtcgtccatgctcgtcacccctgccgagttccctccatttcagtccaaagtgcgtccactgaggcctcatgactctcctcctgccaccggaagcttaaccagtgctgatcagggcgatggcatcaccacccatgatgatccaccacctgctacacaacaattgcctcctgtaacagacagcatggatggtgaaaatcagcaacaagaacttttcactacagagcgcggaccatggtcaaccaaggctgaacaatctaacaaggacgctaaagagcaaaccttgacgtccagtagcccactgagcttccgttgggcgttatgcaacgtcgatgctggagcagattatattccatgcctcgacaacgtagcagctatcaagaagctccgttccaccaagcactacgaacaccgagaaaggcattgccccgagaaatctcctacctgccttgttcctctaccagagggctacaggaatccaattaggtggccaaagagcagagatcagatatggtacaataacgttcctcatactaagctggttgaatacaagggacaccaaaactgggttaaggtttctggagaatacctcaccttccccggaggcgggactcagtttaaacatggtgcgttgcgctacattgattttattcaggaggcaaagaaggatgtagcatggggaaaacgaagccgtgtagtgttagatgttggttgtggagtagctagctttggaggatatctatttgacagagatgtgattactatgtcatttgcacctaaagatgagcacgaagctcaggttcagtttgctcttgaaagaggaatacctgctatatcagctgtcatgggtacaaaaaggctcccatttcccagtagggtgtttgatgttgttcattgtgcacgatgtagggtaccgtggcatattgaaggcggtaaactcttgcttgaactggacagactgttacgtcctggtggttactttgtgtggtctgctacacccgtataccagaagctgcctgaagatgttgagatatggcaagccatgtctgctctaaccagttcaatgtgctggaaaatggtcaacaaagtaaaggatagggtgaatagagtgggtatagcaatttacagaaagccaacagacaacagctgctacgaagcaagatctgaaacaaaccctccactctgtggagagtacgacgatcctgatgctgcctggaacatatcgttgggggcttgtatgcataagttgcctgtagatcctaccgttcgtggttcacagtggcctgagttatggccattgagactggagaaaccaccttattggctgagaggttctgaggctggagtatatgggaaacctgccccggaggattttcaagcagactatgaacactggaagcgagtcgtgagcaattcatacatgaatggtttgggtattgactggtctactgttagaaatgttatggatatgaaagccgtatatgcagggttcgcagcagctttgcgcgatctcaaggtgtgggtcatgaatgtggttccaattgattcacctgacacgcttccaattatatatgagcgcgggctgtttggactgtaccatgactggtgtgagtcgtttagcacctatccgagaacttatgatcttgtgcacgccaaccatctgttctccaaggttaagaagaggtgcgagctattacctgttatcgtggaggtggaccgggtgttgaggccacaaggccggctaattgtcagagacaacattgaaacaacaagtgaggtggagaacattctgaaatctctccactgggaggtccgcatgtcttacttccaggagaaagaaggcttgctgttggtgcagaagacgacatggcggccaaatgaaactgaagctaagctatga

SEQ ID NO: 10595 - DNA, 532 bp, Zea mays
  Peptide Sequence Number=SeqID_53970
gccgaggatgcagctctttcgtcagtttgacactcagggtacagcagctgatgatgatgatgatgatgatgatgattttgggattcctcctccgcctccgcctcctatgcctccacgctcacatgatcatgaggctgggagttctagtgctgcccctgctactcctcaggctatggaccctgctcttgcttcgattctccagactctcactcagcagcaggctcacctggcagccgagcaggcccgtttatccgagaggatgctctcgatgtttcagaacatgcaggacaggcaggatgcacttcagcagcagcttattcaggatagggcagagaatagggcattcatggctctcatgcttcagcattctggtatctcagcacctccggttcagtctgctctgcctcttccgctccccgctgcacagtcccatcgacagactgagctgagtcttggctcgactaaaaaatatgagcatgtacctcaattctctgcatctcgaagatgcaaattactttacctcaatccttag

SEQ ID NO: 10596 - DNA, 855 bp, Zea mays
  Peptide Sequence Number=SeqID_53971
atgtcgcggtttatgcagcccagtttgtgcggcccaacagttggtgcggcccattgttgtcgatttgtgcgttcacatcttctccctggcaactgcttccgtcgtctccaccaccgtcccacgttctcctccctccgcctctcgctctgcgcacatccccatgcccacgccgagcgcttgcgcctcaccgcccccgtcgcaaccgcggccgtggcggcgtcgacgacctcccccgactttcccgccgtgggcgccgtcctagggaagcccacaatgctcgtaggtagtggccgagaagatcggagccgcgaggttcatgctgaaggctcgtccatcctcagcgccgccacctcgcccccgtcctcggagccgtcgtctccaccctgtcctcggagcagcatacaccatcgcgtcctcgagcacccccgagatctcgctccttcctctgcaactgtagccgcccggcgtctccccctccgcgtgagctggcccctcaccgctcgggccccagacctcctcctccagagcttcaccgcccgtcctaccgccgttggccaaccgttttggtggccccagacctcctccagagctaccgacgactacgactgtccaggaaaggagcttctgaagtatagggatgcagcacaaatggttgatgttgaaaccacgcaagaagctgctatggcagagatccttgttcgatgtttaaggcaagacgggtccaaaaggctccttccctgcgatcctcaagtcagggtagacatgatccaacagcaacgaccagataaggatgcattctctcctgtactcctggttcccttcgatttcaggtcaacatttgttatctccatgtag

SEQ ID NO: 10597 - DNA, 255 bp, Zea mays
  Peptide Sequence Number=SeqID_53972
atggcagagctccggctgcacaaggaccactccgacggtggacgtcggcgggcggtggcggaggttctcggttcacgtgggcagagcgagagagagggcaagagctgggtagagggcgcaaatggaagaggggaggtgagcgagcagggcgcgaggttcaaaaggggcgcgagggctcggtcgtggccggagaacgcgcggacgtgggcgcgtcaacgacggggagatcgtgggcgggaggttgaggacggctga

SEQ ID NO: 10598 - DNA, 312 bp, Zea mays
  Peptide Sequence Number=SeqID_53973
atgccgtggccactccccccctgcgcccgtgactcccccttcggcccatttctggcctacttccacgcgtgcgcagtcgctccgtgctccctctccctctcgctgacgagccgaccccactcgccagccgctctctctcgcgcgctcactcccgctggcagaccggccccaccggtcagccgcttcgtcgtcctccccgcgtacggctcgtcgcagtcacctccgaccgacgtcccctccatctcccccgtcccctcgcccatcccctcgccgcacaggagagtttggcaccgccccgtcctcgccgcttga

SEQ ID NO: 10599 - DNA, 453 bp, Zea mays
  Peptide Sequence Number=SeqID_53974
atgggcaagaacaacaaacgcaagcgtgagccaactcctccatcggaggagtttggtgactcggagtactcagaggaggagttctcctctgagtctgaggggtctccggctcccgtccccctgcgtgagtcgtctgacgactcagacgactcccaggggctcgcggcggaggtctggacgtacatccgggccgtcgagcgctccgggctcgagggctcggatgagtcggagtactcctcggatgaggaggactcggacggcggcggcgaggatgaggacgacgacgacgacgacgacgacgacggtgacggtgacggtgacgacagcggcaggggcggcggcgacgacagcaaggacggtgatggcagcggcgggggcagcaaccggggcggcagtagcaggggcagcaccagaggcggcagcagcggcgtcagcaacagggccagtggctag

SEQ ID NO: 10600 - DNA, 133 bp, Zea mays
  Peptide Sequence Number=SeqID_53975
atgtgcagggctagacgccggaggagcttaggtagagcagtggatggccagaggagccgaggcggaccggtggaggcaagagtggtggcggacctggtgatggctggtggaggcaagagcggcgcaagagcaa

SEQ ID NO: 10601 - DNA, 1230 bp, Zea mays
  Peptide Sequence Number=SeqID_53976
atgaagatgcacgaggtcgaggagcctccagcggagatcacccgcgacgcccacccggcgcacgcgctgaggctggtggccaccgacgacggcgcgccgttccggtgcgacgggtgcaaggagcccggcagcggccaggggcggcggtacaggtgcggccacggctgcgacttcgacctgcacgtggcctgcgcgctggcggggccgactctgaggcaccccctcttcggcgagggcctcgagttccagctcctcccggaggcgccgccgcccgtcgacaagacgttctgcgacgcctgcggcctgcgggcgcccggcctcgtctaccactgcttcgacagggacctggacctccacccgacctgcgccgcgctgaagccggagagcgccttcccgggcggccacctggcccagctcggctgggaggccgccgagcaccgctgcgtcgcctgcgacgccgccgccgccgccgccggcaagaggttctgggcgtaccgctgggcctacggcggcacgcacgggtacctgcacgtggcgtgcatgaagaagatcgcctttcagagctgggaacaggcctaccaggccagcgtcgtcggcggcggcctcgtggaggcgagcgtgccgacgatgacagccgtgctgcacaggaagcgcaccgacgaaattacgggcggcgttaagattatcgacaccggcatacgcgggcagtacctttccagttcaacttgggaagtacctgttggagaaatatttactcctaaaagttggcttagctcaagggcctttcatgctctggaacacctacctaaaaagttggcaaacctttataacctcaataagaacttcggcaacacaattagaagggccacactacatagtgcctttatccaacccttaactgtgattactgatagccatgtaaaagatggcacagtgatcccagcagcgagccacaacaataatcaactcctgaggcaaaagcatcagccagttagtcacctcctcacaaaacacgaagagggcagggaaaataaaattgcacaccacaggatacaatgtgattaccttatctgcaatggggagctccccaagttcagagataaaggtcaatttggaaaacctatagcaaaggctgaatgcaagggttatgattttgatctaggaaaatggtgggacaattatgggacacaagttccaattttgcaaagaatggttgtttgtcatttgtga

SEQ ID NO: 10602 - DNA, 1902 bp, Zea mays
  Peptide Sequence Number=SeqID_53977
atggccagacctcaacgcctggcgcctcccagcgacctccgcacgtggggcccaaacagtccttgcgcctctgatgttgatgagccagcggctgacgacgacgtggcctcgtcgctactggagatgggggcgctcgtgctatccaccgccgaccctctcactaaggcacgacgcacccacgccgccttctcccggtgggccatcgggctccctatcggccaggcgacggccccctaccaccccaagcgcaaggaccgcctcgtcgagcgcgcgccctacgcccgcccgtcgtcccccgcggaggagccggagaagaagacggtcaagccggcctcggccttggcctcctggctcgggctcggcagcacggaagccgaccgcctcaccatcgctacctggtctgccccgccgtcttcccccagatcgtgcgagacctgggtctacccagtcgccgctcgcccgctcgccccctcaacctccaagcccaggaagtacacaccagagcgccgccagaagttcatcggagggcaacgaagcaaccacgagaagatccacacggccacaatgaagatcctgacgtaccagctttgcaacagcgtggccttcgtccacgaccccaaggtgctgcaccgggagctcaagttgcacatccttctcaaggaccacaagaccatggtgctcaagatcgttgaatatgttgaggacatttacagattctacaagagcactgaggacacctgccttcctctcagcagctacatgagctcacaggctgaaatcagtgagagaatgagagctatccttatcgactggattatcgaggtacagtacaggcttactctaatgccagagacactttacttgaccgtctacatcatcgaccagtacttatctatggagagtgtaccaagaaaggagctgcagctcgtcggcataagtgccatgctgatagcaacttacacaacaagcagcgatattttacaggttaaggacttgatgtgcctctgtgacaacgcatttaccagagaccaggttctgaccaaggaaaaggccatcctggacaggctccattggaacctgacggttccaataatgtacatgttcattgttaggtacctgaaagccgcaatgtgtgacacagagcttgagaacatggcattcttctactccgagctggcattggtccattacgcgatgctggtttaccctccatcggtgaccgcagccgctgccgtctatgctgccaggtctacacttgggatgaatccaccgtggactgatattctggaacatcacactggcatagttgagccacagttactgctatgggacattggaaagaaggatggcttaagggttactggaaaggaaaccttccacagtgagttcttcatttctctctctcacaagtcagtaacttacccactggatgttctccggctcaggctagcagttcaatctggacacatcactttatctcaggttgctcttaacatgctgagagaagaagggctggcctccttctatggaggcttgggtccatctcttgtagcaattgcaccttacattgctgtgaacttctgtgtttttgacctgatgaagaaatctgtaccagagaagtacaagaatagaccagaaacatctctagcaaccgctcttctttcagcaacatttgcaactttgatgtgttatccgctggacactgttaggagacagatgcagatgaaaggcacaccatacaatactgtttttgatgctattccaggtagtccacgacctctgttcacgaactctctaaaacagaagcacaatatttctcagcttagttcttgttgggggccttcggcttacgaaggtcctcaaaaacaggatttaacagtacttctggagcataatgtgtga

SEQ ID NO: 10603 - DNA, 459 bp, Zea mays
  Peptide Sequence Number=SeqID_53978
atggatgaaggaactcccctcggtggtctggagtctgaggacaacaccgagccgagccacggggctcggatctcgacagttgaagggagccgcagcaccctcggtgtcgactacaccttcggcgagctcggctggtcacccggaggcctcggccacctgtcccccgaagacatcagcccggcccgaggcctcgacagatcgactccggcgtcggtcccgctaacggacgacccggccaggcttcggccgaccaagtcttcttttcgagccaactctgcctctgtccgtgctgacaccgctacccctggcttcggctcatcgaagagcggccgaggggttcctttaactaagcaagagaagcctcagacagcaaggccgaccgagccgagggactcctacgcctccgggatacggatacctcactcgtcacctttgcacggggcgactcgctcttggtga

SEQ ID NO: 10604 - DNA, 936 bp, Zea mays
  Peptide Sequence Number=SeqID_53979
atggctgaaaggtaccaactcccgcggagttgcgttcctccaacgacaaggcggaaggactgcgggcatcccccatccgggggctcggaaggtggaaagacacgatgcataagggagcgcgaagacatggttgcctttcaagggggtcaccctccttttaaaggcgactctccctacttgcgtccccagccgtcgtgggctgagtcttctccaacacgctccaaggtcctcccctacggcgcggggggctgggtcccacgcgtcatgcaagctggcccagggcagaagaagccaaaccgccacgcgcggtgcatgcaacccgtccaacggttacaagcgtccctccactttcgcccagaccagcaggtgaaagggcgggtagccctgcaggcggcatgcaaccgtgccaagtgggcgcacttctccgacttccaacacgcccagcatggaggcccaggcccacgcgtcatgcaaccggcgcgccggatgctacgtgcgagcaactgcaccgccactcgtgccactgccacgcctcctcaactgcggaaccagtaccgcgactcgaggcaaccctacgcacaacccagcagcgccagcctagagcgacggagaagcaagcgacacttcgccttcgccataatgaccgcgtcaaaaaagggaccgggaaagggggataccccgaaaaggatccttctccgtgaaggaaacaggctccgagcctccctactgatcagaggttcgaaggctgccccctcggaagggtttaacagccgcctcagagcgcgtgggctccacacccactactggtcagaggttcgaaggccggcccctcggaagggttcaacggccgcctcaggccactcgggctccgcgcccactactgatcaggggttcgaaggctggccctcgaagggttcacatccgcctcagacatag

SEQ ID NO: 10605 - DNA, 897 bp, Zea mays
  Peptide Sequence Number=SeqID_53980
atggcgcctcccgttgacgtggtcggtccgcgccctaggttgggcgatgtggaggctcctccgaggccgaggtcgagtctgtcttccgtggccgaggtcgagtccgagcccctgggtcgggcgaggcggagaccgtcggttgaggccagggctgagtccgagccctggggtcgggtgaagcggagtttgtcgtcttccggggctgagcccgagtccgagccctggggtcgggcggatcggaattcatcgtcttcaggggctgagcccgagtccgagccctgggtcgggcggagcggagttcgccgtcttccggggctgagcccaagtccgagccctgggtcgggcaaagcggagttcgccgtcttccggggcggagcccgagtccgagccctgggttgggcggagcggagttcgccgtcttccggggccgagcccgagtccgagccctgggtcgggcggagcggagttcgccgtcttccggggctgtgcccgagtccgagccctgggtcgggcggagcggagtttcctatggtgcctgaggccgggcctgactgcctgtcagcctcactctgtcgagtggcgcagcagtcggagcggcgcaggcggcgctgtccttctgtcagggcggccaccttcgcattaaatgcccctgcgatttggtcggttggcgtggcgacttggccggggttgcttcttggcgaagactgggcctcgggcgagccggaactttgtgctgatgggggttaccagctgagaattaggagccttgaggacgtccgtgccccatttgctaggggtcgactagaggcccagaggcacgcccaaaagtacctgcgggtgatctgccggacccggtcccctatcgacggggtccgagggctcgatgcctccctctga

SEQ ID NO: 10606 - DNA, 963 bp, Zea mays
  Peptide Sequence Number=SeqID_53981
atgcagcggcgaccagagttcagcttcccgggctcgccggcgcgggggctgccgccgcggccgccggcgaacccgatggcgccgcggtacggggacgaggaggtccggtggctgcaggcgtcgccgcaggcctcgccggagatggactacagctccggcggctcgggcacgccgtcgccgcagctgtgggcgcaccaccaccagctccaccggcagtacccggcgtcggcgggcagctcgccgtcgcgggcgcaggccatcgcggggtaccgccgcgagatgctcgacctcgtccgcggcctcccggagtccgcctacgagctctcgctccgcgacatcgtcgagcacccgtcgcccccgtcccctccccacgcccctaccaaccctctgccgccgcctaccaccgccggaccacgcgcgagtcgcgccgtccccgtcccggcgcaggagaagggcgagtccgccggcgccaggaaggacgccgtcgcggcggcggacgccgaggacggcggcggtagcaggaagcagggaggctccaagggcaagaagcaggggaggaagcagaggacgatgcggaagcagcggagccggagcctggaccgcagcgtcagcctggacaccggcctgctcatcaagctcttcctcccgctctccctcggcggcaagaagaaggtctcgcccaagcccgacgccgccaaggacagcaagaagaagaagaggaaggagaagaaggaggcggcggtgcaggaggaggagtggtggaccaagagcgagttcagcgaggccgggaacagcagccggaccagcagcagcaacagcaacagcagcgccgccagcctcaggaatgccaatggcgccgccaatccgagagcgccggacaggagctggagcaggaagcggaccgggtgctacgctttcttcagggcgaacaagggcaagaagaacgaagccaaccaggactag

SEQ ID NO: 10607 - DNA, 84 bp, Zea mays
  Peptide Sequence Number=SeqID_53982
atggcttcgtttagctcagccttcgaagtaccttcgagctacttctcgtgtaaagccgaagattgtcaacgcgacaactgctag

SEQ ID NO: 10608 - DNA, 207 bp, Zea mays
  Peptide Sequence Number=SeqID_53983
atgggagaggggaggtgggcgagcagggcgcgtggctcaaaaggggcgtgggggctcggacgtggccggggaacacgtggtcgtgggcgcgtccacggcggggagatcgtgggcgaaagggttttcaattcaaattcaattcaagtttcaaattcaaaccaaatcaaatatgtgcaacaattcaaagaatatttaggctcaatatga

SEQ ID NO: 10609 - DNA, 525 bp, Zea mays
  Peptide Sequence Number=SeqID_53984
atggcgggcggaattgagctcgccggagctaaggagagggggctggccggtgaaggggggcatgcacaaagggactgggccctgacatgtgggcctagggacataaagaatatagagcttggatcctctaatacccagcaggcgcgccgcctactggatgaccttgacgccgcctgccagtggatgggaccggacgcattaaatgctgagaggcgggaagcggaggccaaggcccgcacacgcgtcagcgccgaacccctgcacacgctagggtccttctcgttccgggaccctgctggagttcggactcacccggaggctccagacttgtacgtatataggggtccggtgtccttctgtgggggtctggccttactggggtgtggtgtccttccctgccacgtggcgccctttggcctgcccatccggtggggtcaggtgcggtcctccgtgtggctaaggggcgtcgcttgggcgcggtgtcttcatgctgtaggagagggtacccctaattttgggtactga

SEQ ID NO: 10610 - DNA, 966 bp, Zea mays
  Peptide Sequence Number=SeqID_53985
atggacaaaacaccagcattcaagatgccattacaaacggaactccggttccgtccccgcgggaatgaacaacctccacaccagggagcctgcggggcgacaagttccgggcgactcgccagcgacctctgcagcagcagctatggcggcactaacggcctcaacggtggggaagcttcccccggctgccaccacgtcagcaccgacgacggcgtccgcctctccaccaacgccgcaccggcgaacgcgggccgctccgaagcgcaccggcaggtcctcgctcctgtcctcgccatgaaaacgaggaagagggtggaatgttgcatcctagctgggcagcaacagttcgccttcctcggcatggctggaggatgcctcctccgcagagctgggggatggtttccgccaccagaagctggaagaggaggtggccagctgacccgtgcgggaggtagagccccggctcgcctcgctctccgccccagcaaggacaaccagcgggtgaaagggcggacagccgtgcgggcagcatgcaaccgcgccaagtgggcgcgcccctccgacttccaacgcacccagcatggaggcccaggcccacgcgtcatgcaaccggcgcgccggttgctgcgtgcgagcaactgcatcgccactcgcaccactaccacgcctcctcgactgcggaaccagtgccgcgactcgaggcaaccctgcgtacgacccagcagtgccagcctggcgcgacggagaagcaagcgacgcttcgccttcgctataatgaccgcgtcaaaaaaggccccgagcctccctactgatcagaggttcgaaggatggcccctcggaggggttcaacagccgcctcagagcgcttgggttctgcgcccactactagtcagaggttcgaaggccggcccctcggaagggttcaacggccgcctcaggccactcgggctccgcgcccactactga

SEQ ID NO: 10611 - DNA, 825 bp, Zea mays
  Peptide Sequence Number=SeqID_53986
atgaggaagcctaggattgcactcagccatctcgtgctcacattcctgatcgacgtgttagttccgacaatgggtgttcctttgcatgcggagtacgcgctcgtccagggactcgtctaccttggacgcctcatccttcgaaataggttgggttgggtcctgctccccggtggcatggctcgtcgtcaaaatgggatcgtcgtctaccccctcccacccattgatgacgaggatgttagggtaatagggggaggctcttcctccaccgacttgatgaccgcacccacaatgctgagtgactgtggcgtgggtcggctgtgtcttggggctcttgaagatgacagggccctcgaccctttttctgctctaactgatctgagtcctgttggcgtttcgagaccgggggtccctaagccgacgagtgagtgtgctgcgtgccccagcccagatgggtcgagcgcgtgggcgagcgcgaaggggggagaggcgaggtggccggagacgggcgtgagagaggtggaagtcccgcggccttcgtgttcgtcccgcgcccaggtccggtgcgcttgcagtaggggggttacaagcgtccacgtgggtgagggaagcgagcggccccaagagagcgcctgtcccgtcctcggtcccgcgcggccaaccttctctaagaaggccctggtccttccttttatagtcgtaaggagaggatccaggtgtacaatgaggggtgtagcagagtgctacgtgtctagcggagagagagctagcgccctaagtacatgccaatgtggcagccggagagatcttggcaccctgctggcgtga

SEQ ID NO: 10612 - DNA, 222 bp, Zea mays
  Peptide Sequence Number=SeqID_53987
atggtctcccattccggttatggtgggtacaagtgcggtcactgcacgacggcagtcggggtcagtgaggcattgtacgccaaggcgaggtacaggagtagactcctcacaccgggttctctggaggacatggttgctggagtgacttggccatccatcttgccaccgggttggacagtcgagtgggaccctacctcggctgaggaggagcatgaggagtga

SEQ ID NO: 10613 - DNA, 279 bp, Zea mays
  Peptide Sequence Number=SeqID_53988
atgaagctccccgagcaaggaattgaactttgcctcgccggagaagccagtccacggtcgccgaacttcacccgaccgtcggtgaacgtagaccgagctccacgcatgcatatatcttattcattgcattcgatagattgcaacctcgcggacggagagtacatcctcgtgccagagcaaggagttgctcaggaggtagccccggatccagcaccagagcctgccccagaggatctgcctgccctagctttggaaggcaagccccggttttatgcataa

SEQ ID NO: 10614 - DNA, 558 bp, Zea mays
  Peptide Sequence Number=SeqID_53989
atgcggctctcggtcggggtcgcgcgagagttcttggcgctgcaggaccgcctcgggttcgacaaggccagcaagaccctgaactggctcctcgcccagtccaagtcgcccatcgactgcctcgtcgacgccgccgaccaggtggctgtagtcactggaggacgaccgacgctgatgaaggggagagagaaggggagcaactcaagcacttgctgtttgacagactcgagggctggagtgctacttccagtattgcttgcagctcgaggagttgatgagatgcaacggcggaatgccaagattctaggagttgggaagaccacttctcaacaagaaataaagaaggcgtatcacaaattggctctgcgcctccacccagataagaatcctggggatgaggtcacggaggctgacattgaagaatttgaagctaaatatagagggtcagattatgagaaaacggacttgaaggacctctacacaaaatataagtgcaacatgaacaggaataattatctcttatatcatattgtaaaatctgaaacagttctcctgtag

SEQ ID NO: 10615 - DNA, 219 bp, Zea mays
  Peptide Sequence Number=SeqID_53990
atggtctcccattccggttatggtgggtacaagtgcggtcactgcacgacggcggtcggggtcagtgaggcattgtacgccaaggcgccttgcttgtggcataattttacaggttctctggaggacatggttgctggagtgacttggccgtccatcttgccaccgggttggactgtcgagtgggaccctacctcggctgaggaggagcatgaggagtga

SEQ ID NO: 10616 - DNA, 837 bp, Zea mays
  Peptide Sequence Number=SeqID_53991
atgtcgtatgcggagaaggaggtagcaatagaaagacggatggactcaccgcctcgatgcgattgtggagaccgtgctgtcatcgacgaagtccatgagaagcagttctgttgtccgaacattgattatccatacgggtggcgtaagtgtcgtttcagagagtggttgtatggtcctttgtcccattggccagagccagaggagacgaggaaatgcagttgggagagttacgacgacaaaggagagagtataaggaggttgaaggcggcagatgagaagagagcacatgatgcaagggaatgggaagcggctcaagccgagaaacagatgttggataatcttgctgatcgcctcaagggaaagattggatgtggcgtaaactatttggccgatgaagcgcatgcaagatatgttcaggataaaatggcgacagttgagttgatggaggaggaggaggacgacacttctagattgagtgagcttatcgctctcgcagaggcaggattacatgaagaagaggaggacgacacatcaacgttgagtgagctcatcgcactagctgaggcaggattacgtgctcaagaggaagaggatgagtttatgtctcaggccgccgaagaggtagaggcgtcttattacaagaagaagtctgatgaggctgaggctgaggatgagctattctcccaagctgcagatgaagcagaagccaattattacaagagaactgttgacaagtgtgatgcaggacaatgcagcaagtggaatgaggttgtcgttgaggattgcgcaacggatgactccgaagatgagttacttatatattgtgattcagattga

SEQ ID NO: 10617 - DNA, 462 bp, Zea mays
  Peptide Sequence Number=SeqID_53992
atgggcaagaacaacaagcgcaagcgtgagccaactcctccatcggaagagtttggtgactcggagtactcagaggaggagttctcctctggctctgaggggtctccggctcccgtccccctgcgtgagtcgtctgacgactcaaacgactcccaggggctcgcggcggaggtttggtcgtacatccgggccgtcgagcgctccgggctcgagggctcggatgggtcagagtactcctcggatgaggaggactcggacgacggcggcgaggacgaggacgacgacgacgatgacgacggcgacgacgacgacgatggcggcggtgacggcagcggcagcggcaggggcagcggcggcggcagcaaggacggtgacggcggcggtagcaggggcagcaaccggggcggcagcagcaggggcagcactaggggcggcggcggcagcaacagggccagtggctag

SEQ ID NO: 10618 - DNA, 1200 bp, Zea mays
  Peptide Sequence Number=SeqID_53993
atggagcatggtgttatcccagcgcctaaaaggaatgcaaacacttctctggattatgtcttccagagccaagtcaagggaaagattcccatggttaagcctaagtttctgatacccaaccaactagagcatggaaacataaaatttcatcagagacgtgtgacatgcttggagtttcatccaactaagaacagtgttcttttatcaggagacaagaaaggacttctgggtatctgggattatgttaagttgcatgagaaaatcacttatgattctgtgcactcctgcattctgaatagcatgaagattgataccaccaacgatggtatgatatatacagcttcctctgatggtactatcagttgcactgatttggatactggtattggctctcccttgttaaatctcaacccaaatggttggaatggtccaagctcttggcacatgatatacgggatggacttaaacactgacaaaggtcttcttttggtggcagataactttggttttctttacttcctggatagacgatcaaagacgagaattggacatccaattcttatccataaaaagggtagcaaggcccgtatttgggatacaaggaagcttgaagccaactctccccttgccagccttgctcatggacgggttgttaattcaggatacttttctccacgaagcggaaataagatcttgacaacttgtcaggacaaccgaattcgtgtatgggactatattcttggtgatctgcaatccccaagtagagaaattgtgcacagtcatgatttcaatcgtcacctgactcccttcaaagctgagtgggatccaaaggattacaccgaaacagttgcagtgattggccgttacataagtgagaactacaatggtgttgctctgcatccaattgattttatagatactagttctgggaagcttctggctgaggtgatggaccctgacataataacaatcagcccagtgaacaagctacatccgcaagatgacatcctagctacaggaagctcaaggtctattttcatatggaagccaaaaattgaagatgaacttactgaagaaagagccaagcatgacaatagtagtgatgacgactcaggtggtgattctggcggaaagaacaagaaagcaaagaagactcgcttcactcatgcagtaaagggaaagggcaaatccaaagtctga

SEQ ID NO: 10619 - DNA, 352 bp, Zea mays
  Peptide Sequence Number=SeqID_53994
gtgtcaaaggttcatctacaactatactaaatcgactgtccggaataccgtagattattccggacaggagaagctttttggaaaaacaggccaagcgcggaccgtccgggcccttgtggcggaccgtccgcaacacaaggatgaccctcggacagaaccaatgcaaaaatccgtgtctgcactatggaccgtccggaggataagcgcggaccgtctgggacctcgctcggaccgtccgacctcaggcgcggaccgtccggcaagaagacaccatcttgtggtgggtccttgtaggaactttgtgttccagtatgagaaagaaagctcactcgtcaaggaacgttggaagagg

SEQ ID NO: 10620 - DNA, 83 bp, Zea mays
  Peptide Sequence Number=SeqID_53995
ccggcgccccaacggagggctcgtcgggcatcgatcttgtcggtgttttgggttcgaccgcacacccgggattgcccctcaag

SEQ ID NO: 10621 - DNA, 354 bp, Zea mays
  Peptide Sequence Number=SeqID_53996
atgaagcgcaacccccgcgtcacgagctcccgccggaagtgccgcaaggcgcacttcacggcccccgtcctccgtccgccgcgtgctcatgtccgcggcgctatcgacgggagctccgccacaagtacaatgtgcgttccatcccgatccgcaaggacgacgaggtgcaggtcgtgcgcggcacctacaagggccgtgagggcaaagtggtgcaggtgtaccgccgtcgctgggtcatccacgttgagcggatcacccgcgagaaggtcatgggttacaaagctgaagcttgacaaggaccgcaaggcgctcctcgaccgcaaaggcccggggccgcgccgccgacaaggctaa

SEQ ID NO: 10622 - DNA, 1122 bp, Zea mays
  Peptide Sequence Number=SeqID_53997
atggtcagagagttaagcccccttttcctggtcttgataacccttaggctcacctttccccaccagtctgcaaaaatctcctcatcagctgccggagtgaggtgccccaagccaatagcagcaaggattgtgtgccaaaattgccgggcaaaaatgcacgcagttggaagagagagaggatcagatgatgatgagctcaatgaagctgtggtggccaggtctgaaccgaaaaacctagttcaaccaaatgcatcggtacccttgacctcacaaggctttaaccaattattggatcaacccgggccttctgatccttctgttgtatacaaggacagtatctgcaaccgatgtgggaaagtagcaggagctggtagcgttctcaaatgttacaggtgcatgctaccttgccacatttcatgcattgaggctactggttcacccatttcaactggaaggtggtgttgtaaaaactgcagcgctggcactaaggaaccagttgaaggagacatggtcttagcccatggcaatccaaattgcttgcatgaaagttgtgtcgtctgcgacagacttgcggcctgcaggtctccaaaatgtgataactcaagagcattggttatttccagcgtggacccagagattgatacatgttactcatgcaagatatgtggaggcaccgaagaggatgagaagaggttcttgatatgcggcaacgtcctctgccgatacatgtactaccacattgggtgcctcaagtccatgcagatctctaccagtgtagagaggggcagcccgtgctggtactgcccgtcttgcctttgccgagtttgtctgtgtgacaaagacgacgacctgaccattctgtgcgatggttgcgacgaggcttaccatatctactgcataacacctcgccatacttcaatacccaaggggcagtggtattgctcatcgtgcagcgtggagagggcagaagaggggatgagacagtacgagaggaggacgctgaagctccaccggaaggaggatgctggactacaaagttggaattttgatggtgtggacctgctgctatctgccgcggagcagctcaggatagatgagcagctggagactcgtacagattag

SEQ ID NO: 10623 - DNA, 892 bp, Zea mays
  Peptide Sequence Number=SeqID_53998
atgcgccaagggccataccccatacccgacaaattcctcaacaagatcgcgcccgctactcatgcgggcagcgcaccgaagggctccttcatcttcatcatccttcgctacctcaaactgcggacaataatgttttgcgaagacttccatagagggctaaccgccatacgaagttgtcgcctagacatacttcgacagggccaccacggcattcggcgtcagctggtggacctggacctcgaatctctgcaggacctccgccacgaatcaatgcgcaggcagacgaaggccagcggcgaaaaaagcctcaaaaacgaccaactcgccttctggctcggggacctcctccgcccccgggacatgccccactccgctgccaaaatatccaagctgttgcatatcttgcacgcggaccgaggacatccgcgacacgccaaactccactgtatcaccaagatgcaactcctccgccgccacgttgcgccggccggcggtgtatcggcagcagaagaggaagaggacggcatggctacgtaccgtcggcggcggctggcgaaagagtacctgacccgcgctgccccgcccccttttatacacaggacgcgacgcttcgggaaacccgcagtccaacagtgccgcgtccgtcaacggtcacatcaaaaacccccgcggaaccacttcgagcgagggcagcgtctccaccatctagcgacgtcttcggcaccagatgacttagtcgaactggtccctcggagggcaaatgttggggcgaaggcgaagacgctacccttcgctcgatgccttcgtcgatcttgccgcaccaacggaggcaaagcgaccggcggtttccacccttcgtccaacacgctgcaagacgaaggcctacgacgag

SEQ ID NO: 10624 - DNA, 2238 bp, Zea mays
  Peptide Sequence Number=SeqID_53999
atgccctcccggggcaggcagctggtgcgaagttctgccttcgcgctggatttgcgtggccgagatcccgccgcattcgtgcgtgaagcagaagacggtgcgacgaggatcgtggggcactacatgccgaggacagagggtctgcggagctgggatatccgtgggtccaatgataggttgaatcgggtcttcgaattgaaccgcttgtcgtacggtggttatcccggggaagacgccgtcgactgccgcgggaagaaaccgatgggcggtaccgaggaaggatcctcgcaggaggctgccttggccgctaagaagagaaacttaggtactatagtggggggaatggtggtgtctgataaatttgctgtggagttgatggggacatgtgcggcccccgggggaaggatgtcttcgcccgagctccgggagtcttcgacgcgaatgctggaggttaccgggggtcgatggccaaagaatctttcgatcccctgggcggagggcgaagacatgtatacgtctcgtatagctcgtggcttgaggattttcccttacagacagaatattgttgttgttgtgtcggcagtgatgtacaaggatcgtcaggacgctgcgcagaagcgccgggcggttatcaggctcgccgatcctaggcgtgaggcgaagagaacacggggtagcgcgaaggctgctgccccggcagtagccagccggcgccggctgcgaaactggctacgcccggatccagcaaggcgccggagaggtgtcgctttctgcgcgagcggtgagattccgtcggccgctgtcgtcaaggacgtggtgggctccatgtcccggcggctgagggaggcgtcgcagcagctaagtcaagcggccgacttcaccgaccgcgtggcgtcgggtgccctgactgcagatgtggctgctgaagtcgagagacttcgggcgcagcacgtggatgccgtccgggagaagtcagctgtggagagcaaaaactgcaggctggcggaaaaggtggccgccttggaggccgagaagacggacctccggcgccagctggtggaggacaggagggaggcgaaccaggccatctctgaggcggaggccaaagtggcgcgggtggagggaagcctcgccagccaacgcgccgaggagtgggaggcaaggttcaacaccctgcgcggccacatggacaaggccgaggcctctacacgctcagaggtggagcggacgctcgcacagctcgtggactcgtaccgcgagctgggtgcgcgtaccgctgacttcgaagtacccgaccgggaagcggaccttcgcttcctcgagtggttgcaggaggagttgctggtgctcctgaccatcgtggagggtttcatgtccttcgcctccctcgtcacctgcgagggggccctgaatgcgttgtcccgcgaggggctgcaggcactacgagcgggggcactttttgataggatgtggggggctcatggtcgggaggctgtcagggagcgatccgaccgggcgagagagcagatggagggtgccgaggatgtcgaggaccttggaggtctgaccggcgcgccgtccgaggctgcggaggtcaacccggtgctggcctcggacgccggagaaggcccctcggcccctgcgccacagcaagcacgggccggcgaagaccccgtgtcggcccctgcgccggcggtcgaagatgccccgaaggtggtggctgagccggcagtcgaagaccccacggtcgcggcagtgccttcgcagggttttgggcctgcgcacgcaaccgctactaacaatgctaattttgtggcggcttcgaccgtggttactaaaaatgattccgatgattccgtgtctaagttttttgagtctgatgattctaggagttcagttgtgtggtcggaagagtctttggatgaggacttggattattttgcggccttggatgtggctgcggcggagccttctccgcgtgtgatgggtgctgaagttcttcctagtccgagtgctgggcgtaggcggcgaagggcggtggcgaagaggagagtgagtgaggcggagggtggtcgtcttcgtgtggacggggctagcaaacgggaattcttgtcctcgccggttggggcgagtgtaggtgagggggagttgcgaaatctttttgagggtgaggagctgaggataatgttgttcaactacagggagatgggtatcatcccgaagattgagccaatgtaa

SEQ ID NO: 10625 - DNA, 153 bp, Zea mays
  Peptide Sequence Number=SeqID_54000
atggcgcaccggacagtccggtgcgccaccgttgctccaacggggagcttcttcctcggaccagcctggccccacctggcagagggtgcaccggacagtccggtgcacactggacagtccggtgcccccagggacagaaaccctacttcttga

SEQ ID NO: 10626 - DNA, 585 bp, Zea mays
  Peptide Sequence Number=SeqID_54001
atggagcaagagcagcaggactcttccccctcgcctcagcgagaggtggagtctgggaggcagccctctcctgcaccaccacaaggcaccccagctgctggaggagaccctgacgaagacgacgacgacagtggcagttcgagccatagcacagagctctcggaggatctaccagcaccgtcgcgggttatacctggaccagtgggagctactttcctggtgtgccatacggatgatgatctccagggtgtagaggcctgctcagagcattattctatcactaagtgggacactaccgaggactgttcgttgttcagcggggtagctgatggcctcgacctgaagtactacccccaacatttgaccggtagtaccagaggtgtgattgtctcaccagttagtgagggcaatcctagattgagtagcagggtcaacctggtcgttgtgctcaacactgagctggaccacgcccttgacaagttgggcaaggctcgggcaaagattacggaactacgtgctgagcgcgcggagcaccgccatcaggaggatggctgtggcggaaccacccgaattattccaacttaa

SEQ ID NO: 10627 - DNA, 177 bp, Zea mays
  Peptide Sequence Number=SeqID_54002
atgaaggacgcgatctgggagaaggatgaatcaatttcgaagctacgaatgaagaagcttcggcttagagcaagggcggtgatggagaatggaaccgacctaaaggcatttgagaacaagtccccaacaactaccttacccgataggggcaagggaagtaggggagtaggcgtgtag

SEQ ID NO: 10628 - DNA, 621 bp, Zea mays
  Peptide Sequence Number=SeqID_54003
atgcaaggtcttcaagaaatgcaagtcttcaaagatactgagttagatccatatagtgtcatgatagatgatgctatgtatgatgaaggtaacccaatcacggactggttgtgcaacttaaggagtgagtctccacccattcttgatgagtatgatgacaatgagcttgattccccaatcccatctagagtgctcatggatgagttaggaatggatggagaagtgactgcattgaagaggaagcttgattttaatacaagagatggtaagaagaaaagaaaggcaggacttgtggacattgaggaagaaatgaggacgatgttgagtcagattcttcagaaggtagcccaatacatgttgaattatgtgatagcagttcagatggtggcacagtgtaatctttatggtctcaaagtaggtgatgagtttggtgacgaatgggaatttggaggaccaagtggtggtggagcatgtgatgttggagctagtgatgatggatcaagggatggtgctatgcatgagcaagcagctccaaatcctccatttcgtccaagatcaacgaggctaaagaaagtccttgtgaaggaactttataaggagagctgcgcatcattaaattaa

SEQ ID NO: 10629 - DNA, 1977 bp, Zea mays
  Peptide Sequence Number=SeqID_54004
atgaacaagacaccggcactcaaggtgccattacaaacggaactccggttccgcctgcgcgggacggacgctgcagctagaaggctctcgttcgcgtccccactcaagggacgtgaaccagacattaaagccaaagagccagaggtcggtccgtgggtagcgctgacgggcttgtcggcggagaagctttctccagctgccacctcgtcagcaccgacggcggcgtccaccaacaccgcaccagcgagcgccggtcgccccaaagcgcaccggcaggtcctcactcccgtcctcgccacgaaagcgaggacagaggacagaatgttgcatcctagctgggcagcaacagttcgccttccccggcatggctggaggacgcctcctccgcagagctggaggatggtttccacccccagaagctggaagaagaggtgggccgccgacccgcgcatgagcccggcttgcttctccccaccatcgaactggtggtcaccgtcttgggtgaccaccggcaaggggatgcagccgggctgcctgatgaaaatccttgaagccgaacgatggctgaaaggtaccaacttccgcgaagttgcgttcctccaacgacaacaagacgaaagcgacgcgagcgctccccatccgggggctcagaatgtggaagggcgcgatgcacgaagggagtgcgaagacatggttgccttccaagggggtcaccctccttttaaaggcaactctccccacttgcgtcctcagtcggcgcggactgagtcttctccaacacactccaaggtcctccccctacgacacgggggctgggttccacgcgtcatgcaagctggcccaggacagaaggagccaaaaccgccgcgcgcggtgcacgcaactgcccagcggttacaagcattcctccactatcgcccggaccagtgggtgaaagggcggaccgccatgcaggcagcatgcaaccgcaccaatggggcacaccctttcgacttcgacgcgtccagcatgaaggcccaggcccacacgtcatgtaaccggcgcgccggttactatgtgcgagaaactgcaccgccactcgcgccagtaccgtgccttctcgactgcggaaccggtgccgtgactcgaggcgaccctgcgcatgacccgacagtgccaaccaagcacatcggtcacgggtcagtcagccgcgggagaaggcgcgacggtcgatacggccagaaatgggccagcagtaatggcggtggcaggcaggcggaagcagccgtcaagtcgtcagcaagctcacgccccctcctgggacagcgagagaaccctctcccatggcgtgaagacggcgcgcccgtgttccgttcctcgaacggctcgcgcacgcacaacggctgccccgcgaaccactcgacccatcgcattaactctgcggcaggacaggcggcacggaccgggaaaggggatactccgaaagggatccttctccgcgaaggaagcgggccccgagcccccctactgatcagaggttcgaaggctggcccctcagaagggttcaacagccgcctcagagcactcgggctccgcgcccactactggtcagaggttcgaaggctggcccctcggaagggttcaacggccgcctcaggccactcgggctccgcgcccactactgatcaggggttcgtaggctggcccccgaagggttgtgacagccgcctcagagcacgcagagtgagggatgaccctgggtacgttcgatacataactaaggctcgggctacgctcccgaggagacaccatgttcggcgccctccgagggcaacatggcgctttccccccctcctccttgcggaaaggcgacgcaggggcggccgaagtgaccgtagtcacttcgccgctccgctgaccgacctgacaagaaaacagcgccgcccgcccggctccgactgtcgtgccactcgccagagtgaggtcgacagcggctaa

SEQ ID NO: 10630 - DNA, 324 bp, Zea mays
  Peptide Sequence Number=SeqID_54005
atgacgcacttcttcagtggcttcgtcgatctatctctgaagatcagccagtcgtgccatcttctccttctttctttgtacttgctgatggattatctccatgtccctaatctcttggtccaactcctcctcctggagtgttggattggtggcctttcttttctggctccgagcttctcggagaaaagagtttcctggtttgggtccagtggctgcaacgcagcagcccctctcgctgaagctttcttcggcagcatgacgaagaaagatagaaacaatattgtcggcgtttcgaccccggggggtccctggaccgacgagtaa

SEQ ID NO: 10631 - DNA, 436 bp, Zea mays
  Peptide Sequence Number=SeqID_54006
acctcacgccttgtctttggatcctaccggtcctgcgcctgaggctcctgtgccagcttctgttcctgtttttgactctcaggccgaggatgcagctcttcgtcagttcgacactcagggtacagcagctgatgatgatgatgattttggggttcctcctccgcctccgcctcctatgcctccacgctcacatgatcatgaggctgggagttctagtgctgcccctgctgccccttcggctatggaccctgctcttgcttcgattctccagtctatcactcagcaacaggctcatctggcagccgagcaggcccggttatccgagaggatgctctcgatgtttcagaacatgcaggacaggcaggatgcgcttcaacagcagctacaccaggatcgggctgagagtagggcattcatggctcttatgctacagtag

SEQ ID NO: 10632 - DNA, 516 bp, Zea mays
  Peptide Sequence Number=SeqID_54007
atggaagacagactcgaccccggcttcggaggagcctccacgtcgcccgacctaaggcacaggcccgccacgtcaacaggaagcgccatcatcaccctacctcgagccgactcgggccgcagagaacaagaccggctccgttgctcctccgacagccacgacaccacaccagctgggtgccaagatctctccggctaccacattggcatggccttcttagagaaggttggccgcgcggggacgaggacgggacaggcgctctcttggggccgctcgcttccctcacccgcgtggacgcttgtaaccccctactgcaagcgcacccgacctgggcgcgggacgaacacgaaggccgcgggatttccacctctctcacgcccgtctccggccacctcgcttccccccttcgcgctcgcccacgcgctcgacccatctgggctggggcacacggcacactcactcgtcggcttagggaccccccggtctcgagacgccgacagttggcgcaccaggtag

SEQ ID NO: 10633 - DNA, 1305 bp, Zea mays
  Peptide Sequence Number=SeqID_54008
atggcgtgcataatttgcagagagttcggggttaaaacgcaaaggttccacagactcagaacctacccgcggtggactgcgggttggtttaagaaaatcacgagggttcttatgcaaaacgccaacggcgaagaggagatcacggacgtgaccaagcgcggcttccggttcggacttgaggaagaggatagggctgatagtgggtcccacagaccagtgaccgtgtttgatacgcgcgtgaaagtgataggctggccagtggggcccatacgccagcgccgcggggagggatttgggctgtgcgggaggtggtaccctttacccacaagtcatgttacccgtctgccaagggatcgcgacttcccatacacctctaccgaggaggcgaggcaggggttcttgcctgaccgccatcgcagcaaaatcaaccaaggacctccctacactgaccactcccctactgcccttgcccctttcggaacctacccgcggtggactgcgggttggtttaagaaaatcacgagggttcttatgcaaaacgccaacggcgaagaggagatcacagacgtgaccaagcgcggcttccggttcggacttgaggaagaggatagggctgacagtgggtcccacagaccagtgaccgtgtttgatacgcgcgtgaaagtgataggctggccagtggggcccatacgccagcgccgcggggagggatttgggctgtgcgggaaggaggaaaggaagagggacgaggaggaagaactcaagcagacgagcagccggaaggccgaaccatggctgactgtgaagacgaggcagtactctgactcggggatgttgaggttggcggtgaccttcgagagcgtgaaacgaagccgacaactcgacaaagttgtagctttggaggtaggagaaaaggccaaaggcacaatagtcgaggcataccttgtcaggactcaggagcgggtactcgtcgacgtgaagacgacccatgttcaaggcagacacataggtgggggtacatggaagtcccgatgctgcacgtggagccacgccagcgaccagaaccaccccacaagcgcctcctccgcaccgtcccttccatcgaagagggccgcatcgtcgctggacttggcaagggtccgtcctctaacacctccagtgcctcccgtagcttgctctcctgctgccgacgtccgccgccagacccctcttgaggacgacagtgggacaacatgtgcagtcgacgtcgcgacgggtggtcatgataacgatgctgccttaatcggagctcaacgcgcgagatga

SEQ ID NO: 10634 - DNA, 2172 bp, Zea mays
  Peptide Sequence Number=SeqID_54009
atggggacccgggcccatgagtcatactcttcgggcgtcggcctccatgtgcggagaaggcgaactgccgcgggcccgggcccacgagtcatcctccttgggcgccagttcctaggtgcagagaagtcgaactgccgctcgcgccagtaccgcgcctcctcggggccaccgcggaggatagagaaggtgaattttcaaaaccaatgcagcggtatcgaggctcgccgcgcatggcccagcaaaaccatcaagtgcgaagaccacgggtcagtcagccacggggaaaggcgtgacagttggcgtaaccgagggtggactggcagtaattacgacagcaagcgcacagaagcagcgtgccaatcgccaattaaacttggccccacctatagactcgtttcctcctttgaggcgggcccgggggccactgttggtaccctgaatcaggggtaccccttactacagtatgaaggcacggtgtccatgcagctatctttagtcgcacggcaaacagcgcccaaccccaccacgtgggctgctctgggaccgccacgtggccagaggagacaatctactctaagagcgtgccccgcgccccgccataaagaaacatcgagcaacgcgaagaaagctgccgctgcctgcctcctgctagcagttgcagcccccgccgccgcggaggcggaggagctgcggccctccagtcggttccgtgccgcgccggtgccgatgcggatcccgcggcggaagggcggggccgggccgctcgctgtcggggtgcccagcaggcgggcacaggtggccgcggtcttcgcgctcgccacgctgctgggggtctccgtgctctacgacgccgcccacatcgccgcctcgctgcggaggcacggcggcccgacggcgtacgccaagctctcctcctccgacggcgccgcctccgtctccggcgtcgcgaggacgctcgcgcatgtttcgagggcagtgtggtctgacggcgcggatcggaccgacccgcccccgcacgagcatcttgaggaggccgaggagggcgcggcgaagcccggtgcctccctgcagcaggacgcgccgctgaccgatgaggtggtggaagggggaagcgggggccacggccggcggcggctcgcaggagcaggagcaggatcaggcccaggggacctgcgacctgtcacctgcacgcgcaacggccgccgcgacgacgactaccagaagtggcgctggcagcccgacggctgcgacctccccagatttgaggctaagttgcttctggagaagctaaggaacaaaaggctgatgtttgtgggtgattctctgaatcggaaccagtgggagtccatggtgtgcctggtccagtcagaggcaccatgggacaaaaaatctctcgtcaagaatggttctcttaatgtcttccatcttcaggagtacaatgcaacagttgagttctactgggctccgttcctagtggagtcaaactcagacgacccagacattcacagcatcagcgaccgcatgatcaagccgacatcgatcgcgaagcatgcggcaaactgggaaggcgtggactacctgatcttcaacacttacatttggtggatgaacacaccgcagatgaaaaccgtgcacggtggatctttctcaaggaaacacgtaaagtacgatgaaatagagcgtgtggaggcataccggaaggtcctcaagacgtggtccagatgggtagaggcgcacattgatcccaagagaagcacggtcctattcatgagcgtgtcaccggtacatatgcagagtgaaggctggggcagccccaacgccgtaaaatgcttctccgagacgcagccggcgatcaactacacgaagaaactggaggtgggcacggactgggacctcttcgcggccgcccagcgcgtgacgaggtcgatggagaaggtgccggtgcgcttcgtcgacgtgaccgcgctgtcggagatccgcaaggacgcgcacacctccgtgcacacgctgcggcaggggaagctcctgacgcccgagcagaaggcgaacccgaggaagttcgcggattgcatccactggtgcctccccggcgtgccggacacgtggaaccagttcgtttatggtcacatcgtgtcgagcccgccgccgccgcaggatcaacctcacagataa

SEQ ID NO: 10635 - DNA, 1686 bp, Zea mays
  Peptide Sequence Number=SeqID_54010
atgtccattctgctgacgggcggcggccaggccatcttgcaggcggcgtgcccgttcgctccagtggcaggcagtacgcccatgctgcggcatacactatgctcatcatcactcggcggcatgatggtgcaaatcgttgagcaccgtgctgagacttcggtggatttcctggtggaggaagaagctgcttcttccacgccacagcttcccaaccgcccagtgccgggcgctgctgctggagttgatacgccacccccaagctccatggcctcaccaggggccatgaagcagtggcgtgacgatgtcgaccgactactcgacatgaccaacgacctccgggcaaagctcaacagcaggcgtgcgggagaggatgcccgggtctccctggagagggcacgggagcgccgacgaaacatcgagggtcgcaacctcgatcaggattttgctgcggtagcaccgcaaaccccagcaggtgcccagatccaggcgggtgtcccattggccgacgtgggttgcgccacgctcgcggatcatctccgcgcggcgacctggccacccaagttctgcgcttccatcatcaccgccttccgccaaggggtgcgtgatgaaaaaatgctggagaagttggccacgcatgacgtggaaactgtcaccacgctttttgctctggccgacaagtgcgccagggctaccgagggccgtgcatggcactcggcaccacagaccgaggttgcccagataggtggctcagatgccatctctcaagacggcaaaaagaaaaagaaaaagaaaaagaaaagaaccgtggctctgagaggccaccgtctgctgctccggtcatcgcagctgcgactgggggccaaaacaagcgcaacaagcgcccatggccgtagaggggtaacaccggctcatgccctgtacaccccaacagtcaccatagcgttgcggagtgtcgcgagatcatcgaactcgcgaagcgcgtcagcaaacggcgcgagcagacctccaaggacggctcccctcctcattgccggcctggcaaggaaagggtcgacaacggcgaggtggccgcaggagaaccggacctcgggtatcagtcacccgagggggtcctcaaggacgttttcattggaggctccaactccggtgatgacaactagtcgggccatcggggagaccccatccttcctggtctacggggccgaagcatgcccaggtcccagtcgaggctgcctcctgggggtcgttgccaactcttttaggtatgctggtacccagcctcgacacgtcgagcctacatcccagggggctaggtatgacctactcgacatcagtagggttgcgttgaaagcgcgcggacaccatctccacggcgtacgacgtcttgtacgacccccccgggtggcgtcctcagcagctaggccagcggacaccattggaggcggcaccgaagccatcaaagccaaagagatggagccgcagcacggctcgcttcccaccccaaggagttgggggcgcgagggatggagccgcagctcagcccgctgtccaccttcacgaggctggttaacatccttccccccgaatgctggaggaagaagcgggaaggagcgtcgcccccacgaacatcctgcggaggtaggcgatgatggccgcttgaaggatgaagcagggcgtaacgtgtag

SEQ ID NO: 10636 - DNA, 393 bp, Zea mays
  Peptide Sequence Number=SeqID_54011
atggttgccccgcctcctcctcctgtggcggggaaggtgacaggacaagcccggatgccgttcttccgccacgtggggaagacgtcgtcgattccgccgccgtcgggcgggatgacggccgtcgttgtcgtcgtcgcgcggcggaggaaggagtaccatgtcgtagctgccgtcgagggacatgaactcgagactcccgaaacggagcatcgtcccgggctggagaggttgctggagactacccatctggagcttgacgggaagttgttcgtcaacacgcagcaggcccctacctggcgcgccaactgtcggcgtttcgaccccggggggtccctggaccgacgagtaaattgtcactacgtgtcccagcccagatgggtcggcgcgagatag

SEQ ID NO: 10637 - DNA, 660 bp, Zea mays
  Peptide Sequence Number=SeqID_54012
atggtcgccagccaccggggcgatgcttcggcgccagactacgcgatgggccttcccgcgcgcctgctcgcgtcggcgcggcctgcgctcttgtgtgcgtggcagcggggtcgctcctgtgcgctcgcgcctgctctctcgatggctatggacggcatgctcgcctacgaggcagcaacagcggcgtcggaactaaggactagagatgtcaatgggacccgatacccgctaacccgtggggaattccccctattagggtatgggtatgggacaaaaaatatccccataggtatggatatgggacaaaatctccacccattgggtaaacgggtcggccggcccgagcctagacaccacctaggatctctcctccccgacggggtccctcccgggagcgagatccaggcgccgccggcgacttccgccgcctctgcgtacgcgcggaccgtccggccccagggcgcggaccgtccggccgtcaggcagagaagccctagccgcgcaccaggccgcggaccgtccggcctcaggccgcggacagtccgcccctgcgcggagagtaccaccgcgcctcgcaccaggccgcggaccgtccggccctgcgcgcggaccgtccgctcctgtgcagaggacaccgccacggttctcttgagtaattga

SEQ ID NO: 10638 - DNA, 1832 bp, Zea mays
  Peptide Sequence Number=SeqID_54013
atggcggagaaattagacaagttcactgaagctattagggatgaagcaccaaaagggccaacatcaaaaaaaattagcacattggaggagatagacgggttagatgaagacacatttttagacttatttgatatcttaacagatgatgcgcgcaagtacgagtacttattgacacttccagggatcctgaggaagagatggttgttgaagcaacttaaaaagcagcaaagcaccgggaccaggacgccggccgcttcccgggttataaaagtcaacagcctccgcccaccaccctgtcggctaagcaagctaaaggtaaccccccccaaacctcaccgccgatcccaccgcccggcgccgcgttctatggcctacacctcctccctcaacctcccaaagcacctcctcctccccagcccccgccggacaaggcacaggccttcctccttcgtccccaccgccgcggccaaggtcaacggtgacgcgcccgagaggccggcgcccaacggcaaggcacgcatcaacggccagggcaagaagggagtgaacgggcatgcggaccggatccacctctcggtgagcacgggcggcggaggccaggacggctccggcctgcgcgtggcgttccagggcgcgccgggcgcctacagcgagttcgcggccaagacggcgctgcccggctgcgacacggtcccgtgccgcgccttcgcggacgcgctggctgccgtggagcgcggcggcgccgaccgcgccatcctccccgtggagtccaccatggaggggacggcgctgcgcaactacgacctgctcctgcggcacggcctggtggtggtgcaggagatcaacctgttcgtgcactactgcctgctggccatgcccggggtgcgcgccgccgaggtgcggcgggtgatcagccaccccatggcgctggcgcactgcgggcgcgcgctggcccgcctcggggtggaccgcgagcccgtggaggacacggcgggcgccgtggagatgctgcggtccaagcggatgctggacacagccgccatcgccagcccgcgcgccgccgacctgtacgggctccaggtcctcgcgcacgggctccaggacgagtcctggaacgtgacgcgattcctgctcctctccaggccgccgtcgcctgtggccgtggcgctgggcgtggacgccgacgccaagaccagcatggtggtcgcgcaccggggcggctccatggtggtcgtgctcaaggtgctctccgccttctcctcccgcaacatcaacctcaccaagctggaggtcatcaacaacgaaggcgctggatccggaccaggcgagcggccgccggtggtgatactggacacgagcgcccggggcgcacccacgctgcgcgccttcccgcacgtcctctacgtggactgcgagggcgccgcgcacgacccgcgcgtccgcgaggccatccaggagatggagaggttcgccgtcttcgtgcgcgtgcttggatgctacgccgccgactccaccgtctacgatctgcagagcgagacgcacacctgccaggctgccacctcgctgccgccgcagcacgggtgcgggcgctggcaccaccgccaaaacgccaacgccgcgggcgcagggcgccgccgtcgcaacacggtcgcgcaagcgtgcgagcgcgggctcgccgccgccgtctcgccaccgaaggagagtgcgggcaccgtgccggccgccgctgccccgcaggcgagcatcccggccggaccgccgatgccaccgcgagcaggcacaagcgcgcgggcaaggaccgccgccgctatgacaggcgagccgcagccgcc

SEQ ID NO: 10639 - DNA, 1245 bp, Zea mays
  Peptide Sequence Number=SeqID_54014
atgccttcccatggtgggaagctggtgcgaagtcctgccttcgcgctggatttgcatagccgcgatccggccgcctttgtgcgtgaggcggaggatggggcggtgcggatcgttggtcgggtttttgaaatgaatcgactgtcgtatggtggttatcccggccaggacgatgtggatcgtcgcgggaagaaaccggcggtagagtctggagacgaccccgcgccggcggccgccccgtcctcgaagaagaggaaactaggtactgctgtgggaggacttggggtttccgatggttttgctagagaattgatgaggacatgcgtggccccgggtggaaggatgtcttcacctgagctccgggagtcttcggcgcggatgctgagggttaccggggtgatggacaaggatcgccaaggagctggacagaagcgccaggcggtcgtcaggcttcatgaagccaggccgaagaggcagcgggggggctgcgaaggctactgccccccgcgggggcgccggaggctgcgggctgccgccggtggttccaagactacgaaggctgcaccgatttccggcagggtgccggaggccgtgaaggcggcccgagggttgccgccgccgggcaagcgcgtcgccgacttcgtcaccgacattagcgtggaagactatcttgttggatcggacgaaggccaacttgtcgttgttccgcctgccgcggcgaccacggcagttgccgtagtgccaaaggcgaagggtggtgctcttcgtgctggcggcgagatgccgacacttgctgctgtcagggacgaggcgggcgctgtgtcccgccggctgaaggaggtgaaggaggcactaagtcaggcggctgacttcgcagaccgcacggcgtcgggggcctttacggcggttgtgtctgccgaagtcgagaggcttcggacgcaacatgccgatgccgtccgggaaaaatcggccgccgacagtaagtgccgcaagctggcggacaaggtggccacgctggagggggagaagactgaccttcggcgccaactggcggaggagaggagggaggccaatgaggccctcgccaaggcgcaggctgcgcaggcggaggccaatttggcacaggtggagggcggtcttgctagggagcgcgccgagcagttggaggagcggctccgcgccctgcaaagccgtgtggacagggccaaagccgcgacgcgcacggaggctgagcggactcgcaaatag

SEQ ID NO: 10640 - DNA, 420 bp, Zea mays
  Peptide Sequence Number=SeqID_54015
gtggcaatgagactgatggttcttggttttgactctggtaatgcgcaggatccacttgagagcagtgagatggggctcctgtggggtgtgcatatgcaggcacaccttctggacgacgtaggcgatgtctggcctggagaagtcggacatgccagcgcgctccaggatgtcaatggcgtcctggcattggtggaggaagagaccctgaggccggcactcggcgatgatgttgaggaagtggtcagcggtggatgccgtgagaacaatctcgtcgtcgtagagaaggaggtagatcatgtcaccaccgcgcaagtagatgaacagggacgtgcccgacttagccttgatgaagctggtggaggtcaagtagcaggcgaaacaattgtaccatacccgcggcgcctgcttgaggtcgtatag

SEQ ID NO: 10641 - DNA, 309 bp, Zea mays
  Peptide Sequence Number=SeqID_54016
atggaggaagacattcttgacatcgagctgatgtattgcccaatccctagagagggtgagggagaggatagctcaaatgacggcgaacttgatgacggggttgaaggtctcgtcatagtccactctggagcactgggtaaagccccaaacgacctaacgggtcttgtagcgatcgagggacctgtccgagggttccgtacccttctccaaagcgtgattctagtgggcgtcggcgagggcgacaagaacggaggaggggactggggagacacccggaggagtggcagccgtgttggctgccaggattag

SEQ ID NO: 10642 - DNA, 207 bp, Zea mays
  Peptide Sequence Number=SeqID_54017
atgggttccttggcgcggaccacccgccccttggccgccccaaggccatggggggcccccccttttgggcccttggaaggtggcaatgagattgatggttctgattacgattatggtattggttgtcagcattgcaaccactgctcaggcgaagatgaagctgtggaaggagacttccaggagttccaagattacgacgagttctag

SEQ ID NO: 10643 - DNA, 312 bp, Zea mays
  Peptide Sequence Number=SeqID_54018
atggaggcgaggatgatagcggagcgggaggcggagtgggaggccctctcggcagatcaacagaggatggcaaagatgttccagtatatgcagagccttggcgccgcacatggtttcgctccaccacctctgttgttccctctagttgaccctgctcggttccatactccagtgagtatcaaaattctagttcttcatgatatatattcatctgagacaatctggggcggcatccaacaaccctcatggatcgtccagcccatcaccgcaccagtccagccgcccacctcgatgagatattatctttgttag

SEQ ID NO: 10644 - DNA, 483 bp, Zea mays
  Peptide Sequence Number=SeqID_54019
atggcaactcgtgccgcctgggccctccgcttgagggcatcttgtgctgcagaagccggcaccgtcttaagggccttccggggagccaaaccggccaaaccgtgcctccgtttgctcggaggaaaagatacttatccgctccggaccaaggccaatcgtgcccacggggagacccctcaggcctcggtccccgcaggcgccgccgagcctcagatccgggctaaggccaaggcgggccaccatgtcatcgtcctcgtcatcctcgtcgtcatcgtcatcgtcaggcgtctccggcggtggctccctcgggagtccgtccctctcctgcctctgacggcgcctctccaagcgtcccgagcccgcatccgcttgcgagcccgagcctttttcgcgtccttcttctccttcatcttctccgtagcgaccctccgcgcggctcggtctaccgtgtcctccgagactggcggcagggaaggcttgtaa

SEQ ID NO: 10645 - DNA, 294 bp, Zea mays
  Peptide Sequence Number=SeqID_54020
atggctaatcctggccccgccccattgccatctctaagtgttatctacattgtcgcgcccactattttcaagagcactcttcctccgatggcgactccgacgagagggaagaaacggctggtcgtcgacgtcgatgtcgaggtcgacagtgaggtcgaagtggcttccgccttcagccgattgtccatttcaatcgttgccaagcgtacaggcgacggttgcagcaaggagcactccatcggcaaggagcactccaccggcaaggaactcacctacgcggccacatcagtgtaa

SEQ ID NO: 10646 - DNA, 534 bp, Zea mays
  Peptide Sequence Number=SeqID_54021
atgggtggtgctagtgcatcacgggacttcgccgcgcacgtatgtggcctcgtcaggcgtgggccatggtcgggacgccgacaattgcacgtcggcgctcaccaatccgccctgggccgtggtcgaggaattccgtgctgtaattgccggtcagcttctctcccacagattcacattctcgtatggtacctctttctatcatcaaggagcactcccccagcagcagaccccttctatcgtcaagcactgctcggcacctcgttcagtgttgttcgtagtgacctcgcccaagccattgcaaagatgcatgtagttgggaaggagttgaaagatttggccggagacgagattatggattcgccagatacggccaaagaggtgtcagtgaacttcacaatgtggcgcgtgtatgagcttgctcagtcacttgaagctggtccgtcgccaccattatctgagtgtttcaacaaccaatttgctgaagatgaagatatgggtggtggggaatgggcactggatgatgtcagttcttaa

SEQ ID NO: 10647 - DNA, 3228 bp, Zea mays
  Peptide Sequence Number=SeqID_54022
atggggctgcaagacgtgaccacgacttggtggctggcgcatctgatggctctgccatggttatttacagcagctgacagtgatgatatctgcacagtggtacagtttataaacagcaagagaccttggacaacactaatgggtgttggatggggctatggggcaaatatgcttacaaagtacctcgtggaagttggagagtcgactcctcttactgctgctgtttgtattgacaacccttttgatatagaagaagcaacgagatcatttcctcatcatataactcttgatgaaaagctcacagctggcctggttgatattttgcgttctaataaggaactctttcaaggtaaagctaaaggtttcaatgttcaaaaggctttatcagccagttgtttgcgtgacttcgatgttgctatatccatggtttcacatgggttcgatactcttcatgacttctatgctgaaattagtacaaggctgtcagttgcccatgttagaatacctctactttttatacagagtgatgatgggactgtgccgcttcttgcagtgccccgcagttcaatatcagaaaatcctttcacaagccttctcttttgttcttgtgtacactccactatgtccatgtttcagagatacagtgtgttatggtgccagaaccttgccttagagtggttatcagcagttgagtttgctcttctgaagggtcgccatccacttatcaaagatgtggacatcacaattaacccgtccaaaggtctagcatttgttgaacctcaagtgaatcaaaggaaatctccaaaaggaaatagttttcgtcaacattctgagcttattttgtataataatgttgcacatggaataaatggactgctagttgattctgcaaataagtactctggtgctcaaaacaaagaaaatgggcagttgaataataatggtgacataggaactgtagacaaagatctggaagaagagttagaagagagttctgaagatgttgagaaaggtcaggcactacaatcagcaagtcttgtgatgaatatgctagatgctacaatgcctggcactctcaatgatgatcagaagaagaaggttctggtagctgtggagcaaggggagactcttgtgaaggctctagaagaagctgtacctgaagacgtgcgcggaaaacttacagcttctgtaactgaaattttacattccaaacgagaaactttcagtttaggtgcattgaatcgacttggctggaacaatgtaagaccaaccactaccaagacattggcccaggaaaagctcaaagattcagatcatgaaagcgggcttaaggataccaaaatggttgatcagaacaggatttctgcaaccgcttttgagggggatctgaaagacattaatatgacaaatgatgataaacctggagaaagcatcgaatcgtcacagggaaagccttctcaaacttctgaacctgttggaacagcgacagaaattggaactgaacagccttataaatcagataaagctaattatggaaccaatgatagcagtgaagggcagcatataacagaacaggacaatgaaatgactccaaagcaagtttctgatgatcagtcagtggccaactgtaatgggccttctaaagaaagggagcaatcagcagatgctacaacagaccagaatctacaatctaacacaacaacagaaaaggaaggtgacacaagtcgcacaggtgaagataagactgctcataatgtgaatgatcaaagcacacaagtctctaaaacagaagaatcaaaaccttcccccattactgtgacccaggcattagatgcattaactgggtttgatgactcgactcaaatggctgtcaacagtgtttttggagttcttgaaaatatgattgatcagtttgagaaacaacaggactctgagaatggtgaaagtgctgatggaaatgatggtatcacttccgtggatgagacagaatctcatgtgaaagagaatacagagaatgtgtcaagtggagaagatataaaccactcatctaaacaaccagaaggtagcagtcctggaaaaactgattcaatcatgtccaaatatgattgtgcttttggtgaggaaaatcccaatttaagcattgtttcatatggtagaggaaaaatgagatattaccgaggaaacaaagttggtgatcatgtgggtgctgatggtatcgagcgagtcagtggcttgcctgactatttattagatatagctgtcaactcttacttgaaggcgcaatatgcaatgtatcttcgtgaatttctttacacagaattgcaactcaaatcaccagagtctaattcagcaactgatcttttccttgatccacaagagggtaaatggaaaattgaagaacagatgggcaatgtgcaaaatgacaattttgaatcctcacaagagtcatctaagatggacaatgctattgagccaccctactttataccaggaaaaaatccagacatcgcatacaagtccaataaatggaataatacagtagcaaccaggtcaaaacctggtaatgatttgaacgaggcacttacacactttgttagagatgaactatcaagtgcccttaaaattgaagttggtcgcaaaatagggataacagatactaagcaacttgaaaggagtcttgcaaatgatgtagaacagattgctgctgaagtttctaaaactgttgtccttgactgtgagttgtattcagccatacatgtgcaaagaagtccaacaactatcaagtttggttcaacacatggaaaaaatgttgttgaagctgtgtcgactgcagttcagcaatctcagcatctgaggaatattcttcctgtcggtgtcatagttggtgtaactttggcatgtttgagaaattacttccatgttggtgtctctaagcatggtgaccatatgatagccactatgaagtcagatatttttggtgaggaagttattgttcaggacagcagcaaagagaatgttcaggatagtggaaaagcaaatacaaacgataataatattgaaaaaaccagtggggagaaccagcaggatatgacgaagtcacagggtcaagatatgatggtcggggctgtgacggctgccctaggtgcttctgctttggtagcacatcaagtaagtaaactaatatcccaactttattttcttgtctatgatttcctttggacctgttag

SEQ ID NO: 10648 - DNA, 123 bp, Zea mays
  Peptide Sequence Number=SeqID_54023
atggtgatggccccctgggtgaagtaccttagccaagaatacgaccccatgttaacgtgggctgccagcacctaccgctccccctcttgcccatctttcaggttaaacaaggaatacaggtag

SEQ ID NO: 10649 - DNA, 363 bp, Zea mays
  Peptide Sequence Number=SeqID_54024
atgaccgtcgttgttgtcgtgctgcggggagaggagtaccatgtcgtagctgccgtcgggggacatgaactcgagactcccaaagcggagcaccgtcccgggccgaagaggttgctgaagattatccatctggaactcaacgggaaatcggtccgaggccgaggtcgggcgaggtggaggtttctcctgaggccgaggctaaggtcgggcgaggttgtgactcctcccgaggtcgaggctgaggccgaggcccgaggtcgggtgaggcagagaccttctcctgaggccgaggctgaggccgaggcctggggttgggcgaggcggagaccttctcccgaggctaaggctgaggctgaggcctga

SEQ ID NO: 10650 - DNA, 807 bp, Zea mays
  Peptide Sequence Number=SeqID_54025
atggtcgcaccgtcctccgccgccacagcctgcttcgtctccccgctcccaccgcctcgccgcccgcgtcatttcctcaggcacctcgcgcgcgccgccgtcgccgagcccacgcccgcgcctgcctccgcctcctcgctcgcccacccgtcgccatggccgtgggcgcagcggctctgcgacctggtccccaccgaggccgtgggccggctgctgtcgtcggtcgtgggctccctcatcgtcgcgctcgccttcgcgtcgctcatcctcggtgacaccgacgcggcctccgcgttcgtggtatccacgccgcggaagctacaggcggacgagcttgccaccgtgcgcctcttccaagagaacacaccctccgtcgtctacatcaccaacctcgccgtcaggcaggacgcgttcacgctcgacgtgctcgaggtgacgcaggggtccgggtccggctttgtctgggataagagcggccacatcgtcaccaatttccatgtcatccgtggcgcgtcagaccttaggttggtcgggactacggagtgcttcatgctttcctactacactttcttagtcgtttggttatgctcaaatcgaagcttgtcgattcttgtattaatggtggacagagcggggagaaaggagttgtggtgcttcaatgtgttgttggacaaggatgttgttgttttgcgtatcaaagcaccaaaggataaactaagacctatacctgttggtgtgtcagcagacctactggttggtcagaaagtatatgccattggaaacccagcttacacagacctgttttaa

SEQ ID NO: 10651 - DNA, 177 bp, Zea mays
  Peptide Sequence Number=SeqID_54026
atggtcaatgcggacgaaagtgggccggcagtaatgacggtggcaggcgggtgggagcagcaatcacgtcgtcagccaggctcacgtcccatccaggggcagcaagagagcctcctcccacggcgtgaagacgggaccgggaaagggggataccccgaaaaggatccttctctgtga

SEQ ID NO: 10652 - DNA, 525 bp, Zea mays
  Peptide Sequence Number=SeqID_54027
atgaacaaagatagagacttgcaaaacggaattgggattcagatgggtcagattcaagcgatagaaatcaaggagaccgcggaaaaaaggagaaatgggaagagcaaggtcgcggaggaggaatggaacgtagatgacggattcatgagtgtcctctgttggaacagtgaccccacggcagatccgctaggaacagagctcctttggaggaagaaccccgatagatacaagatggagaaggtcagattcagagacaacggacatatggttacctgcgaaaggcaactgactgttggggtcgatggggggatgactgcgacggacgaactcgaagctttccgcttgggcgccatttcaaccttgccggcgaacggagcggaagcagcgttgaaagagagtggagaaggcctgggtgcagaaaagcaagaactagggcacggaatgtggaggcgtgcgacagtacagtgcatatggggtttttcgaagccagatgccgaatctaaaaagcgcccagtcatcacctag

SEQ ID NO: 10653 - DNA, 329 bp, Zea mays
  Peptide Sequence Number=SeqID_54028
gtgacatgaggcagcaggtcgacaaggggaaggggggacctgttgccaacgacgatggcggtgggcacgcgtgcgaggggcacgagtgggtggtggggtcaatgaccctgatgtttgtggtctctggttccaagaatcttttgctctctgtatgcgactggataggttcctctgtagcttattccatgctccaaggaggattgggcataactaacttcaaaccagacagcttctcttctagcaaggctagcgcacaacttcaatctgagacatctcctggatgggtcaagagggagctgatgttgatgacttcttctggcagcaactga

SEQ ID NO: 10654 - DNA, 1005 bp, Zea mays
  Peptide Sequence Number=SeqID_54029
atgcgcggccccagggggaaggatgtcttcgcccgagctccgggagtcttcggcgcggatgctgagggttaccagggaagcgccaggcggtcgtcaggctccatgaggccaggccgaagaggccgcgggggactgcgaaggctgcggccccccggaggaagccagccgccgctggcgacgaagtcggccgcccctaggtccagcagggtgccggaggctgcgaaggcggctgccgccggcggcaccaagtctgtcccggcgggagccgtgaaggcccaagagttgccgccgccgggcaagcgcgttgccgacttcgccaccgatattagtgtggaagattatcttgttgggtcgggcgaaggccaacttgttgttgttccgcccgccgtgacgaccgcggcggctgccgtggtgcccagggcgaagggtagtgctcttattgccggtggcgagatgccggcactcactgccgtcagggacgaggcgggcgctgtgtcccgccggctgaaggagacattaagtcaggcggctgacttcgcataccacgcggcgtcgggggcccttacggcagttgtgtctgccgaagtcgagagacttcggatgcaacatgctgacgccgtccgggagaagtcggccgccgaccgcaaatgccgcaagctggcggataaggtggccgcactggagggtgagagggctgagctccggcgccaactggcggaggagaggaaggaggctaatgaggccctcgccaaggcacagtctgcgcaggcggaggccaatttggcgcgggtggagggcagtcttgccaggcagcgcgccgaggaattggaggagcggctcaacgctatgctgacccgtgtggagaggaccgaggcttcgacgcgctcggaggcagagcggacacgcaaacatcttatggactcataccatgagctgggcgcgcggaccgctgacttcgaagtgccagaccgagagcccggacttcgctgcctcgagtggctatag

SEQ ID NO: 10655 - DNA, 576 bp, Zea mays
  Peptide Sequence Number=SeqID_54030
atgaagaacgtagcaaaatgcgatacttggtgtgaattgcagaatcccgcgaaccatcgagtttttgaacgcaagttgcgcccgaagccttctggcggagggcacgtctgcctgggcgtcacgccaaaagacactcccaacacccccccgcggggcgagggacgtggcgtctggccccccgcgccgcagggcgagcgtcccggcgcgaggccggccattcggccctacggacccatcgagcgatcgagcttgtcctcggaccgcgaccccagcaaatattcaaatgagaactttgaaggccgaagaggagaaaggttccatgtgaacggcacttgcacatggccggaggtagggtccagcggccggaagagcaccgcacatcgcgcggtgtccggtgcgcccccggcggcccttgaaaatccggaggaccgaataccgtccacgctcggtcgtactcataaccgcatcaggtctccaagtgctctgaatgtcaaagtgaagaaattcaaccaagcgcgggtaaatggcgggagtaactatgactctcttaaggtagccaaatgcctcgtcatctaa

SEQ ID NO: 10656 - DNA, 468 bp, Zea mays
  Peptide Sequence Number=SeqID_54031
atgaacgcgctctctcgcgaagggtgccgacactatgaggtcttcgaccaagccgatgaggatttcgagcgtgatatctacaagggcccctatggtcgagaggtggtcagggagcgggccgagacggcgaggggtcaggcggcgcgtggcgagagggtggatgacttcggggcttttaacagcgcgctgcctgacccggagttgaacccgacggaggctgtgtccgaggccgccctggagccgccctcggaaaccgccgaaggcgctcctgatgcccccgcagccgctactgccggtggaggcccgcctccgaagaccgccgaaggtgctcctgatgcccccgcagccgctgcggccggcggaggcccgtcgccaactgctgcgccgagggctgaggatcctgtgacggtggcggcggaggcgacagcggagactcccgcgacggctgggtcttcgcaggtggcgtag

SEQ ID NO: 10657 - DNA, 393 bp, Zea mays
  Peptide Sequence Number=SeqID_54032
atgaccctagagcctcatcccctgcagccaggctggcgttcgctggactctgagtcttttggatacagggctaaggatactatcgaggcgattgctcttcacgagctgaccaccttctgtggtttccaccccttggagctgtccactcaccccattggtttgttccccacggagaacgaggacgacccaatatggaaggatcgagtggagcatgccaaggatatatgggctatctacccaggtcagattgctcacttgacggagatccaggacatggaggccaacgaggatgtcgacatcgagggaggagaggagcctgcctccagcttggacactgctggctcagggagaccaccatcccccgagtcgagtgttgcctcgtttgctcactag

SEQ ID NO: 10658 - DNA, 681 bp, Zea mays
  Peptide Sequence Number=SeqID_54033
atgtcttcgcgctcccttatgcatcgtgtctttccaccttccaagcccccggatgggggatacccgccgtctttctgcctcgtcgttggaggaacgcaactccgtgggagttgcttcaaggatgttcatcatccttgctggggtggaggccgggctgagccggagctctacctcccgcgcgggttcgtgggtcaccctctcctgcgacgttcgagggagagggcgctcactggccctgcgtgcgggtcggacttcgacaacgcggggctggtcgacggcgggtgtcgtcagcttcagcgtgtcgagctcgtcggcttggcccccggtgccccctcctgccagaaaggcggctgccgcgccgtgtgcacgggaggaccgcccaagatgtcgcgcgctgctagggcggcgttcgtgttctggggcggtcctgccttttcaccggtattggcacctccgcgcggaggtcggtgccccactcgtctgggaggatctgagtggggatctgccggagggctgacggcccctgtcgtcgatgccgaggtggaggcggctcaagaagtccccgttgccgacgggatcaccgccaccatccgcgcttcgggcctccggctctttgtacttgtcctcgcccctcgagcgtcagagtgggcgagggcaagattgcggcagcaccggccctga

SEQ ID NO: 10659 - DNA, 231 bp, Zea mays
  Peptide Sequence Number=SeqID_54034
atgtctagtcagcacggaccagactatgactggaagacctcacctattgatcctcaggctgtgtatgcaagtggtggaaaagctcatggaaggtacacaatgtttgctaacgtcatcaacacgagccagacccctccagctaccttgccgacgcatgaacaagacgatgtgttagactttgtcgaaaccctcttcactagtggaggtatcgaccatcactcttcactgtaa

SEQ ID NO: 10660 - DNA, 459 bp, Zea mays
  Peptide Sequence Number=SeqID_54035
atggcccgcgcccgcgcctataaagccctcccaggcttcgactgcactcttccgcgccccctcaaacctcaccggagtttagctcgccgccgtttgcccgtgcgcagcgtgtccgctgccgcccaatccctctgccaccgtagaccggccaatagagccattcccaaccccgtccagccctcggagaagactgtgcacacctccgtgaagtccccgagcgaggaatcggagtttgcttcgccggagaggccagtccacgctcgccggagctctcaaccccgccggaactgtaaccttgctgacggagagtacatcctcgtgccggagcaaggagctgctcaggaggtagccccggatccagcacccgagcctgcaccagaggacctgcctgccactgctttggaaggcaagccccggtttatgcataacctgttatttatgctattttacttcacttaa

SEQ ID NO: 10661 - DNA, 543 bp, Zea mays
  Peptide Sequence Number=SeqID_54036
atggctggggcgagctggccacggtggccgaagctcgggtggcttggcgggcggtggcgcgtcgtgctcaggggaaagtccggcgaactcgggcttgggcgggactatgagcgtgcgagggacagggcttttcggcttcgcgtatgggctgaaaacaagtggttggccatggcgcgtgggccgaaaactaagggagggaagcggatgggggctggcgacgtgccccggccgtatgcggaacgactcctgttggtccgcctatcggctcggggcgtggaccgttgtcgcccgcgccagcggccaaagcccgggggcccaggcgcccccggcagccatcgtcgacgcggacggtatccgcgcgcctcttgcgcgcccctcggggcgctgcgccacaatggtctgcgagctccccatccgacccatcttgaaacacagaccaaggagtctgacatgcgtgcgagtcgacggtttcagaaacctgagatgcgcaaggaagctgacgaacaggaggccctcacgggccgcaccgctggccgaccctga

SEQ ID NO: 10662 - DNA, 780 bp, Zea mays
  Peptide Sequence Number=SeqID_54037
atggcccacgtccgcgcctataaagccctcccaggcttcgactgcactcttccgtgccccctcaaacctcaccggagtttagctcgccgccgtttgcccgtgcgcagcgtgtccgcggccgcccaatccctctgccaccgtagaccggccaatagagccattcccaaccccgtccagccctcggagaagactatgcacacctccatgaagctccccgagcgaggaatcggagtttgcttcgccggagaggccagtccacgctcgctggagctctcaaccccgccggagtacgtggaccgggtaatccactcaaccatccttcgattccttgtgcacacggtcactatgttaccccgtgaagctcaccgtgcccttggattgaaccagttcgctgtggtttggccggtacactcgccgccgacgagaacacccgcctgcgcgcgtggaccgagcgattccggccatccccgacgtcaagccgtacctcgacgtgaccgccagagtctccccgagccaaccccacacttcgccggacctccctcgccgccggatacaagagcaatacaaattccctatgtttatcctcaacaaaaacctaagcctaaagactgtaaccttgctgacggagagtacatcctcgtgccggagcaaggagctgctcaggaggtagccccggatccagcacccgagcctgcaccagaggacctgcctgccactgctttggaaggcaagccccggtttatgcataacctgttatttatgctattttacttcacttaa

SEQ ID NO: 10663 - DNA, 531 bp, Zea mays
  Peptide Sequence Number=SeqID_54038
atgaagaacgtagcaaaatgcgatacctggtgtgaattgcagaatcccacgaaccatcgagtttttgaacgcaagttgcgcccgaagccttctggcggagggcacgtctgcctgggcgtcacgccaaaagacactcccaacacccccccgcggggcgagggatgtggcgtctggccccctgcgccgcagggcgagcgtcccggcgcgaggccggccattcggccctacggacccatcgagcgaccgagcttgtcctcggaccgcgaccccagaggcgtcctcagcgacggaccgggcccaagttctctggaaagggacgcctgggaggggtttgagttggagcacgcctgtcaggacccgaaagatggtgaactatgcctgagcagggcgaagccagaggaaactctggtggaggctcgaagcgatactgacgatagctggagcccacacgagttctatcgggtaaagccaatgattagaggcatcgggggcgcaacgccctcgacctattctcaaactttaaataggtag

SEQ ID NO: 10664 - DNA, 414 bp, Zea mays
  Peptide Sequence Number=SeqID_54039
atggcgaacgggccaaaaacggattttcggccacggccgcgaaaacgggcacgcggaagggcacgggaccctcccgtggtccccccgcgtgagacgtggaagttcgggtccacccatgagggaaaacgggtcacgctagcgaaacccctgattctgagcaaaaacgctgtgttcggccatcttagatgggtttcgtggggtcctgggaaaatgccctggttttctgaaggcagaactccccgaagtcctaggagggggtatgcccctcaggtctcctcggccgagccccgcaccccctcgcggcctagccgtggccggtcggcaccctaccgcgcccagctccgagctggcgctgttggctgcctggccgacccgtggttcggccgtgacgcagccacgaccggctatggctag

SEQ ID NO: 10665 - DNA, 411 bp, Zea mays
  Peptide Sequence Number=SeqID_54040
atggaagaaacaaaccgccacgtgttcgacacgttctgccatgccagagcacgcccgcgcatgtcccgcgccgcgcccgagccaagccagcgccctgccattcccaaccccgtccagccctcggagaagactgtgcacgtctctgtgaagctctccgagcgaggaatcggagtttgcttcgccagagaggccggcccaaggtcaccggacttcacccgaccgccggcaaccgtggaccgagaacctccccgagccgaccccacccttcgccggacctccctcgccgccgagtacatcctcgtgccggagcaaggagctgcccaggaggttgccccaggcccagcaccagagcctgcaccagaggacctgcctgccactgctttggaaggcaagccccggttttatgcataa

SEQ ID NO: 10666 - DNA, 252 bp, Zea mays
  Peptide Sequence Number=SeqID_54041
atgccgccgtggataggccggagcacacgccgccgacgagctcgcccgcctgcgcgcgtggaccgggcgattccggccatccccgacgacgagccgtacctcgacgtgatcgccagaacctccccgagccgaccccacccttcgccggacctccctcgccgccggataagaaaaatagaaaatgtaattaaattaatgaaccagagagtacctctatttttgttgggttacttcttcaatatagttcactag

SEQ ID NO: 10667 - DNA, 183 bp, Zea mays
  Peptide Sequence Number=SeqID_54042
atggcgcacggccgaaaactgaggttcgggcacgaccccgaaaataagctaagtccaagcgtgtggaaagacaccgaagggaaaacggcacggaggcgcgcgacgacgggcggcatggctgttcgtcctagcgtctgggccgaaaacgaggggttcgcccatggcgcagggggcgaaaactaa

SEQ ID NO: 10668 - DNA, 165 bp, Zea mays
  Peptide Sequence Number=SeqID_54043
atgactctcggcaacggatatctcggctctcgcatcgatgaagaacgtagcaaaatgcgatacctgcgtcccggcgcgaggccggccattcggccctacggacccatcgagcgaccgagcttgtcctcggaccgcgaccccaggtcagtcgggactacccgctaa

SEQ ID NO: 10669 - DNA, 69 bp, Zea mays
  Peptide Sequence Number=SeqID_54044
atggcgacgaagggctgctcggttggtggtgacggagcttccggtgaaaaatcccgaggtccaggggcg

SEQ ID NO: 10670 - DNA, 807 bp, Zea mays
  Peptide Sequence Number=SeqID_54045
atggtgcaggaaaatatagcaccgacctccacaaaaatcgttgaaacaatcatatcacctcttgcgaaggaactcgacgagggggacgtagacaaaattgttcctcagaatgtcgacgcaaacatcaaaaaggaagcaaaggttgacaccaatgttgaagggccaactacttcaaagaaaattcatcagcgaatcgccactgacgatgtcaagaaaccgtcagaatcagtggcacgctacctgcaaaaattgcagagagttatgacaaatcaatcaaaagcggaatcagcatctcgtggagtacgcacacggtcccaaatagacaatttcgaagtatgggaagaagatgaaatgattcatactcgagaatcattacgtcttaaaatcaatatcccgatatacaagaaggaggttgttcctcctaaatttgtgaatgggaggctgttcttgacgacggtacaactttctaagttgtcgactccggagattagaatgcatgagtggatgcaatacatggatgataagaagaaacaacttaagacagggtttcttgacccgttgatgatatcccaagctcgctacaaagaagttgctcggagacatggagaagaatacaaagacttggatgatgatgaatttgagaaagccgtcaaacagaatcagagaaagaaaaatgaagtgcataccgtttttattggaaagatcttggcggcgaacatccagaggacaagcctaatttgtccatatcattatttccatatggtgacaaacaaccttcaggttcctaaatcaatgctgaatggttag

SEQ ID NO: 10671 - DNA, 478 bp, Zea mays
  Peptide Sequence Number=SeqID_54046
ttcatggactcggcagaaagccttcgtcgaacggttccactccttgactacgaagagcctgttggggcgaaggcaaagacgccacccttcgctcgaggccttcgctgataaccactggtcagacagagacagaacaggcagggacacccttcgctccattcggcaccagacgaagaccggcgacgaaccgcccccaggcttcgccccactggagggcgcggatctcaccgaggatggcgaggtcctcggcgtctcaacagaagaacagttacagctgcgcgccctgcgcctcaagaaccgcaatctccagaggcagaaagagatactcgaagccaagcgccagcgtgtgtccgcactagccaaggtgcggcaaatgatacgcgacgaggagcagaaggcccaagacctcgagcgcgagatcacgctgatgcagcgcgaaggccacctcggtctacagcaagagccacccctccagtag

SEQ ID NO: 10672 - DNA, 447 bp, Zea mays
  Peptide Sequence Number=SeqID_54047
atggcgcttcctgttgacgtggcgggcctgtgccctaggtcgggcgacgtggaagctcctccgaagccggggtcgagtctgtcttccatggccgaggccgagcccgagttcctgggtcgggcgaggcggaggtcgttcggcagaggccagggcggagtccgagccctagggtcgggcgaagcagacccgagtccgagccctgggtcgggcgaagcggagttcgccgtcttccggggcctagcccgagtccgagccctgggtcgggcggagcagagcggcgctgtccttctgtcagaccggtcagtggagcggcgaagtgacggcggtcacttcggctctgccgggggggcgcgcgtcaggataaagctttatgctgatgggggttaccagctgagaattaggcgtcttgagggtacccctaattatggtccccgacaatcctgttga

SEQ ID NO: 10673 - DNA, 540 bp, Zea mays
  Peptide Sequence Number=SeqID_54048
atggacgacaccgttgaagcagcagccatgaagactctgacgactttctatggctaccatcccctggagatggtgatgcaccccttgggactcttccctgctgagaagaaggacgaccccatgtggtgtaaccgcgcccttcagagcgacgctatggcacaccttgctaacatcgctcaaatcgccaagctcactctcgacagtcgggaagtttttgtggtcgatttatccaccgagttggtagagaaggatctgcaggtggaaaggctaagccagcgcattaccaccttggaacagcaggtggagatccgagacaacactattgatgtcttggagaaccagcttcacgatgtgcagagggaactcgaagaagcaaatgaccacctggacatgcaccacttggagatggaggccaatgaagtcggaagcgagggagaagaggctcccgaggagctaggaccagcccctggtgccaatgggactacctccgcgatgcctccttcacccgtatccagtgtcgcttccaccgctcagggttaa

SEQ ID NO: 10674 - DNA, 297 bp, Zea mays
  Peptide Sequence Number=SeqID_54049
atgatcagcggggagcatagcacaaaagtggtcccaccaagtccgagcagggccgcgaagctgctgcgcggcgaagcgagccttggcttcatcaaggcagtctcccgtgaggaggggaaacatggactcaacgacgcggagccacacgtcggcgtccaacggatcctctgccttggtgaacaagggcggctgcgtactcagaaactcctggttcgaaatgaagataacatggtgacaaacatcccacagatttcaaaagttcacagggttacatcaatcaggggaaggtacccgtaa

SEQ ID NO: 10675 - DNA, 963 bp, Zea mays
  Peptide Sequence Number=SeqID_54050
atgtcttctcgctcccttatgcatcgtgtctttccagcttccaagcccccggatgggggatacccgccgtcttttcgcctcgtcgttggaggaacgcaactccgtgggagttggtacctttcagccatcgttcggcttcaaggattttcatcatgcagcccggctgcacccctccaccggcggtcacccaagatggtgacctccggcttgatggtgggggaaagtgagccgggctgcggcctctacccctccctcagcctcaaggattttcatcaccagggctggggaggggagagtgtcgagttgggcgtgcctggctttcggacgcgagtggcttcggagccgctcgcggcgccggcgtctgccacgacagctggaagaggttcctccgccgacgagatagccagggccgcccacggaccgacctccaactctacggccttctgcccgtccttgcctcacaagtttgggcatgggcgggggcctcctggcagcagcatccgccctgaggtcagtgctgccgctgttcggccccccggagcagaagtcgtcgtcgtcgctgctgctggagcaggtgacggcgcgccgttcgtcggtcttctgttgctccgcaggcccacccctatcgagtggggttactcgcctgttgcttatctgaaccgcttcaccaagcatgagtcgccccgtgtcaaggtgacgagtgagcatgaacaggggcgaagttggctcgaaaatgaaaacctggttggccggagcctagccgggttgtccgttagcgggaccgacgccggagttgaccagccgaggcctcgggtcgggctggcgcccttggaagatggtgttcggaccgcgtcgccgtccgaggctaggtcgaacctcgccgaagttgtcgtcaatgccgagggtgctgctgcccccttccagcgtcaagacccgagcctgcaggatcagatagtcttgtag

SEQ ID NO: 10676 - DNA, 582 bp, Zea mays
  Peptide Sequence Number=SeqID_54051
atgatgaccgcgtcaaaaaagggatcgagaaaggtggtatttcaaaaaaggatccttcccagcgaaggaaacgggccccgagccctcctactgatcaggggtttgaaggttacgccctccggggttgggcaaccgccccagagcactcgggctctgagcccattactgatcaggggttcgaaggctagcccctcggaagggttcgacagccgccctagagcacacagagtcagggatgaccctaggtacgtctgttacatggccgaggctcgggctacgctcccgagtgagcgcaccctcggctcgcctgaagcccagcttgggcagactttgtcgtgcagcgacctcggccggatcgccctaccagtcgaccgcctcggcctcagcctcggcctcgggagaaggtctccgcctcgcccgaccccaggcctcggcctcagcctcagccttgggagaaagtctccgcctcgcccgaccctaggccttggcctcagcctcggcctcaggagaagtctccgcctcgcccgacctcagcctcggaccgactatgctacaggagatacatcattaccctactcctag

SEQ ID NO: 10677 - DNA, 135 bp, Zea mays
  Peptide Sequence Number=SeqID_54052
atgggcgcgtgggtgggtctagggttcgagggaggtgatgcggtggagatcgcaggggaggaggaagaggggagacgggagatgggagatgcggaggacccactgggagaggaggcggcgtggggtggatattga

SEQ ID NO: 10678 - DNA, 627 bp, Zea mays
  Peptide Sequence Number=SeqID_54053
atgacggatgaggagaaggaggtagcaacagaaagacggatggactcaccgcctcgatgcgattgtggagaccgtgctgtcatcgacgaagactatgacaagcagttctgttgtccgaacattgattatagcccagaggtaaaggaaaagagatacatggggtgggcggcagaagaggtcaaatttgatccagtactctgcaaatgtggtattgaagctaagtatggattagttccttcggagcttggcgttggatatttttgtggacatatggtcgattacgatgaggagacgaggaaatgcagttgggagagttacgacgacaaaggagaggtgatgcgcacaatagagtccaagagaataatgggacagaagatgtgttgtggatctcgactcgttgattcgtacattaacgatcgcatacgcgacatgcgtagggaagcaaaatctgccttttatgatagcccgaagcgtgcagagtataggaggttgaaggcggcagatgagaagagagcacaggatgcaagggaatgggaagcggctcaagccgagaaacagatgttggataatcttgctgatcgcctcaagggaaagatgggaagcggcgtaaactattttggccgatga

SEQ ID NO: 10679 - DNA, 279 bp, Zea mays
  Peptide Sequence Number=SeqID_54054
atgtcggcgcgtgaccgcgagacggccgaggcgctggtgcgcgaagacaaaggcttccactccgtaactcatccttcgccgtcgcttcgcgcatctctccatctttttggggagagttcaaagcaaaaggacttcgtctttggtacaatcttcactcatttatttatgaccaaagggggagagagtagatcaagggctctaatgattccgtttttggtgatttatgccaaagggggagaaaatattagcccaaagcaaaaggaccgcaccaccacctaa

SEQ ID NO: 10680 - DNA, 306 bp, Zea mays
  Peptide Sequence Number=SeqID_54055
atgaccgtaacgccctgcccccatctggacgagtgtggaggtggtgctgcgcttgttcggcgtggacttcctgtgctccgttgcattatcagtgtgcctgttggtactctgtctgttctgattgttgtccaccgtggcctggtgcttgggctctctgctgcgcggtgttcatcttctcgggctggtgccgtggacgtctccctcggctccggcagcggctctagtatctccgtcaacctcccgccgtgcaggcccggacgtgggcggcggaattggttttctgggacagaacttcgtgttcgctga

SEQ ID NO: 10681 - DNA, 1173 bp, Zea mays
  Peptide Sequence Number=SeqID_54056
atgtcggagctcacccctgcgccctccagtaagccactgcgcgccctctgctcggctgcagtgcctgctcctcttcggggcccgctccctctgcggcatactcgacgcatcgcgagatcggggccgaggaaacggggcccactcctcccggccgcaccatcgtcgccgtccccctcctcgctcccgctccacctcaccgtgccgatccccgcgccgtggcggtcgcacccgccgccgcactccttcctctccctcgccgcgcaggcgctggtgctcgccatatccttgcacccgctccccacgctcgcggccttcctggcctcccaccgcgacgagcttctccgcgcggacatcacatccctgatcaaggcgctggagctctcggggcattgggagtgggcgctcgcgctcctccggtgggccgccaaggaggacatgcatgtgatgcgatgccccttgtgcaaacggaacagctgccgaggtgagcaggtggatggtgctggaatggggaatgtgtcctgccctgccactgccggtggaattggtggttcagggaacaagcagatcctggacgcacgccactctgagctgttcctggagaaggcatactgggacgagaccttggagtacgagagcctcggcgagcactttcaggacgaggaggtggccgccgccttatgtgccgttgtcaacacgaagcagttcgcttccccatccactacatctgtcctcaacagggcccgggccggaaagcacgacgacccgatgaccaggcactgtgcttccgcaaccgccgctgccatccacaccaacctccagagcaacggagataaatggggtaccccttactacagcatgaagatacggtgcccagcacgcaaaccacgggagcagaatccttctcctgccacatcctcatcgcccccgatgccaaacctggaacttcctaagaggcttcttcttacatacaaacctgaagaatcggaggacattcctgagcctgcttctgttgaagaggaaaatgcaccagttgaagagcctgttctggtaccacctgttactgaagttgtttcacctcccaagaccgaggtggccgatattggtgaatcactgtgtaaatatctcccgctaacaaatcctgactgcaacagacatttaggccaaaaatcttaa

SEQ ID NO: 10682 - DNA, 273 bp, Zea mays
  Peptide Sequence Number=SeqID_54057
atgcccgcccacgcgcccagctctcttcttagagccccgctagtgccctcgcgctcgccccccccacttaatttcacgcagcaccgccctctctcgcgctctgcccacaccgccagcagccgccggagacccgcgcccgcgttcccgaccacccaactcgccggagaccgcgccaatcctccccgagacaacaagcagtccgaggttcctaagtgtgttgttggagacctccctgaacaacaacctggtgaaggcaagtgtcctctgacctaa

SEQ ID NO: 10683 - DNA, 351 bp, Zea mays
  Peptide Sequence Number=SeqID_54058
atgcaggactttgaggagttccaggagtggcccgtatcaggtgcaccgcacgtcagtccagtcatctggagagacttcatcgtcacctgcacgaggagcaggagcgccgacgcccaggagcaggagcagcaggactcttccccctcgcctaagagggaggtggagtctgagagggccgccttcccctgcacctcagccagagatgccccctgcactgctatagggcatctcggctgcaggaggagaccccgatggagatggagacgacgacgacgccggtggcagttcgagccacagcacggagctctcggaggagccggagttggaggaatggatcgtgtaacaccctga

SEQ ID NO: 10684 - DNA, 777 bp, Zea mays
  Peptide Sequence Number=SeqID_54059
atggcgccctcttcccctctgcccaactccggcaaccctgaagccagcctagctcgcgcctgcctcaactccggcgacctcaccgccgcggagaggagcgacgccgcttcgcgcacatctgtttccccgatcgctagacccatcactcgtgacgctgctcgcgggtgtcacttccacgacgctctcgataccctgttgcgtcgggccttcgaccgacacacctggtctatcgagtaccgttgtgtagtctaccagcatcgtcgcgggctatacccggaccagtgggaggctacttgtttggtgcgccatccggacgatgatctccggggtgtagaggccttcttagagcactattctatcactgagagggacactgccgaggcagccatgcagaatgcagcacgacgagcactttctcagtattgcttgttgttcagcggggtagctgatggccttgacctgaagtactaccctcgttgttcaaccgacagtgctagaggtgtgattgtctcgccagttggtgagggcaatcccaggctgagcaacatggtcaacttggtcgccatgctcaacacagagttggaccacgcccttgacgagttgggcaaggtttgggtagaggttgcggaattacgtgatgagtgcgctgcacgccactatctggatgttggttctcccgcccctatcgagattcagcacccttaccgttcaccgccccgtggtcgcttcgactatggtaccccagactgcaggacccagatagatttggatccctag

SEQ ID NO: 10685 - DNA, 156 bp, Zea mays
  Peptide Sequence Number=SeqID_54060
atgtatggtttacaggtggtgatgaggaggatggttatgattatgactatggtaatggttgcctttggtgcaatctatgctcaggtaaagaagaaggagaacggtgtcgaggcggatcttcgggagttcgaggacgtcgatgagttcgaggattag

SEQ ID NO: 10686 - DNA, 273 bp, Zea mays
  Peptide Sequence Number=SeqID_54061
atgattactaaatggaaactagtgcttgtgttgctactaacatttctcttgagttcaattatgaaaatctacaagaaagaaagtgcacaagcctcatgggttgatcttcacccaaaggaagaaaggaaaaagaagccactacaaagggaggactctcaaatgaaagaggagaacatcaagaacaacaccacctacttctacgaaacaatcaatggtgtggttggggagcctttttatcttgattatgttgagactattgctttatctcagtaa

SEQ ID NO: 10687 - DNA, 1365 bp, Zea mays
  Peptide Sequence Number=SeqID_54062
atggcggcatcatcggcggacgagctggtggcagcagccgccggcatcatctgctcgatgcgcggggccgacctcgccgccggctgggcgccgccgcggcgcaagcagcaggagccggcgcgggagggagcgctgatctggccggcggtggcgcgggggaagcggtcgcgccgccgctcgccgtccgcgggcttctcctcctcgggcaaggcgcggtgggggggcagggccagcccggcgtcgaccctcgactacagcggcggctccggctccggctccgggtccgctcccgcgtctaccagcggcggcgaggacggtggcttctgctccctgccccaccgacccatccacacttccatacggacctgttacgctgctcgcctcgacctcgacatcgtctctactatttcgagccctacaagttttcttgacgcggacgccaagttcgccacttcgccagaggccagagctgcccctggggtcccgatcccgacggagcgcttctttttaccgggggcagtccggtcattttcggccgtccttttttatcccccggcgcaattgctcgtgggagccaccgaccggccgcagctcatcttcccgaccccgccgcttccacgcctcgccggccagcgaccgcggaagaaactgcgtgtcgtgtggctggtgagctggcgcgagggagacgagaaaactgtttccccgacgcgctttgctgttccatccgaaaagccactaaaagcagatccagtggtgctttcagatttgcactacgggaaaaggctgccggagatgcagcagctggtgcggtcactcgccgtggacaacgagaggctccgcgaggtcacagtcacacaccgctcctcatctcaggagatgcgggatctacagggagcttgcgaggcgctgtccaaggaaaacgacgagcttgagacaaggttaggccaatcgagccgtcagagcgaggtcgcttcgaaggagcagagaggaaagggtctgcttgatccgcggcagcccgcacgggacagcttcgcgctacctgatctcaacctcccaccacaggactctgccgatgtctcaacagtttcattgatcgctccagatcgaaaaccacactattcacccagttccgactactgtgccaaccaccagggtaaaactaacgacagtaagtcacgacctcccccgaattcagcctcgggcgcaacagggagctccgcctcgcccgaccccaggcctcggcctcgggggaaggtctccgcctcgcccgacctcagcctcggcctcaggagaagtcgctacctcgcccaacctcggcctcagatcgactacgctacaggggatacatcattaccctacctctag

SEQ ID NO: 10688 - DNA, 456 bp, Zea mays
  Peptide Sequence Number=SeqID_54063
atgggcaagagtaacaagcgcaagcgcgaaccgactcctccatcggaggatttcggtgactcggaatactcggtggaggagttctcctctgagtccgagggatctccggctcccgtctctcccccggcgtcgtccgatgactcggacgactcccaggggatagccgcggaagtctggacatacatccgggccgtcgagcgctccgggctcgagggctcggatgagtcggagtactcctcggatggggaggactcggacggcggcggcgaggacgaggacgacgacgacgacgacggcgacgacggtggcgacggcgacggcagcggcagcggcaggggcagcggcgacggcagcaggaacggtgacggcggcggcagcaggggcagcaccaaaggcggcagcagcaagggcagcaccaagggcggcggcggtggcaggggcagggccagtggctag

SEQ ID NO: 10689 - DNA, 57 bp, Zea mays
  Peptide Sequence Number=SeqID_54064
atgccgggagaagacttggtcgactacgaggcctctccagaacgcccagaaaattag

SEQ ID NO: 10690 - DNA, 330 bp, Zea mays
  Peptide Sequence Number=SeqID_54065
atggcgcttcctgttgacgtggcgggcctgtgccctaggtcggacgacgtggaggttcctctgaagccgaggtcgagtctgtcttccatggccgaggccgagcccgagcccctgggtcgggcgacgtggaggtcgttcggcagaggccagggcggagtccgagccctggggtcgggcggagcggagttcgccgtctttcggggcttagcccgagtccgagccctgggtcgggcggagcggacatttgagaacaagtccccaacattggcgcccacctccggtgaactcactcccacttcgagtcttcgtgaacaccttcggaagctatag

SEQ ID NO: 10691 - DNA, 414 bp, Zea mays
  Peptide Sequence Number=SeqID_54066
atggccctagactcactgcatgagttattcgacatatgcttgaaagggaaatgtgcccttgggccatttctaagtattttggtgattaagtgcaaacacaagtgctttagtgtgaatctatgcccatggatgaacaaagtgcaaatcacaagtaaagatctgcaacggtcggctgcgcctgttaaggaaagaaatcgggcaccggacagtgtccggtgtgcaccggactgtccggtgcacccggcgacagaaggcaaggatggccttccagatttgttctcaacggctcctagctgccttggggctataaaagggacccctaggcgcatggaggaggacaccaagcattccttgagcactcttgatcactcacacatcaatcttacgcacttgttcgacattctagtgatttga

SEQ ID NO: 10692 - DNA, 564 bp, Zea mays
  Peptide Sequence Number=SeqID_54067
atgcacaagagcaaggggaagttctccggcgtcctgcacaagggcttcaagcctgacaagtgcaagacgtcgccgcggatggcggtgggccggatcaagctgctgcggaatcgcaaggaggtgcaggtacgccagatgcgtcgcgaggtcgcgcagctcctcgaggccaaccaggacatgaccgcgcgcatcaggaaccaatgtcagctgattatacttgttccatatttactcttgcatgcctgtctctgcaaacatgtgtatcttgctggaacggtcatccctagagcagtgcaccatatctttgaaatacttgcagcacggaaggctgattatagcattgaaggcaattcacagagtgggttccagattgttgggtttgaggtcgtgccttgcagcgtaagacatgatcctgagtccatgtccaagctcaagatgtatgacaaggttggctctgtgaattgcccgtttgctgccctgggatttctctcacctgcttccaggggaatgctcctgaccggaataatcattctctacctcttccttggtatcattgctggataa

SEQ ID NO: 10693 - DNA, 303 bp, Zea mays
  Peptide Sequence Number=SeqID_54068
atgaccagcaggaagaggacaatgaacaggaagccaaagacagtagaatcttcccaaccaaatgttggaaaggataaagaagagctcaatgaagagacacgtgtgcctagcaagcctccaattagtgtgagtggcacaaagatgcagaaccatagggccaggagggtgaagaacagtgagatgggtagagctcaagtgctcttcttgcccccacagaatggagttaagcacattgaggatgatgaacacaatcctagggaagaagcaggcagtcagccaagcaacagatttccacccttctga

SEQ ID NO: 10694 - DNA, 1587 bp, Zea mays
  Peptide Sequence Number=SeqID_54069
atggaccgcaagccccacgaaccgtcgcacatcccgtgctccttgcctcctccacgtccgcaccaaacacccatcgtcttcgcctccctccactccgagcccatgatgtcttatcagtacgcgcgctacttccacgaggtggacgaggagctgatgcacaacctgatctatgtcaacgtcgagggcgtcacgctgggcatgcacgatgtgttgccacgcatggtcgagactcgagagtcccataggaaactccgtttcgcccgaccccagggctcggactcgggctcagccccggaagacgacgaactccgcctcgcccgaccccagggctcggactcgggctcagccccggaagacgacgaactccgcttcgcccgaccccagggctcggactcgggctcagccccggaagacgacgaactctgcttcgcccgaccccagggctcggactcgggctcagccccggaagacaacgaactccgtttcgcccgaccccagggctcggactcagccctggccccagcagacggtctccgcctcacccgacccaggggctcggactcgaccttggccttggaagacagactcgacctcgacctcggaggagcctccacctcgcccaacctagggctcggaccgaccacgtcacaggaggcgccatcattaccctaccccaagctgactcaggctacggggaacaagaccagcgtctcatctggctcgctccgctatacgacgacgggactcggcctggcggtccggcgatcagagttgccttccgctaccattgcgctgggcggtgggtggggtgggttcggcgccgagtcggagcacatcggtttgggtgcacgatcgacgcgcatgtgcggtcggccgctttcgcgttgccggccgctgctgccccaacctccactccccatctcgcagtccgccactgcttcgtcttctcgtccgatccccttcgagccccgcctccacacgaacaccccttcggccgttgttgaccaacctcacgcgtcctcctccggtacgtggccaccagttacaatatgctcaactgttgcgagtggaagcaacccgactgttgctgatcaaactgagggcgtcagccattatgttgcttcaaagggtttcatggtttgcgtacgcacagaggggtcgacgttcgagcatcaacggtcggcaaggcgacacaacaaaagagcaacagcaggccgaccttcttgcttcttcgattgtccggacgtcgaggagccccgccagggaggccggtggcagcgcacgcgtctgcgcaggtcatggtggccgcgcccgcagaagaatagaaggggtaacggcgaatccggccgggaaggccacgacagcgacggatccagcctggaagacggcgatccggccaaagggacgatggatctagccgggaagatcgcaaaaacggtgaatctggccgggaaagccgcgacagcgacggatccaacgaaggcagggaaggggaagggcgacggggcggatccagtcgggcaggggccttcatcgagcctcgcaaggggtgtcgacgccatcgacaaaaaaaactcgaaaggttag

SEQ ID NO: 10695 - DNA, 576 bp, Zea mays
  Peptide Sequence Number=SeqID_54070
atgtcggtagcgaggcctctctgttttactcacgcgttctctgcccaaacggcggcgccgacctcaatctggtgtgctatggcccgatatgtggcgacggcgtggtgtcgtgtgggtgggaatccacttcgagctggtgaggtgtttaagatgtcagaagcacttcagaaagataaggaaattggtgaagaggaagaggaagaggagtatgtattgttagagttggacaattgtctttattcagacatatcgcctggtgctcagttcgtactctctggtttggatacattgacgcctaccttgatagtaggtgacaatctgaagatggtcggggaatatgatgaaactattggcacctgctatctattttctgaaagtgaaactgaaccaaaacctgcaagtgatgagctggcaccttctaaagaaaacacagaaacaccgcttaacagcagtaaggaagcgcccttgaaggaggtgaaccatctggccagcgttcaaaagatcctcaaatttaagccaatcaatgtggagcactcgcagcatcgagcatatcagcacaaggacaaggaactttag

SEQ ID NO: 10696 - DNA, 1183 bp, Zea mays
  Peptide Sequence Number=SeqID_54071
gcagagcgaggagctcagttacagattccttctgatcagattgcctatcgagttcgtcgcctcgcctctcgtcctcgctcctaccactcccaccactgctaccactccaccacccactttgcctgctcccgtcactcctgcgccatccaccacctcagccatacccaccacctccactactccatcttccactgctcctcctcccgctcccctttccgctcctcctatcccacctgctcgcttccgggagcgcaatgagactgaggtgcgacctctggctgcggatcccagactgtttgatcttcagcgtgctacagcagcacaggtacatcggttcagacacgtacccgtggagacttggctaccggctcagagggaccctactgcagttgatctcttcaacacctatattcaggagtccttcttcagagctcagatgtctgcacagattgctctacgagtgcaccgacttctggaccttcctgcatttctgctggccgccgatgctgactctgaggtacacctctcctatctgcctggacttctcactctgttgactaccagcggcagatatgttgaggaatgggtccgagttttctatgcttcagtatggatagaccctgatcaccagtggatgaggttccgctttgagcgagaggatgttaccattcatgccagccagatttgccagttgtttggattcaacgagtcgtcaactcgtcttcacaacttgtgctatggcacctctgatcctcctcgtcgccctcacggcggagttgctcctggtacaacccacgtcgcggctttgttccgccacccttctcagatgggttgcgacgttctctggcagacttcaccacaggaggctgccactcatattcagctttggctacttggtgccctggtctctcactccgagtttgatgttgtggatttcctcatttgtgagatcgaagacaccgtactggatggtctacatgcttgtcgacagctaccgtatgctcactatctttgccacatctttgctcagttgattcggccaccacagttccagggtactcttgaggcctctcgcctcctctttgggtcctaccgtccagctctagaggatcctgtgccggcacctgctccagtgattgatactcaggccgaggataccacctttcaccagttcgagacttag

SEQ ID NO: 10697 - DNA, 288 bp, Zea mays
  Peptide Sequence Number=SeqID_54072
atgaccgggaaaaagaccacggcttcctctgacggcggcactccaaagaaagccaaggtggtggtggaggatgaggaagaggcggggttggaggatgaggaagaggcgactgtgacactatccgtggagaaggacacgctggagtgcgacatctgctgcctacccttccagtccgaagttttcatggcaagtcagattaccatgcattgcaagaacgggcattctggatgtgcaaagtgctgcatccgcacggacgaaagtcgtgtaaaattacatgacatgtcctaa

SEQ ID NO: 10698 - DNA, 105 bp, Zea mays
  Peptide Sequence Number=SeqID_54073
atggacatgggaatggctaaggtgtcgaggaggaggagcaagagcgtccacaacaggaaggagtactcggctgtgattccatctcgggttccaagaccaggataa

SEQ ID NO: 10699 - DNA, 504 bp, Zea mays
  Peptide Sequence Number=SeqID_54074
gcggcggaggtcgtcggtggcacctgctccggccaaaccacggcggtggggttcaatgaaagtgtacgaggagctccactgggtgatgtagaggctatgcacgcaaggaatcgagaaatggttcagtgttttacccggtccacgtgctctggcgggttcacgaactccgacgagcgtgattgcactattctggtggggctggtcctcagctcaagctcgggcaagcttcacgacctcttgaggaagctatccgagggctcggatcgagcggaggtgggcgtgaatggtttggccacggcgggcgtcctcgggcggctctggtgggtcgcggggaggtctctggagctgcgggctggctcgggaaggctaggcacagtgcggaggggtgactgggaaggcgtgctctgggcgcgctcccgagtgcctgcccacgtcgaacacgtggtggggtccttaggcgccattttgttaattgggccctttggttttgaggtctggaagaag

SEQ ID NO: 10700 - DNA, 696 bp, Zea mays
  Peptide Sequence Number=SeqID_54075
atggctgaaaggtaccaactcccgcggagttgcgttcccccaacgacgaggcggaaagacgacggatctcccccatccgggggcctggaaggtggaaagacacgatgcataagggagcgtgaagacatggtcgccctccaagggggtcaccctccttttaagggcggttctccctactcgcatccccagccgtcacgggctaagtcttctccaacacactccaaggtcctcccctacggcgcgggggctgggtcccacacgtcatgcaagccaactcagggcagaagaagccaaaccaccgcgcacggtgcatacaaccgcccagcggttacaagcgaccctccacttttgcccagaccaatgggcgaaagggtgggcagccatgcaggcggcatgcaaccgcgccaagtgggcgcgctcctccgactcccaacatgcccggcatggaggcccaggcccacgcgtcatgcaaccgggaccgggaaagagggataccccgaaaaggatccttccccgagaaggaaccaggctccgagcccccctattgatcagaggtttgaaggctggccccccggaagggttcaacagccgcctcagatcacgtgggccctacacccactactggtcagaggttcgaaggccggcccctcgaaagggttcaacgaccgcctcaggctactcgggctccgcgcctaa

SEQ ID NO: 10701 - DNA, 183 bp, Zea mays
  Peptide Sequence Number=SeqID_54076
atgcaggcggcatgcaaccgtgccaagtgggcgcgccccttcgactccaacgagcctagcatggaggtccaggcccacgcgtcatgcaaccggcgcgccggttgctatgtggaccgggaaagggggataccccgaaaaggacccttctccatgaaggaaacatgctccgagcctccctactga

SEQ ID NO: 10702 - DNA, 489 bp, Zea mays
  Peptide Sequence Number=SeqID_54077
atgcaggtgtgggttgagccgtcggcgaccaaggacatgatggacaaggtggagcaggtacgacaacggaggaaggccgagaagtccctgctcagcttgcaacgaaggttggctacgacaagcgcagaagaattggagaatagtggctgtcagaagacatatgcgagccctcgaaaaagtgaatgtgaaaatcaacgatttacaagaaaaaatcacgttgaacaacaactctcaacaaaagtggatatatcctctgagaaggaagttgattgtgcacaacaggagactattgatttgaaatctaaacttcagtccaaggaagctaaaattgaaaagatgaaatatgagcatctgacgagggaggctgctttgaccgagaatgagcttcttgaagaggagtacaagaaaaagttagacgaggcaaataaggaactatctctggagaatgatctagcaggcatcgcatttgcgcctagaagaagcaggtga

SEQ ID NO: 10703 - DNA, 342 bp, Zea mays
  Peptide Sequence Number=SeqID_54078
atggcaatttcacccgcgggttcgggccccgtcgggttttgcacccgtcggagtctgatgtctgaccaaggtgcttcgaggccgagcaggagcagtcgtcaagttcccacaaagagcagtgctgtggttgcaggaggttcctcaagtgcagctacaccgacgagtgctgctgcaaatgaaatgccatcttcaagtgttcaagctccaccatcagaaggtacagaacatgtggtcgtaaatgatgatgatgataatgtacaagttggatgcaaaaggaagctgaaatctgatgtgtggcttgaatttgaacaagatgaagcagattctaccatagttgattga

SEQ ID NO: 10704 - DNA, 1314 bp, Zea mays
  Peptide Sequence Number=SeqID_54079
atggcgcagccgaccgttggccgccagagagccgttggcgcaccggacatgtccggtgcacaccggacagtccggtgcccccttctagccgttggctcggccacgtgtcccgcgcagatcgcgcggccgaccgttggctcaccgaacagtccggtgtacaccggacagtccggcttctttccatcctcctacaagaggacatgtatcgaaattctgtcaagcatagcagatgtcattggacgcattacagctctttctgatgcaacaccatttcatactagcagtggaatagtttgcatgaaaaggctgatccaccttgtggatctaaggggaaataaaattgaggtatcactatggagacgtagagcagaggaattcccaggacaacaagtctttaaagccagtgaaatgaatcatgtaattgttatctttgttggaacatcagtcaaatcctatcgtggatcaccaccttttcttagtggcacagctgcatgccgctggtatataaatcttccggagatccatgaaatcaatactttctatgcaagtatcggtgaacaataccaatcaatccaaaagcttcatattcagacaatgaacgagatgcagaacaagattgagcaaaagacatttttagaaatgaaattagtcgacccatttgatgacatgagcaaacgtttcgaatgcaccatgattgtaacaagaattgctgacaatgagccctggtataaaatatctctatatgccactgatggcacctatgagctagaattcgtgctctttgatgagagagcgacatcacttattgggaaaaccgcagagaaattactgagacaaagcaacaaatctgaattgccggaagagattaaagcaattgtgggtgagaaattgactgttgtggccaagttttttccaggaaaaagtattaaaaagagaggacctaacaaggtcaacaaagatccaacatttgatattcttagtatcaaaaagaggcatggaaaagacctactccttttcgtattcaaaaaagaagagcctgttgttctccacagcgctagctcatctcaacttccaaagctaccacccctagtaccaatagagccaaagacacaagatatacagacctctggttcagaagcagcatcaccacatgaattacaacttatggagattgatcagactagttgctttgacaacgtcagagtatcatacaagagaaatttcaatgcaattgatgactccgacaaggaagaaacacatggtgctgaccaactttcagtctttgcaaaaagaccaaagatgaagaacaattag

SEQ ID NO: 10705 - DNA, 900 bp, Zea mays
  Peptide Sequence Number=SeqID_54080
atgggtgcgcggacagttcggtcccctagcgcggaccgtccgccttctagcagatctccctattgtggatttaggggtctaaagaagaagctcgtaggacggtttgtgtccaaacgccgtcgtgcagatgattctgattataaccctgccacagactccgaggcccaatcatcagctgggggcagtgtctctttggacgctgaagatgctccacactcacatccagactatcctattgacatcatagggtggacatatcccaggatgaaattctccatggctgaatattcctctaggagtactgttgatcaattttctcttccaaatgacacaaacaatcagtactttcatactcagttacaatttgatggtcaaacagttatggaaggattacttgctaaattccaggcatgtggcttatatgagtttatgggacaatggactgacttcaatgaactgactgtcaagcagtttcttgctactgctgaaattaatattgaagatcagttgattgtctggatgactgggtttaagtgctatgtggctacctttgatgaattttccattgctaacagtttgaattatgacatgatctctcggggagtagatctttacactgaggaccagttgaagattttgcccaatattatgaacctgccaggctggcacaagctccagacacatatggatggtcaatttcaaggcatgatgtcacatgtcgatgatcgctttgatcacatgcaatctacctttgatggccaattctctgatttgcatgatcgattttctgttgttgactctcagttggatggagttcattcacagtttactgatcttcgttctcatattcaaactactatacatgatccaattatgagtcgaatgaacaacatgcagtaa

SEQ ID NO: 10706 - DNA, 2103 bp, Zea mays
  Peptide Sequence Number=SeqID_54081
atgagggactcctttgtgcgtgatgcggaggacttggcggtgcggctcgtgggacgttacgtgccgaggacggaaggccagcgcagctttgatatccgcgggtcaaatgaccgtttgaacagggtcttcgaattaaatcaattgccgtacgacggctatcccggtcaagacgaagcggaccgccgtgggaagaaaccggcggtggagactagagacgaccctgcgccggcggccgccccttcctcgaaaaagagaaaattaggtactgcgatgggaggacttggggtgtctgacagttttgctagagagttgatgaggacgtgtgcggccccgggggaaaggatgtcttcgcccgagctccgggagtcttcagctcggatgctgagggttaccgggggctgctggcctagaaatgttcctatcccctgcgcggctgaggaggactgttttacatctcgtatggttcatcggtggagagtttttccttacgggcgaaatatcggtgctgttgtgtgggcagtgatggacaaggatcgccaagggtcggacgaggggcagcttgctatggttgcgcctggtgcggagaccgcgacggcggccatagtgccgagggcgaggggcgaggcccttggcgccggaggcgaggtgtcggccctcgcggtggttagggacgaggcgagcgcagcgacccgccggctgaagggagtgacggaggcgctgagtcaggcgacggaggcgctgagtcaggtggctgacttcgccagccgtactgcatcgggggccctcacggcagctgtgtccgccgaagtcgagagacttcggacacaacatgctgatgttgtccgtgagaaatcggcctccgacagcaagtgccgtaagctgacggacagggtggccgccctggagagggagaaggccgacctccggtgccaactggcggcggagaggagggaggcaaacgaggccatcgccaaggagcaggctgcgcaggcggaggccaaactggcgcgggcggagggcaatcttgccaaggagctcgccgaacatctgcaggagcggcttaccgccctggagagccgcgcgaagggggccgaagccgcgatgcgtgcggaggctgaacggacgcgcgctcagcttacggatacatatcgcgagctgggcgcgcggaccggcgacttcgaggtgccggaccgagagcccgggctccgctgtctgcaatgggtgcaggaggagctgcaggaactccccactgttgtgggggggttgatgtcgtacgcctccctggtcacctgcgagggggcgatgaacgcactctcccgcgaagggtgccgacacttcgaggtcttcgaccaggcagatgaagattttgagcgagatgtctataaggtcgaagaccctgttgtgaaggaatctgccggggccctctacgaccggatgtggggtctgcatggttgtgaggtggtcagggagcgggccgagactgcgagggctcaggcggagcgcggcgagcgggtggacgacttcggggctctgaacagcgcgctgccagacccggagccgacccttgcggaggctgtgactggggttgctctggagccaaccctggagaccgcagcgatcacgacggctgcctccacatccgctgcggccggcgaagacctgcccccgaaggtggccgaaggcgcccctgatgcccccgcagctgctgtgccgagtgctgaagatcccgcggtggtggcggcggaaacaacggcggaggctgcggcgggaccaacggcggagccaacggcggaggctcccgcagcgtcagggccttcgcaggttcaagattttgggcctgcgcacgcaaccgctattactgagtttttggcggcttcgaccgcggaaggtgggaatgaatatggtgggtttgcatctgagttttttgattttaccgactccgggagctcggttgagtggactgaggagtcgtcggaggacttggattattttgcggccttggacgtggctgcggcggaggcttcgccacacgccgcggacgcgccagacgtgccaggccctagcaccgggcgccgccgacgaaggggtggttgcaaaacatag

SEQ ID NO: 10707 - DNA, 207 bp, Zea mays
  Peptide Sequence Number=SeqID_54082
atgggccacacggagcttactgtccagataatgatagagatgaccagggaaaaacaagaagggaatatggtagagaagaacaatttctacaggaaaaagggtgaaggccacatcgacaagcagtgggattcggactgtagctcctctaactacgacgatgaaggcctcgccacaatcaccttcaacaatcttctctctttcctgtag

SEQ ID NO: 10708 - DNA, 687 bp, Zea mays
  Peptide Sequence Number=SeqID_54083
atgccgtggctgcgcgagagtgagaagaacagggccaatgagatgggcgtgaactactgctgcgaaatcgccgcgatgtggacggatctagcagacataggcgcgtgcacagctgagaaaaaggaggaggtagttgaaagagatgacagggtggccctggcgccgcctgccagtggaatatatggacatgacacaataaatgccgtgggggcacatcatgtcagaagggcgaacaagcggcgtgtcctttccgcaataaatgcggaggccgcgcggctcagagccattatgtcatgctccatccgctggcctacgtcacgggcaataagccatgtggccgcattagaccctcgaccgagcgggagcagaggtgctccgaatagagcctggacacgcgtcaatactggacccatgcccaggggccctgcgccttctgggcccgatggcgttatctccgagaatgccaccttaactgctcacgagatacccctggggctgttctccgcgtggctaagggtagccgcgcaggcatcgtgccttcatatcgtagtaagggttactgccggcccgcctatggtcacgccgactgccacgcctgcccctgtggccgactggcccgtgacctccgtacttaatgtctttgttgggccatgcgcggggtgcctcgagtcgctgcatcggttttga

SEQ ID NO: 10709 - DNA, 780 bp, Zea mays
  Peptide Sequence Number=SeqID_54084
atggcgaggctgccgctacgccgcgcagattacgccggtgctgctgcgggcatgaacgacgatggcaatgacaacacactggggtcacgcaggatgcgcacgaggttgcgccgggcatgcgcaagcgagtcgcgggcacgccaaccacatgcaggccgtgccgagggcacacacacgggccgcaccggacgcgagcgtgaggccacgacgggggcacacggaagggtcgcgccggacgcgaccgcgaggccgcgctgggggcacacgcacgggccgcgccggagcacagcctggctgcgagcagcgggtcgcgctgacgtgcgcgccaggtgcaccaagcgagccgcgccggctgcgcgccacgctggccgcatgagtcgcacgaagcaggccgcgccgggcacgcagggccgcgcgcaacggctgcacctgcaagctgcacggccgagtcatgcgcaacagctgcgcaggccgcgcacagacgggagctcgggctgcatgggcgagccgcgcgcaacagggagggccggcgagatgtcgtggctgcgcaagagagggaagaacggggccaatgagatgggcgtgaactactgttgcgaaatcaccgcgacgttgacggatctagcagacataggcacgtgcacagctgagaaaaaggaggaggtagttgaaagagatgacaggtggggccaaattgcagcggcactaggccagcgacgctcggctgggcgttgcccacgcgcgcgcgggccgctggggcacaggagcgtgagcgtctag

SEQ ID NO: 10710 - DNA, 351 bp, Zea mays
  Peptide Sequence Number=SeqID_54085
atggctgcagggagcctctgcgcgcggggaagaagaatgccctgcctggcgtgcgtgaggaggctggctgctgctgccagtttgttgttgaaggatgtggatggttttgggacacaacaacaggaggagatccctccaacaaccttgcatatcccaatagcattctcccctaagacggcacatgttgctccacacaactgctcattacaattgttagacatggagcattgttcccctcctaagagggcacggccgccttggcttgctggcatggtcgaagcaagaagagctaacaatattggaacaatgagaacaacaagagtcttcttagagaacgccatggagctctag

SEQ ID NO: 10711 - DNA, 162 bp, Zea mays
  Peptide Sequence Number=SeqID_54086
atggggctcggtgtatgcggctcgctctgccaaggtggcaatgagattgatggttctgattacgattatggtattggttgtcagcattgcaaccactgctcaggagaagatgaagctgtggaaggagacttccaggagttccaagattacgacgagttctag

SEQ ID NO: 10712 - DNA, 474 bp, Zea mays
  Peptide Sequence Number=SeqID_54087
atggcattcctcagcacgaacgcgttgatgagcgtccccatcacggcggcagccgctcctcgccaccgccgcagcttggtcgtggtaagggccgcggccgtcaaatctaacgagcacctgcaggaaagagcaagcatccgtggcccgacggagctcgtgggcgtcgcccgagcccatggtgttgttggcccgcccaccgctgctgtcactggatcatcccgtagccatctgcagagaacgtcaggacccatatgtccagggtgtcggcgaatgggctgtcaggagcacaacaggcagactggtgagagcttgcagtcccgaggtggtcagtggcatggaacagtggtcgtcggcatcaactcgagctcacctcggactgaagattcaacgtcgtcttacccagcagtttgtgttttaatccgttgccaaactccagcaaaaaatcgccagctcatgtccttcaagtctatttga

SEQ ID NO: 10713 - DNA, 309 bp, Zea mays
  Peptide Sequence Number=SeqID_54088
atggcgcaccgccgtgggagcttcgctccgccaccggtgtccgcccagttggggcggagatcgtgcaccgtgcgatgcggcgcgggcgatcctagattcaagggcctacacagtggatcatttattcgctatgcgcgatctaatcctcgccatcaggatctgatcggacggctgagcaccctcgataccccttcggttgtcacattttcacatgagcccctaaaattattagaaaccaacccgccgtcctggcggctgagatctgtgtcttgggacttttcgcgcattaacccctgcactttcctgtaa

SEQ ID NO: 10714 - DNA, 105 bp, Zea mays
  Peptide Sequence Number=SeqID_54089
atgcctacggccctaagcggcgacggcgggactccaggcttccgtggcgggtggcggcgtgatttctgtgcagggaaaaggcaggcaaatgcttttcatatataa

SEQ ID NO: 10715 - DNA, 126 bp, Zea mays
  Peptide Sequence Number=SeqID_54090
atgaacgtatgtgagctcactcttgctgtctcacatcccccacaggtcaagaacaggttcaaggctattcttggtatggtaagagcagcaacaataggaaccggtgtaactatcgctaaggcgtag

SEQ ID NO: 10716 - DNA, 705 bp, Zea mays
  Peptide Sequence Number=SeqID_54091
atgccgtcgtggcagtcggagaggttttggcaccctgttcatgtgatgtcgtggccgtcggaggagtgcttgagccgtgtggaacccgaggtcgggcgaggcggaggctcctccgaggtcgaggtcgagtctgggctcgagggtcgggcgaggcggagatcgacgtccgaagtcgaggctgagtccgagccctggggtcgggcgaggcggagttcgtcttccgaggtcaaggctgagtccgagccctggggtcgggtgaggcggagtccgtcttccgaggtcgaggctgagtccgagccctggggtcgggcgaggcggagtccatcgtctggcgtcgagtttgagcccgagccctggggtcgggcgaggcggagcttcctatggcgcctgaggctggacttagctgctgtcagcctcactctgtcgagtggcacagcagtcggagcggggcaggcggcgctgttttcccgtcagcttcgtgctgatgggggttaccagctgagattaggagtcttgggggtacccctaattatggtccccgacacccctagtcatctcacgatacattggctgcagggcagcccctggcgctgttgccctcttcggtggcatgacgaaggcgaacgcttgccaaaggttgtggaagtgagttcaccggaggtgggcgctaatgttggtcacttgttcttaaatgttgtgaattaa

SEQ ID NO: 10717 - DNA, 297 bp, Zea mays
  Peptide Sequence Number=SeqID_54092
atgcacccgcgctcgggacgcatcaagggctgggtaagggcgccggcgtccagcctccctaccgtgccagctacccgcctgtggaggtcatcgacggagagggggaccgaggacatctgcgaaccctccaagtcgacccccgacatcatctccgaaagcagcaaccgccgctctgtcaagggaagcaccctccggcgatggatggcggcgaccacccccgcggcgggaccgggaaaggggatgctccgaaagggatccttctccgcgaaggaagcgggccccgagtcctcctactga

SEQ ID NO: 10718 - DNA, 747 bp, Zea mays
  Peptide Sequence Number=SeqID_54093
atggagcagcgtcccgggctggagaggttgctggagactacccatctggagcttgacgggaagctgttcgtcaacacgcagcaggcccctacctggcgcgccaactgtcgacgtttcgacccggggggtccctggaccgacgatagggggttacaagcatccgcgagagagggagagagcctgtccgacagcctgtcctcccgtgcggccacctccttctacgagggccctggaccttccttttatagatgtaaggagagggtccagggtaatgatgtaccccattataacgtggtcggtccgagcccaaggtcaggcgaggcggtgactcctccgaggtcgaggctgaggccgagccctggggtcgggcgaggcggagaccgtcttccgaggtcgaggttgagtccgagccctggggtcgggcgaggcggagaccatcttccaaggtcgaggttgagtccgagccctggggtcgggcgaggcggagaccgtcttccgaggtcgaggttgagtccgagccctagggtcgggcgaggcggagactgtcttccgaggtcgaggcggggccgagccccggggtcgggcgaggcggagcttcctatggcgcctgaggctggacttggctgctgtcagcctcaccctagcgggtggcacagcagtcggagcagggcaggcggcgttgttttcttgtcaggtcagtcagtggagaggcgaagtgactacggtcacttcggccctgccgactga

SEQ ID NO: 10719 - DNA, 438 bp, Zea mays
  Peptide Sequence Number=SeqID_54094
atgccgcgtgcgccgtggcaagtggttcggagttggtcggtgtatgggtccacgctgtcagtgggccagatcattgtgggcaacgtggagcgaggaccgaaagatgaaggtcacccggggcccacaggaccccacctgtcagggcgttgtgtcagggggaaaccttcgtggagactgaagaggaaggccaagttcgagggtgttcctcgtccactcttctcgatccgcaatgcgtgcggccgccggagacgccccgccgcggcgtgcgggggggagaagagagatgtggggagggagaaggagagctggggggggaaggagaaggagaaccaggtggctgaggggatcgtacggctgagagggaagttgcagtggctatctagatggaggctgagggaggctgaaatgggcctactaggccttaggtgctcgccttaa

SEQ ID NO: 10720 - DNA, 681 bp, Zea mays
  Peptide Sequence Number=SeqID_54095
atggatcccatgaacgtagacaacggcggctgcggcggccttgacgcgcagatcgagcagctgatgcagtgccgcccgctcgccgagcaggagggcacgcttagggtttctcgccttctcttcggtgcactgtttggttggaagtgtgatccggtgttccggtggtttgggggatatttgaacctcttttggtatctggttaaggccctgtgcgagaaggccaaggagatattgatggaggaaagcaacgttcagcctgtcaagagtccagttacaatatgtggtgatatacatggacaattccatgatcttgtagagcttttccgaattggtgggaagtgtccagacaccaattacttatttatgggggattatgtagatcgtggctactattctgttgagactgtcactctgctagtagcactaaaagtgaggtacccacatcgaattacaatccttcgtggaaaccatgagagtcggcagatcacacaggtgtatggattctatgacgaatgtctacgcaagtatggcaatgcaaatgtatggaagacatttacggatctttttgattattttcctctgacagctctggtgtgtactcttaagactggaaccaccttttttcagttgtatctggagcatctattctatgcatcatcttcccaatatgcagaatcttaa

SEQ ID NO: 10721 - DNA, 115 bp, Zea mays
  Peptide Sequence Number=SeqID_54096
acattgtggtacaggtggttatgagattgatggttttggttatgactatggtgctggcgaagatgaagctgtggaaggagacttccaggagttccaagattacgacgagttctag

SEQ ID NO: 10722 - DNA, 462 bp, Zea mays
  Peptide Sequence Number=SeqID_54097
atggccaggggcatgtcattggcggcgctaccattccgcagaaacctcgagccccgcggcgttattgacggcgacgacgtttggttccagaaccctcctcgcggctcacgccacacctcagtccgccgagaccgccccttgcgctcccggccattcccagacttcgccctcctccgcctccaatgccggcactgcgtcccctcctccctcgcgcttcttcaacgccacccaccactccgtggaccttccaccgcaccctactcctccatgaccagtcccgccgcctactcctgcctcgcgcttcttcgacgccaagcaccaatagaagaagcaataggtgcccttccctccgtcacccacgacgtcgacgccgacgatgtcggcgaccccccccccccccccaacgtcctcatcgagatacagagatctatcggctgcttgagcattctagacgccacatga

SEQ ID NO: 10723 - DNA, 360 bp, Zea mays
  Peptide Sequence Number=SeqID_54098
atggcgagggtttgggataggacgaagcacttcaaagaggtcgcaatgctctcacatggatacaccgagtcagtattttttcctaagaaacaaatcaaccatgtggcacctaaaccactatcagagattgcagaggagcacgatggtttagagagagttttagtgcctatgcaggggattatggataatgtgaaaagtacttcagagctattgactggctctgtgtcattgaggtcagctgaggtggctagatcacctgttggccgaattgtgaagtgtgaggagtttctgaaggctgcaggacctgctatggttagtgtcaaccccaagaaggattcaatttttctttccatcttctga

SEQ ID NO: 10724 - DNA, 213 bp, Zea mays
  Peptide Sequence Number=SeqID_54099
atggctttgaatgtttggatacactcaaggaacatttgtctaagttatagacgttcccaagagaagagccaagtgaagtcgaggaagttgtgcaaaaatggagtttggtttggctattacgagtgcatcggacgaggtccagtggtgcatcagaccaaagtcccagagagcttgttatcagatgcagaggcttgggacgcggacaagggttga

SEQ ID NO: 10725 - DNA, 567 bp, Zea mays
  Peptide Sequence Number=SeqID_54100
atggatcgcgagctcagccccaggggcaatgctccagggagagggagcggcggcgcgtcgtcatcgaagcacaagaacggcggcggcggcaagaagccgatcaaggtgctttacatcgccaaccccatgcgcgtccagaccagcgccgagggtttccgcgccctcgtgcaggagctcaccggccaacacgccgatccctccaagtacagccccggcgaccttgactccggcgctgccgcacagggtctgagccccagggccagggtcgcggacgtttcgtcggaaaccatcgtcgcaagccacagccctggcagtaaggccgcgccgcacggaggggactactacgacgtcgaggaagacgaagatgacgtcttcaggtcgcctcacatgctgctggagaacaattatacggtgttctcgccgccgacgctactatatgaccatcacccgcacagcaagttattttcaatggaaagcatcaaattaacaaaagacaattgcatgaagaaacgtcaaagacatcagattatagccaatggggaacaagagcagcaaccattagttcat

SEQ ID NO: 10726 - DNA, 462 bp, Zea mays
  Peptide Sequence Number=SeqID_54101
atgaagtgcaagtgctcaacatgtgaagatgatggatggaagtgcagaagtggaaaagaaagtgcaagccaaagggacgacatatcgagccgagaaggccgcagcaacggtgaatccggccgggaaggccacgacagcgacagatccaacgaaggcgatgaagggggggggggcgaggcgggtccagccgggcaggggcctgcgccggacctggtaggaagggttgaccccagcgacaggagaagctcaaagttagggggggctgctggcacgggcaggcataacccagtgacgggggcgctggcgagtgagcaccggcgccgcctctgctggggaggcgtccatccaagttccaaggcacaaccgacgacacaacaggaggcgtcttggctacgcgtgcgcgagcagcagcaagggaggccaccggggaagctgctggcggcagctgcagaggctgggtaa

SEQ ID NO: 10727 - DNA, 156 bp, Zea mays
  Peptide Sequence Number=SeqID_54102
atggtgatgatgctacaaggaatttgtctcaaggtggagtttgttgagtttgtgatccaaattctgaagaacgcggccaagttggcgagcgaagtagaggcccgtcgccgggaggcttgggccggagcggatgtgtttggtttgaggtcaaagtag

SEQ ID NO: 10728 - DNA, 315 bp, Zea mays
  Peptide Sequence Number=SeqID_54103
atggccgcgagcttttccttgctgcgactgtctcccaaggacagcgcgcagcagcctccccgtggccatggtctgcaacaagaagtcgcgcgctacatgttcgatgttttgcgcagcagctccgatgtctccgcgcggctcgctgttttgtgttgcgcagagagaaaccccgtgttttgcgaggagaaggcaagccgctcaacgctcgtcgatggcgaagctatgcacaaatcggaatcaccgtcgttcttgcaaacgccgtttgggtttgtttatggtgagccgatgcaggtcgctctcgatcggctcgattaa

SEQ ID NO: 10729 - DNA, 411 bp, Zea mays
  Peptide Sequence Number=SeqID_54104
atgggggctggccttgctccctgctggctgcttgctgccgtgggagccagggaggaagaagggcgcctgctgcagggatgccgagcgccggagcagagggccgaccatgggagagaggccagcgccctgggaggaagggagccgagctccctgcgctggggaagaagggcgccatggctggggcgcgtggagcagggctcgctggtggctgctgccgccctgcgcaaggatgaagaaggtatcttcggcgtggttgatacgaaggttgatacacaacagaccagaataatacgaaggttgatacagcgccgaaggtgtgaacagtacccccgtactgttcacgctgatctgacaatcacttttgcgtcacgcttgtactttcatctccttcaagctgaagagataaattaa

SEQ ID NO: 10730 - DNA, 2208 bp, Zea mays
  Peptide Sequence Number=SeqID_54105
atgccgaggacagagggccagcgtagctgggatatccgcgggtcgaatgaccgtttgaacagggtttttgaattgaatcgactgccgtataacggctatcccggccaagacgatgtggaccgccgcgggaagaaaccggtggtagagtctggagacgaccctgtgccggcggccgccccatcctcgaagaagaggaaactaggtactgctgtgggaggacttgggatttccgatggttttgctaaagaattgatgaggacatgcgcggccccggggggaaggatgtcttcgcccgagctccaggagtcttcggcgcggatgctgagggttaccgggggttggtggcctaggaatgttcctatcccccgcgcggccggcgaagacttttttacatctcgcatggttcgtgagtggaaagtgtttccttacgggcggaatattgctgctgttgtgtcgacagtgatggacaaggatcgccaaggagctgcgcagaagcgccaggcggtcgtcaggcttcatgaagccaggccaaagaggcagcggggggttgcgaaggctacggcccccggcggaggccatccgccgaagtcggccgtccctgcatccagcagggcgccggagcctgcggctgccgccggtggttccaaggctgcgaaggctgcaccggcgtccggcagagtgatggaggttgcgaagtcggcccgagggttgccgccgccgggcaagcgcgtcgccgacttcgccaccgacattagcgtggacgactatcttgttgggtcagacgagggccaacttgtcgttgttccgcctgccgcggctaccacggcggctgccgtaatgccgaaggcaaagggtggtgctcttagtgctggcggcgagatgccggcacttgctgctatgagggacgaggcgggcgctgtgtcccgccggctggaggagatgaaggaggcgctaagtcaggcggctgacttcgccggccgtgcggcgtcgggggcccttacggccgttgtgtctgccaaagtcgagagacttcggacgcaacatgccgatgccgtccgggaaaaatcggccgccgacagcaagtgccgcaagctgggggacaaggagaggagggaggccaatgaggccctcgccaaggcgcaggctgcgctggcggaggccaatttggtgcgggcggagggcaatcttgccagggagcgtgccacgcagttggaggagtggctcaacgccctgcagagctgcgtggagaggaccgaggccgcgacgcgcgcggaggctgagcggacacgcagacagcttgtggattcataccatgagctgggcgcgcggaccggtgacttcgaagtgccggaccgagagcctggacttcgctgcctggagtgggtacaggaggagttgcaggcactccccactatcgtggaggggtttatgtcgtatgccttcctggtcacctgcgagggggcgatgaacgcactctctcacgaagggtgccagcacttcgaggtcttcgaccaagccgatgaggattttgaacgagatatctacaaggttgaggaccctatagtgaaggagtccgccggagccatctacgaccagatgtggggcccgcacggtcgagaggtggtcagggagcgggccgagacggcgagggctcaggcggcgcgcggcgagagggtggatgatttcggggcattgaacagtgcgctgcttgacccggagtcgaacccggcggaggccgtgtccagggccgccctggagccgccctcggagactgccgaaggcactcctgatgcccccgcagccgctgcggccggcggaggcccacccctggaggccgccgaaagcgttcctgacgcccccgcagccgctgcagccggcgaaggcccgccgccaactgttgtgccgagggttgaagatcctgcaacggtggcggtggaggcgacggcggaggctcccgcaacggctgggtcctcgcaggttcaagattttgggcctgcgcacgcaaccgccactactaattttttggcggcttcgaccgtggatggtgttaataaatcagatgggtccacatctaagttttctgattttggtgactccgggagctcggttgagtggactgaggagtcgtcggatgaggacttggactattttgcggccttggatgtggcagcggcggagggcgagttccaacagagagcaagttgttga

SEQ ID NO: 10731 - DNA, 171 bp, Zea mays
  Peptide Sequence Number=SeqID_54106
atgacggcagtcggggtcagtgaggcattgtacgccaaggcggtgagcccctctctgctgacaggttctctggaggacatggttgctggagtgacttggccgtccatcttgccaccgggttggacagtcgagtgggatcctgcctcggctgaggaggagcatgaggagtga

SEQ ID NO: 10732 - DNA, 513 bp, Zea mays
  Peptide Sequence Number=SeqID_54107
atgtactgtttgatgtccggtgcaccggtggtcagggagcggtcggacacggcgaggggtcaggcagcgagtaacgagaaagtggagaactttggggctttgaacagcgcgcagcctgaggcggagtcgaacctggtggcggctgggcccgaggtcgccccgacgccgctcccagaaaccgtcgaaggctccctcgctgcccccgcggccactgcggccggtggtgattttgggcctgcgcgcgcaaccgctactgctaatgttttgccggcttcgaccgtggatgctgggaatgaatcagatgagtctgcgtctaagtttactgattttggtgactctgggagttcggttgagtggacggaagagtcgtcggatgaggacttggattattttgcggccttggatgtggcagcggcggaggcttcaccgcgtgctgcggatgctgaagttatgcctggtccgagtgctgggcgtaggcggcgaagggcggttgtgaagcgtagagtgagttag

SEQ ID NO: 10733 - DNA, 462 bp, Zea mays
  Peptide Sequence Number=SeqID_54108
atgtcggacgaccttgttgttcctgtccactttgaagttggccaagaactttgcttttgcctcctggatcatccgctccttatgctcctcaaactggagctgctcgtcagccgacaaggtttccccaacggagtcgccaaaaagtatgttgacgcctttttggaggcgccaattactcaagagaaccagcggcagtgctctctgcacaggggcggacggtccgcgcgcgggggccggacggtccgcggcctggtgcgaggcggcggtgctctctggtcaggggcggacggtccgcggcctgggccagacggtccgcggcctggtgcaggagcccaggttccctgcctgacggccggacggtccgcgccctggggccggacggtccgcgcgtacgcagggacggcggaagatcgccgacggcgcctggatctcgctcccgggagagaccccgtcggggagtag

SEQ ID NO: 10734 - DNA, 279 bp, Zea mays
  Peptide Sequence Number=SeqID_54109
atggcgatgtcatcgagtacaccgtcggcaacaccagaggaggcccctgctgcgcccgcccccaccatcgaggccgacgcggggggtgcgtccagctccatcctgccgcccactccggaggagacagaggtgatttttgggcggcggctctggtccggccctgagccagaagcagcaccggttcccctcccccgggtgttgtctcgcgcccatcaggctcttcacgagactgaagcggcgattctgcgggactgggaggcgctcgaggctgaacactag

SEQ ID NO: 10735 - DNA, 999 bp, Zea mays
  Peptide Sequence Number=SeqID_54110
atggcggaagagggaggtgggcaaagatggccacctggaggatggagtgggggtgaggtgctgaagctggaggccgaactcctccaacaacatcaggaagaaaggcgggatcggcagcgccaacccgcaggagatgtaagaggtgaacaaaacgaactccccggcggcgaggtcaccgagaaggagggcgccagcgcggatcctcccggcgagcgccagcgcactccatccaagcaggtggcgcaccacatcgagcatcgcctcggtctagaagcggtcaggttggccaagcaaagtcatggcgtcggcaatggtgctgcggtatcgaggcgcctcgcgcgtcgcccggtgaaaccatcatgcgtgggggtcgcgggtcagtcagccacggggacagacgtggaagttggcgtgaccgaaggcggtctggcagggattacgtcagcgaacgtacagaagtggcgcgccaatcgccaaccaagctttggccccacctgcaggctcgtatcctcccctgaggtgggcccaagggccactgtcggtaccctgaaacaggggtcccctttactacagtgtgaaggcacggtgcccacgcgactatctctagtggcgtggagaacagcacccgtcgccaccacgtggacggctccaaggccaccacatggccagagaagacaatatcctccgaggtatcaacggcgggtctggacccccatgagaaagtgtcgccccatgcatatacggaccggacctcggggcagggtccgaacctctgcgggtacagaccggacccccgggacgggtcccagatctctctgtgtggggtccgggccaccctcagtagagtcccgagattctgggacaaagagtacccggaccttactcaaggccaggcgggggtccggagctgacacgtgtccggaccataccgtgtacgcttctgctcctcgcccaggcggagacccgatgctgccatgtggcccactgcccgtggcgtaa

SEQ ID NO: 10736 - DNA, 138 bp, Zea mays
  Peptide Sequence Number=SeqID_54111
atgggccagtcccacagagcggtcgtgtgtggtgtggttctgctgttgttatgggcccacatcacaccctggaatgtgggtcactgtagagactccgatgctgaggcccttatcaccgaggttgacttggccccatga

SEQ ID NO: 10737 - DNA, 198 bp, Zea mays
  Peptide Sequence Number=SeqID_54112
atggccactgcgagatctccgttccgcggttcagttgtagccatcagggggaagatggctcctggcgacaaggcccacaagtcagccaccaatgagggtggggccactgatgtaattatggacatcactccacaacccatcacactcaatcaaagatccaaatcatacaatcataagaacaagcactcaagcatatag

SEQ ID NO: 10738 - DNA, 87 bp, Zea mays
  Peptide Sequence Number=SeqID_54113
atggcgaactacctcgcgcagttccagaccatcaagtcctcctgcgaccgcatcgtcatcgccgctgagtgcctgctcgttgcatag

SEQ ID NO: 10739 - DNA, 213 bp, Zea mays
  Peptide Sequence Number=SeqID_54114
atggcgagagtagcgtgtaccctccatggcaaaaggctggatggtggtgtatctatgctctgggttggcgtgaacctgatctgccagcatatccttgagagtcttttactttgtcgggtgaagaagcagcaaacttttgttgcttctgttcaaaggtggtaccaaaagaagagaaccaagactaaagctgcgagagggaaggtcctccgttaa

SEQ ID NO: 10740 - DNA, 189 bp, Zea mays
  Peptide Sequence Number=SeqID_54115
atgcggcttcatatccttagaggtatgaaggcagaagtcatccttgcatttgcagacatttgcactcatgagagcgagtttgagaaaatttcaagatttgaatttttgggatgctacacccgcccggtctcagctttatcatttcaacccaaagtttggtacctgccagagggatttaaggagaagtaa

SEQ ID NO: 10741 - DNA, 564 bp, Zea mays
  Peptide Sequence Number=SeqID_54116
atgaacggacacgccaagatgagttactgcgacgtggtagagcacctaggcacgtggcaaccgatcgacaggcagccaactccggtgagcttatctggaccgatcgtaaggcaagggggtacggcggccagccccaggtctcattcgtggcgaagatcttttaccctgaagcgttatctgaccactaacggcatgaatcgcgtcaccagcgtgaatccaggcgtaggggtcaccggtggcaagggcggccaagaggtagccgacgaagctataaaaaagaacgaaaaagaatcccatgaagcccgagaagaagccaagcgagccgaagaggccgccgagcgcgcaaggcgcatagctgaactttcaccgccacccgagccatacgatcccgaggccgatccagccatgaaagcggcactagaaacaataagaattgctgaagaagctgttgatgaagcagtcaacaagcttctaaacgaagctgcggagaagatcttaaaagaggactacatttttgtatacttaagaaatgtagtatttaaggaatgtaatgttcgtacatga

SEQ ID NO: 10742 - DNA, 366 bp, Zea mays
  Peptide Sequence Number=SeqID_54117
atggggccccatgtggagcggtcggaagcgatgtggcccgcgcttggcgtggtcagaggcgacggggccgcgcgtggcgcggaggccaccaggatcggtggggtcaaacttcatggaacaagaattgttggtggtgaaccgacgaatagaaagaagattctagatgatgtggggagcaacaataatgtttttgaggtggaacagtcctggaagaaccgagtcacctactggggtaaccaggagggtggaaccgttccttacaataatagaggatggaagggatggatgagggggatgggagtgagagaacgtgctagcaccaggagtggtgcggtaggaggctctagagtccaccacctagtctga

SEQ ID NO: 10743 - DNA, 399 bp, Zea mays
  Peptide Sequence Number=SeqID_54118
atggcgcagccgaccgttggatctccgggctggttggagcaccggacactgtccggtgccctctgccaaccgttggagcgggccacgcgccgcccgcggatttggcggccgaccgttgcgctggcggctgttggctcaccggacagtccgatgcaccaccggacagtccgacaaagccttgtggtcttcgcggcctcagttatccggtccttgaagtctttgatggtcttcgcctcggctcgttggagcaaagggggcgcccaggccttcgcatggacgacgtccgtggccagcctggcagagcctgttgacacggccttcgatctgtggaccgttgatgtagaaatcctcgagggagggggtggcgtgtttgccttcgccccaacatttgccctctaa

SEQ ID NO: 10744 - DNA, 516 bp, Zea mays
  Peptide Sequence Number=SeqID_54119
atggagtcttggtgcttaggaatgatcaaggaatgcttgggtgactcctccatgcgcctgggggtcccttttatagccccaaggcagctaggagccgttggaacccaacaaggaaggcaattcttgccttctatcgggtggcgcaccggacagtccggtgcaccaccggacatccactgtagtatgttcagtgcggatctccttccattcctggcgcagtcgaccgttggatcttcgggctggttggcgcaccagacactatccggtgcacaccagacagtctggtgccctctgccgaccgttggagcgggccacgcgtcgcccgcggatttggcggccgaccgttgcgatggcggccgttggctcaccggacagtccggtgcaccaccgaatagtccggtgaattatagccgtacgccgccacagtttcccgagagtggcctgttcgccggagtccagcctggcacaccggacactgtccggtgcaccaccggacagtccgatgtgccagactga

SEQ ID NO: 10745 - DNA, 570 bp, Zea mays
  Peptide Sequence Number=SeqID_54120
atgtccggcgaggggcagggtttgctccaggaggtcctggcggtcacaacggtgtacggctcgacggcgggggtggccggaatcgttcggtccacgcgcgcaggcgggtgctctcgtcggcggcgggtgctccggccaaaccacggtgatctagttcaatccaatggcacagaatcgaagaatggagcagaggattacccggtctacgctcgccggcggtcgggtggagtccggcgaccgtggactggcctctccggcgaagcaaactccgattcctcgctcggggagcttcaccgaggtgtgcacagtcttctccgagggttggacggggttgggaagggtcctgctggccggtctacggtggcggggagatcgggcggccgcgggcacgccgtgcgcgggcaaacgccggtgggtttgggctccggtgaggtcgagcgcgtgcggaggggtacggtcaaggtcccctgggtgctttataggtgcgggcacgggccatggcgcccggctggtctttggcgcgacgcggggcacgcggggcgcgcgtcgggcgtgctctggcgagcatag

SEQ ID NO: 10746 - DNA, 780 bp, Zea mays
  Peptide Sequence Number=SeqID_54121
atgaatggagtgattctggaggatagctcaaaggagattctagcgacacccaccccgttgtcagaatcactagcctttgcagctggagcttcatcttcagcaccgccagcaccagtagcccaagcccctactcctggaggcgacgatctagatgattctggtgatggtggagaagatgatgatgaggaagaggaagaagaagaggaaatcaacaatgaagaagccaacgatgagcaggaggagaacttcgtcgggatatggcctatcatggagcattacacttcaatgttcgagacgggacacttcccaaacctgctgcaggatgttctgcatgcgttaggaacctacgcccgacctctgtatgacacaagacgagtgtctgagcctccccaggcttgctactacatcagtcgtgtgcatatctgggtgatggatgcaggagatagaggttttaggactctatcgtcccatgagtccctgacgccactatctacctacgctgcttcggtcagcaatgctgctaggaaagctctatggtctctcagccacatttatcgacaacagttgcatgacacgaggtacatacatcttcctatatgtcttcgtggagaaagccagaccactgttgttctaggtgaagctggaaaagatcgcctcaacacccttgtaggtgtggtggcaggtcttaacactgacctggatagcgctaccctagatctttcaagggtacatagagaacttgaagaagcacacgccagaattgcagccctcgaagcttag

SEQ ID NO: 10747 - DNA, 1833 bp, Zea mays
  Peptide Sequence Number=SeqID_54122
atgaacaaggatcgccaggaagctgcgcaaaagcgccgggcggtcatcagactccccgaagctaggccgaagagggcgcgggggactgtgaaggctaccgtccccggcggtagccagccgacgctggcggcgaagccggccgcccctgggtccagcaaggtgccggagagcgtgaaggcggtcggcgccggcggaaccaagtctgccccaaacggagctgcgaaggtccaggaattgccttcgccggggaaacacgttgccgacttcagcacaaatattagcgtggacgactatctcgttgggtcgggcgaggggcaacttgttgttgtcccgcctgcggtggcaaccacggcgtctaccacagtgcttggggcgaagggtggcgctttcagcgctggcggcgagatttcggcggctactgccgtcaaggacgaagcgggcactatgtctcgctggctgagggaggcgtcgcagcagctgtcgcagcagctgagtcaagcggccgacttcgccgaccgcgtggcgtcgggcgcccttactgcagatgtgtctgccgaagtcgagagacttcgggcgcagcatgcggacgccgtccgggagaagtcggctgcggatagcaagagccgcaagctggctgagaaggtggccaccctggagggcgagaggacggacctccggcgccagctggtggaggagaggagggaggccaaccaggccatcgccaaggcgcaggcggaggccaaattggcgcgggtggaggggagtctcgccagccagcgcgccgaggaatgggaggtgcggttcaaagctctgcaggcccgcatggagagggccaaggcctctacgcgctcggaagttgagcgcacacgcaaacagctcgtggactcataccgcgagttgggtgcgcggactgctgacttcgaagtgcccgaccgagaggcgggtctttgcttcctcgagtggctgcaagaggaattgctggcgctcccgaccatcgtggagggattcatgtcctttgcctccctcgtcacctgcgaaggggccatgaatgcgctgtcccacgaggggtgcagtcactatgaggccttcgaccgatccgatgaagactttgggcgcgagatttttaaggtcgaagaccctgtggtgaaggactccgcgggggccctcttcgaccggatgtggggcccctacggtcgggaggtggttagggagcggtctgaccgggcgagggatcaaatggcgcgtgccgaggacgtggaggacttcgaacatctgaacggcgcgcagcccgaagcggaggccaacccggtggtggccgaggctgaggtcgacccggcaccgcccctggaaaccggtgaaggctcccttgctgcccctgcgtctactgtgtctggtggaggctcgtcgccggccacggtgccgctggcggaggatcccccgaaggcggcgatggagctggcagcggaggatcccgtggtggcggctgggtcttcgcaggttcaggattttgggcctgcgcacgcaaccgctactgctaattttgtggcggcttcgaccatggtcactggaaatgaatcggatgagtctacgtctaagttttctgagtttgatgactctaggagttcggttgtgtggacggaagagtcttcggaagaggacttggattactttgcggccttggatgtggctgcggcggaggcttctccgcgtgttacggatgctgaagttttgcctggtccgagtgctgggtgtaggcggcgaagggcggtggcgaagcgtagaggctggcaagcgggaattgttgtcctcgtcgtttggggcgagtgtaggtga

SEQ ID NO: 10748 - DNA, 1686 bp, Zea mays
  Peptide Sequence Number=SeqID_54123
atggaagtcgtggagttggttccctgcgcccgcaataaatggggcaactggtgggatttctggttttacgtttccgaaggcgcaatcgaagaccacccagggctccccgtggccgtcatgtgctcccattattacgtagcgtacccgcagtttgaggtagcggaggatgatgaagatgaaggagcccttcggtgcgctgcccgcatgagtagcgagcgcgatttagttgaggaatttgtcgggtatgggctggtgcgaagtcctgccttcgcgctggatttgcgtggccgagatcccgccgcattcgtgcgtgaagcggaagacggtgcggcgaggatcgtggggcgctacgtgccgaagacagagggtctgcggagctgggatatccatgggtccaatgacaggttgaatcaggtcttcgaattgaaccgcttgccgtacggtggttatcccggggaagacgccgccgaccgtcgcgggaagaaaccgatgggcggtaccgaggaagggccctcacaggaggctgccccggccgcgaagaagagaaaattaggtactatagtgggggaatggggagttgatggggacatgtgcggcccccgggggaaggatgtcttcgcccgagctccgggagtcttcggcgtgaatgctggagtgatgaacaaggatcgtcaagacgctgtgcagaagcgtcgggcggttatcagactcgccgatcctaggcgtgaggcgaagaaagcgcgggagagcgtgaaggctgctgcccccggcagtagccagccggcgccggctgcgaaaccggcctcgcccggatccagcaaggcgtcggagagcgcgaagactgtcatcgctggcggaaccaagcctcccccgggcgaagctgcgaaaacacgggagctaccttcgccggggaaacatgttgccgacttcggcacgaacattagcgtggaggactattttgttgggtcgggcgaggggcaattggttgttgtcccgcctgcggtggcaaccacggcgtcaacggcggtggttggggtgaagggtgccgctttctgcgcgagcggcgagattccgtcaaccgctgccatcaaggacatggcgggctccatgtcccgacggctgagggaggcgtcgcagcagctgtcgcagcagctaagtcaagcggccgacttcgccgaccgtgtggcgtcgggtgccctgactgcagatgtggctgccgaagtcgagagacttcgggcgcagcacgcggatgccgtccgggagaagtcagcggcggagagcaaaaaccgcaggctggcggagaaagtggccaccttggaggccgagaagatggacctccggcgccagctgggaagtctcgccagccaacgcgccgaggagtgggaggcaaggttcaacgccctgcgcggccgcgtggacaaggccgaggcctctacacgctcggaggttgagcggacgctcgcacagctcgtggactcgtaccgcgagctgagtgcacggactgctgacttcgaagtgcccgaccgggaagcgggccttcgcttcctcgaatggttgcaggaggagttgctggtgctcccgaccattgtggagggttttatgtccttcgcctccctcgtcacctgcgagggggccatgaatgtgttgtcccgcgagggctgcaggcactacgaggccttcgactaa

SEQ ID NO: 10749 - DNA, 3345 bp, Zea mays
  Peptide Sequence Number=SeqID_54124
atggcggggaacgagtggatcaatgggtacctggaggcgatcctcgacagccgcacctcgtcgggcggcggcggaggcggcggcggcggggacccaaggtcgccggtggcgggggcgtcgccgacgaagggggcgagcccccgcggcccgcacatgaacttcaacccctcgcactacttcgtcgaggaggtggtcaagggcgtcgacgagagcgacctccaccggacgtggatcaaggtcgtagccacgcgcaacgcccgggagcgcagcaccaggctcgagaacatgtgctggcggatctggcacctcgcgcgcaagaagaaacagaaccccacacttaactgtgatgtcacatctaaaaagaaactttttgctgatctgcagtgtttcattgctgttcatataaagctggagttggagggcatccagagaatctcggcacgccggaaggaacaggagcaggtgcgtcgtgaggcgacggaggacctggccgacgatctgtcagaaggcgagaaaggggacaccctcgctgagcttgtgccggttgaggcggccaagaagaagttccagaggaacttctctgaccttaccgtctggtctgacgacaataatgagaagaagctttacattgtgctcatcagtgttcatggtcttgttcgtggcgaaaacatggaactaggtcgtgattctgacaccggtggccaggtgaaatatgttgtcgaacttgcaagagcaatgtcaatgatgcctggagtgtacagggtggacctcttcactcgtcaagtgtcatctcctgacgtggactggagctatggtgagccgaccgagatgttatgctccggttccaacgatggagaggggatgggtgagagtgccggagcctacattgtgcgcataccgtgtggaccacgggataaatacctcaagaaggaagcactgtggccttacctccaagagtttgtcgatggagctcttgcgcatatccttaacatgtccaaggctctgggagaacaggttggaaatgggaggccagtactgccttacgtgatacatggacactatgccgacgctggagatgttgctgctctcctttccggtgcgctcaatgtacccatggtgctcactggtcactcacttgggaggaacaagctggagcaactcctgaagcaagggcgcatgtccaaggaggagatcgattcaacatacaagatcatgaggcgtatcgagggaatggatttcagcaatgttgtggttcatgaagacattgatggggatggtgacagcaaagatgatatcgttggtttggagggtgcttcaccgaagtcaatgcccccaatttgggccgaggtgatgcggttcctaaccaatcctcacaagccgatgatcctggcgctgtcgaggccagacccgaagaagaacatcactaccctcgtcaaagcctttggagagtgccccccactcagggaacttgcaaaccttactctaatcatgggaaacagagatgacatcgacgatatgtctgctggcaatgccagtgtcctcaccacagttctgaagctgatagacaagtatgatctgtatggaagcgtagcgtttcctaagcatcacaatcaggctgatgtcccggagatctaccgcctcgcggccaaaatgaagggtgtcttcatcaaccctgctctcgttgagccgttcggtctcaccctgatcgaggctgcagcacacggacttccaatagtcgctaccaagaatggtggtccggtcgacattacaactgcactgagcaacggactgctcgttgacccgcacgaccagaacgccatcgctcaagcactgctgaagctcgtagcagataagaacctgtggcaggaatgccggagaaacgggctgcgaaacatccacctttactcatggccggagcactgccgcacttacctcaccagggttgctgggtgccggttaaggaacccgaggtggctgaaggacacaccagcagatgccggagctgatgaggaggagttcctggaggattccatggacgctcaggacctgtcactccgtctgtccatcgacggtgagaagagctcgctgaacaccaacgacccattgtcgtcggacccgcaggatcaggtgcagaagatcatgaacaagatcaatcagtcgtcagcacttccgccgtccatgtcctcagtcgcagacggtgccaagaacgcaaccgaggccacgggcagcaccttgaacaagtacccactcctgcgccggcgccggcgcctgttcgtcatcgccgtggactgctaccaagacgacggccgtgctagcaagaagatgctgcaggtgatccaggaagttttcagagcagtccgatcggactcccagatgtccaagatctcagggttcgcgctgtccactgcgatgccgttgtccgaaacactccagcttctgcagctcggcaagatcccagcgaccgacttcgacaccctcatctgtggcagtggcagcgaggtctactatcctggcacagtgaactgcgtcgacgctgaaggaaagctgcgcccagaccaggactatctgatgcacatcagccaccgctggtcccatgacggcgcgaagcagaccatagcgaagctcatggccactcaggacggttcaggcgacactgtcgagctggacccggcgtctagtaatgcacactgcttcacgttccttatcaaagatcccaaaaaggtgaaaacggtcgatgagatgagggagaggctgaggatgcgtggtctccggtgccacatcatgtactgcaggaactcgacaaggcttcaggttgtccctctgctagcatcaaggtcacaggcactcaggtatctttttgtgcgctggggcctatatgtggggaacatgtatctgatcactggggaacatggcgacaccgatcatgaggagatgctatctggattacacaagactgtgatcgtccggggtgtcaccgagaaaggttcggaagggctgctgaggagcccaggaagctacaagaaggacgacgtcgtgccgtctgagacccccttggctgcgtacacgactggtgagatgaaggccgatgagatcatgcgagctctgaaacaaaggttcatggcgtccaagtccggcgagccacgcatgacgctgctgggcgtggtcctgctgctggggctgctgcagctgagccagcacgcggcgcccgtcggcgccgacgagagcgccgcccccaccaagaaaaatactagcttcagtttccacaacaccgccggcggccgcactctcagcagcttcagcgtcaacggcgcctacagcaagaagcccgtcggcaagggcaactga

SEQ ID NO: 10750 - DNA, 495 bp, Zea mays
  Peptide Sequence Number=SeqID_54125
atgacagaggaagccagtttcagaggccgcatcatagctcacaatcttcaaggcaacaacaaagctctttcaggccaccagctccaaggggcagaggcagcaggggcttcggaggaagatatggggatcagcccaggaaactctactgcttattctgtggttaggacaagggccacactacaagaatatgccaagtcaccatccagaagcaaaaagagattgccgaagcagaagcgcggcagaatcagccgaagcaggttttacacactgcttcatgctactctccctatataccagaatatgtgggtaatcaacctgcagcttctgttgcttcggcaagtcattcacaagcttcctggccccagctcccactaccaccaccattgccacctactcatacccgaagccagaagccagaagggcaccagcacgcccaacagcagcgcgacttcagggaggagtctgaagctcgtacagtcaatagcactgtactag

SEQ ID NO: 10751 - DNA, 666 bp, Zea mays
  Peptide Sequence Number=SeqID_54126
atgaatgtaaatggaaatttgcagaatggaattgggattcaggtgggtcaagttaagacagtagaaatcaaggaggccgcggaaaaagggagaaatggggagaccgagaccgcggagaagaaaaggaacataaatcacggactcgtgggtatcctctgtcggaacagtgaccccgtggcaaatccgccaagaacaaagctccctcaggggaaggaccccgatggacacaaggtggagaagtggcacctagacactggccctgttgctgcctttgctgctgccgccgccgttgctgcccctgctgctgccgccgtcgccgcccctgctgccgccgttgccgctcctgccgccgccgttgccgcccctgctgccaccgttgccgctcctgccgccgtcgttgccgcccctgctgccgccgtcaccgtcgtcgctgccgtcgcctccgtcgtcgtcgtcgtcaccttcgccgtcctcctcgggcgagtcctcctcgtccgaggagtactccgactcatccgagccttagagcccggagcgctcgatggcccggatgtaagtccagacctccgcggcaatcccctgatagtcgtccgagtcatcggacgacgctgggggagagacgggagccggagacccctaggactcagaggagaactcctcctctga

SEQ ID NO: 10752 - DNA, 393 bp, Zea mays
  Peptide Sequence Number=SeqID_54127
atgaggatcaggctcaagaaaatgaggttgaagatcaagaagatgagccacctcaagaataggacaatgatcaagggggagatgaagatgatcaagataaggaagatgagcaagagattcatggtcaaagaccgccacacccaagagtccaccaagcaattcaacgagatcacctcgtcaactccatccttggtgatattcataaggggggtagaggatgcactaagagattcggattgggtgctggcaatgcaagaggagctcaacaacttcacgaggaatgaggatggcaaacccatcaagacacccatgggaacaaatgggcatctcgacctcaacacgggagcacctagagaaagaaagtattgcaaaatccggcagcacctcccttga

SEQ ID NO: 10753 - DNA, 423 bp, Zea mays
  Peptide Sequence Number=SeqID_54128
atgggcaagagcaacaagcgcaagcgcgaaccgactcctccatcagaggatttcggtgactcagaatactcggaggaggagttctcctccgagtccgaggggtctccggctcccgtctctcccccggcgtcgtccgatgactcggacgactcccaggggatagccgcggaagtctggacatacatccgggccgtcgagcgctccgggctcgagggctcggatgagtcggagtactcctcgaatgaggaggactcggacggcggcggcgaggacgaggacgacgacgacgacgacggtggcgacggcgacggcagcggcgacggcaggggcagcggcgacggcagcaggggcagcaccaaaggcggcagcagcaagggcagcaccaagggcggcggcggcagcaggggcagggccagtggctag

SEQ ID NO: 10754 - DNA, 681 bp, Zea mays
  Peptide Sequence Number=SeqID_54129
atggccgaggctcgggctacactcttgaggtaccctaggacatttccgagaccggcaggaacgatttgtaatggaatcccaccggagggaggcatcgagccctcggaccctgtcgaaggggtccaggtccggcgaatcacccgcagaccgcatgagggaatgatcagaccggccgaggcaccacgaaaagcattcagacctcagaggagtcaaagcactcctccgaggcctcgggggctacacccggaaaacagcgccgctcgccccgctccgactgtcgtgccaaccacccaggtgaagactgacaacaagtcacgattgaccaccgagtttggcctcgggcgcaacaggaagctccgcctcgcccgacctcaggctccggcctcgggaggaggtctccgccacgcccgaaccccggactcggcctcgacctcaagctccggcctcgggaggaggtctccgcctcgcccgacccctggactcggcctcgacctcagcctcgggaggaatcgcgtcctcgcccgatcccggccttggcctcaagagaagtctccgcctcgcccgaccttgggctcggaccgaccgtgccaacaggggatacatcattaccctatccctagccagctcaggctacaaggaacaagaccggcgtcccatctggcttaccccggcgacgggtaa

SEQ ID NO: 10755 - DNA, 93 bp, Zea mays
  Peptide Sequence Number=SeqID_54130
atgacggccgtgtcagaaaagggaccaggaaaggagatgtttcggaaaggatccttctcggcgaaggaagcaggccccgagccctcctactga

SEQ ID NO: 10756 - DNA, 1407 bp, Zea mays
  Peptide Sequence Number=SeqID_54131
atggcgtacatggagctccgcttgacagatgcgctggttggccgtggtggcgacagggtggaggacacggtctcagggctgcaatcctccaactccgccacctcctccgtcgccacgccgatgtacgacgacgtgttcgactcttcggtggccccgatgtacccaggcgatgtgttcggctcttcggcggcctcacccccaggcttcgatggcgagcctactttcgacgaggagcacaacaactccatcaccgagtacgtcgacgtctcgtgccacgaccatctcttcctcctcgacaccacctgggactcctcgcagcagcacaacgccagcatcccaggacggcgccaacatcccggttgcagcgcgcggctgcagcgccgaccgctccagcacctgaccgtcgaccccgtcagcgccgtggacaccatgcctctcgatttcaatctcactctcgacgagttcaaccagcggttcgacgcgtccgctagcgtgccgcctagcccggtcgcagtcatcgccgacaattggggcgggtgcttcgacagcgagcagtaccacacgagaccatccgtcgtcgctgatagttggggcggattcttcggtggcgaggacctcgcttcgtcaggcaacgccacgagattcgtcctccccatcgcctccaccgacgagcccagcatcgacatcgcgctagcccgtgccaactccgaagtcacagatgactccgtgttcgtgaccaccgaacctgccggctacgacgactccgagctgcacgccaccgccatcctcgacgtgctgtcccgcgtgcacacgctggacaagtgcatgacctcgcaggacaagctcgtcatcgacctcgatccagacgacatggagacaccattatcggagtcggcccttcccgtcgttcccagtgccaatgaaatggagacgcccaccacctgttcgactccggtcctcaccgagcacgcgccggccgaggccgcacacaactgcacactgcgggtgccccgtggagagccgcttccgcgcctgcttcacgcgttcctagcgcacgattggctcgaccactccgccgacacagacgactccgtgctaacatccatgtctgggtgcaccaagctcgtcgagctgcaaccgaggggcgtcaacctcagaggctgcattccggatgctctgttcgatgtcgagcttgagacgctcaacgtgccgtcgcacgcgctctcgggcatacttcccttgggctccaccaagctggcggagatgctacaatcgctcgacctctccgtccaccagctcacctatggcatcctcaccgagatgtcgctcttcttcaagctgcgtgtggatctgtattgcgccatacctgtcgacctctgcgagtctgttacccaaggggtcaactaa

SEQ ID NO: 10757 - DNA, 105 bp, Zea mays
  Peptide Sequence Number=SeqID_54132
atggcgcccaagaggaagaccgcgagctcgtctgctgtggtgattcctccaatcgatcccaacagccagttgccttttgcagaacattcagccactgaaagatag

SEQ ID NO: 10758 - DNA, 834 bp, Zea mays
  Peptide Sequence Number=SeqID_54133
atggaggcccaggcccacgcgtcatgcaaccggcgcgccggatgcttcgtgcaagcaactgcaccgccacttgcaccactaccgcgcctcctcgactgcggaaccgataccgcgactcgaggcgacccagcgcacgacccagcaccgccagcctggcgcgacgacgatgcgcccgtgttccgttcctcgaacggcccgcgcacgcgcaacggccgccccgcgaaccactcgccccgtcgcattaactccgcggcgggacaggcggcgcctctggcaggagaaggaccgggaaagggggataccccgaaaaggatccttccccgtgaaggaaccaggctccgagcctccctactgatcagaggttcgaaggctggcccctcggaagggttcaacagccgcctcagagcacgtgggctccacacccactactggtcagaggttcgaaggccagcccctcggaagggttcaacggccgcctcaggctactcgggctccgcgcccactattgatcagggggttcgaaggctggcccccgaaggcgggaacgatcttgtaacggaatcccatcagagggaggcatcgagccctcggaccccgtcgacaggggaccgggtccggcagatcacccgcagctcaccggagacaccatgttcggcgcccaccgagggcaacatggcgctttcccccctcctccttgcggaaagggctcggactcgggctaagccccggaagacggcgaactccgctccgcccgacccagggctcggacttgggctaagccccggaagacggcgaactccgctctgcccgacccagggctcggactcgggctaa

SEQ ID NO: 10759 - DNA, 897 bp, Zea mays
  Peptide Sequence Number=SeqID_54134
atgtcgaagagcacgaaaatcgcagataaagcaatcatcttgatgcaggatcatgccaagcatatctatcgtatttgcaatgagaagctaatattgggtaaaggattgactgcatttgaggtcaaagaacttcgtgaagcacttgaattcgccgccgaaggattggaccaggactccctttttgccaagaggaattggatgcaactgttaaggaggaacaattggagcatgacgagaaggctggctgttcattgtccagcttgctggattcactgggagccagttcagttagctgaacgccaattcggagatgttaactgggagccagtcgagctggtgggagctgagcctgttagggctgattgggagcctaggaagggagctaagtacacgagggtgccccctacatttaaggggcgaaagcaaattgagaaccgcagagtggttgagttgggtggaaagtccgttaagaagcaccgcacaccgttaagtgttgcgaagctagctttgaagaatcagaagaaacgagaacagaagaaaatggaagaggtggaggtactcaacttatccggtgcactttttataacctgttttcaaggacataaacaaggagtgacacatcagaactctatgcaggaaaaactccttgggatctttaggaagagggacaaggacaccaaacctcacaagaaaaggccagaggaccgagtgcttagggccacagaagggcgctttaggaacggtatactgaacgtcaagcatcttctggcgccaccgaaaccatcaggcaaggacatgtcggaaccgaagatgaggaaggacaaacacaaggggaaggttaagcagaaggaagagacgttgaagaaagcacacttctgtaaccaggcttgctattaa

SEQ ID NO: 10760 - DNA, 900 bp, Zea mays
  Peptide Sequence Number=SeqID_54135
atgacgcgctccttcggcaagtgctcggcctacccactcctgctcgatgttttgtcggagctgcacaagtcgcccccgcttcttcgtcgagcttggccttcatctcgtggaattgctcgagtcgtgtgtcctgaccccccgcagggactaggaccacagctagctcccgcgggatgtcaacgcgagacgcaggcacaggggcgttgtcatcttgcggcatgccgaggtggttgtcttcgctgtgatccccttgatcgatgtggagacactcgcggcttgggtcgtaaccctcatcgtcgaagcttttggtcgatggacggtggtgaagtcccgtcggggacggaatgcaccgttatctcaggtacgaggctaacgcccagcaagtccttcgcgagggtgctggcatcatcgatccgcttgaggtgcgaggacaacacccgacatgtcccccgcaggggtgccggcgtcgttgactcgctctggtccgacagtcgacgaggtgccacctcctgcatggccacggttgccccgtctcctcctcctccggcgaggagggtggcggggcaaacctgggtgttcctcttctgccacggtgggaagtcgtcgtcgagttcgccgccgctgggcgagccgacgaccgttgttgctgtcgcgctgcgggggaaggagtaccatgtcgtagctgccgtcaagggacatgaactcgagactcctgaagcagagcatcgtccccggctgaagaggctactggaggctacccatctggaactcaacgagaaagtgttcgttaacacgcagcgagcccctacctggcgtgccaactgtcggcgtttcggacccgcgaggaccgtcaaccgaccagtaaatttgttgctgcgtgtccctgcccagatgggttga

SEQ ID NO: 10761 - DNA, 87 bp, Zea mays
  Peptide Sequence Number=SeqID_54136
atgaccgagcggaccccacgagtcagcgacgtgggtgaacggctgagcactggagtgcgggtcccaccgtacagcggaagatcttaa

SEQ ID NO: 10762 - DNA, 294 bp, Zea mays
  Peptide Sequence Number=SeqID_54137
atggccggatctaccccctcccatggacgcccagaaattccagcagcgagccccctcctcgctgttctccgtggtgcccgccggctgttcgtaaaaatgtgcagcaagccgcatgctgccggctcgctgtttcgtgaagcccggttgacagcacgccgtgacgctcgccgggcgtttgctgtttttggcgcggacccgctcgcgacgtcgtcgaccctcgccaccgtcaaagtcacgctccgcgcttggccgttcgacgaaatgccaagccttgtggacagcccatgtgactag

SEQ ID NO: 10763 - DNA, 192 bp, Zea mays
  Peptide Sequence Number=SeqID_54138
atggagcggttagccgaggcgtctgctcgggccgggacccttgcggagagcctagccgaggccgtcgggtctgcccagtccgcccaagccgaggcctcgcagcagcgtgcccgggacgaagggttcaagacggctcttgacgagtccatcaagaactgcaaggcgcttgccgaggcagctgagcagaagtag

SEQ ID NO: 10764 - DNA, 450 bp, Zea mays
  Peptide Sequence Number=SeqID_54139
atgggcaagaacaacaagcgtaagcgtgagccgactcctccatcagaggagtttggcgactcggagtactcggaggaggagttctcctccgagcccgaggggtctccggctcccgtctctcccccggcgtcgtccgatgactcggacgactcccaggggatagccgcggaggtctggacatacatccgggccgtcgagcgctccgggctcgaaggctcggatgagtcggagtactcctcggatgaggaggactcggacggcggcgaggagggtgaagacgacgacgacgacgacgacgatgacgacgacggcggcagcggtggcgggggcgacggcgacggcagaggcggcaccaagggcggcagcggcggcagcggagacagcaccaggggcagcagcaggggcagcacccggggcggcggcggcggcaggggcagggccagtggctag

SEQ ID NO: 10765 - DNA, 414 bp, Zea mays
  Peptide Sequence Number=SeqID_54140
atggcgcattctggctcgaccaggtctaggccacggtcatcccgccgccaacatgaggcaacgacgtctgtgcgctcaccctctgtgaggggtgcacaaaccgacgacctccgggtagacctcaaccataggcgtgcgggagaggatgcccgggtctctctggatagggcgcgggagcgccgacaaaacttcgagggtcgtgaagacgctcgagtctctctagagagggcgcgtgagcgccggctaaacatcgagggtcgcaacctcgatcaagactttgttgcggtagcaccgcaaaccccagtgggcgcccggacacttagtccactacaaggaccaccacaacttggtgtctcttgctttgattacaatgatcttgagaacaagaaaggaggaagaagaaaagtgatctaa

SEQ ID NO: 10766 - DNA, 1812 bp, Zea mays
  Peptide Sequence Number=SeqID_54141
atggcgcttcctgttgacgtggctggtctgcgccctaggttgggcgacgtggaggctcctccgaagccgaggtcgagtctgtcttccgtggccgaggccgagtccgagcccctgggtcgggcgaggcggagagttcgtcgtcttctggggctaagcccgagtccgagcggagcggagttcgccgtcttccgggacttagcccgagtccgagccctggggtcgggcggagcggagttcgtcgtcttccgggacttagcccgagtccgagccctggggtcgggcggagcggagttcgccgtcttccgggacttagcccgagtccgagccctggggtcgggcggagcggagttcgccgtcttccgggacttagcccgagtccgagccctagggtcgggcggagcggagttcgccgtcttccgggacttagcccgagtccgagccctggggtcgggcggagcggagcttcctatggtgcctttggcagggcctgactgcccgtcagtctcactctgtcaagtggcactgcagtcggagtggcgcaggcggcgctgtccttttgtcaggccgctttatgctgatgggggttaccagctgagaattaggcgtcttgagggtacccctaattatggtccccgacagatggaagcaccgttgggtccggacctccacagaggaacactggacccctgtgagtacgagtccagagctcccgaggagacatgccgggtacccccgagtgaggtccgggccttagcaaggcggaaactcgccgcggccgcgtggcttgtggctcgtgacataagccaacgggccgagcctaacaatgaagatggtttccccaagttgctgagagcatgcacagttcgcctaggaatcaggagccagccagagtatgatggtcgtgaattcgtcgagcatggcacagagaagtgtgtcgtgattgtatacattggatccagtccgcaccatgtggaatggagtgtcactgctgctgggcacagattcaaagacacctgtcaagtcgtcgctcgcaaggcattgagggccctatgtcagatctatgaagaagaagttgccgacaccccgcttaaattctttccgccctttcagagaaaccgtccagtttgtatgacaaggatgcgtgcattggaaggtcagaagttgcttgaggacgacccctcagtcgtgtacctcactgcattcctgctcaccctggatgcacaatatgatttcttggctcgacaccaccgtcagatgattgcccgagcagaagatgcagagaagctcaaccgtaagctccatgtggatctcaccgcaactcaagcccgtgtagccgccttggaaagttgtgaagtcattgttgttgaagccctgaagcaagccaaggatgagcacgtccagaagttgatggaggcctacttggtaacccacaaccaacgtagagccctgcggatccaagagcctgcttcatccaacccagttcaacccacgagagccgaagacccccaaattcttgaaggtcacccggtctctattagaggagagaataaggcttgggaactcccggaaggagccatagtcttggaaggaattccagtcttccctcaggctatgaataagcaagagcaccccgagtcctcccaagatcccccgccagagttgtttgagcccctcaccatgaagaagattccagcaccgtcccgtgaggtcaaagaagaagctgcaagcaccccaccagcaccgccgcgctctgaggagctacaagagccagtcccgcttgaagaagagttcaaccccgtgttgccatcttaa

SEQ ID NO: 10767 - DNA, 255 bp, Zea mays
  Peptide Sequence Number=SeqID_54142
atggacaaggtttacaggattctgagcttcattgggtgcaccggaggtgcacccaatgggtgtagctctcgagcttcgagtagattttggaaatatctgctcgaaggtcttctccagaaatatttcatttgtgctcctgcgtttggtgaggtggcctttaatctgtccacgcctcgagtcgcactatctgctgatgatatcatggggtgcaccggaggtgcatcatggtgtagctccgacttcaatggattttga

SEQ ID NO: 10768 - DNA, 507 bp, Zea mays
  Peptide Sequence Number=SeqID_54143
atgccccatcaagccctcggagacaccgccatctacccctcgcccacctacctcccgacctcaagcatagacatccatgccaccgtcgccaaggccgctgagctgcacgcggcgctcctccagggcggcagcgccgccgcgtccattaccgacaagcctctgaaacttcttgcacccacatttgtttctctgtctgcttgtttctcggtactagaagcaattatttgtatcattatatgtcaaaacccaaaaggacaaaatcatcatgcccccgtgacgcaacatggtagggaggccaagtgtgagaatgatgttttttctatccatgtgagtgacgttgctgaaaagttgaagatcaagcttcatgaggatggtatcagtggacaggaaactaactacattgtttcttctccattttacaaggaaggaacaagcatcaggcgacgaccgtctcgactgcgggagaggggagtgcccctcgagtatccgcagagatcatatggttaa

SEQ ID NO: 10769 - DNA, 819 bp, Zea mays
  Peptide Sequence Number=SeqID_54144
atggcagaggaatgccttcttcaagcaaaggacttaagtggcttgttgctactgtactcatctcttggagatgctgaaggaattgaaaagcttgcttctttggcaaaagaacacggaaaaaacaatgttgctttcctctgcctttttatgcttggtaaagttgaagattgcatacaattgcttgtagacagtaaccgtatacctgaagctgcattactggcacgttcatatcttcctagcaaagtactagagatagtggcaatttggagagacgacctgagtaaaattaatccaaaagctacagagtctctagcagatccttctgaatatccaaatctatttgaagactggcaggttgctctaactgtagaaaaaagtgttgcgtctcagaggggcaattatcttcctgctgaccagtatgatgctagggtccccctggacactgtgttcacagcttcagttatgaagatgtatctcaagtatgaatcactagaagtgctggcaaatgaatgccggcgccccttgtgtccagctcccctgttcgatgggcttcatgcccagtttcttctgctgcttccgttctacttgtcgaggcatcacctccaagatgaagctgccaccgttccatgtcgaggcgcacaccttgagtatcaggaacaccacgtgcatccggtaggacaggaatatagggaccgtcagggccattgttgccactgtgaacagcgcctggagcagtatgtacatgacctgccggttccggtcacccagcagtccgctcagcctccaccagatgttgtttgctttctgtgctttctttga

SEQ ID NO: 10770 - DNA, 2670 bp, Zea mays
  Peptide Sequence Number=SeqID_54145
atggcggattcgcgaggaatagcttccaagagcgctgacaaggatagcacctccactcgcccggcgcgcctccgcgtcatgcgccaggaagtcaaggattttttgacgagtcctcgccgtagccgccccaagaagcagccgcctccgcctcatcccccgccgccactggaggagaaggtgaaggagaggaagaagggaaaggagaaggcagcgacggaggaagagaaattcgagcgcgcgcaatacagctgtgccttccaggacgagggcgatgggggccgcgacttcgcgccgccggagctggtctggggtaaggtgcggagccacccctggtggcccggacaggtattcgacgccgccgatgcgtcagagatcgcactgcagcaccggaaagccggcgccccgctcatcgcctacttctgggacaggaccttcgcgtggagcgactcttctgcgctgctccccttctgcgccaactttacgcgactatccacccagagtactatgtctagcttcgtctccgccatcgactccgcgctgttggaggttgagcgacgcgtagaggctggcctctcgtgcggttgcttcagttccaacattgccacgaagcaggaggttcaaaactccggtatccggcaaggggcgtatggtgcggcgatagactctgtctacacgagggatgccttccatggcaaaacatttcttgactacatctcagcactaggaaagaagccactagccggtgctgatcttcttgacctagccaccgccaaagcacagttgagggcattcaatcgttcaaggggttcaagggaccttcctgagtttgtgatgtttgagggcattgcggagattacagagatgacacacacaaagggagaaaggatgcacaagagtgaggatgatgttctgagcaaggagaagaaatcgaggcgcgctgggagttcacgtagaaaaggagaggctttaccagaggctgcaaatgatgatgctatagatgaagacagcaatggaggggcaggaaatgatacgttgagtcagggggaaaagtcaaagcgtgtgaagagttcatcgaagaagaaaacagacatttacaaacatttatatggactcaaaactgattctgttgctgacagcagaacactggacaagaagggagtagatgatgttttgagcgagagaaaatctgggcgcacactgcgatccacgagcaagaaggaagatgcattagagggtttgaaaaggctggcaaagcatggaattgaggaattagcaggaaaaagcaaagatgcccccgttcttaaagaaaacaatcagaggcatggtgcaggctctgcacacaagggtagaatcacagaggatgggtatcatagacttggagattgcaatgctgaggatctaacttctccaagcaagagaagattggggcataatgaaaactcaataatcaagccagtgaccatctccgagcatggtaggaagaagaagaaactttctgaactcatggcagctataggcaggcctaattctgtatcgggtggtaagagcaaagctcgagggaagcgttcgttgcatggtttagctgagaaacctgaggatgctgatcgccactctaaggatacattgatgactaggaaaagaaagaagctcaacacattaggggatttatcttcacagtcagagcctctctctcctaagaagtccacaaaggttggagaactgatgagcaaagcagctgggagcaacatgttacaggcagcacctgctgtcaaagctattagtgcagtgtctcagacgaaaccacgtagggctaagcacaggcaagtaaatgctgcagacaaatctccacgtcatatgaaggtaaatcgggggaacagcaaagccgctagtaaggagtctctatcttgtggagaaatgctacggcagatctcattagcagcatgtggtcttaagcagagagaggaaattgctccttcaagtgttaatttctttaccgattttaggaagaactccattttttctagttctgatgtcgatgagaggatgcctgagaaggcaaccaacgccgagtccactccttcagaacagcccattgttgatcatatgcaggatgactattggtccgacattctcattaatgtggaggagccgttatctagcctcaaaaagaagatatataagagtaagaaaagagcaaacaagaaggcacctcaggttaagaaacctcctgttaattcattggcgactgcagaaaatgcggatgagccaaggagtgaaggcaaccaagatacagaaaatggggaacaacttaggaacaaaacgaagctgttttctgcaaatggatctcaacagaatgggacaaaatctggtgaagagatggaaaatagctttctgtctggactggtgctgcacttcagcaggccaagtgatgttccatcatgcagtgaccttatcaagatctttagccaatacggtcctgttaatgaagccaaggcagaggttgcaaacagtaccagctctgctcaggtgatcttcaagaggcgcatggatgctgaggcagcgtttgcaggtgctgggaagatcagtgcccttggaccagcccttacgagctttcgtctcaccgacttcccagcaagtgcttcaggaaataaagcttcacatggtgcatga

SEQ ID NO: 10771 - DNA, 723 bp, Zea mays
  Peptide Sequence Number=SeqID_54146
atgggcagcaacactggtggtgccagtggtggcttctaccagcccttcaacagcaacttagctggtgcaggggctagcactggcatccaaaactttccaggtgtacggctgcgaggtctcccttttgattgcaatgacattgatatctgcaagttctttgtgggactggacatagtggactgcctcctggttaacaagaatggtcgcttcactggtgaggcttttgtggtcttcccaacagctatgcaaacagaatctggtctgcatcataacaggcagaacatgggccggaggtatgttgaggtgttcagatgtaagaagttggagtactaccgtgcaatagccaacgaggtgagccagggtggttactttgagtcggagtatcgccgctcctcacctcctctgaggccccctaagaagcctgctgaagacaagggcagcatggagtacactgaggtgctgaagctccatgggcttccctactctgcgaccactgaggacatcatcaagttcttcctggagtatgagctgacagaggagaatgtgcatattgcgatcagctcagatgggaaagctaccagtgaagcctttgttgagttcccaacagctgaagttgccaagacggcgatgtgcaaggataagatgactatcgggacgagttcattagcagcacttgtcaatattgcttatcttctcaccgacggcgtgctatcctgtatttaa

SEQ ID NO: 10772 - DNA, 1500 bp, Zea mays
  Peptide Sequence Number=SeqID_54147
atgtcgtcctcttcttcttccgctgccactacgccgccggccgccgcctcgtctgaggagacgctgagtagtttgatggtggaggagttgcgcgccggcgactctgttgattttggtgtgtcgcggatgacgtcagcccgcgttcaagatatgcagcggttgggctactttggcggcggagttgctcgtgctccggggacggaggaagtccccgagccggaggggtcggacgagggccagcttgctatagttgcgcctggcgcggcgatcgcgacggctgccatagtgccgaaggcgaggggcgaggctcttggcgccggaggcgaggtgtcggccctcgcggtggtcagggacgaggcgggcgcagcgacccgccggctgaagggggtgacggaggcactgagtcaggcgacggaggcgctgagtcaggtggctgacttcgccagccgtactgcgtcgggggccctcacggcagctgtgtctgccgaagtcgagagacttcggacgcaacatgctgacgctgtccgtgagaaatcggcctccgacagcaagtgccgtaagctgacggacaaggtggccgccctggagagggagaaggctgacctccgacgccaactggcggcggagaggagggaggccaacgaggccatcgccaaggagcaggctgcgcaggcggaagccaaactggcgcgggcggagggcaatcttgccatggagctcgccaaacatctgcaggagcggctcaccgccctggagagccgcgcgaagggggccgaggccgcgatgcgtgcagaggctgaacggacgcgcgcgcagcttatggatacatatcgtgagctgggtgcgcggaccggtgacttcgaggtgccggaccgagagcccgggcttcgttgtctgcaatgggtgcaggaggagctgcaggaactccccattgtcgtgggggggtttatgtcgtacgcctccctggtcacctgcgagggggcgatgaacgcactctcccgcgaacggtgccgacacttcgaggtcttcgaccaggcagatgaagattttgagcgagatgtctacaaggtcgaagaccccgtcgtgaaggaatccgccggggccctttatgaccggatgtggggtccgcacggtcgggaggtggtcagggagcgggccgagactgcgagggctcaggcggcgcgtggcgagcgggtggacgacttcggggcgctgaacagcgcgctgcctgacccggagccgacccctgcggaggctgtgtctggggtcgccctggagccaaccccggagaccgcgacgatcgcgacggctgcccccacatctgttgcggtcggcgaagacctgcccccaacggtggccgaaggcgcccctgatgcccccgcggctgctgtgccgagtgttgaagatcccgcggcggaggcggcggaaacaacggcagaagcggcggcggaggcaacggcggaggctcccgcagcgtcagggccttcgcaggtggcgtag

SEQ ID NO: 10773 - DNA, 456 bp, Zea mays
  Peptide Sequence Number=SeqID_54148
atgggcatggtgccggatgcatctgcggccggtggcaggaaggtcgagctggatggggacatgcgatggacatcacaggttggcccctccagtgatccatctcaaacactagccagcggggacgacgctaagtcgagcaatggcgaagcggcccgtggtggcagtaacggtggagagaagcagggggatgaatccaacggtggcgggatacttagcgctgtggcttccaggattggcgtggtcgtgtccagcgccaacggggaccgcagcggcagcgctgaggatggtgccaagacgagcgctggcgacgctggtcacggtagcaagggcgaggagaaggggcgtggtgtgaacggtggtagaatagtcgagcagatcatttccaatctgccctcagatgatcaggcgcctgatgccgatgaagcttccttgctcatcgccattatcgaagattag

SEQ ID NO: 10774 - DNA, 501 bp, Zea mays
  Peptide Sequence Number=SeqID_54149
atggccgatgccgaggatatccagcccctcgtctgcgacaacggaactggcatggtcaaggctgggttcgctggcgacgacgccccgagggccgtcttccccagcatcgtggggcgcccgcgccacattggtgtcatggtcgggatggggcagaaggacgcctacgtcggtgacgaggtgcagtccaagaggggtatcctgaccctcaagtacctcagcttacacatcacattattccccacattacagcaatcagtgcaacaatcagagcatttatttagggattcttgcaatgatatgggctcagtaaatgaggttcctgctcagccaatttatattgattcttttcccaagctaagggcttggttctgcaaaccgatcatgacaaaaccaaaggtagctttgaagccgcagactctgtctccacaacctgaagcccaagcacctcatgatcctcaaacaccagagcaacaacaaagcgggactggtgtaggcgtgtag

SEQ ID NO: 10775 - DNA, 468 bp, Zea mays
  Peptide Sequence Number=SeqID_54150
atggggaaaggggagaggggatgggggagggaggagagggggaggggggagctcaccggggaggggcgcgacggcgaggggcggccggcggcaggggcggccgagggcggcggttgggcagggggcggcggcggcttagggcaggggtgccaaaggttcatctacaactatactaattcgactgtccggaataccgtagattattccggacaggagaagctttttggaaaaacaggccaagcgcggaccgtccgggcccttgcggcggaccgtccgcgacacgaggatgtcactcggccagaaccaatgcaaaaatccaagtctgtgctatggactgtccggaggaaaagcaaagaccgtccgagcccttgcgcggaccgtccggcctctagcgcggaccgtccggggcggaccgtccgcaccaggagggcggaccgtccgcgctcagcagaatggcccaacggctag

SEQ ID NO: 10776 - DNA, 447 bp, Zea mays
  Peptide Sequence Number=SeqID_54151
atgtctagcaatttctccaagagcccaccgaagaaagctagagatctagccacctatgaaaacctcaatgagcctcataagaaggtttatgacgaaactattgatgagtttaaaaccaagttcattgcatattttgagtgcactagcaagaaggccataaggctcaatggttacccattagaaggagttcttggtggcatcaacttaactatgccctttgaccaacagatcgaagggatatcattgcaaacaacactaaccataacaaggcaaggaactccctctacattgtattttatacgtcccaaggaagaagaacaaccctttagtgctagaagggcaaatgagatagaactggaagacatagagtggaacaatatgtacaagtcaaaacttgaagaaactaagactacattaaccatggacaaactcactgaaatcctatga

SEQ ID NO: 10777 - DNA, 369 bp, Zea mays
  Peptide Sequence Number=SeqID_54152
atggccagggagggacacgcggtctctcgccggagcggccagagcggctcgccgacggcggtgctcagccagggagcgggccacggcggcatgcatgcacaacaacttagcaggaaggggatgcgagaccttaccagtcggggtggcgtcggcgatgtgttgcgcacagtgttccagcgaagcacgtctatggcggagctccagacttctacccgtgtctccactagcagcttcaagggaacccccttccttgacaccacgaggagatacggaagtgagagtcttgccttgcgtatgggagagaatgagaatatggcggatggggtggttttgatcggccaggacaggactgggagttgcaggaggtag

SEQ ID NO: 10778 - DNA, 468 bp, Zea mays
  Peptide Sequence Number=SeqID_54153
atggagctaaagcatgccttcctccggaggcccttccggattccccccgggtccgggctgcagacaggtatgaactacctccacaccagtaagggccgcgggatagctggctccaagcggctcgccagcggaagcgactgcatcagctctgacggtggcggccacctctgcaccgacaactcgccagcagcggcgatcatcttagcatcgtgcttgaaggtcctcgctcccgtctttgctaaaggagtgaggacatccaagaacgtggtcgccgcccccgcgacgtacgacgtcatccacgccccgacccagcagcagaaggcagcgtcggaggcggcgccgaagccatccaagccaaagcatcaggcacgcggtgggctggtgggacccgtagtcggccagccccacgagggaggccgcagcccggcttgcttctccccaccacaaggctggtggtcatccccctag

SEQ ID NO: 10779 - DNA, 2907 bp, Zea mays
  Peptide Sequence Number=SeqID_54154
atgaccaataacttcctcacgacgataaagagcctgaagctgatcgagggttgcaaagccgcacaattatacgccttaagctccgttggggcagcctccacgtccggctcgggggatgccggagggagcagcaacggcaagccccagcctcctccgccgccaaagaccatctcgatgcggtccggatcgctgtactacccgcacgcggcgccgtccacgtcgggcgccttcgtgcccgagccgcacctgccgtgcggcctcccggtggccgacgccctcgagccggccctggacgcgtgcctgcgccccgtcgaccacgtcggcgtgctcgccgcgtcgtaccggcgggtctcggccgccacggcggggggcgacgacgacctctgcgacgcgtacctggagcagcacgcgctgttccagtcgatcggcgacgcgaggctgatccggcgggcgctgcgggccgcgcgcgtccacgcggacaacccgcaccggcgcgccgtgctcgccgcgtggctccggtacgagcgccgcgaggacgagctcgacccggcgccgccgccgctcgcgccctgcaccgcgacgacgccgctgctcgagtgcccccgcgccgctgtcttcgccagcgtgtcccactcccacagcgtggacccggtctgcccgtgccgccgcccaccgcttcctccagtcacccctccaccgcaccgcctgaggcgcaacacgtcgggcgccgcctccgagatgagcgaggaggaggagccggagaccaatgacctgtggttcatcatcggcgaggaggaggtagcgtgcgagcggtcgtgcatcgcggcgctctcaaagccgctcaacaccctcctctacggcgggttcgccgaggcgcaccgcgaccggatcgacttctcccgcgacggcatcacgccgcgcggcatgcgcgcggtctccgcctacagccgccacggccgcgtggacgacttcccgcccgacgtcatctcccagctcctcgcattcgccaacaagttctgctgcgagggcctgaaggcagcttgcgacaaccagctcgcggccatggtgcggggtctcgacgacgcccggtccctcatcgacatcggcctcgaggaggcctcccacctcctcgtcgcctcctgcctccaggcgttcctgcgggagctccccaagtcgctcacgtgcccggacatcgcgcgcctgctctgcagcccagaggggcgagagcgccttgacatctccggtaacgcgtccttcgcgctctaccacttcctctcttacgtcgccatggagcaggacatgaggtcgaacaccacggtgatgctgctggagaggctgaatgaattcgcggagcagccatggcagaagcagctggcactgcaccagctcgggtgcgtgatgctccagcgcggcgagttcgaggaagcgcaggagtggttcgaggccgccgtcggcgagggccatgtgtactcggtcgccggagaggcacgtgccaagtacaagcgcgggcacaagtacgccgcgtacaagctaatgaacagtattctcggcgagtacgacgaacccgccgggtggatgtaccaagagcgctccctgtactgtgtcggcaaggagaagttggctgatctgcaggcggcgacggagctggaccctacgatgacattcccgtacaaatatcgtgcgtgcgcgctgctggaggaggacaatgctgcgtccgcgatcgcagagatcagcagggtcgtcggtttcaagatggcgaccgattgccttgagctccgggcgtggttctaccttgcgcttgagcagtgcgagctggctgtgcaggacgtgagggcgatattgacgttggatccaacctacatgatgttccacgggagaatgcacggggagcagctgattgagctcctccgaggacaggtgcagcagtgggatatggcggattgctggatgcagctgtacggtcggtggtcggcggtggatgacatcggctctctggcggttgtccagcagatgctctccagggaacccggaaacagcagcttgcggtttcgacagtcacttctccttctaaggctaaactgtcagaaagctgccatgcgcagtttgcgatatgctcggaacagcacgctccatgagcatgagaggctcgtatacgaagggtggattctgtatgacagtgggcatcgcgacgaagcgttagccaaggccgagcagtcgatcggactccagagatcattcgaagccttcttcctcaaggcgtacgccttaggagattctagccttgacacggaatcctcgctctccgtggtccagcttctggaacatgccaacagctgtgcttccgacaaccttcgcaaggggcaggcatacaacaacatggggagcatctacgtggactgtgacatgctggacgaggctgccgagtgctacggcatcgcgctgaacataaagcacacacgggcgcatcagggcctagctcgagtccactacttgaaaaacaggaaaaaggttgcgtttgaggagatgacgaagctcgtggagattgccagcaactgcgcgtcggcgtatgaaaagcggtcggaatacggtgagcgcgaagctgcgaggagcgacctgaacatggcgacgcttcttgatcctaccaggacttatccttacagatacagagcagctgtactgatggacgagggcaaggaggaggaggcgatcgcggagctgtcaggagccatagctttcaagccggacctccagctgctgcacctccgcgcggcgttcttcgactccatgggcgagcgcgagagcgccctgcgggactgcgaggccgcgctctgcctggacccgacccacggcgacacattggagctgtacagcaaagcctccaccaccaaggccgaaccccagagctag

SEQ ID NO: 10780 - DNA, 1272 bp, Zea mays
  Peptide Sequence Number=SeqID_54155
atgatgagagagggtgatgcacgtgttacgcttctaagaagcaagctccatggcctggtcgaaaggaaccgagatctggaagaggaaaacaagcaattgagacaccaagtgagccaattaaaaggtcagatctcctctctcgaaggccaggaaactaataagaggatgctgtggaagaagctggagaattctgcaaccggcatcagctactccaaggaaaagcagtttgtccagagcaacgatggtgctaaggaagccgtagatctcaacagctcattgtctcacagcaggcagcaattctccagtgtaaaccaagtgagatcaagggcgccaagggttccaaatcaacctcccaatccgacaagcacccaaccaaaggcaactgtgagaaaggaaggatgcatggcccctcctcctcctcctcctcctctaccttccaagttgcagaggagcacaaaggcgatacaaagggtaccagaggtagtcgagttgtaccggtcgctagtgcggcgtgaaggcaaaaataatgcaaagtctggatccgtaggaattccagcagcaacgaacagcagagagatgatcggggagattgagaacagatcagcttatgttttagctattaaatcagacgtagaaaatcaaggcaacttcgtgaacttcctcgcaagtgaagttcaaaacgcagcatacaaaaagatagctgacgttgaagagtttgtgaagtggcttgatggggaattgtcataccttgtggatgaaagagcagtgctaaaacaattccccaactggcccgagaagaaagcagatgccttgagagaagcagcattcaactaccgcgatctgaagaacatagagtcggaagcatcatccttccatgatgacaggagagtggccacacctatggctctcaagcgcatgcaggcattgcaggacaaaattgaacaaggtattcataacactgagcgagtaagggacagtgcaagcggaagatataaggaccttaagataccatgggaatggatgctcgactctggagtcataagccaagtatgtcttcctttcacactaaagatggcttccttgaagcttgcaaaagagtacatgaaccgcattgtgaagacactgaagtcagatccatttgcgaatgaggaggagctgcttctgcaaggtgtccgctttgccttccgcatacatcagcttgctggtggctttgacgaaggatgcagaaaggcatttcaggaactaaatactaatgcaagcaagtcagagtga

SEQ ID NO: 10781 - DNA, 591 bp, Zea mays
  Peptide Sequence Number=SeqID_54156
atgcccaaaccggacaaaactttccccttccttatcctcccggtgctccccagccttcttaaccctggggttggaccgcacgagttcggatcgagtgactgcccacacagtctcgagtggttgtacgataaaggagtacagaaacactttgccctacttccagatccacatttcgtaaccggaaataatatgttaatgcgggccatctctcccttcacaatgcaatgttcccccatgattcccggcctaggcagtggtagagagaaaaggttcaatttgggccagagggggtcgggagggggcttgcccacggggagggggcggagttccgcggcggggatcgccgccggtgggctctgggtggggaacgggggctggaaggcggtgcttcgggttcgtggctacgcgagggagctgctcggctcattcaattccttgccggaccaacagaggaggagagggaggaggaggaaaggactcaccggagaggaggacgacgccggctctttgcgaattgggctcgggggagggggaagagggatggccgaagctggtgcgaggaataaggagctcggggcgagctttttatag

SEQ ID NO: 10782 - DNA, 678 bp, Zea mays
  Peptide Sequence Number=SeqID_54157
atggctgaaaggtaccaactcccacggagttgcgttcctccaacgacgaggcaaaaagacggcgggcatcccccatccgggggcttggaaggtggaaagacacggtgcataagggagcgagaagacacggtcgcctttcgaaagggaccaacgggcgaaagaggcgggcagccatgcaggcggcatgcaaccgggccaagtggacgcgcttccccgactcccgacacgccagcatggaggcccgggcccatgcgtcgcgcaaccggcgcgccggatgctgcatgcaagcaactgcaccgcctgcgccaccaccgcgcctcctcgattgcggaaccaataccgcgactcgaggcgacccagcgcgcgacccagcagcgccagcccgacgcggcggccaacgcggccaaaagtgggccggcagtaatgacggtggcaggcgcgcgggagcagcggtcacgtcgtcagccaagctcacgttccatccgggggcagcaaaagaaccccctctcacggcgtgaagacaacgcgcccgtggtccgttcctcgaacggctcgcgcacgcgcaacggctgccccgccaactactcgccccgtcgcatcaactccgcgactagacagacgacgcttctggcaggagcaacgggcgacgcttcgccttcgccggaacaaccgcgctaa

SEQ ID NO: 10783 - DNA, 1392 bp, Zea mays
  Peptide Sequence Number=SeqID_54158
atgcaggcgcacaaaagagttgttgataaaccaattactgaagttagagaagcgggaatatgcatgcgtgaaaattctttctatgtagacatagtgcgtaggagatctttaaacatacaaggacatgctgctggcaatattagggcctttcggtcgcagaatatctttaagaagattgattttagtagtggagcagtttcagaggccaatgaagcccaacccagcccaaagccatcatatcgtggcactccgtccaaccctccttggtacaacaacgacgacgacgaggccgtcgtcactccctccatcccctatgacccgccggcgctatggaaagtgttcgagaaggtcgtggtcgagcggctgatgatagacgtcctgttcggcgtcctactctccggcgggctggattcgtcgctggtggcggccatcatcgttcgccacctcaccgggacagaggccgccaggcgttggggcaccaagctccactccttctgcgtgggcctggaggggtccactgacctcaaggcggccagggaggtggcagagtacctaggcaccctgcaccatgagttccacttcaccgtgcaggacgacatcgacgccatcgaggacgtgatctaccacacggagacgtacgacgtcaccacaatcagggcgagcacgcccatgttcctcatgtcgtgcaagatcaagtccctcggggtcaagatggtcatctccggcgagggctccgacgagctcttcggaagctacctctacttccacaaggcgcccaacaaggaggagttgcaccgagagacgtgcaggaaggttaaggctctgcatcagtacgactgtctgagagccaacaaggcgacatcggcttggggcctggaggctcgcgtcccgttcctggacaaggagttcatcaatgcggccatgagcatcgatcctgagtggaaaatggtctggcctgatcttggaaggattgagaagtgggtgctgaggaaggcattcgacgatgaggagcagccattcctgcccaaggtgcatatcctctacagacagaaggaccagttcagtgacggcgttgggtacagctggatcgatggccagaaggctcatgcaacatcaaatgtgactgacaagatgctgtcgaatgcgaagttcatcttcccacacaacactccgaccaccaaggaggcctactactacaggatggtcttcgagaggttcttcccacagattgcttcgggagatgatggagagcaccgcaccaagatgtggacagagcaccgtggatggatgaagcagcctgcccgtcatggtgggagaagcaacagtgggcagtggcaaagctccgagagcaggctcagcaagagatgtgaattgagatgtatgggcgattga

SEQ ID NO: 10784 - DNA, 888 bp, Zea mays
  Peptide Sequence Number=SeqID_54159
atggatgtgagtgtgaccgcactttcttttccacctaatgaaatacatgctcaggcgcattatattcatgaaaacatacacacgtggagagtggtggttctatatgcctctatctacaaggatgtccctatattggttaacctttctgatttcaccatcgtgcaggtgctgtcagtggaacctctgctattgggcactgttattcaaacggtagtcggttgcccccttcgttgctcattttgtgccacggggaagggagggtttgcaaggaaccttcaaccacatgagattgttgaacaggtgttggccatcgaggagacgttcaaatacagggtgacaaatgttgtgttcattgggatgggtgagcccatgatgaacctcaagtcagttctagaagcacaccaatgcttcaataaggaactaaaaattggacaaaggatgatgacaatatctacagttagtgttccaaatacaataaaaatgctagcatctcacaagcttcagtcaacgctggcagtcaggagaaaatattactcagcgacattactaacatggctagagtggatttcgtggccagctgggattaacgatgaaaaagagcatgccgaagagctagcagaactacttcgtatgtgtggaggtggttaccatgtgaacctgattccctataacccaattgaaggctccgagtacaagagaccttacagaaaagtggtccaagcctttgttgatgctttagaagcacgcaagataaccgtcagcgttcgacggacccgtgggcttgatgctaacgtagcctgtgggcagctgaggaatgcgtttcagaagaatccactacttgagattgaaccgtcaccctccatagagcggaccctcgtaactgcttaa

SEQ ID NO: 10785 - DNA, 1785 bp, Zea mays
  Peptide Sequence Number=SeqID_54160
atggcgggggcgcccggggtcgggccgggtgcggggggtgggggcggcgccgctgcggggctcaagacttacttcaagacgcccgaggggaggtacaagctgcagtacgagaaggcgcactccgcggtgctgcactacagccacggcggcaagaccgtctcgcaggtacggatgggaactgggaagtgcgcttctgccagggggatctacgcggattgctgcggtggatggatgcttttgttgacagtggcatacctcaaggagaagcctgctagccagggctctcagccatcaacaccaagcgccagcagtgggatgcggtctgcagcagcaaggctgctgggcactgggaatgggagcaaggcacttagctttggtggcggtaatggtgcaagccgagctgttgctggaagcagccgtgtaggaggcggccttggtacacctacaggccttggtggatcacaggggggcacaaattatgatggcaagggtacatatattgtattcaatgctgctgatacactattcatcagtgatctcaattcccaggagaaggatccactaaagtccatccatttcagcaactcaaacccactgtgccatgcattcgacccagaggccaaagagggacacgacctgatcattgggatgggatcaggggatgtctattcaatgtcgctgaggcaacagttacaagatcctggaagaaaacccgtggcagctctacattacaataagggtgataaagatgtctcacccaatggaagacatgatcaaggtagcataggtacatgtctgaacaaggatgggaacacagactgtacgtttccagctgtcaaggatcagtctcagtttatggttgcacatgcaaagtcgagtaaggttcatcttcatctatttgaatacagacataaaaaccaagagctaaaacaactactattttggaatgaggggagcaacccagtcgctaggtggcatatatgtcaaggttcgatcaatgcaatttccttttcaccagatggcgcatacttggcgactgttgggagagatggttatttgagagtattcgatttttcaaaggaacaactaatatttggtggaagaagttattatggtgcactgttgtgttgcacttggagctcagatggaaaatatctattaacaggtggtgaagatgatcttgtgcaggtcagtggagttgcttttgattcatattggtccccaccaagttctgatggaaatggagaaaatgtatatcgctttggttctgttgggcagatcagggataagaattacttcttttcagtactgatggggttattttctcatgatgttttgaaagtaatttatgtttttgacacccaactacttctgtgggacctggcactggatgagattgttgtcccactacggcatccttcaagtgcctcacctacgtttagcagcgggagcccttccacacactgggacaatgcatgccctccaacaggtgttcttcaaccttctcctagaatgcgagatgtcccaaaactatcgcccctagttgcccaccgagtacatgccgatcccctatctggtatggtgttcaccagtgaatctatcctcaccatctgccgcgagggcctcatcaaaatctgggttcgaccagagcagagcgaaaacaatcagcaatcgaattcttcagaatttgctttaggccctgcttcgaaggatagggcgatcacatcttccaataaagcaagtagctccagctttaagaagctgccgcctgttcttgtcacatga

SEQ ID NO: 10786 - DNA, 834 bp, Zea mays
  Peptide Sequence Number=SeqID_54161
atgcccgccagcgggtctggtccgtgtcagcatacatctgctgggagtgttaccggcgatctgccaacggctactgtggccccatcagtgtcggcgccaagcccatcatcggcggccgagggggttccagctacatctgcccccatcgtgcaggatgacgctggtgccgaggtggcgtcatcgagcccccaggattcgcctgtcaccgtcgaggcaacaccttcgggttcccaagttccagctgggggtccagaagcggcggtgccgccaacatctattgcagaccctccaacggcgataccgccgggtgcaccaccagtggtgctgattcgcgctcaccaggccctccaggaaactgaggcagctatccaacgagagtggaaggcgctcgagaccgagcaccagcgccttggcgactggtgctcccaactggagaggcgcactaaggcgacatcctgccaattcgcctcggagcgggccgagcttgagcaggagcgtgaggacttcaagaaggacaaccggaaggtgtctgaccgagaggaggagtgggacaagcaagctgcggctgaggcgaagctgcagcaggaactctccaacaaggctagtgatattgctcgtgttgagggaaacctcaaggcgagggaagcctccctggcgaaacgaacaactgacctcgcttggcaggaggaggacctcgccttcagggaggagatgtgggcaaggtggaacaagctgctagatgagcttgagctcgaggccgaggagaaagtgaagcgtttggaagggaaggtgcgggcgctggaggggcaggtccgccagttccaggcggcatag

SEQ ID NO: 10787 - DNA, 689 bp, Zea mays
  Peptide Sequence Number=SeqID_54162
ggagaaaactccggctgggcgcgaccaaggactgggcgagcgcgaccatcgtcgccggtgaaaagccgagcaagggaggggcgctgcagggaggaagcacgcgtgcgcaaggaagctcgacggctgggcgagcacaggaacgcgcgcaggagctgggacaggccgtgcgcagggaagaagacgcgcagaggagctgggggagcagagctccggccgagcagaggacaccggcgtccatggcagggctggacgcgctggaagaaataggagaccacagcgcgtgtggcgagcaccggcaagcagcggggcgttggaatccgagccaggggcgcagccatggacggcgcaaggagccggctgcggccagcagagatgcgcgcggtagaggagctcgaactggagaatcgggggaagcaagcagcaggagcgcgcgctcggacagggaagagagcagggagcttcaatgcggagcgagcgcaggaagatcggagaagaagacgcgcaggagctcaggccgggctggcccctcggaagggttcgacagccgccccggagcacacagagtgacggatgactctgggtacgtctgttacatggccgaggctcgggctacgctcccgagaggctcgggggctgctctcgcaccaggctacgaccaaactgttgacagcgtcaacaaaccggcttaa

SEQ ID NO: 10788 - DNA, 2010 bp, Zea mays
  Peptide Sequence Number=SeqID_54163
atgtcgtcgattgatgaatggtgtgatgctaattggcaggtcatggcggcgagaagccccaacgtgaggctacagaaggctatcgacaggaagaaccagagctcgatgctgaaatgcccgcactctgcgccaccgaagcgtccgagagctcggttcgcgaggctgagcgcagagactgaggccgcggagaaggcaccggtggagcccaagccaagggtcgagcggatctgcgccatgcgagcatccccaattcgcaccaagacagcgagggtcgaatgtcccagcgagaggaagaaggcactgaccacgccgcggagcaaggccgttcggtcgaggcaggagctgttccacaacgtgaagcaccagaaggagtcgttggccgctgcagccaggaaagggacagttgtcaagtctctgttcatgagcacgacgcgaaaaaaggaaccggtccagacgctagcggcagataagagcaagggggcggtgtccgaggtctgttcgaagctgaggaagctgaacttggcgtgtcgggaggtgccgagcaggtacatatctcagcctcaaccgaagaatacgaagactgccaagaagagtgaagagaccacggtggccaagagcgagaagcgggggctagaatccaaaaccaatgccaagaagaaaattttaggacgctcagtgaagcgtgctaatgccggacctaacggagagaaccgaaatggttgcagcactgctgcagacgagagctcgcttgcagaaactgctggctcccatcaggaaaggaaggttgtgctgcgggaattgagaatcgaggtggatgcatcgcgacgtggcaattcagatgacaacaaggagaatgtgtccagtgctctgagtgaagaagcattggacaattcatcacattatggaagtgaaaacagactgttggagaacaatgagaatgttcctctgaaggagaatgttgctctgaagaagaaagtgcatcaagagcaggcaggaaagctcaagaaaaccaccaatcctagggtcttatgggatgggggccagtatgatccagccttatgggctggcaaagtgggcaatagttggcatacaactgacgacataacggttacatggaaaagcatgacatacattgctgataagaacaacaagtgggcatcatatgctggacctggtggttgggatgacccagatatgctggaagtaggcaatggtggcatgaccttagcagagtatctctcacattttagcatatgggctctcatgaaggcccctctattaattggttgtgatgtcagaaacatgacttctgaaacaatggaaatactgagcaacaaagaagtaattcaaaatcctcttggagttcaaggaagaaaaattttaggacaaggaaaatatggatgtcgtgaggtgtgggctggtcccctttctgggaatcggcttgttgttgctctgtggaaccgttgttcagatactgctaacgttacaatgaaactgccagcagtaggccttgatgggtatgctgcctattctgttagggatctgtggaagcatgaaactctatcggaaaatgtcgtaggaacttttggcgctcaagttgacgtgcatgacaccaagatgtacatctttctctgcaaccatgtcgcttcggaatactatgacccaaaccgttcaatgttggagttggtctttgctcctgtagacgaatggattggtcgaagtgacactgaaatcatcgatgcaactattgaagagctagccaagttatttcctaatgaaattgctgctgatcagagtaaagcaaagattcttaagtatcatattgtgaagacaccgagatcggtttacaaaactgtcccaaactgtgagccttgccggcctctccaaaggtcacctatcgaaggtttctatctagctggtgattacacaaagcagaaatacctggcttctatggaaggtgcagtcctatccgggaaagctttgcgcccagtccatagtgcaggattatag

SEQ ID NO: 10789 - DNA, 927 bp, Zea mays
  Peptide Sequence Number=SeqID_54164
atggggagaggaggaggaggaggtggatccagggcgtccatggcggggaaccgaggtgccagggcgggagtacggtggatccgcagcgcccttcgggcgagattcacgacgggggaaggggcgcggtggaggggtgcggcgagggcaggcggcggagtgagagggagaggcagaacccgagccgaggacgccacgctcgcctacaacgccgccgcgctccgcttctgcgacggctgcgccaagctcaacttccccgaggacaccgccgcgcgccacgccagggacgccgaggcggcctccgccgcggccagggtggggcctcccgccgcgctgctcgactcgcaggtcgtcagcgacgacatggccgattacctcgactattcgaggattctcgaagccaccgagcctagcggccacgggaacggacgcttcgtcggctccgggtttgaaatgggctcggtggcggccgacgcggacgaggggcggtggggaagggacgctctcgtcgctcctcatctccgcgccgctctccttctcctcctcccgcgcgctgctcatctccttctcgccgctcccctccgcgacctccgtcgagcccatcttcgtcgaggccccacgcggggcgccgtgcccaggatggcgcgggggacggtgctgcgcggttgtggtgggaggggcatggcgggctgcttccatcacgcgtgggagggtgcacggttgtggctagcgcgagatccgcgggggcaagatccgtggcggggcgacgggggaagaatggaagggcaggcgggggtagggcgggggctggcgcgagatccgcgaggggcgagatcgggggcggcggggaaggactgcctgcttccatgcgcgtgcgtgggagatcggcagaaccgtgcaccatttcccttgtgtggacgcctacattag

SEQ ID NO: 10790 - DNA, 1923 bp, Zea mays
  Peptide Sequence Number=SeqID_54165
atggcgggcaccacaccagggtacacctacatcagcgcttggccattggaaaccgcccaggagacatcaccaggcggcggcgcgggcgcttgcaaggacgaggccgcccttgggctcccgtggtccgaaatgttccgctccgcctcgcgccgccggcccaagcaggagtccgacgatgcgccgcccaagaagcccgcgctgaagacggcgggtgccaaggagatgaaggccaagccgtcgtcggtagggactggagctggggcaggagccgacatcgcagggctgtcgctggagcccgacgcgcgcctggcgctctacatcgccatggcgcacgcgggcctcgccaccgcgctgctcgtgctctacggcctttacctgctgctcgccgacttcctccgcccgctgcagtgggcgttgctctgctccgtcccgctccgcgagacgcagcgcgcgctcgtcgccttctgggagcccccgctccgtggcggactcagcgccgcactgctcgcgctgccactcgctgtgctccggtcctcgaccgcaacgctcgccgacgcgcgcgccgcgctcctgcgccgcccgctcccgtcatcgccggcgttcccgcgcctcctccgctggctcgtctccttctttttcttcctcatcctcttcgagcgcctcggcgccgccaccgcgctgctgctcctcgttttcgcgctcgcattcttcgccgcgtcccccaagctcaaacgcgctgcctcctcacgcatctccggtcggcctccctcctctcgcggcctcctattaactggaggcatcctccgccaccttaagacactagtcgctcttggtctcatgcttggtatgatcgctgggttcataactggcagcatcttcttctcctacaagattgggctagagggcaaggacgccgtcatgtccctcaagtcccatgtcgagaagagcaactactcagagaagattggcttgaagaagtggatggacgacaatgacattcctggcttggtcgatcagtattctgccaagatctatgacaccttgtgggagcaggtcgaccaattggctgtgcagtacaaccttacagatttcactagtggcttccggcatttcttgatcagccaatcagttgaccccaaaagcaaggcgctcatcagttccagaccgcacccatactcaatgaagttgcaatcaattgcgacacgtgtgagaaacagagaatgggtggagatttactgggagcttgactcattctttagggagctgttaatcacaagagaggatttggtcatcaaggccaaagagcttgctttgcagggaacagaaatcgcaaagaggcttctgtccagcagcacatcggtgctgggcggtagtgccaatttgatgttgtcaatcaccctccgcattgtctcaggtgcggctgaggttgttaatttcctgtcacaactgatggtgttcttgtgggtgctgtattaccttattactgtggagggaggtggagctacagagcaaatcattgatcttttgccagtgtcaaaacaagtaaaggaccgctgtgttgaggtcatggatcatgccatcagtagtgtattgttggccactgccaagattgccatattccagggggggctgacatggctattgttcaagttcttcaaagtgcattttgtgtacacatcaactgtgcttggattcataagtgcacttgtgccaatacttccattttggctgtcctcgatatttgccacagggcagcttctcatggaagggagatatgttcttgcactggtggtaactgtgatacacctcatgctcatggattatggcacaactaccattctggaggatatacctgggtacaatgggtatctcaccggcctcagcataattggtggcatgacactgtttcccaatgcactggag

SEQ ID NO: 10791 - DNA, 747 bp, Zea mays
  Peptide Sequence Number=SeqID_54166
atggtgacgaacagttccacggtgagggtaccagtggcatggctcgagcaaaggcagagaccgacgcagggagacaacaggactcgcggtcacgacaacgacgggatctgcaagagtacagagacgcacaacagcagaaccaatcaaccggtgaagaaggaactgaccgcactcgaactcgaaacggagtacaggcaaggaataatggaaaacgcgagcgcggggaacggcagtcgaagccgagcagggagaaaactccagctgggcgcgaccaaggactgggcgagcgcgaccatcgtcgccggtgaaaagccgagcaagggaggggcgctgcatggaggaagcacgcatgcacaaggaagcttgacggcttggcgagcacaggaacgcgcacaggagctgggacaggccatgcgcagggaagatcgactgggggaagggcgcacgaccaccatggcagagggagaaaatccaacgtgcaagaacgggcaggaaggagcagagaaggagcgctccatggcggggcgagctccaaacttggtccaagaacgcgcgcgcacgacaccagggactcgcggcaggagcagcgagcggcagagaccgcgccaagggaagggaaatccgagctggggcaagcttggttgggctggagcgcgcacgggaggagaaataggtggccgggcggccgagcggatgaaggcgagaacagcggcggccgacgggataacgacgacgcgcaggggatga

SEQ ID NO: 10792 - DNA, 1116 bp, Zea mays
  Peptide Sequence Number=SeqID_54167
atgcagcagttggggtattttggggacggtcttgggcgcgtctcgagggtggaagaaattcccgagcctgagggcgagttagtggtccaccagttgacacctaacgccgtggtggccctggcgaagtatgtctgggcggtgacttcgtacggcggtcagccttccgtagaggtcttctccaagaattactatctgcattggcaaaagagaaagattggaaacaagattgcacagtttggatccgaagtcgaagacctcccagggctccccgcggccgtgatatgctcccattattatgtggcattcccacaatttaaggtggcggaggatgatgaggacgaagtgccctccgccgcgttcgttcgtgaagtggaggacgaggctgtgaggattgtggggtggtatgcgccgaggacggagactctgcggagttgggatattcgagggtccaatgttcgcttgaatcgggtcttcgagttaaaccgtttgccatacggtggttaccctagatatgatgctgctgcagctgttgaccgtcgcgggaaaaaaccagtggtcgtggctgaggaaggcccttcgccggaggctgccccagccactaagaagagaaaaatagttgatggggacttgcgcggccctcaggggaaggatgtcttcgcccgagctcctggagtcttcgacgcgaatgctgaaatagtgatggacaaggatcatcaagatgcggcacggaagcgccggacaatcactagggtcggggaccctatgcgcgaggtgaaacaggcgcggggaggcgcgaagtccgccgccctggcagcagcaaaccaccgccgactgggtcttgaacaaggttatggtgtagggtcggatgcggggcagctggctattgtcccgtctccggtggcggccacttcgcctgcggtggcggttggagcgaaggacacttcgcaggacccatggtccaacttctgtgccagtggccagatttcgtcggccaccgccgccaaagacgtggcgggctctgtgtcccagcagctgaggcatgcgtcgtggcagctgaagcatcttaagtgcccaggtcgcacccttaagggcagcaacacacttaaacaggaataa

SEQ ID NO: 10793 - DNA, 1527 bp, Zea mays
  Peptide Sequence Number=SeqID_54168
atggagctgtgctcggccatgggaagggagatggcagggggcgccatggccagccggcgctgtggccaagcacggaggctccatgagcacctagcagaggtccggccatggatggatgatggagctcgggaggtgggcgtggaggtgagggagaaggctgctgctgcattttggaacagagaggaggagaagtggcgtgtgggggaagggaaggagaggggtgggctgccatttattgagctggagctctggacatgtcaggtggcagtgagcagtggcaggtggaaaaatgtggacattgggcggccatttttggcattttctgcttgttttcggaccttggtcgctgtagaagatttcttccttgatctgcactctacaattgttgcggccgccttcgccgaccatattgcgttgggcgccctgactttggagttcgctgccgagagggcaacgactcgagggcagatcgagcgcctccgagcgcagcatacggatgctgttcaggacaatctgcgcaagccgaggccaagcttgcgcgggcggaggccagtctcgcccgccaacgcccgaggagatggagacgaggctcggcagcctgcgcgaccgcctggacaagacagaagcctcgatgcgtgcggaggtcgagcggacgcatacgtagctcgtggacgggaggagctagaggtgctcccgaccattgtgacgggcctcatgtccttcgcctccctcgtcacttgcgagggggccgtcaaggacccggtgctgaagcggtcggctacggcgctttttgataggatgtggggcactcacggccaagagactgtctgggagaggttcgaccgggcgatggatcagttaaagatggcgcatgacgaagaggttgaggaccttgatgatctagacagtacactgcccgaggcatcgggggtggagcttgcgccgccatccgatgcaggcgagggcccctcggcgacccccgcaccgactggagctggcgaagaccccacaccagccactgtgctggcgagtgaggatgcttcgaaggtggtgggcgaaccagctgccgaagacccagcggcggctgctgggccttcgcaggttccgacgtttgggcctgcacaagcaaccgctgctggcaatactgattttgtggtggcctcaactgagtcatcagatgaaggcttggattattttgttgcgttaaatgtggccgcagcggagtcttcgctgcgtgtggagggtgtcggggatcttcctggtgagagtactgagcataggcagcgaagggtggtgtcgaaacgcagtgtgggtgagttttcgcgaagtggtaggtgccgtcatatggagatggagcacggtcgtcttcgagtagactggattggtaaacgagaattgttgaccttgccgattggggcgagcataggtgagggggatctgcgaaatctttttgagggtgaggagttgaggataatgttgtttaattacagggagatgggtatcatcctgaaggttgaaccgatgtaa

SEQ ID NO: 10794 - DNA, 909 bp, Zea mays
  Peptide Sequence Number=SeqID_54169
atggtcggcgagacaagtccggcgatgacgagacactctatgccgtcgggccgagccatgctgcgcgacgctgggcatcgagcagagatcgagctggagctaggcatgacacggaaggacagacagccatctgggcagcgcgcaggcgcacgcataggggcggagtcaggattacgatataaggggggccgccttgggaggggccatggccctgctggccccctggctccgcccctgcgcacgcaacgaggggagcaggagcagggacacgacagcagggaggagcaggaaggttgggcgaccaagcgccgtctcctgcggcgagcaccgacgagcagcagggcatggccatggatggaggagctggagcgccggcagagggcagagatggagcagggaacttggccaggaaagggactcggaaccgggcgcggtggctggacacagggcgagccatggagatgggcgccgagctccatggatgcagggaggagggaggagctcgcaggctggctggggatggaggaggagaaatccacgcgcgccatagaagggcttcgacagggacagggcactgctgggaaatggagggagagaagcaagggggcagctaggctcttggtcgaccggagttggaggaagaagccgcggcctgaacgccggcgagccaggcgcggccatggctggggaagaggaacagcaggcgatttggagcgcggcgtgcttgaagatggagcagaggaagcagtgcagagaaggaacgcggggcgtaggaagagagaaacgggcgtggaggagctgcgcgacgacgatgacgacgaccgacggcagccgcgaccagataaagctcccgcgcgcgtaagggataaggaagaaggagacttagagcggtgggatttttcaggctga

SEQ ID NO: 10795 - DNA, 171 bp, Zea mays
  Peptide Sequence Number=SeqID_54170
atggggaagcctgtccgatcactcctcatgctcctcctcagccgagtgaccgcacttgtacccaccataaccggaatgggagaccacgtctcaggtcgcgtgaggggtaaagtccactgccaggttcaatcagtggacaatttagagcatctccaacaacgtgacctataa

SEQ ID NO: 10796 - DNA, 144 bp, Zea mays
  Peptide Sequence Number=SeqID_54171
atgacatcacaacacgaggaagaaaccgtggtagaagatgaggttgtctcccaagctgaaaatcctccaacggagaacaacgtttacttcgacatctgcgaagtgtaccctaaacctcctgcaacacaaggcaagcccaggtga

SEQ ID NO: 10797 - DNA, 1188 bp, Zea mays
  Peptide Sequence Number=SeqID_54172
atggggaggggacagttactagaggggagggaggggctgactgctagagagaatgggggcgactgctacagagaatgggggcgtctgctagaggggagggaggggtggctagggtatggaggggttgagtggctccgaccatcatccgccctaggcccctaccccaaggcccatagaataggggactaccaccccatcgccgatgtttgtggcaaggtgtcagggaccgaggagccggaggccgagacctactgtcgtgcccctctcaggcgccgagcccgcgcaccgtccttcacagccaccaagctggtgaagcgtggtgcgggggcatctatgggggccttgtcccgcccccattctgcccaggaaccacccaggagggtgttgaggtggtcctgcccgctcctgcagcgccggttaagcccgggatcgctgcagccgaggcggttccagcatgccctacatcaccgatggaggccatcgtcgtctccactggggaggaggcggaggcggatgatactatgccggtacagcgtcacccacggtctccaacctcttgcgtgccatccccgacaccccgaagttgcgctgagctcaggggcgggggttgccgaggaggccggtcccacagagccacctaagggtccattcgaggacatcatcatccaacctcctctctcaggtggtagtggtgacctcgttcgcgtcgtgctggacccctcgatatggggaggtccgaccgtgacatggatgtctacctggcatgatatgtacttcgtcctcgatgacaccgaggagcgggagttgtgggaggacctgagggtggtgacccagctggcactgaggagcgacaaggtggtggacttgacgtcctggtgcatgggactgaaggaagagggcttagccgatcgcacaagcgtgcatcggctggtggacggagtccgccacatcaaggcagaggctgacaagcacgaggaggaaatgcggcagatgaagggaaaccttcaggcattgatggtggagtgggacaagtctcagtgtcaagacgtcgaggcttccctccgcgtcgactccctctccaagcacctggagggcgagcggtccgagggtcgagccttaaaggcccggataggaggcctcaagaaggatctggagactgcagtacaaacctctcggactctatcctag

SEQ ID NO: 10798 - DNA, 309 bp, Zea mays
  Peptide Sequence Number=SeqID_54173
atgaccaggctacgtggtcggaggaggaccagaaaagggtacgacagcagttggcgacgggagaggcggaaccacctcggcctcgaagtggagaacgtatccctcgcacacccgctcgagatcgatctcgtagtgggaggcaaccatgaccaacactcacttcaccccgaggtggacggcgtcgcggagttcaccccgtacgaagccactcagggcttgcatacggggccacgggggcccaccctgggggatgtccaccacgtcgaggtcctaaaggaacttcgccaccgcatcggacaactcccttag

SEQ ID NO: 10799 - DNA, 1290 bp, Zea mays
  Peptide Sequence Number=SeqID_54174
atggcggcagcaggcgggcggaagcagcagtcaaatcgtctgcaggctcacgtcccctcctgggacagcgatagagccctctcccacggcgacaggcaacacctttggcaggcgaagcgggcaacgcttcacctccgccataatgaccgcgtcaaaaaagggaccgagaaaggggatactccgaaagggatccttctccacgaaggaagcgggccccgagcccccctactgataagaggttcgaaggctggccccttggaagggttcgacagccgccttagagcactcgggctccgtgcccactactggctggaccctcggaagggtttgacagccgcctcgggccactcgggctccgcgcccactactgatcagaggagcgattctgtaacgaaatcccatcagagggagacatcaagccctcagaccctatcaaacgggatcgggtccggcaaatcacctgcaggctcgggggctgctctcgcaaacccggctccggccaaaccgttgacagcgtcaacataccagcccgagaacttggaacctgactatgcacccgggctacggccactggtaaacccaatcagcacaaagctgcaaaggcctgatgggcgtgattccggtcaaggctccgtccactcaagggacacgatctcgcctcgcccgagcccagcctcgggcaggaacggtaaaccaaggcagattcacgccttgcccgatggtctcctcaagcaacagacgcaccttcgactcacccgaggcccagctcgggcaggcttcgcggagaagcaaccttggccggatcactacaccaaccgaccgtatcgcaggagcattcaatgcaaggatcgcctaacaccttatcctgacgcacgctcctcagtcgacaaggccgaaccgccaagaccggcctcaggcgccataggaagctctgcctcgctcgaccccagggctcggactcaacctcgacctcggacgacggtcttcgcctcgcccgaccccagggctcggactcaacctcgacctcggacgacggtctccgccccgcctaacccccggggctcggactcaacctcgacgccggacaacggtctccgcctcgcccgaccccagggctcggactcagcctcgactccgaaaggcggtctccgcctcgcccaacccctagagctcggactcaacctcgactccggaagacggtctccgcctcgcccgacccccgagtccggactcagcctcgacctcggaaatggaaaatcagggaaattgatttcaaaaatgaatttttaa

SEQ ID NO: 10800 - DNA, 528 bp, Zea mays
  Peptide Sequence Number=SeqID_54175
atgggtgtagttcgcttcgccgtcgtgccgttaatggggctcggtgtatacggctcgctcttccaagggtggtttgccccttgggaggagtgcggaggtgatgaggatgatggtcatgattatgcttatggtaatgttcctggtattctttccatttggaaaggggtttacctagaccgatgggaggcgacttgcttggtgcaccgtctggagaacagtctccgaggtgtggagttctgctcagagcattactctatttctgagcgggactcagctgaggcagccatgcaagatgccgcatggcgtgcgctttcgcactactactcagtgctcggtggggtggcctatggtcttaacctgaggtattacccctgctgtccatctggccgcacaggaggcatggttgtctcatctgttggtgaggacaaccctaggttgagcagcacagtcaacctagccatcgtgctaaacatggagctggaccatgccttagatgagctgagtagggctcatgctgagatcgcttag

SEQ ID NO: 10801 - DNA, 324 bp, Zea mays
  Peptide Sequence Number=SeqID_54176
atgtcctcttcattggggggagagtggaatcgtcccccatcttcgacgacgaaccaaccgtgcctagggaagaacctcctcagcgggaagctcgccgacgaaggaatcgacgtcgtaatgcccggcgacaccatgaagccggagaaagagacccgacgcaacctatatcacaagatgagatcttggaggtgggcgaaaatccagatgaacgagtcttcagggaaagaaggaactcccgccgacgtgatcatcggcaagctcaagagcaagccgagcaggaggcgagacatcgccgagagaaccctctctttggacgaaacttga

SEQ ID NO: 10802 - DNA, 369 bp, Zea mays
  Peptide Sequence Number=SeqID_54177
atggagggatttggtcgcggtgagacgaggcacgggcgcacggcgttgggcgcggatggtccagttggggcagggcgcggtccatggcttagcgcggccgggtcgaggcgccgggcttcggtcggggtagcgagcaggcgctcggtgcggggctgggcaggggctcaggcgcggctggagcgggtgtcctggcggctggcgcggtcgacagcgggtgctcctggcagcggtcggctcggcggcgtcagggcgtcgcggcacgggcagggcgagcagggcagctccatgggcgcggcttggacggggcttcggctcctggtcgggcagggcgtggcggcgaagaacggcagcacacggcgaggactatag

SEQ ID NO: 10803 - DNA, 450 bp, Zea mays
  Peptide Sequence Number=SeqID_54178
atggataaaggaaatacagttttgcgctggggtccctggcgaaagttcttaaaggaattacagacaggtccctggtgcactattcacatgagtctacggctctacagaaaaccccctagggtttctggaaatcgaacccgcggtccctccttaatggagcagtggccgcggagaaagaaagaggcggaggggcttaccggcggcgagactgctccggtgggcgaccgaagtccgggcgtgagcgatcttgggcctccggtgaagttctgtcgggtccgaggacttggaaagcttcacgagctaatggtgaagctaaccgagtggctggcgcggcttagaagcgactggagggagctggccacggtggccgaggctcgggtggtgatggcgggcggtggcgcggcgtgctcgaggcgaagtccggcgaaccttggctcgggcaggacttga

SEQ ID NO: 10804 - DNA, 846 bp, Zea mays
  Peptide Sequence Number=SeqID_54179
atggacacgggtccatggggacgtgtggtctacgagacgaaaattggaataaggattaacgtacttcaaggagcaggttacacgacgcctccccagtacacggtgcagctgttcgaggagcaccgggtgccccgctgtagggtgaggatgaccctggagcctcatcccttacagccaggctggcgttcgttggactccgagtctttcggatatcgggctgaggatactatcgaggccattgctctccatgggctgaccaccttctgtggttttcaccacttggagctgtctactcatcccattggcttgttccccgctgaaaaggaggacgacccaatgtggaaagaccgagtggagcatgccaaggatatatgggctctttacccagggcagacttctcacttaacggtgcgatgcatggatgccatgtattgtctgcaagtgatgcgaggagaggcaatgtctcagctaatggcattgttggaggctaccaagatcaccttggataacagagaggaactggtggtagacctatccactgagatggtggaaaaggacctgcaggtggaacagatgtccaacgagattcaggagcttgaggagctagtgggaaccatggagaaaaccattgaggttctcgaggatcagctaatcaaaactcagcaacaacttgcggaagctaaccaacatttggatatgcaccaccaggagatccaggacatggaggccaatgaggatgtcgacatcgagggaggagaggagccggagcctgcatccagcttggacactgctggctcagggagaccaacttcccccgagtcaagcattgcctcgtttgtccattga

SEQ ID NO: 10805 - DNA, 1122 bp, Zea mays
  Peptide Sequence Number=SeqID_54180
atggcgatacagttcaatccaagggtatgggaagcttcacgcggtgctaaggagtcgacccgtgcaaggaatcgaaaaataactcattgtggagctcggtctacgttcgtcggcggtcggttgaagtccggtgaccttgatctggcgtctccgacgaggcagagctcgattcctcgctctgggagcttcaccgaggcgcgtagagtctctctcgagggttggacggggctggggatggctcggctggccggtctacggcggtgggtgctcgggcagccgctggcacgccatttgcagagcaaactccggcgatctcgtgctccgggcatgtcgaacacgtggaggtgttcttctgcccatgttcaaaagcttgctaagatcgcaaacgtgcgaatgttggcaaaaatccggcgcaggcctcttactggcacctatggctatctcttgtatccgggttggcgttcccttgacttcaagacgattggattaaggacggacgacaccactgaagcagcagctatgaagactctgacaactttctgtggctaccatcccctggagatggtgatgcaccccttgggactcttccctgctgagaagaaggatgaccccatgtggtgtaaccgtgtgagccatgtaaaagatgtgtgggaaatgtatcttgacttcgttgggagggtcactgttcagtgcatgagtgcgctgtaccgccttcatgccccgcagagtgacactatggcacatcttgctaacctcgctcaaaccaccaagctcaccctcaacaaccgagaagactttgtggtcgacttgtcctccgagttggtagagaaggatttgcaggtggaaaggttgagccagcgcattaccaccttggagcagcaggtggagatccgagacaacactatttatgtcttggagaaccaactccacgatgtgcagcgagaactcgaagaagctaatgaccacctggacatgcaccacttggagatggaggccaatgaggccggaagcgagggagaagaggctcccgaggagttaggaccagcccctggtgctaatgggactacctcctcgatgcccccttcacccgcatccagtgtcgcttccaccgctcagggttga

SEQ ID NO: 10806 - DNA, 117 bp, Zea mays
  Peptide Sequence Number=SeqID_54181
atgccgagaaatatgataaatcgttatggtgggtacaagtgcggtcactgcacgacggcagtcggggtcagtgaggcattgtacgccaaggcggtacttcttaggttgattggttga

SEQ ID NO: 10807 - DNA, 153 bp, Zea mays
  Peptide Sequence Number=SeqID_54182
atggccggaaggagagatggccgcgtggcagccggagttagtgccctccaccgcggcggtcttatccggagcaaagaggtcttcgcggggagatgctcgccgccggatcatctcgaccccggcgcaaatcgcggcgcggaaaggtcgtcggcg

SEQ ID NO: 10808 - DNA, 471 bp, Zea mays
  Peptide Sequence Number=SeqID_54183
atggagtcacggggctacgacggtggagcagggacacgacgtacgacggtgggggagctccggctgcgcgagaatcactcaggtgaacgcgggtcggctgaaccagggagggaaggggcacaccgaaggatgtcccgagcaactaacagtgaggcggagctcaccgtggcactggacggggcacgaatgcgacagtggccgcagaataggcggtggtcggcggcgggcggtggcggtgctctctacacgcgtgggcagagcaagagagagggcgagcgagtctggctgagggcgcaaatgggcgaggggaggtgggcgagtagggcgcggggctcaaaaggggcgcgggggctcggacgtggccggacaacgcgcggtcgtgggcgcgtccatggcgggagatcgtgggcgagaggctttttcattcaaattcaattcaagtttcaaattcaaaccaaatcaaatatttga

SEQ ID NO: 10809 - DNA, 477 bp, Zea mays
  Peptide Sequence Number=SeqID_54184
atggctgggagcagggaggagcaaccgagggaggaggagctgtcgcaggacgccggtcagaggtggaagaaggggaggacgccctggctgctgggagcgcctactggggaggttcacaggggcgcgcgtcgggaagaggacagggagctcggcatggctcccatggctaccgcggccaccaagaccagccatccaaattggaggagccgagcgcctagggcaggggtctggccatgggcaactgcgagctcgctgccatgggggaagcttcagtgcgccgaggaagaaggagcaggggggcgccatggagaggagcacggctccctgcgcgctggggaagaaggtgctgctgtgcgtgggggaagaaaacagggagagaagaaagtggcggctagggaaaatagaggggtgggagtggaaaatttccaagtgagcacccctatttatagaagaagccctagggttagggtttcctag

SEQ ID NO: 10810 - DNA, 531 bp, Zea mays
  Peptide Sequence Number=SeqID_54185
atggcgcagagccgaagctatgcgcaggggagcttcggcgtgatagctgaaaaggaaaccgacttaaaggggaaaaggctatttagaccccgatggattactatagagttgttagcaaatcatgggcaagaacaagaagggctaaagtttgtcgcaccactccgacgacaagcggaaacgcgagccaagtcccccttggaggactttggtgactccgagtacttagaggaggagttttcctctgagtccgaggggtcgccggggatcgctgccgaggtgtggacgtacatccgggtcatcgagcgccccaggctcgagggctcagatgagttggagatctcctcggacgaggggaactcctccgactcgtccgaggaggagagcggcggtgacggcgatgacgagtacgatgatggcgatggaggcaacgacggcggtgatggcgacggcgatggcagcaagggcaacggcggtagcggcaagggcgacagcggcagcaacaaggccagtggcaaagcaccactggtttaa

SEQ ID NO: 10811 - DNA, 504 bp, Zea mays
  Peptide Sequence Number=SeqID_54186
atgcaggaatcccttgcaggaccgccatcacagcaaaatcctcccgagggcctccccaggaatcccttgcaggaccgccatcacagcaaaatcctcccgagggccttcccaggaatcccttgcaggaccgccatcacagcaaaatcctcccgagggcctccctacactgaccactcccctactgcccttgcccctttcggatctacggtccgggttcttcctaaccgaagaggtagctaccttccaatcttggccgcccatcatcagatcaacggccaggagatcttcgcctaccaccctgcgcacgcgacaaggcagagaccacaggccacacggcggcgagctccccggcgcacccgcagtcgacgacgcagagctctaaacccaaattggacggagctacacgatgcaggggtaagggtgaacgcgcgaagaaggttctcaccgacggaagaggctcagtcgaagcagtccacggcggagggcgagcccgcggcggcgtag

SEQ ID NO: 10812 - DNA, 204 bp, Zea mays
  Peptide Sequence Number=SeqID_54187
atggcggtcagacgagggattcctgtcatgggtaaaaccctaagaaattggagaaaaatgagcccatatagagatgtcaatggggacccgatacccgccaacccgtggggaattcccctattagggtacgggtatgggacgaaaattgtccccatgggtatggatatgggacaaaatctccacccattgggtaaacgggtatga

SEQ ID NO: 10813 - DNA, 468 bp, Zea mays
  Peptide Sequence Number=SeqID_54188
atgggggtcgttgcttccactactgctactttcatgtcgggggagccaattgatgccgaggcaccccaattggtcccgtggacttgcgtgccgttagcctgcaaagctaagcatcaaaaagcttttgtaaaacaggtgatcaaggaaggtaatcaaattcaaggaagttcacgaaaaggtccccgggttcttgtcaattcacaactcgcagtccccgacggcgttcaagcacggccgcgctccggcgagcaactacgccggccgattgaggctaagactggtgctaatcttcggctgagcccaaattcgagttcctatgaacgttttccccaactaaattacactatcggtggactagggagctccggccacggtggccgtaagcacaacggcaacatgatcgtgttcccggcgatgggcgccagtctagttcaattaaaggggtcggggagcatcacagaggcatga

SEQ ID NO: 10814 - DNA, 817 bp, Zea mays
  Peptide Sequence Number=SeqID_54189
atggcgcgtcctgttgacgtggctggcctgcgccctaggttgggcggcgtggaggctcctccgaagccgaggtcgagtctgtcttccatggccgaggccgagtccgagcccctgggtcgggcgaggcggaggtcgtcggcagaggccagggcggagtccgagccctggggtcgggcggagcgaagttcgtcgtcttctggggctgagcccgagtccgagccctgggtcgggcggagcggagttcgccgtcttccgggtcttagcccgagtccgagccctgggtcgggcggagcggagttcgccgtcttccgggacttagcccgagtccgagccctgggtcgggcagagcggatcggagcggcgcaggcggcgctgtccttctgtcaggccggtcagtggagcggcgaagtgacggtggtcacttcggctctgccgctttatgctgatgggggttaccagctgagaattaggagtcttgagggaagctccgcctcgcccgaccccagggctcggcccccgtctcggcctcggacgacgaactccgcctcgcccgacccagggctcggactcagcctcggctccggaagacgacaaactccgcctcgcccgacccagggctcggactcagactcggccctggaagacgacgaactccgcctcacccgaccccagggctcggactcgacctcggctccggaagacgacgaactccgcctcgcccgaccccagggctcggactcggcctcggctccggaagatgacgaactccgcctcgcccgacctcagggctcagacttagccttggcctcagacgatg

SEQ ID NO: 10815 - DNA, 234 bp, Zea mays
  Peptide Sequence Number=SeqID_54190
atgccggttacccccctgtggaggtcatcggcggggagggggaccaaggacatctacgaaccccccaagtcgacccccgacgtcatctccgaaagcagcagtcgccgctccgtcaaggggagcaccctccggcgatggatggcggcaaccacccccgcggcgggaccgggaaaggggatacttcgaaagggatccttctctgcgaaggaagcgggccccgagcccccctactga

SEQ ID NO: 10816 - DNA, 1410 bp, Zea mays
  Peptide Sequence Number=SeqID_54191
atggctgaaaggtaccaactcccgcggagttgcgttcccccgacgacgaggcggaaagacggcggatctcccccatccgcgggcttgggaggtggaaagacacgatgcataagggagcgcgaagacatggtcgccttccaagggggtcaccttccttttaagggcagttctccctactcgcgtccccagccgtcacgggctgagtcttctccaacacactccaaggtcctccccaacggcgcgggggctgggacccacacgtcatgcaagccgactcagggcagaagaagccaaaccgccgcgcgcggtgcatacaaccgcccagcggttacaagcgaccctccacttttgcccagaccagcgggcgaaagggtgggcggccatgcgggcggcatgcaaccgcgccaagtgggcgcgcttctccgactcccaacacgcccagcctggaggcccaggcccacgcgtcatgcaactggcgcgccgactgcttcgtgcatgcaactgcaccgccacttgcgccaccactgcgcctcctcgactgcggaaccaataccgcgactcgaggcgacccagcgcatgactcagcagcgccagcctggcgcggcgcgactcgcgcacgcgcaacgaccgccccatcaaccactcgccccgtcgcatcaactccgcggcgggacaggcggcgcctctggcaggaaaagcgggcgacgcttcgccttcgctataatgaccgcgccagtaaaggctccgagcctccctactgatcagaggttcgaaggctggccccccgaagggttcgacagccgcctcagatcgcgtgggccctacacccactactggtcagagaggctcgggggctgctctcgcaaacccggctccggccgaaccgttgacagcgtcaacataccagcccgagaacttgggacccgaccgtacacccgggctacgaccagctcgcatgagggaacaaccagaccagccgaagcattacgcgaggcattaagacctcggaggagtgaaaccactcctccgaggcctcgggggctacacccggcgggtgcgctcgcgcgcacccaccagaacaaaacgcaaccgagaaaggctggtccccttgcaaaaaagtgcgacgaaagcctccaagcgagagctaacactccctttgaggctcgggggctactgtcggggaccataattaggggtaccctcaagactcctaattctcagctgggctcggactcgggctcaaccccagaagacggcgaactccgctccgcccgacccagggctcggactcgggctaagtcccggaagacggcaaactccgctccgcccgacccagggctcggactcgggctaagtcccggaagacggcgaactccgctccgcccgacccagggctcggactcgggctaa

SEQ ID NO: 10817 - DNA, 201 bp, Zea mays
  Peptide Sequence Number=SeqID_54192
atggctacctgcagcgcattaaatgcgcgccagcgcgcgcagaagtcaggcacgcccatgctggcgcaccggacactctacagtacatgtccggtgtgccaccggacatccaggcgggcccagaagacagagctccaacgtccggtgcacaccggacatgtccgatgcgccagccacgtcaccaaggtcgttgggttctga

SEQ ID NO: 10818 - DNA, 939 bp, Zea mays
  Peptide Sequence Number=SeqID_54193
atggcctccctttgtggcgtggtcggcctgagcgaggtggtgactcctccgaggtcgaggctgagtccgagccctggggtcgagcgaggtggagaccttcttccggagtcgaggtcgagtccgagccctggggtcgggcgaggcggagatcgtcttccggagtcgaggtcgagtccgagccctggggtcgggcgaggcagagaccgtcttctggagttaaggctgagtccgagccctggggtcgggcgaggcggagatcgtcgtccgaggcgaggtcgagtccgagccctggggtcgggcgaggcggagattcctatggcgcccgaggctagacttggttgctgtcagcctcaccctggcgggtggcgcagcagtcggagcagcgcaggcggcgctgttttcctgtcaggtcagtcagtggaggggcgaagtgacggcggtcgcttcggccttgtcgactggaaagcgcgcgtcaggataaggtgtcaggcgatccttgcattaaatgctcctgcgatccggtcggcttggcgaggcgatctgaccaagctttgtgctgatgggggttaccagctgagattaggagccttggggagccacagcgccgtcggctggggcgccgggtcgtccgaggccgacgaggacctgcgcgaggtggtccgcgccgcgtcgcagcgccgcgtggagcagcgccgcgccgagctgcaggccgtggcccggagccagagcatggccgcctcgctctccatggcgcgcatcgacgaggacgcgccgtgcgacttcggggcgcccggggcgctgtgcccgaggagccagagctgtgtcggcgacgccgcggggaggaggcccccaccgccgcggccacgggaaggtggcggccttgctctgacggagtcggagctgctgtccggccgccgccgtcggtggcacagtgtgtga

SEQ ID NO: 10819 - DNA, 231 bp, Zea mays
  Peptide Sequence Number=SeqID_54194
atggtgacctctagttcgacggtggggaaaacgggccaggccgcggcttctacccctctcccggcctcaaggattttcgtcatccaggccaagatggaagacgaggcgagtcggggggccgcctccgcgtgggtcggctgcccctttcttccccctgcgcccgggggtgaagggcgtcctcgagccccacggagacttcctccagccatgccaggatatgcagggcgctag

SEQ ID NO: 10820 - DNA, 351 bp, Zea mays
  Peptide Sequence Number=SeqID_54195
atggagtctgactatttccttgagaaacaaatgtgcaagggctacaccttcgtaggtggtcttcataggaatgaagtattggtaaaggttgtaaaaatctcgcgggcttttgatgctctacctcggtcacatcccaagccttgtctggatgcattgcagaagatgacgaagtttcggtggatatctgataaggttggcataggagagccaaaactcacagttactgaacttggcatcgagtcgatgtgctctaagtctttcaaggatgactcagaggtggttctcgtgctcttcttggctcttggagtagatgagaatgtcgtcgatgaagaatatgacaaacttatctaa

SEQ ID NO: 10821 - DNA, 157 bp, Zea mays
  Peptide Sequence Number=SeqID_54196
cagtagtgattgttcacgagaagctctttacaagagacggaacaggtccagaccccccgcagcaacggggcaggtgcagggttttgttggcagagcctgggcgggctttgggtatggtttgcggaggattggcttccttggcaggtccctgcagtag

SEQ ID NO: 10822 - DNA, 489 bp, Zea mays
  Peptide Sequence Number=SeqID_54197
atggcgtgtttgggcctcggcggccgcagaaaacacacactacaagataatccgatcctgcaggctcggatcttgacggttggagggagcagcagcaccctcggcgtcaactacaccttcggcgagggtcttctccaagaatccggctcgagcaggcggctcggctgctcaccccgaggcctcggccagctgtcccccgaagacatcagcccggcccgaggcctcggcagatcaactccggtgtcggtcccgctaacggacgacccggccaggctccggccgaccaagtcttcttttcgagccaactctgcctttgtccgtgctgacaccgctaccactggcttcggctcatcgaagagcggccgaggggttcctttaactaagcaagagaagcctcggatagcaaggccgaccaagccgagggactcctacacctccgggatacggatacctcactcgtcaccttcgcacggggcgactcacgcttag

SEQ ID NO: 10823 - DNA, 297 bp, Zea mays
  Peptide Sequence Number=SeqID_54198
atgcaggcggcatgcaaccgcgccaagtgggcgcacctctccgacttccaacacgcccagcatggaggcccacgcccacgcgtcatgcaaccggcgcgccggtcgctacgtgcaagcaactgcaccgccactcgcaccactgccgcgcctcctcaactccggaaccagtaccgcgactcgaggcgacccagcgcacgacccagcagcgccagcctggcgcgacgggaccgagaaagggggataccccgaaaaggatccttctccgtgaaggaaacaggctccgagcctccctactga

SEQ ID NO: 10824 - DNA, 1047 bp, Zea mays
  Peptide Sequence Number=SeqID_54199
atgcggtgcggaggtcgatggcgtcgcggtcggggtactgtggcggtgcgaagtggggagctcgcttggggggacctcgtgaccccgcccttgttcgacatcggcaccccctcccctagaccactgccagattccatcgtaggagctcctcgctcatgcccgcttcttcaccggcgattcaggaggccatgccccttcgtcgtgtcctgccttttggccacagagccacccctcgtcgcctctccgacccggccgcgtcccgcctcagttgatggatgggtgggacggcaaggccgtggtgtaccctcaccgcgcgcgagagctggtgctgcgattagctccttgacagttccacccacacctacgtgtgctctgcctcgccgcatcctgccgctctacgccgacatcgacaccaacaaggcgtgtggcctcggcctcggcgaccgcatcggcagtcgaggcacctcccattggtgtcgcggtggagggagcgaacaacacagctgcttgtggggtggggacagtgaggcagcaggactcaaggtccaggatgatgaacaacaacagtggtggcgacgcaggaggccctggttcaggcatggtccgggagtgccggatgtcccattgggctgcagggatggaaagagcttcacatacaacagtagtatcaacattgctatagcagtggccatagatggtgggttgattacatcggttcttcaagatgctggtaagctgattgccggagagattaaaatcaaaggggttgagctgcaggagagttgcagtttgtcgttcttttccatggtaggaattttcattgggttcatacaattattctctgtcgatgtttacaagaaaatagtatctaaaaacaagatgcttctgttccatgagggtgtgattgagactgaaacggtgggtaccagagtgaaggagtcggaggcagttgtagttgagaaagaggtcgaactgatagatgagcctcagattcaagagagccctccagttcctgcattgttggatgatgaggtggattttgcttaa

SEQ ID NO: 10825 - DNA, 258 bp, Zea mays
  Peptide Sequence Number=SeqID_54200
gcgactggggagaggaacctcgctcggctggcctccattgagcagggcggcgctgtgaggcttgggaaggatgaggcggtgcctaacttcgttgtgctcgacaacgagggaaggatggaggtcggcggcgtaggcgcgcgccactgtgtccctgtgaagatgacactgctgacaagtcgggccgagctggtggtgggggagaggggagggaggcaggggctgggatgggatggaccaaggtggagcgggcgggcgtag

SEQ ID NO: 10826 - DNA, 282 bp, Zea mays
  Peptide Sequence Number=SeqID_54201
atgaaggaatggcgccgccgtgggccaacttcgatccaccgccgacttagcctcgatcggtgcccgcgcgccgtcaccagggggccttggaagcttacactgggatcaccagcaatcagggccgtctccggtgtgaggaatttctcatcagggttcaatcatcgccaccgtccgcatcctaccgtggccagggtgcccttcgcggcaagctccggtgagaaccgtaccctcataatcactaggaaccaagtacctttagcactttttaacttagagttctga

SEQ ID NO: 10827 - DNA, 375 bp, Zea mays
  Peptide Sequence Number=SeqID_54202
atggcttatggacagttccttgcagcagcactggcccgccctccactcctagccacgccgttctctgcctcaatggagctcgcccttgctcggcttctccagcgcgcctggccgccgcgtcgttcctgctcatcaacgccagcaagcttggtccctgcgccctcccatctccctcacgttctctgtccagctgccatgggtgcgctcgccccggcgctatccatcagcgccaccagccgtgcccttgtatcccgcatcctcgactcgtccacaacgctgccccaagccaggggccttgtcgagctccctcagctcgcccccgaccacagccgcacgccaacctcgcccttggtcatggagcagcaacaactatga

SEQ ID NO: 10828 - DNA, 921 bp, Zea mays
  Peptide Sequence Number=SeqID_54203
atggctcgtcttagacacactgcacgtaagtcggtgattcctttcctgccgtctcgacttgcggagcgtcctctgcaccgcaccgtgtccggacagtcgagtcacctggagaggctgcaccaccgcctgcgtgaggagcaggaacgccggcgccagcacggagagcagcagggctcttcctcctcaccccagcaggaggtggagaccgtgaggccccgttcctctgttgcccagctggaggcgccccttgttccaccgcgggacgtcccggctgttggaggagctactggaggagaccccgacgacgacgactcagcccacaacacggagtcttctgagccgcaggaggcggaaggatgggtcgcccgacccatcacccgtgacgccgctcgcggttgtcacttccacgacgcactcgacaccttgctgcgccaggctttcgaccggcacacctggtcgatcgagtatcgttgtgtggtctaccagcacagtcgcgggaggtacccggaccgctgggaggctacctgcctagttcgccgtccggaggatgacctccggggtgcggaggctgtttcggagcactattccatctccgagagggacactgcagaggcggctatgcaggatgcagcacgacgtgcactctctcagtactgttctttgttcggtggcgtggccgacggtcttaaccttcggtactacccccgccgccctactggcagcacagagagtgtggttgtttcacctgttgggctcgaaccggagattgcggagttgcgtgctgagttggcagagcgccatcaccaggagggtggttctcccgctcctgttgggactcagcacccataccgctcaccgccacgtggtcaccacacttatggttcccctgtctgtaagaccaggatagatttggatccttag

SEQ ID NO: 10829 - DNA, 162 bp, Zea mays
  Peptide Sequence Number=SeqID_54204
atggaatttcatccccttccccaatccctgtgtcgcttggctgtctcttcctcttcggcggggtcggtgttgcccaagctccgcaagcgccgctcattcgactccactgccactagagagcaagcaagcgccccagcccctcctcgcagatttccaacatga

SEQ ID NO: 10830 - DNA, 276 bp, Zea mays
  Peptide Sequence Number=SeqID_54205
atggctggtgaaggctctgtgcggctgacagcgttgggggaaactcgcgagcaaccaccagggagcgactcggcgagcatcagagggcagcgccggcatggagagggacgagggagggactggcgcaggaagggagaaccaaaggcaagggaggggagggattcagggggagccgctaaggggagaggaggagatgggggcgagctgcaggtggaggagagcgcggctgtgagggagagcgctgggaggcggagcttgggcgagctccacgcctag

SEQ ID NO: 10831 - DNA, 915 bp, Zea mays
  Peptide Sequence Number=SeqID_54206
atgtcttcttcctcccttatgcgtcgtgtctttccatcttccaagcccccggatggggggtatccgccgcctttccgcctcctcgttggaggaacgcaactccatgggagttggtacctctcagccatcgtccggcttcaaggattttcatcggccggcccggccgcacccctatgccggcgatcacccaggatggtgaccaccagtttctgggtggggaagagcaagccgggctgcgatcttggtcccaccctcagcttcaaggatgttcatcatcctcgctggggtgggggccacgctgagccggcgctctgccttccgcgtgggtccgccggtcacccttttccgcggcgtttgggggtggaggcgctcgctggccctacggacggcgcggacttagacagcgtggggctgatcgacggcgggcgtcgtcacctccagcgtgtcggagtcgtcggccgggcttccggcggcccctcctgccggagggcgaccgtcgcgccaggccggtgtcccactcgtctgggaggatttgagtggggatctgccggggggctggtgtcccctgccatcggcgccgaggcggtggcggatcgagaagtcctcgtcgccgacgggatcactgccaccacccgcgccccgggccaccgtgccggcgtgcttgtcctcgcccctcgagcgctggcgggggcgagggcaagatcgcagcagcgccggcccactgtcgccgtagtcagaatgggcggcggcgagccgtccgtcggtcttctgttgctccgcaggccttccccatggagtggggttgaatccctcggcccgttcggccttgttgtctggggctcctctagcttagctaaagagacccctcggccgcccttcgatgagccgaggccaggggtagcgatatcagtatga

SEQ ID NO: 10832 - DNA, 738 bp, Zea mays
  Peptide Sequence Number=SeqID_54207
atgttcggattacatgtggcaacgagaatgatggttttggcattggctatggtaatgatggctcgtcttagatgcactgcacggaagtcagtcattcctttcttgccttctcatctcgtggagcgtccgcttcgccgtccagtgactggtcagtctagccacttggagaggctacaccaccgcctgcacgaggagcaggagtgtcgacgacaggagctggagcagcaggactcctctttctcgcttcagcaggagatagcgccccctgcaccaccactgagcgccctagccgctagagtagctgctggaggagacccagacaacggaggcggtgacgacagctcgagccacagcgctgacctttccgccgaccaggagttggaaggatgggttgctcgacccatcactcgtgacactgctcgcgggtgtcactttcacgatgcgctcgacaccctgctacgccaggcactcgaccggcatacttggtccatcaagtatcgctgtgtggtcttccagcacagtcgcggggtttacccggaccgctgggaggtgacctgtttgatgtcagaaaataggcgcagaggaggaaggcgtgctcagcaggagcaggcagcaccgcaggatgaggcaccccagcaacagcagctgccaccaccgcccctgatgtccatcaagcagatgttcatgatgcagactcaggtagttcaagccatcggtcagactttggccgacatttag

SEQ ID NO: 10833 - DNA, 339 bp, Zea mays
  Peptide Sequence Number=SeqID_54208
atggccgccattatcgttgtcgcgcgacggaggaaggagtaccatgtcgtagttgctgtcgagggacatgaactcgagactcccgaaacggagcagtgtcccgggctagagaggttgctggagactacccatctggagcttgacgggaagctgttcattaacacgcagcaggcccctacctggcacgccaactgtcggcgtttcgaccccgaggggtccctggaccgacgaggggctgagaatcgccgtcgtcatgggagcacgcggggtgccatcattacttgtttaccggggcgagctagatgggacgccggtcttgttccccgtagcctgagctag

SEQ ID NO: 10834 - DNA, 543 bp, Zea mays
  Peptide Sequence Number=SeqID_54209
atggtcaagacgaaggctgatgtggctccgaagctacatgtaggggagcttcggctcaatggcggaaaaaggaaccgacttaaagtcgttggtccaacagagacaagacaacaggcagggacacccttcgccccatacgacatcagacgaagacctgcgacgagcactgctggccgcaaaaaaggcaaggccctcgccctcacccactccactcaccacgaggctaccgaagacgacgttctccgcacctgcgaagacgatgctctccgcacctgcggccctgaaggacaatcgcaacccccccaaggcttcgccccaccggcgggcgcggacctcaccgaggacggtgaggtcctcggcgtctcggcggaagaacagctacagctgcgcgctctacgcctcaagaaccgcaatctccagaggcagaaagagatactggaggccaagcgccagcgcgtgtccgcactagccaaggtgcggcaaatgatacacgacgaagagcagaaggcccaggacctcaagcgggagatcgcgctgatgtag

SEQ ID NO: 10835 - DNA, 2715 bp, Zea mays
  Peptide Sequence Number=SeqID_54210
atggaggtagttgagttggttccttgcgctcgcaacaagtggggcaattggcatgagttttggttctacgtcgcggagggtgccgtcgaagaccatctggggctccccgtgtccgagatgtgctcgcatttttactcagcatactcgccttttgaagtggcggaggaggatgcggacgaaggggcccttcggtgcgccgccggcttgagcagtgggcgcgatttggttgaggaatttgtggcgtacggggtatggcctttggcgcatggctgggcgttgggcgaagtgtgtcctcgccagatgccttcccatggtgggaagctggtgcgaagtcctttcttcgcattggatctgcaaagccgcgatccggccgcctttgtgcgtgaggcggaggatggggcggtgcggatcgtgggtcgggtttttgaattgaatcgactgccgtatggcggttattccggccaagacgatgtggatcgtcgcgggaagaaaccggtggtagagtctggagacgaccccacgccggcggccgccccgtcctctaagaagaggaaactaggtactgctatgggaggacttggggtttccgatggttttgctagagaattgatgaggacatgcgcggcccccgggggaaggatgacttcgcccgagctccgggagtcttcggcgcggatgctgagggttaccgggggttggtggcctaggaatgttcctatcccccgtgcggccggcgaagacttttttacatctcgcatggttcgtgaatggaaagtgtttccttacgggcggaatattgctgctgttgtgtcggcagtgatggacaaggatcgccagggagctgcacagaagcgccaggcggtcgtcaggctgcatgaagccagaccgaagaggcagcggggggctacgaaggctggtgcccccggcggaggccagccgccgctggcggcgaagtcggccgtccctgcatccagcagggcgccggaggctgcggctgccgccggtggttccaagtctgggaaggttgcaccagcgtccagcagggtgccagaggccgcgaaggcgggccgaggtttgccgccgccgggcaagcgcgtcgccgacttcgtcaccgacattagtgtggatgactatcttgttggatcggacgaaggccaacttgtcgttgttccgcctgccgcggcgagcacggcggctgccgtagtgccaaaggcgaagggcggtgcccttagtgctggcggcgagatgccggcactcactgctgtgagggacgaggcgggtgctgtgtcccgccggctgaaggagatgaaggaggcgctaagtcaggcggctgacttcgcagaccgcgcggcgtcgggggccctgacggcagttgtgtctgccgaagtcgagagacttcggacgcaacatgctgacgccgtccaggagaagtcggccgccgacagtaagtgccgcaagctggcggacaaggtgtccgcgctggagggggagaagactgaccttcggcgccaactggcggaggagaggaaggaggccaatgaggcccttgccaaggcgcaggctgcgcaggcggaggccaatttggcgcgggtggagggcggtcttgccagggagcacgccgagcagttggaggagcggctccgcgctctgcagagccgtgtggagagggccgaggccgcgacgcgcacggaggctgagcggactcgcaaacagcttatggattcataccatgagctgggcgcgcggaccgctgagttcgaagtgccggaccgagagcccggacttcgctgcctggagtgggtacaggaggagttgcaggcgcttcccactatcgtggaggggtttatgtcttatgcttccctggtcacctgcgagggggcgatgaacgcgctctctcgcgaagggtgccggcactatgaagtcttcgaccaagctgatgaggatttcgagcgtgatatctacaaggttgaagaccctatagtgaaggaatccgccggagccctctacgaccggatgtggggcccccacggtcgagaggtggtcagggaacgggccgagacggcgaggggtcaggcggcgcgtggccgccctggagccgcccccgaagaccgccgaaggcgccctgatgcccccgcagccgctgcggccggcggagacccgccctcggagaccgccgaaggcgttcctgatgcccccgcagccgctgcggctggcgaagccccgccgccaccagctgcgccgagggctgaggatcctgtgacggtggcggcggaggcgacagcggagtctcccgcgacggctgggtcttcgcaggttcaagattttgggcctgcgcacgcaaccgccactactaattttttggcggcttcgaccgtggatgatggtaataaatcggatgggtctgcatctgagttttctgattttggtgactctgggagctcggttgagtggactgaggagtcgtcggatgaggacttggactattttgcggccttggatgtggcagcggcggaggcttcaccgcatgctgcggatgcagaagatgtgcctggtccgagtactgggcgtaggcggcgaagggcggttgcgaagtgtagattgtgtgccctcgcgcattcggctatgctcgcgaagtgttacctacttggtcaggtgtatttgttatgctggactggtgcgcgtgtagtcggtgtttgcgcgggcagtttggtgtag

SEQ ID NO: 10836 - DNA, 885 bp, Zea mays
  Peptide Sequence Number=SeqID_54211
atggaagaggcagtagaatcggcgcggcggctgcgcacgcccccgacccctaccgcgagttccatttccgcggccctgggggggatattcctggcggcgaggggcttcagcagcggggtgctggttggcgatgttgtgcacttgctgttgattgcggccgtctcgaccggagtcttgctgcggagtcctcgtccacgtgtggctggtctgtggagcatctttgggcttcctttgagactcaaccttgcgctggttcttgggcggatctctgatgaagtggctatagaggacgccgacgcgaaggccactgatggcgtagtggatggcgatctagtcgtcgctgagggtagctgtgacttgagtagtctccctttccagctgcttgcagagcgagagttcggccaaggcatcggtgtctgggcggtacccttggaagttgagcaggaacttgtcccggaggcttctccaggaatcaatggacagcggaggcaacctggtgaaccaggtgagagctgggccttcgagggcgatgatgaaagacttggccattgtggcgtcgtcccctccggaagatgcaacggcgacctgataactcattatgtattgtgtcgggtcagtgctgccgttgtacttgggataggtccctgcccggaagttggcaggccacgacatcacttgcagatgtggcgccaggggacttcgctcgtcgaggtagttgaccccttggaatggcgcggcgtgcgggaaggtgtggtcgcgctgggggaaacgcgggtcttccggttgtgcgcgctgttgcaggggtggcccatgctgcaggccgaggtggccttcacgcgtgtcttccagttgtgcgcgctgttgcaggggtggcccgtgctgtag

SEQ ID NO: 10837 - DNA, 174 bp, Zea mays
  Peptide Sequence Number=SeqID_54212
atgggttcaggcacagtacttgctctgctgaagctggttgcagaggttcttgatttggttttgttagtcacccttccactggggagaggttgtccccactgtattcagtgctcaggaggagatgctggcaacatggaggactttgaggagtttcaggactatgacgagttctag

SEQ ID NO: 10838 - DNA, 180 bp, Zea mays
  Peptide Sequence Number=SeqID_54213
atggactggcctctccggcgaagcagacttcgattcctcgctcgggagcttcaccgagggctgtctctcatccgtgagtcgccatggcagatatgccctaggtatggagatctttggacgccaaatcagaacttaggtggttttggtgccatcttcaaggtgaacacggaggatctttag

SEQ ID NO: 10839 - DNA, 561 bp, Zea mays
  Peptide Sequence Number=SeqID_54214
atgccaagccgttgccccgcgctcccctgtcagctccgccctcccctgtcagctccgccctccccgcgcccgccgtggaccagcgagcgcacactcacgcacgtcgctgggatcctcggccacgtcgctctgcccacgccccagctactttttgagccccgcccatgcccgcactcaatccccgcctcattccacgtagtcccgctcccgctcgcgctctgctcacgccgccagacctcgccgaagacccgcgcctgcctctccgaccatctagctcgccggagaccgcgccaagccaccccgagcttcgtcccgagggaccaactaagaatggttagcgtgaaatctttctgttctctaggaaattatcgcacccgtaaagaaatttatattcttcggtcactccctcgcacagtcagcctgactatattctccaagaagaaagttctcaaggtagacgcaccaatcatcaataacccgtttcgattaaattgggtcaactggaaattattgaggcccaaaacgctgacacttctcggacgtgtcattgctgcaagctaa

SEQ ID NO: 10840 - DNA, 90 bp, Zea mays
  Peptide Sequence Number=SeqID_54215
atggcggattttgatatccatgggtattttattggatcatttgttatgcccatcgggtacggtggacgtgggcatgatgttgccatttaa

SEQ ID NO: 10841 - DNA, 372 bp, Zea mays
  Peptide Sequence Number=SeqID_54216
atgacggtactaagggctaacacttacgctatctccaacagatgctctatcttgtttccttatttcaaacttgtatttacaaacagtgtcatcaacagttttactagagataatctaaggaaatttgagcaaaatattcctgtcgcaacagctgttttcgtgcatgcagtgcaaatctcaatatttgccaacagccatgcagtaaggcacatctccagtttcagctcctcaagcgggctgcggcagcagcaacagctgaccagcacgctgccaccggacgatgctcaacaccaggtttcggttgccacaggtacactcgtgtgggctgcagcccaagacagaatgctaataatgtacagccctgtgaactga

SEQ ID NO: 10842 - DNA, 180 bp, Zea mays
  Peptide Sequence Number=SeqID_54217
atgcacactagtactcatctcgtcgtaaaaggtgtcaggatggagggtttcaggagcagtctgcggctaagtggatgcgttgctgcacaagacagccctccaacgctaaagggtgatcaaagatcctcgactaacgtgacagccctatcttaccaaatcagggttttagatcagatgtaa

SEQ ID NO: 10843 - DNA, 96 bp, Zea mays
  Peptide Sequence Number=SeqID_54218
atgccggcctatttgggtcctgaatattacatgagtcgcaacagctcttcgaggagagtcatgcttacagctttggagctgtcctaccgtgactaa

SEQ ID NO: 10844 - DNA, 771 bp, Zea mays
  Peptide Sequence Number=SeqID_54219
atgatgaccgcctccaaaaaggtgcgccacactgtttcgaaatatctcctttcttcctttcccctctctctctctctctttctccgcagggatcgggaaaggagacatttcgaaggagtccttctcagcaaaggaaacgggccccgagccctcgtactgatcaggggttcgaaggttgcgccctgcggggttcggcaaccgccccagagcactcaggctccgagccctttactgatcaggggttcgaaggctggcccctcggagggattcgacagccgccccagaacatgcagagtcagggatgaccctgggtacgtccgttacatggccaaggatcgggctacactcctgaggtaccctaagacatttccgagaccagcgggaacggtttgtaatggaatcccaccgaagggaggcaccaagccctcggaccctatcaaatgggtccgggtccagcgaatcacctgcaggccgcataaaaaacaacaaggccgaccgaggagtaacaagaagagcgttaaagacctcagaggagtcaaaccactcctccgaggcctcgtgggctacacccgacgggatgacgacactattcaccccgttcagaccactgtgccaaccaccagggtaagactgacaacaattttgaattatgaccttaataagcctgccatggccgccgaaaatagggcgtggattttctgcgggcttgaattttcggcggctagaatgggggtcgccgaaagtttactattttcggcggctgtctggtag

SEQ ID NO: 10845 - DNA, 1218 bp, Zea mays
  Peptide Sequence Number=SeqID_54220
atggcggcgaagccggtcgcccctgggtccagcaagccgaggaagcacgttgccgacttcggcacagatattagcgtggacgactatctcgttggatcgggcgaggggcaacatgttgttgttccgcctgcggtggcgaccacgacgtctgtcgcggtggttggggtgaagggtagcgctttcagcgctggcggcgagatttcggcggtcactgccgtcaaggacgaagcgggcactgtgtcccgccggctgagggaggtgtcgcagcggctgagtcaaatgtgtctgccgaagtcgagagacttcgggcgcagcacgctgacgccgtccgggaaaagtcggctgcggatagcaagtgccgcaagctggcggagaaggtggcccgccctggagggcgagaggacggacctccggcgccagatggtggaggagaggagggaggccaaccaggccatcgccaaggcgcaggcggcaaaggcggaggccaaattggcgcgggtggaggggagtctcgccagccagcgcgccgaggaatgggaggtgcagttcaacgctctgcaggcccgcatggagagggccgaggcctctacgcgctcggaagtgcccgaccgagaggcgggccttcgcttcctcgagtggctgcaagaggaattgttggcgctcccgaccatcgtggagggattcatgtcctttgcctccctcgttacctgcgaaggggctatgaacgcgctgtcccgcgaggcgtgcagtcactatgaggtcttcgaccgatccgatgaagactttgggcgcgagatttttaaggtcgaagactctgtggtgaaggactctgcgggggccctcttcgactggatgtggggcccctacggtcgggaggtggttagggagcggtctgaccgggcgagggatcagatggtgcgtgccgaggatgtggaggacttcggacccctgaatagcgtgcagcccgaagcggaggccaattcagtggtggtcgaggctgaggtcggcccggcagcgccccaggaaaccagtgaaggctccctcgctgcccctatgtctactatgtccggtggaggctcgttgccagccactgtgccgatggtggaggatcccccgaaggcggcaacggagctggcagcggaggctcccccgaaggcggcgacggagccggcagcggaggatcccgtggcggcggctgggtcttcgcaggtggcttag

SEQ ID NO: 10846 - DNA, 375 bp, Zea mays
  Peptide Sequence Number=SeqID_54221
atggcacccaagagagctagctcgaaggctgacgaggctgcgaaggcagcactgctggccgagaaaaagggcaaggccctcgtcgacaccacccaccaagaggccactgaagacgacgctctcaacaagaggcagcgcaacgaacaacccactcccgaaggcagtctccgcacctgcagatctggaggacaaccgcaacttcccccaggtttcgctccaccggagggcgcggacgtcatcgaggacggcgaagtcatcggtgtctcagcagaagagcagctacagctgtgtgccttgcgcatcaagaaccgcaacctccagaagcaaaaagaaatccttgaggccaagcgccaccgtgtgtctgcacaaagctaa

SEQ ID NO: 10847 - DNA, 1023 bp, Zea mays
  Peptide Sequence Number=SeqID_54222
atggagggcgcgcgcccatgggggtgggggcgctcttggcgtgaggtcgcgtggggaccagtgagggccgcgcccaacggccaaccggtcggccacgtcgtgcggctgcacgccgccgccgggaccacgcgcgcccgggccaggggcagggcgccgtgccacagggacaggggaacaagaggtccgatcaacaaaccgtacgcgcccaggcgaagccctcgacgagacgaacgcagcgagccctgggctctatttaactacaggaagccccgaccagcagtggtgtcgcctcgaggcaggcgaccgacggcggcgctccaccaggaacgagcaacaacgacgctccgaggcaggcgggcaagcggtgacggcgctgtcgaagcagacgggcgacggcagcgcaccctaggctcggcgacaacgacggttgtcccgtccgtctctgtgatggccaccgccgctgccgctcaagcatctgtggcgccgtcccttgcacccaaggccaacgacagcaggaaggcggtggtgcccgtggacgcgtcggagctggagaagcacgtgctggcggtggacgacaaatccgtggaccgtgtcgcgatcgccaggatcctgtgcggctccaggtatagggtgaccgccgtggagtcggcgacgcgcgcgctggagttgctcatgatgggcctgctccccgacgtcagcatgatcatcaccgactactggatgcatgggatgaccgggtatgagctgctcaagcgcgtcaaggagtcggtggcgctcaggggcatcttcgccgtcatcatgtcgtctatgaccatcgattcatggctatcatatgcatggctgacgcatgctcgcgtacagtgggccgaccgcgacctggttgtgtcggggaccataattaggggtaccctcaagacgcctaattctcagctgaaggacagcgccgcctgcgccactccgactgcagtgccacttgacagagtgagactgacaggcggtcaggccctgccaaaggcgccatag

SEQ ID NO: 10848 - DNA, 1032 bp, Zea mays
  Peptide Sequence Number=SeqID_54223
atggacaatcagtatccttggttcttggttactgggccatacaaactcattcgacagtgtgaagtgactgcaattcttatattgtacgagctgccaaggctgctaactggctcgattctagctcatgagatggtgcatgcttacctccgacttacagatgcgtcgtcgtcatcttctacatcttcctcaatgaaaaagggtgcaaagacggaattcgaaaaaagacttggcgagttcttcaagcaccaaatcgaaacagattcttctgtggcttatggagatgggtttcgagcactacacgttattcctttgcctgaacgaacagaattagaggaccctgatgaaatgcagaaatggaagtggagtttaaagaaggcaaagaaaactaaccgtgagctgcatgctgagagatgtgacagtgagctcaaactcttgatactgtggtgcagtttatatgctattgctttgctggaattatacttgtttcttttctgtaaacatgttgctcgtaaattgagagagaaggatggattttattaccctcacaatttagatttccgtgggcgtgcataccctatgcatcctcatttaagtcacctaggttcagatctttgtcggggtgttctagagtatgctgaagggcggccactaggaaagtatgggttgtgctggttgaagatacacttggctaacaaatatggtggtggcattgaaaagctttctcacgagggcaagctagcttttgtggagaaccaactgtttgatatatttgattcagcatcaaatcctgttgatgggaactgctggtggacgaatgttgaggatccctttcagtgtttagctgcatgcatggacctttctgatgccttaagaagtccatcaccttaccatgctgtctctcacctgcctattcatcaggatggttcatgcaatggtttacaacattatgccgctcttggaagggactatttttacactatagactgcattgtttatagagtgaaatttgaaataggagatgaggatgagtaa

SEQ ID NO: 10849 - DNA, 333 bp, Zea mays
  Peptide Sequence Number=SeqID_54224
atggcaaaagctctgttaatctggcctctcaaggacactgtgcggggggagacctttacaaatcaggcccgtaatgctcagcggccacgcagcgcctgttacaatgggccggatcacacgtgggcctccgtgttggacgaggccgcgatatgggacgacctcgtcacagaccttcgtccggcgacgcgtgggacgaagggtaaatctgccagtcgtcttgtctccgttggtgcagcgaggctggcgaaggcatcgagcgaagggtggcgtcttcgccttcgccccaacagcaccaccgggcagtgtccagtgcaccagggagatcaactctga

SEQ ID NO: 10850 - DNA, 699 bp, Zea mays
  Peptide Sequence Number=SeqID_54225
atggtgacctccagcttgatggtgggggaaagcgagccgggctgcggcctctgcccctccctcagcctcaaggattttcatcaccaaggctggggaggggactgcagcgtgcccggctttcggacgcgagtggcttcggagccgctcgcggcaccggcgtctgccacggcagctggaagaggttcttccgccggcgcgatagccaaggctggccatggaccgacctccaactctacgtccttctgcccgtccttgccttacgagttttggcatgggcgggggcctcctggcagcagcacccgccctgaggtcggtgctgccgctgttcggccccccggagcagaagtcgtcgtcgtcgccgctgctggagcaggtggcggcgcgccgttcgtcggccttccgttgctccgcaggccttcccccatggagtggggttgttcgtacctgcggagggggaaccggagttccgtttgtaatggcactttgaatgccagtgtttttgttcattgtggctgtcgaggcctgaacatgggtaaccggccgagccgcctgctcgggccggattcccagagaagtccttggaccgcgtcgtcgtccgaggctgggtcggacctcactgaaggtgtcgtcgatgccgagggtgctacagcccccttccagcgtgaagacccgagcctgcaggatcagattgtcttgtag

SEQ ID NO: 10851 - DNA, 441 bp, Zea mays
  Peptide Sequence Number=SeqID_54226
atgcatgaatatatcagagccgacaatgaattccgacaaagaagggaggaagcctacatgtgctctgagatgaccaggggcttcagaggaggcttcatccgaggcatgtcaggacaattcacaatcccagtcaaagtgaagacagaagcaatcatagtcaagggcaccaacacagttcccagtcaagtgaagatcaagaacttagaaaataacgtcgaattacaaatgtaccttcgacttgaaggggataaaagtacaagcgtgacgcaaaagcgaatgccaaatcagcgtgaacagtacggggaaatactgttaaatcctgtttttgaggaccttcgtaagccgaaggcccccaacagtctccacagatcagagtctcttgcagtcatacacaagtttatgggagctaaaactccaatgaacaacaagagggaggagtag

SEQ ID NO: 10852 - DNA, 1779 bp, Zea mays
  Peptide Sequence Number=SeqID_54227
atggggctctcgggcgcgacgatctcggcgccgctcggctgctgcgtgctgcggtgcggggcagttggcggaggtaaggccctgaaggcggacgcggagaggtggcggcgggcgggatggagccgacgcgttggcggaccgaaggtgaggtgcgtggcgaccgagaagcacgacgagacggcggcggtcggggcggcagtgggcgtggatttcgcggacgaggaggactaccgcaagggcggcggcggcgagctgctttacgtgcaaatgcagtcaaccaagcccatggaaagccagtccaagatcgcttccaaggtttcgcccccctttattgtgctggtatttggagatttatttacaggatggaatccagaacatcatgcacctactgaatattaccttttccgccgtacttcacctgcgttggctacagctacaaggatgttcactggaaagcagggtgatcgcctagcgggcgagctatcgcccatatctgatgaaaatacagtgcttgatttggttatcattggttgtggtccagctggtctttctctagcttcagagtcagctaagaaaggtctcactgtaggtctcattgggcctgaccttccattcacaaataactatggtgtgtgggaggatgaatttaaagatctcggtctagagagctgtatcgagcacgtctggaaggatactattgtctacctagacaataacaagccgatactgattggccgttcttatggcagggtgcaccgtgacttgctccatgaggaactgctgaaaagatgctatgaagctggcgtgacatacctgaactccaaagtggacaagatcatagaatctccagatggacacagagtagtctgttgtgacaagggtcgcgagataatttgcaggcttgccattgttgcttcgggggcagcatctggtaggcttctagagtatgaggttgggggtccccgtgtttgcgtgcagactgcatacggagtagaagttgaggtggaaaataacccatatgatcctagcttaatggttttcatggactacagagattgtttcaaagaggaattctcacacactgaacaagaaaatcccactttcctgtatgctatgcccatgtcacccacacgagttttctttgaggaaacatgcttagcttctaaagatgctatgtcttttgatctacttaagaagaggctgatgtatcggttgaacgcgatgggaattcgtatcctgaaagtttatgaggaggaatggtcctacattcctgttggagggtccttaccaaacacagatcagaaaaaccttgcattcggtgctgcagcaagtatggtgcatcctgcaacagggtactcagtggtcagatctttgtctgaggctccaagatatgcttctgtgatatcggacatcttaggaaatcgagttcctgcagaatatatgctcggaaattcacaaaattacagtccatcaatgcttgcatggagaacactgtggcctcaagagaggaaacgccaacgatccttcttccttttcggattagcgttgataatccaactgaataatgaaggcatacaaacattcttcgaagcctttttcagggtgccgagatggatgtggcgaggatttcttggctcgaccctttcatccgtcgatctcatactattctcattctacatgtttgcgatagctccaaatcaattgcgaatgaaccttgtcaggcatctcctctctgacccaactggctcatccatgatcaagacctacctgaccttataa

SEQ ID NO: 10853 - DNA, 633 bp, Zea mays
  Peptide Sequence Number=SeqID_54228
atgggacccttctgtcactctcatctctcccccttcttcgcgattttggttcgctccgcgtcaacaacccgagcgccatgcgtggattccttccttgcttcgcgcgagttaggccacgatcccgactccgagggctcggtggataaaagtcgagcgcacgcgctttttctcccctatcccctctttagcccgatttctcctcgccaccagaacgccaccgcgagccgtgtgaggggattcagtccgccgtcgtcgaccggtcgatttctcagcgattggaccgaggtctggggtgcgggagctccacctggtccggtgggtcacggctggaaccttgcctgggcgcatcgcgcggcggacgaccttgaatttctcgtcgtcgctgcatcttcgccgtgcgccgcggaccgggcagagcgccactcgattcccggtaagaaccttaccaacgcgttcgcaatgttatcctattcatttagtagtgttctgagcgaaggtcgtgagctgggggcgctaatggcggaatgccggcgatggcgccgccgcgtagagtcgccccgacggccggagttgggtgatgcagctgagctaatgcgtggggccgttgatcttctaagcgacggtcgtgattag

SEQ ID NO: 10854 - DNA, 504 bp, Zea mays
  Peptide Sequence Number=SeqID_54229
atgtcccatctgatggcattgttggaagcaactaagattaccttggataaccaagaggagcttgtggttgacttgtccacggagatggtggaaaaagacttgcaggtggagcaactgtcaaatgagatccaagagcttgaggaactggtgggaacaagggagaacaccattgagatggccgggagagcgcgtcatggtcaaaatgagcgcgttcctccaccgccaccaccgcctcctactctgcaggagctaatggctcagcagaatgagatcttgaggcagctagctcagcgtcagccgccacctcagcactatggtggtggtgatcatcagcgtcaccccgtggcagccacctaccaggagttcctcagtacccagtgtcacacccgggtttcggggcaccaagacccgggcatgaacataatcaccaggtgtgctgggaccaagtctcacacatatgatgaatcatggcacaggatcgaatgtcacatctttactacataa

SEQ ID NO: 10855 - DNA, 294 bp, Zea mays
  Peptide Sequence Number=SeqID_54230
atgaccgtcatcccagcgcacaagaattcatggccgaacaacccgagagtcgttggcattggcaatgaccatgaggtctccctgtttggcgatggacagcgcgaggtcgaactggcagtcgccaagcttcttctcatcgtcgatgagcgacgccaacgcgagcgcctcgtgctagtggtgtttgttcgggactgtaacgccgaggtaacactgctcggcgccacagatcttggcgccgagggcatgcatgcatgtgctgcgctgaggctagcttattttttatttaccctctag

SEQ ID NO: 10856 - DNA, 285 bp, Zea mays
  Peptide Sequence Number=SeqID_54231
atggaaggggagatgcatggcgtgggcgaggttcgtggggacaggggtgtccttggaatggcgcccatggaagagcgagatcgtagggcggtagcgagggaggccgcggaggattctggaatggcgcttttcatagccgtgaatggcgggcattgggagatggcggggcatggtgaagcaatgtcggatgcggagcgaggactacccggtaaatacacggatattcgggtcggatacgggtacacgaattttgggtacccgtttttcatttttcgcataatatag

SEQ ID NO: 10857 - DNA, 447 bp, Zea mays
  Peptide Sequence Number=SeqID_54232
atggctcctggcgtggcggggcttggcttgcttggctctgtcgcggcggctcggatgcgcggctgcgcgggtttgggcgccggtaggggttgggcgcaggagctctgccgctgggttcctgagcacggtcgtcgaggtggtcgagttggagaagggagcgagggccggtcaggctggcggctccacgggcgcggcgcgtcgaggtggctcgtggtcgtgcaggagagcgggcatcggggcttcgggtgtgggctcgagcgggtcatggccggttgcctggcgctgctcgcggtgtcgcgcctcctgggcggtcctcagcttcctgctcggtgtgcgcgcggtgaagcagagaggcaaggaggaggagagagagagtggttggtgccggctgggtttggaggagccaggggcggtggctacagggagggagcagggcgcgcggtttag

SEQ ID NO: 10858 - DNA, 66 bp, Zea mays
  Peptide Sequence Number=SeqID_54233
atgggttcaacatctgaaaagaactacctctaccaggtggttcccaagcaggaggaggagaactaa

SEQ ID NO: 10859 - DNA, 435 bp, Zea mays
  Peptide Sequence Number=SeqID_54234
atgtgcctgttcatccgcagtgatgtagatgtccacctcccaaaacaattgtttggaggtggctggcgctttctagagtatagctcggacgaaggccgagtcattggatccccggaacgatcgaatggtctcgtcgttccggcgcctgatggatttgaggtcccatggctgcactggcttgtcggagagggactagatatctgtgatgaaacgatgactgaagatgtcgatgcagtgtcggggaagatgtcggagacactccagcgtgtcttgccccaggacaatgggcaagtacgccgtcatgacatcctccgtcgccccagtggctcaggcggcagtcgtgtagacagccaaccagccgcctgggtcctgcttaggctcgtacttgtcgacattggagaccttgaagatgggaggccactggatggctcgtag

SEQ ID NO: 10860 - DNA, 591 bp, Zea mays
  Peptide Sequence Number=SeqID_54235
atggcgtgtaccctccatggcaagagggtggacgatggagtaattgtgctctcggttggcatgaacccgatgtccctgtggctggaagatgcttccagtcctgaaggaggattagttaggtttatgtatgagctttgcaagggatctaccttcctacttttgtatgtacacaaactaaaccctaggaaagtgcgactagtgttcaatgacggagcacaagagcggcttgaagaaacaaaggttcaagctgagcaagatgttggattagagcatcaggtagtagaactgcaggcacaacaccaagcgtatcagaatcgcatcaaggaacttgagcatcagctgactaatgctcattcaaaatctaaagttttgattcagcaacaagaagatactcactcgtatgatgttactgttagggaagaacttagcgaaaccataggtgtcctaagtcatcaggatcaggtgcttgaggagttgcatcgtacctgtccgatagaatttcaaaccgtgcaatgccttatcaaccatctgcaacaaacggtgcatatgctccacattgcctgttattctaccccaacaccagtggactaa

SEQ ID NO: 10861 - DNA, 915 bp, Zea mays
  Peptide Sequence Number=SeqID_54236
atggcctcggacatggccatgcggtcggcctccttctgctcagccgcctgggcaagcgtcttgcagttattgacagactcgttaagagctgtctcaaaccctgaagacagtcggacaatattcttcagacacgcggagaagaatgaagctaaaacaaaggcagaaggcaagcgcaaatggcagggcgggcgggcgccgtttcacctccgtcatgatgactgcctcaaaaaaggtgcgccacactgtttcgaaatatctcctttcttccttttctctctctttctatctctccagaaggatcgggaaaggggacatttcgaaggagcccgtcgcagcaaaagaaacgggccccaagccctcctactgatcagaagttcgaaggttgcgccctgcagggttcggcaaccgccccagagcactcgggctctgagccctttactgatcaggggttcggaggctggcccctcggagggattcgacagccgccccagaacatgcagagtcagggatgaccgtaggtacatccgttacatggccaaggctcgggctatgctcccaaggtaccctaagacattttcgagaccagcgggaatggtttgtaatggaatcccaccgaagggagggaaacaacactattcaccctgttccgactactgtgccaaccaccagggtaaaactaacgacaggaagtcacgacctcccccaagttcagcctcgggcgcaacagggagctccgcctcgcccgaccccaggcctcggccttggcctcgggagaaggtctctgcctcgcccgacctcaggcctcggcctcagcctcagcctcagaaggagtcacaacctcgcccgacctcatcctcggcctcaggagaagtcaccgcctcgcccgaccttgacctcggaccgattatgccatag

SEQ ID NO: 10862 - DNA, 369 bp, Zea mays
  Peptide Sequence Number=SeqID_54237
atggcggtcggcaagaaccctgcactggagcttcctataaactgtagcgggcggggtggtggaattgatttgcctcctaatcagcacactcggaggatatatagacaaccccagccacaacctgcagagatgaatcctcctaatcctccaccaggcggagttgacccactggttgctgctcagatggcggtgatgcagcaaatggcggacactatggctgatatgcgtgcccagatgcagcaagaacgccaagagatgcgtcaggaaagagaagatatacgccaggagttgcgccaggagagagatgagatacgccaagaaaggagggcgcaacaacagcagctgcaacaacaacttcaacaacagtaa

SEQ ID NO: 10863 - DNA, 939 bp, Zea mays
  Peptide Sequence Number=SeqID_54238
atgcccgccaacgggtctagtccccaccagcatacatctgctgggaatgttaccgacgatccgccaacggctaccgcagccccatcagcgtcggcgccaagcccaccatcggcggcggccgagggggttccagttgcatctgcccccaacgcgcagggtgacgctggtgctgaggtggcaccatcggacccccaggatctgcctgtcgccgttgaggcaacaccttcgagttcccaagttccagctgggggtccagaagtggtagcgtcgccaacagctgttgcagacccaacaacggcaataccgtcggatgcaccgccggtggaaaccgaggtggctatccgacgagagtggaaggcgctcgagaccgagcaccaatgccttggcgactggtgctcccaactggagaggcgcactaaggcggcatcctaccaattctccttggagcgggtcgagcttgagcaagagcctgaggacttcaaggaggacatccaaaaggtgtccgaccgagaggaggaggtgacccggaaggagagaagcttggacaacaagaaaaaacacctagaccaaaaggaggaggccatcacagcactccatgataagctgaaagcttataatgcagtgctggagaaacaacgggacaagcaagctgcggctaaggcgaagctgcagaagctgcagcaggaactcaccgacaaggccaatgatattgcttgcgttgagggaaacctcaaggcaagggaagcttccctggcgaaacgaacaactgacctcacttggcaggaggacctcgccttcagggaggagatgtgggcaaggcggaacaagctgttggatgagcttgagctcgaggcagaggagaaagtgaagcgtctggaagggaaagtgcggacgctagaggagcaggtccgccagttccaggcagcgcaggcgacatag

SEQ ID NO: 10864 - DNA, 825 bp, Zea mays
  Peptide Sequence Number=SeqID_54239
atggaggtgtgtgacctgcgcaaggtgtgggagatccatgagctcaagaccaagctcgacgcggccggtgcccagacgacattgggattgtgctcctctctgcgactgttatcgtcgtgtgccacgccgcctcgcgctacttcgtcgtcgacacctcgaggattaggattctactccgtgcgccgctccatctccttccatgcggacgccctagccctcaacaagctcgccacattgctctcctcctctgtcactgcgggtggtgctgggggcaacagggagcagactcgggcacgtcacccacgtgttgcatcatgccgcaaccgccctcgcccttggccacgatcttggcttccgacgaatgtgttagggaccgtaggcgacctcatcacgagtggagcattcaggcatgtctacctcggcatggacctcgagtccagtgagatcctcgttgtcaaacagaggtatattgggatgacatgggaggaaaacacgctaaatattctactggaatttgttcctggaggctccatccaatcgctacttgggaggcttggatcattcccagaggctgttgtgaagctattcctggtcagcgagaggtacgacacggatctcaactccttgaagctctctggtatctcccccatgagcttgttccttcaagctggagtcgatagcaatctcaccagagagcgagttgttcctcaagctgattaccctcagaagtggacaactttacagggaatcgggcaactcaccatccagcctattggtggccaggatgggcaacgtgtacaggtcatcgggatcccggtgaaatag

SEQ ID NO: 10865 - DNA, 489 bp, Zea mays
  Peptide Sequence Number=SeqID_54240
atggaatcttgcccgagattgtcgcagcgctcacgcgtcttctccaaagagatacatgcttctctgcccgcacgtctgcggttgagttcatccctcaggtctcctggtccctctggagggacccgcacatctccttctgcgtgtctgcggttgagcttcgttcgcagatctccaggcggggcagtcctcaccgagggcgtgcgctccggggcagatgcttcgtgccaacgccaggacgatcgaggcctgggcctgaccgagccagtgtgcaccatgccaaggaggcggtctatgtcgtcgtgccactgcctcatagcccctggtgaagccgtggggctgggcaagtggcgcaacaattctctggctgcagagagcgctccgacggggtatcccctgacagagtccaggacgcccgccctggcgtgcgccgccgtgcagggcgcatggctgcagtgccaagcgtcggatggccagagctctgtggcgtag

SEQ ID NO: 10866 - DNA, 177 bp, Zea mays
  Peptide Sequence Number=SeqID_54241
atggggaggctagaaccctgggcagaatgggaatcacggcttgtgggtaaagtgtgcaacctctgcagagtgttagaaactggttgtccccactgttctcagtgcttaggaggtgaagttggcaacatggatgacttcgaggagttccaggaatacgacgatttccagtttacttaa

SEQ ID NO: 10867 - DNA, 780 bp, Zea mays
  Peptide Sequence Number=SeqID_54242
atgccccctacaccaccacacggcatcccggctactggaggagaccctggcggagacggagatgatgacaacgtcggtggcagttcgagccacggcacagagcgttcagaggagccggagccaaagggatggatcgcgagacccatcactcgtgacactgctcgcgggtgtcacttccccgacgctctcgataccctgttgcgtcgggccttcgatcgacacacatggtccatcgagtatcgttgtgtagtctaccagcatcgtcacgggctatacccagaccagtgggaggctacttgcttggtgcaccgtccggacgatgatctccagggtgtagaggccttctcagagcattattctatcactaagagggatactgccgaggcagccatgcaagatgcagcacgacgggcactttctcagtattgctcgttgttcagcggggtagctgatggccttgacctaaagtactaccctcgctcttcgaccggaagtgctggaggtgtgattgtctcgctagtcagtgagggcaatcccaggctgagcagcatggtcaacttggccgtcgtgctcaacatagagttggaccacgcccttgacgagttgggcaaggttcgggcggaggttgcggaattgcgtgctgaatgcgcggcatgccactatcttgatggtggttctcccgcccctgtagggattcagcacccttaccattcaccgtcccgtggtcgcttcgactatggtaccccaaactataggacctgtatagatttagatccatag

SEQ ID NO: 10868 - DNA, 261 bp, Zea mays
  Peptide Sequence Number=SeqID_54243
atggccgggaacgcgggcgcgggtctccggcggcggctggcggcgtgggcaagcacgagagagggcgaagctgcacgaaatgaggtgaggggtgtgcacggggcactagcggggctctatgaagggagctgggcgcatgggcgggcgtcatggccgagaaatccggcgacgtgcgcgagtgcgcacgcgctggtccacggcgagcgcggagggcgtggaactaacaggttttttcaaatccaaattcaaactaggttttaa

SEQ ID NO: 10869 - DNA, 1299 bp, Zea mays
  Peptide Sequence Number=SeqID_54244
atggcggcgagctccaccagcgcgcccacgatgccggcgatggtcacgcctctgccgggctacggctaccagggctctgccgcgggcgcgggcgcgggcggcgagcctctgtacagctcctcggggtcgtcgtccatgggcaccttcttcggggtgctcgtcgcggtcgtggtgctcaccctgctgtcctgcgtcttcggccgggtgtgcgcgggccacgccgaggggcccgacgagcgctacgactgcacgaggctggccccgcggtggtggtgcggctggcggcgggcgcctcgccggaccgctgtgaagcgcgaggcgaaggcgccgcccgtgttggaattggaagcgcctgccgcatcgccgccgcccggggagcccagcgcctcagccgcggcttccatccatggcgccgcggcttccatcaatcaacagcgcgccctccgcaatcccgctcctttgtcagccgtcgaggacgcaatcctagctgttgcgtccgtgattcgcgcccccacccgccgacagccatcggcgatcccatccacgcgtcgtgccccatccgtgcccctccatcggcgccccacctcaaaccacctgtttcttcgctcacctcggcccccaaatccgagcaaccactgcccgccgctcttcgtcgtcctccagacgcccatgccgccgccctctccccaacgctgctgctctctccccaacgatgtcgccctgctcagctccctaaaccccatcccttacggctgcggttggggaagagagagatcgaagagaatcagggtaatgcagatgggatcgatggaattcgtagcgccggcgttggaggagcttttgccggaactttccctcgaggagcagccacggttgcagaaccaatcccgcgagcgtgaccgcacccggaagcgacataccaagcactctcctcctccccgtccgtcgttgatctcggtacggtacgtgatggagatgggatcgatgggaatggatttcgtggcgccggcgttggaggagctgctgccggatctttcccgcgaggagcagctacggttgcaaaacaaagcccgcgggcatgaccgcatcttgaagccacataacaagcacactcctcgtccccgtccgtcgtcgttctcggaatgggatcagtgcaacttcttcaaaattcccaaggttctccaggctctcgcccactacaatgccaggcaccctggtggcgagttcgatgatgtgaagcccctgaagcagagccgcgtgggattccggggccaggcatggttccatatcaacttctag

SEQ ID NO: 10870 - DNA, 1770 bp, Zea mays
  Peptide Sequence Number=SeqID_54245
atgcggggactactgcgctcgccatctgggacggcaaaacgccgcacacctcacgtcgcctctgccacggccctctttcacagcgaagcaacgaggagctccagcctcgtctcgcgacacaccggcacggcccgtgcgggcagcggccgtgcttcatgccctctcccacctgcctgcggcctgccgccgcgcgccgcgcccgcttcactcttcagattcacccagccaggcaggaggcagccactgagccacacgctcgtgcacgcgtacgccgccatgctgcggtgcggtgcgggccccggccccggccccggccctgccctgccctcgcgcattcggatttcggaccgtgcggaccagtgcatttacgcagacaccggccgcacgccgggcgtccccagcggaccagcgcccgcccggccgctttgccaaaagcgctcgagtcgcgccgcgcatgcaccagcccccaacttgccccaagtgccaagccaagcccttaaaagcgtctcggcacttgggctccgcctccgccatcaaatactcccgccgcgcgcgcgcgcactcgccctcggaacctaccattactgccatcacgcgccgcgctcacgcacgctccggccgatcgagcgagcctatcccacacccaccatggcgagagccttccgcgctgcgtccccgctgcccctgccgagctcgaggagcgcggccgcggcggcgacgagcggcggcgggagagggaacttcccgtggctgacgaagaagcagggctcgtcgtcgtcgagcaagccatcgccgagcggcggcggccaggagagcaagggcgacgagcacgagggggcgagcgccgccgggtccgtcgagcagtctccctcgccgtctccgtcgccgtcgaggaggcgcgcggacgcgctggcgcggctgcgggcgctgttcctggcggcgatcacgcaccggcggcggcggcggcagctggggtcgtgcgtgacgggcaccatcttcgggcggcggcgcgggcgcgtgcacgtcgcgctgcagacggacccgcgctcgccgcccgtgctgctggtggagatggccgcctactccaccggcgcgctggtccgggagatgtcgtcgggcctcgtgcgcctcgcgctcgagtgcgagaagccgccgctcgccgccggggagaagcggcggggcctgttggaggagccaacgtggcgcgcgtactgcaacggccgcaagtgcgggttcgcggtgcgccgggactgcggcgcggacgagtggcgggtgctgggcgcggtggagccggtgtccgtgggcgccggcgtgctcccggacgacgacgtcgccggctccgtctccggctccggcgcggcggagggcgacctgatgtacatgcgggcgaggttcgagcgcgtggtgggctccagggactcggaggcgttctacatgatgaaccccgacggcagcggcggcccggagctcagcatctacctcctgcgactcgtagtaaacaactcaccggccggagcgtccaacgccagcgccagcggcatgaagaagaaaaaggttcagagaatggtaggccggcaggaggcggcacgcatgattggcgtccgcaccttttggcgcgagttgtactgtgtcgacaagtatggcactcagtgccaccagtattcagaagaagaagaagaagaagaaaagaagctgctcctacaggcttgtgcacgagcgagtccttggattaaggaccgccttggaatgtgcagcaccgtcaccttctaa

SEQ ID NO: 10871 - DNA, 309 bp, Zea mays
  Peptide Sequence Number=SeqID_54246
atgtggccagagaaaacgatacactccaagataccaacagtgggtccggacccccatgggaaagtgccggacccctgtacatgtagaccgaacctccggagcaaggtccaggacccccgcggcgtccaggccatcctgcaggcagcgtgcctatccattccattgccaaacagtacgcccgtgctgcgaagtgcactgtgcccatccatcatcactcatacgttgccagggaagcttcccctgcacgccaatactacgcagatcgcagatatcagggcgcaaggagattgcttcaacgaggaacattag

SEQ ID NO: 10872 - DNA, 729 bp, Zea mays
  Peptide Sequence Number=SeqID_54247
atggcggcggcgcggcacctcagatccggcctccccctcctccgcgcccacctcgcatcctccgaatccgcggccgtcgctcaggtttcgaggggcttcgcgtcgcaggccgccaagcccaccgggaaggagatcaaggttccaaaggctctgtttggcggcacaggcaactatgccagtgcactgttcctcacagcagctaaatctaatgcattggacaaagttgaatctgagattaaagctattgtagaggcttccaagaagagcccgttgttttctcaattcataaaggacttgtcagttccaaaagcgaccagggtgaaggctatagccgaaatatttgctgacgctgggttttcagatgttacaaagaatttcttggtgcctaactttgtgttggtttatgaagctgtcctggcggacaatggcaggctgaaatatattgaacgcattgcggagagatttgttgatttgactatggaacataagggggagatgaaggttgtggtcaggacagttatttcactcaccaaggaggaggagaaagaactcaaggaaaccttgcaggatatccttggggaaaacaaaactattttggttgaacagaagattgactacagcatcatgggaggattagtgattgaattcgggcagaaggtgcttgatatctcaatcaggaacagggcgaagcaaatggaggcgttcttgaggcaaccacttgacttctaa

SEQ ID NO: 10873 - DNA, 1428 bp, Zea mays
  Peptide Sequence Number=SeqID_54248
atgggtcctatgggtgtgctactaacgctccctagccgaagatgtgttcaggtccaggtcccagtcgaggctgcctcctgggggtcattaccaactcttttaggtatgacctactcgacatcagtagggtcgcgctgggagcgcgcgaccgccacctccacggcatacgacatcttgtacgaccccccgggcggcgtcttcagtagccaggccagcggccaccattggaggcggcaccaaagccatcaaagccaaagagatggggcgcggaagatggagccgcagctcagctcgcttcccgccttcacaaggctgactcccccgctcgtgccccgaaacgccacaggaagtctcccccaatgcacactggtgtacccaacctatgacacgggggcccggccccacaagtcatacagctggtgcgctggtctccgggtgcggagaaggcgaaccgccatgcaaggcccacatgtcatgcacctggcgtgtcggttcctgggtgcggagaaggtgaaccgccatgcaaggagcgaatcaccgcgcctcttcatccccgccgaaagcagcggtctagcccctaacacgggggcccgggcccacaagtcatcctccttgggcattggtctccgtgtgcgaagaaggcaaaccgccgcgcctcttcgtctccgccgaaagcagcggcccagcctctggcacgagggccttggcccacgagtcatactcttcgggcgtcggcctccgtatgcggagaaggcgaaccgccgcgtgaagagcacgccaccgcctgcggtagtgcgcctcttcacctccgtcgaaaccaacagcccagtctctgacgcgggggcctgggcccacgagtcatcctccttgggcgccgaagacagagaaggtgaattttcaaaaccaaatgcagcggtatcgaggcaccccgcgcatggcctagtaaagccatcaagtgcggagaccacgggtcagtcagccgcggggacaggcgtggcagttgacgtgaccgaagacagactggcagtgaatacgacagcaagcgcacggaagcagcacgccaatcgccggtcaagctttggccccacctgcaggctcgtgtcctcccctgaggtgggcccgggggccactgtcggtatcctgaatcagggggtcaccatgtggccagagaaaatgatacactccaagataccaacagtgggtccggacccccatgggaaagtgtcggacccctgtacatgtagaccagaccttcggagcaaggtccaggacccccgcgagtgcaacccggacccctctgcgtggagtccagactacccacagctgggtctcgggactctggggcagagaatacccaggccttgctcaggcaggggtccggtgccaacatgtgtccaggcccagcctggtgcggacttgtccgcataa

SEQ ID NO: 10874 - DNA, 225 bp, Zea mays
  Peptide Sequence Number=SeqID_54249
atggcgcaccggacagtccggtgcgccaccggtgcgccaacggtgcgccaccggggcctagatgctttcaccaaggacagaggaagaaaagcttcgaggtaccaagtgcacgggagaaggtcaaggaggctgaggaacccaaagccaagggtgaagaagaaggcttgcaaagtcaagggtgatcgagttgagaacagctacgacacatcaaggatcactatataa

SEQ ID NO: 10875 - DNA, 444 bp, Zea mays
  Peptide Sequence Number=SeqID_54250
atgccccacggaatgtttgaagtctctacagttccgcaaggtgtggcgcatgtccttttggtacggacattggaagtcgaggatttcatccagtgttcgcactcctccgcggggtgcgcctcgagcccgagcagcaggcggcccggcggtgtgcacctcctcgcgaggccttttctcccaacgcttgtccagctcctggttcatgtccagccgtggcataggtggcgtaaatatcgtgcctccgatgaggtcctgggctcgctcatccgcggtgatgtagatgtctgcctcccggaacaattgttcagaggtggttggcgccttttggggtatggctcggacgaaggccgagtcattggatcctcgatagaagacttcaattacagccgcctaagcgacttcggggatgtggttcttcattatttgaaaccttttgaggaatga

SEQ ID NO: 10876 - DNA, 201 bp, Zea mays
  Peptide Sequence Number=SeqID_54251
atggcgcaccggacagtccggtgcgccaccggtgcgccaacggtgcgccaccggtgcgccaacggtgcgcccaccgcgctctcgggattctgcgactgggaaggctctgctgtggaccagcctggtcccaccaggcagagggtgcaccggacagtccggtgcacaccggacagtccggtgccccaaagccagaaaccctaa

SEQ ID NO: 10877 - DNA, 1083 bp, Zea mays
  Peptide Sequence Number=SeqID_54252
atggcacccaagcaagctagctcgaaggctgacgaggctgcgaaggcagcactgctggccgcaaaaaagggcaaggccctcgccctcacccactccacccaccaagaggctactgaagacgacgttcccgcacctgcgaagacgacgctcaccgcacctgcagccctgaaggacagccgcaacctcccccaggcttcgctccaccagagggcacggacttcaccgaggatggcgaagtcatcggtgtctccgcagaagaacagctacagttgcgcgctctgcgcatcaagaaccgcaatctccagaagcagaaagagatacttgaggccaagcgccaacgtgtatctgcacaagccaagtgtggagaatggagttgttctggaggacagctcagaggagtttctgccaacgcccaccctgttgtcagaatcactagcctttgcagtgggagcgtcatctttagcaacgccagcaccagcagtccaagccccttcccctggaggcgacgatccagatgattctaatgacgatgatgaagatgacaaggatgaagaagaagaggaagataacaacaatgaggaagctaatgaagagcaggaggacaacttcatggggatatggcatgtcactgaacattatacttcaatgttcgagacggggcacttccctaacctgttgcaggatgttctgcatgtgttaggaacctacgtccgacccctgtatgaaacaaggcgagtgtctgagtcccctcaggcttgctactacatcacttgctttcatatcagggtgatggatgtagggggtagaggttttaggactctatcagctcatgagtctatggtgccgctatccacctacactgcttcggtcatcaatgctgctaggcgagctctgcggtctctcagtcacacttaccgagaagatcgcctcaacacccttgttggtgtggtggcaggtcttaacaccgacctagacagtgctaccctagacctctccaggagggtgcttctgacgaaggtgcgcctgctgccgaagctggataggttgacattgaagagggtgatgctgatgaagaagagatag

SEQ ID NO: 10878 - DNA, 612 bp, Zea mays
  Peptide Sequence Number=SeqID_54253
atggtggacgactcgagttggccgtcggtagcagcaggagcaaggacacacggacgcaaaggaggtcggggaggaagagaaactccctgtcctggaggtcggggaggagcaggggaggctgctccggccgtccccgtgacggtcggtgggccgggtggccgtggaggtggcgccacggctgctggagtgccggataaccctgccctcacggctccggtcgcgctcgcgcaggggcgcaggggcggctttgatcagcggtcgcgctcgcgcaggggtgcagccgcgcaaggaggctttggtcgcgctcgcgcagccgcgcaggggcgcagggcgcaggggcggctctggtcgcgcgcaggggcggtttcggtggaggcgtgggccgcctggccgcctgggaggctaagacggcggctggacggggacgagacggagagacggacacgcgttttagggtctctgcgcaaggcaagacataaacctaatggaaatggccaaatgggcctcaccttaggcccatctcgtggacaagtgcggttgcgcctgggccgcctgccactgtcgaggccgtggagtggaggcagccattttgggccttttcgtgcctgttaa

SEQ ID NO: 10879 - DNA, 567 bp, Zea mays
  Peptide Sequence Number=SeqID_54254
atggagccccgccgccgcccaagcccgctgctccccccgtcgtcactcgagccccgctccacgccggcctgccgcccgcgccacaatgtcgttgtgccgccctcgcgccgcccgcgccaacgaggtgctccctcgccggaccgccaccgcctggcctgctcctcccgtgccccgctaggcctgctcgccggacagtcgtcgcctcccatgcaccgccatcgccgagtgtgcatgtcagccatcgtgttgttcgtttctctgcaggtttcagaaacctcattgtatagggaagatacgagaccatcaggctccacctccgccatcggtagcttgtctccactggaacctcagatgaacgtcctaataacattataccatggaggaaatgtggagaaaaatgtttatgggaatcttagttttgatggaatgaagaagtcgcctccatttcccttgcctcttgtgctctcttctcgtttgccgccttcaaactcctacgctcaacacgcatcgggctgccataacccagcgattccacgaacctacgcatctcctgtctgtgatctttaa

SEQ ID NO: 10880 - DNA, 693 bp, Zea mays
  Peptide Sequence Number=SeqID_54255
atggcctccttcacctgctcccaggtcggcgctgcggcagcgggcggagcctcgcccttcctcggctaccggcggcggagcggccccgggggcgccattccgtcgagctccctcttcgtgggccggcggttggcggcggtgcagatgcgcgcgccctctcgcggggtccgcgggggctccgcgctgcgggtcacgtgcgagaaggtggtggggatcgacctgggcaccaccaactccgcggtcgccgccatggagggcggcaagccgaccgtcgtcaccaacgctgagggtgcgcgcacgactccctccgtagtggcgtacaccaagacaggggagcgcctggtggggcagatcgctaagcgccaggcggtcgtgaaccccgagaacaccttcttctctgtcaagcgcttcatcggccgcaagatgtctgaggtcgacgacgaggccaagcaggtctcgtacggcgttgtcaaagacgacaacggcaacgtcaaactcgactgccccgctattggcaaacagtttgctgccgaggagatctctgcgcagagaatagctcctggacctggcaaatcatttgttaaggtacaccagatccagatggatgctttttgtaatgcaagtggttacattgcgtttgagttacgcagttggtcatttgtgttcttatgtccttatgacctgggggagtga

SEQ ID NO: 10881 - DNA, 687 bp, Zea mays
  Peptide Sequence Number=SeqID_54256
agattcgacaatgaaccaactgctgcatcattggcctatgggttcgagaagaaaaataatgaaacaattctagtgtttgatttgggaggtggtacctttgatgtctctgtattggaagttggagatggtgtgtttgaggtgctttccacatcaggtgatacacaccttggtggtgatgactttgataagagaatagtagattggcttgctagcaacttcaagaaagatgaaggtattgatcttctgaaggataaacaagcccttcagaggcttactgaggcatcagagaaagctaagatggaactgtcaacgctgacacaggcaaatattagcctgccattcattactgctactgctgatgggccaaaacacattgaggcaaccctctcgagagccaaattcgaggaactatgttcagaccttatagacaggcttaaaactcctgttaataatgccttaagagatgccaagttgtctgtcagtgatctagatgaagttattcttgtgggtggatccacccgaatccctgcagttcaagaacttgtgaggaagcttactgacaaagatcccaatgttacggtcaaccctgatgaggttgtttctcttggggcagctgtgcagagcataatcctcacatggagagcccctacaactacaacaaagccttttagtcccaagcaagactag

SEQ ID NO: 10882 - DNA, 642 bp, Zea mays
  Peptide Sequence Number=SeqID_54257
atggggacgtattcttggctaaggtacctcacccagggggtcaccaccatcggttttagaaaccttagcgggttgcttcgtattaagttggtagtcaagaaagttccggtggatctccctcacaaccgagtggagaatgtagtcatcctagaggacagctcggaggaacagctgccgacgcccaccccgttggtagagtccctggccttcggaactaggtcatcgacatcggccccgcctgcaccagccatccaagcacctgcacccggaggcaacgaccccgacgactctagggacgatgacgacgaggatgacgacgacgacgaaggaggagacgaacatgtcaacgaggaagccgactacgcccagcaggactacttcatggggtttgggcctgttgtcgaacattacacatcaatgttcgagatggggcacttccccaacctgctgcaagacgtgctgcacgcgctaggcacctatgtccgccccctgactctgtctgctcatgagtccctgacaccgctatccacctacgctgcctcggtcagcgacgctgccagacggaccctgtggtctcttagccacatgttgggaccatgcttcgtcgccgaaggtcctgcaggaagaaacagcttcggctga

SEQ ID NO: 10883 - DNA, 285 bp, Zea mays
  Peptide Sequence Number=SeqID_54258
atggtgctccggagtcgagcacagtccttgggtggtgatcttctgggtcgattgtcctctgagcacttgatccttgattggcacacttccccatcggaagccctaatgaggtctttttcgaggggaggaccaccttcctttgacctagtcagcacggggaaggtggtcatcgagcttcaaacgggttatccagaccctttgctcggcgccatagccaatggcgccgaggtaacacagctcggcgccataggctatggcgccgagatttttcgtttatgtcgctga

SEQ ID NO: 10884 - DNA, 105 bp, Zea mays
  Peptide Sequence Number=SeqID_54259
atgggtcaggtggacgcctgggtgattcagccctttgatttggagaccgtttctcaggtggtgaagctgacttccttcgtggagatgctgcagacaaatttttag

SEQ ID NO: 10885 - DNA, 288 bp, Zea mays
  Peptide Sequence Number=SeqID_54260
atggccgaggcttgggctatgctcccgagggtaaaactaacgacagtaagtcacgacctcccccgagttcagcctcgggcgcaacagggagctctgcctcgcccgaccttaggcctcggcctcagcctcggcctcggcctcgggagaaggtctccgcctcgcccgaccccaagcctcggcctcagcctcggcctcgggaggagtcacaacctcgcccgacctcaacctcggcctcgggagaaggtctccgcctcgcccgacctcggcctcggaccgactacaccatag

SEQ ID NO: 10886 - DNA, 414 bp, Zea mays
  Peptide Sequence Number=SeqID_54261
atgacggtggcaggcgggcgggagcagcggtcgcgtcttcggccaggctcacgtcccattcgggggcagcaagagaaccccctctcacggcgtgaagacagggcgcccgtgatccgttcctcgaacggctcgcgcacgcgcaacggccgccccgccaaccactcgccccgtcgcattaactccgcgggaccgggaaagggggataccccggaaaggatccttccctgtgaaggaaccgggctccgagcccccctactgatcagaggttcgaaggctggccccccgaggggttcaacaaccgcctcagatcgcgtggggccctacacccactactggtcagaggttcgaaggccggccccccgaagggctccacgggccgcctcaggctactcggggctccgcgcccattactga

SEQ ID NO: 10887 - DNA, 366 bp, Zea mays
  Peptide Sequence Number=SeqID_54262
atgaacaaaaacactggcgttcaaagtgccattacaaacggaactccggttccccctccgcaggtacgaacagccccacttcatgggggaaggcctgcggagcaacataagactgacgagcggctcgccgccgcccgctctgactacgacgacaaccacccccgccccgggcggcgaagcagcttcggcagcggcttcggggcaggtgttacgacaggaggactctcacccgcagaggacgagagccagccattcaggccgggagacagagacccagggctactggcggagttggcaatctcaccggtagagaagccgtctccggctgccgacgcctcgaagcgcgccggcaggtcttcgccctag

SEQ ID NO: 10888 - DNA, 918 bp, Zea mays
  Peptide Sequence Number=SeqID_54263
atggaggcccgggcccacatgtcatgtaaccggcgcaccggttaccatgtgcaaagaaaccgcaccgccacttgcgccaatgtcgcgtcttctcgggactacagaaccagtgcaacgactcgaggcagccccgcacatgacccaacagtgccaattaagtgcgacggtcacagggatcgagaaaagggacatttcgaaggagcccttcgcagcaaaagaaacgggccccgagccctcctactaatcaggggttcgaaggttgcgccccgtggggttcggcgaccgccccagagcactcaggcttcgagccctttactgatcaggggttcgaaggctggcccctcgaagggattcgacagctgcctcagaacatgcagagtcagggatgaccctgagtacgtccgttacatggccaaggctcgagctacgctcccgaggtaccctaagacatttccgagaccaccgggaacggtttgtaatggaatcccaccgaagggaggtaccaagccctcggaccctatcgaatgggtccgggtccagcaaatcacctgcctcggcctcagcctcggccttgggagaaggtctccgcctcgcccgaccctaggcctcggcctcagcctcggcctcgggaggagtcacaacctcgcccgacctcagcctcggcctcaggagaagtcactgcctcgcccaacctcggcctcggaccgactacgctacaggggatacatcattaccctacccctagctagccgcctcgggctacgaaggaacaagaccggtgtcacatctagattactccggcaacagggccgcaccgccagctacgattctacagggctcaagcacttctccgccggccacgatagcacacagctacacccccacatgtacagctggatcacctccttgtatctataa

SEQ ID NO: 10889 - DNA, 1746 bp, Zea mays
  Peptide Sequence Number=SeqID_54264
atgcaaccgagaaaggctggtccccttgcaaaaaagtgcgacgaaagcctccaagcgagtgctaacactcccttcgaggctcgggggctactgtcggggaccataattaggggtaccctcaaggctcctaattctcagctgaaggacagcgccgcctgcgccgcgtcgactgcagtgccacttgacagagtgaggctgacaggcagtcaggtcctgcagaaggcaccacaggaaactccgctccgcccgacccagggctcggactcgggctcagccccggaagacggcgaactccgctccgcccgacccagggctcggactcgggctcagcaccggaagacggcgaactccactccgcccgacccagggctcggactcgggcttagccccggaagacggcgaactccgctccgcccgatccagggctcggactcgggctcagcctcggaagatggcgaactccgctccgcccgacccagggctcggactcgggctaagtcccggaagacgacgacgacctccgcctcgcccgaccaggggctcggactcggcctcggccacggaagacagactcgacctcagcttcggaggagcttccacctcgcccaacctagggcgcagaccagccacggccctcttaggaaaggttggccgcgcggggatgaggacgagacaggcgctctcttggggccgctcgcttccctctcccgcgtggacgcttgtaaccccctactgcaagcgcacccgacccgggcgcaggacgaacacgaaggccgcgggattcccacctctctcacgccggtctccggccgcctcgcttctccccccttcgcgctcgccctcgcgctcgacccatctgggctggggcacgcggcgacactcactcgtcggcccgagggacccccccggtctcgaaacgccgacaatattgatagaggaatcctaaaaatgacaagagagacctcgaacggcaaggccgaccgagccaagggactcctaagcctccgggatacggataccttactcatcaccttccgcgaaaggaatgaactacctccacaccagaagggctgcaagataacaaactccaagcggctcaccggcgaccactgcaccagcagcgacaacgacctccgcctcgggcggctagacaacagcagtgattgccccagggcaaacgctactgtgaaaaggccctcgcccccatccccacacggggggcgagaacaagccattaaagccaaaaagctggaggtctggccacaggtggcactgacggtctcgttggcagaggcaaccacctctgcagtgggaagcctcacctatggcggccaccacctcagcaccgacgacaacggccacctgcgcaccgacgccgcaccggcgaatggcggtcgccctagcgcgcacaaggaggtcctcgctcccgtcctcgctacgggagcgaggacaagaccatccaggaacgcggacaccgcccctgcggagtacgacgtcttgtacgaccccccggtgtggccggcgacgcgggacgggccgtggacgtggccgacctgcgcacggcgcgaccgtcgcccgtgcggtggacggacagccacaccccgaccaggcagtaggtggcagtttgcctcctccgcaaggctggtgaacgcccttctcccccgaatgctggaggaagaagcgggtcgccagcccatgggaaggcaggaccccaactcggcttgcccttctccccagcatggatga

SEQ ID NO: 10890 - DNA, 2598 bp, Zea mays
  Peptide Sequence Number=SeqID_54265
atggcgctccgggcggcctttggggcggcggcggcagtggtggctggcggggtcggcggtggtgggggcgagcagccgagcaggagcagagcagctgtcgtcgtcgactcgtcgtccggggctcggccgctcggggtcgggggcgactggggcagattcgcagaagctctagtctccagcagccgagcaggggagttcgcgccgcctcaccggcgcgagtgcgccgcgtcgtcgctgccgccgtgccgtgagcccgcgccgccgtctgttgctgcctggctgagtggctggaatgctggttgctgccgctggaagctggatagggccccagagctaaaagatggaaagattagtaaaagccccgcagcatccacacgaggacttcagaatcagcagcagccagcaggcagcagctcagcgagacagacgcgtccggggctcccctccgcgcgcccgccgatcaaggatcaacaacacacggggacgcctcccgtctccttcattcccagcctgcactgcgccgccccagacgcccgcgaccctctccacctcctccggcgaataccgttcctccccggcaagctaccctccgatcctttgttccggggtttatgcatgacagcccctgtgtctcttccaaatgagctagaagcggtctcccattctgcaagggttgagttattccgagacgctagttgcaacatagaaaatgaggtgttggccagtttgggaaatggccaagattcaactgctgttggagcaactcctggtttcagagttggagagatcaggtttgctaatggagatatttattctggcacattgttggggaacacaccagagggttcaggccagtatcgctggtcagatggttgcacctatgatggtgagtggaataaagggatgaggcatgggcaaggaaagacggaatggccatctggagccacctatgagggtgagtattctggtggctatgtatatggtgaaggtacctataagggtccagataaaatcatttacaagggacgatggaagttgaatcacaagcatggacttggacatcagacatatccaaatggagacatgtttgaaggttcgtggattcagggagaaatagtaggtcatgggaagtacacgtgggcaaacggggacacttacgttggcaacatgaaaagtggcaagatgtcagggaaaggaactcttacatggaaaaatggggactcgtatgagggtaactggatagatggcatgatgcatgggtatggaatctatacatggaatgaatgtgggtattatattggaacatggacaaggggactgaaggatgggaaaggtaaattctttccgaaaggttgtagagtacctgttaacgacgagatgtatatcaataatctaagaaatcgtggtgtactgcctgatattagaaggcagaatcatggttcacgcatacttcactcttcctcggttgacatggggaacatgaaggttggtatggctaggcaatcttcagatgttttgttcaaaaggaattcagctgagcaatcttctttgaagaatgtgtctttggaaagacggtggagtcttgaggtggctattgaaaaatttattggccatgaatccagcgaaagttctggtctagaaagcttggaaaacttgagtgattctcgtttgcccatactggaaagagaatacatgcaaggtgttctaatcagtgaggtggttcttgacaggagtttttcagactcctcaaagaagacaaaacgccgccagaagaaaacggtgagggacacaaaaaagcctggagagacaataattaagggacacagaagctatgatttaatgctcagcctgcagcttggaatcagaatccaccggaggtttgatttgaaaggatcatctttaggccgttctactgataaaattgaaattgacgagaacacaactctgaaggatttggatcttaactattccttttatcttgaaccttcctggcgtgaggctcttcttaaacagattgaaacagacagtgattttttgagaacacagcggataatggattacagcctactgcttggtgtccattatagagctccacagcacttgcggacacgtgcatcttatcaccggagcatggcagcagatagattgactgttgtttcagaagaagatgctcaggaagatgatgcccttagccatccagaaggactagtcttggttcaaagcagtggtgagaacagtgttattgttggccctcacataagaggcagccgcttgcgtgcatcggctgctggatttggcgaagtagacctactgctgcctggaacagccaggcttcagatccagctaggagttaacatgcctgcaagggcagagcagacccctaaggaagatgaaagcaaaccgttccgtgaggtgtacgatgtggtcctctacctgggcatcattgacatactgcaagagtacaacatgacaaagaaaatcgagcacgctgtcaagtccatgcagtatgactcggtctcgatctcggctgtggacccccagttctactcggagcgtttcttgaacttcatccagaccgtcttccctgagaattcgtag

SEQ ID NO: 10891 - DNA, 132 bp, Zea mays
  Peptide Sequence Number=SeqID_54266
atgggctcttgctctgtttgttggtacttcacagatagctgggagcaattccgtatcagtggcagcatagatgtgattgatgcttctactacagaccctgccaagctccaggtgtgctgtccgcaagcataa

SEQ ID NO: 10892 - DNA, 626 bp, Zea mays
  Peptide Sequence Number=SeqID_54267
atggcgaacgggccaaaaacggattttcggccacggccgcgaaaacgggcacgtggaagggcacgggaccctcccgtggtccccccgcgtgagacgtggaagttcggaactccccgaagtcctgggagggggtatggccctcaggtctcctcggccgagccccgcaccccctcgcggcctagccgtggccggtcggcaccctaccgcgcccagctccggctggcgctgttggctgcctggccggccgtgaagtgcttgcgtgctgctacccgtcccacgggaagccgtgctcgatacacgttgccttcgtcaagctcaccccccggggtgcggctcgtcggctcgagagcgcccgcggcgtttgcctcgtgccgccgtcggcctatggccggcggcaccgaggacacctcgctggcgcttttggtctcggatgtggctcacgctgaaggccggagacgcgttggcgtcacgcgcccaagaatcggtccgcccgaacgaacgacggccagcccggcacgacgcctccgcgcggaggccggcgctggcccgtctgcgaggacgtgctacctggttgatcctgccagtagtcatatgcttgtctcaaagattaagccatgcatgtgcaa

SEQ ID NO: 10893 - DNA, 915 bp, Zea mays
  Peptide Sequence Number=SeqID_54268
atgaactcgagactccccgaaacagagcaccgtcccgagctggaaaggttgctggagactacccatctggagcttgacgggaagctgttcgtcaacacgcagcaggcccctacctggcgcgccaactatcggcgtttcgaccccggggggtccctggaccgacgagtaaattgtcgccgcgtgccccagcccagatgggtcggcgcgagacggagcgcgaaggggggagacaggcgtaaaaggggaaacccgtggccttcgtgtttgtcccgcgcccaggtcaggcgtaaggagagggtccagggtaatgatggcacctcctgtgacgtggtcggtccgagccctgggttgggcgaggcggaggctcctccgaggtcgaggtcaagtttgtcttccgaggtcgaggtcgagtccgagcccctgggtcgggcgagcggagttcgtcgtcttccagggctgagcccgagtccgagccctggggtcgggcgaggcggagttcgtcgtcttccggggccgagcccgagtccgagccctggggtggggcgaggtggagttcgtcgtcttccggggctgagcccgagtccgagccctagggtcgggcgaggcggagttcgtcgtcttcaggggttgagcccgagtccgagccctaggatcgggcgatgcggagtttcctatggcgcccgaggccggacttggctgctgccagcctcactctgtcgagtggcacagcagtcggagcggcgcaggcggcgctgtcctcttgtcaggccggccatccttgcatttaatgctcctgcgatacggtcggtcgtcgtggcgacttggccaaggttacttcttggcgaagactgggcctcgggcgagccgaagctttgtgctgatgggggttaccagctgagattaggagtcttgagg

SEQ ID NO: 10894 - DNA, 1584 bp, Zea mays
  Peptide Sequence Number=SeqID_54269
atgaacagccaccggcactcaaggtgccagtacaagcggaaccccggttccgtccccgcgggcggcgctgacgacctcgacggtggggaagctttctccagctgccaccacgtcagcaccgacggcggcgtccgcctctccaccaacgccgcactggcgagcgcgggccgctccaaagcgcaccggcaggacgcctcctccgcagagctggaggatggtctccaccaccagaagctggaagaggaggtggccagccgacccgtgcgggaggtagagcctcggctcacctcgctctccgccccagcaaggatgatgaagatccttgaagctgagggcgggaccaagatcgcagcccggcttgcttctccccacccaggggctggtggtcatcgtcttggccatcgcgggctaagtcttctccaacacgctccaaggtcctccccctactacacgggggctgggccccacgcgtcatgcaagctggccaggggcagaagaagccaaaccgccacgcgcgcggtacgcgcaactgcccggcagttacgagcaatcctccactttcgcccagaccagcgggtgaaagggcggaccgtcatgcaggcggcatgcaaccgcaccaaagaggcgcaccctttcgacttcgacgcatccagcatggaggcccaggcccacacgtcatataaccggcgcgccggttgctacgtgcaagaaactgcacctccactcgcacctctaccgtgcctcctcgactgcggaaccagtaccgtgactcgaggcaaccctgcgaatgacccaacagtgccaaccaggcacatcggtcacgggtcagttagccgcgggagaaggcgcgacggtcgatacggccagaagtgggccggcagtaatggcggtggcagacgagcggaagcagcgggaccgggaaaggggataccccgaaagggatccttctccgcaaaggaaacgggcctcgagccccccctactgatcagaggttcgaaggttggcccctcagaggggttccacagccgcctcagagcgcttgggctccgcgcccactactggtcagaggttcgaaggccggcccctcggaagggttcaacagccgcctcaggccactcgggctccgcgcccactactgatcaggggttcgtaggctggtcctcgaaggccccggaagacgacgaactccgcctcgcccgaccccagggctcggactcgggctcagtttcggaagacgacaaactccgcctcgcccgaccccagggctcggacttagccctggccttagccgacggtctccgccttgcccgacccaggggctcggactcgacctcggcctcggaagacagactcgacctcgacctcgggaggagcctccgcctcgcccaacccagggctcggaccgaccacgtcacaggaggcgccatcattaccctacccaagctaactcaggctacggggaacaagaccggcgtcccatctagctcgccccggctccagcgcccctctgacggccacgacaccacacgaacagggtgccaaaacctctctggttgccacgacggcatgtacttagggcactag

SEQ ID NO: 10895 - DNA, 159 bp, Zea mays
  Peptide Sequence Number=SeqID_54270
atggcgagagtagcgtgtaccctctatggcaagagcctggacggtggtgtatctgtgctcttggtgaagaagcggcaaatttttgctgcttttgttcaaaggtggtgcccaaagaagaaaatcaagactgaaggctcgggaggaagtgtcctccactaa

SEQ ID NO: 10896 - DNA, 696 bp, Zea mays
  Peptide Sequence Number=SeqID_54271
gagatagagtctgtgaggagctgctcccccgtgcttccgctagaggcgccccctgcaccaccgctgagcgccctagcccctagagtagctgctggaggagacccagacgacggaggtggcgacagcagctcgagcttcagcaccgacctttctgccaaccaggagctgaaaggatgggttgctcgacccatcactcgagacgctgctcgcgggtgtcacttccacgatgcgctcgacaccctgctacgttgggcacttgatcggcgtacttggtccatcgagtatcgctgtgtggtcttccagcacagtcacggggtctacccgaaccgctgggaggcgacctgcttggtgtgccgtccagagaacagtctccggggtgcggagtattacccccgccgtccatctggcaatataggaggcgtgattgtctcacctattagtgaggacaatcctaggttgagcagcacagtcaacctagccgccgtgctaaacacggagctggaccatgcactagacgatttgagtagggctcgtgctgagatcgcccagctgtgggctgagcgcgcgaagcatcgtcacctggatgatggctcccccgctcccgtcgggactcagcacccgtaccgctcacctcggcatggacaccagtcttatggcaaccccgactgcaagaccaagataaatttagaaccatag

SEQ ID NO: 10897 - DNA, 540 bp, Zea mays
  Peptide Sequence Number=SeqID_54272
atggagcaatatttcatccgccccctccccttcctcttggacgtcacccctcttcccctctcccatcttcattctcctcaaacctttgcagccctcaccacccaaaaccctagccgcccctccatttctcttcccccctccaaggtgcaaccctcccgcgtgttctctgtcgtgtggctgcgatctcaattggagtttggagggaggaagaaggaaggaggaagggaagaactcaagatggtggacttccggatcacacttagggatttgcccaaacttccggtgaaggcaagtaaaacagtgatgtttcgtcgtgatcttatggtccgaccataccagtacaatgagcatcatatgttgcccgagaaagggcacctgatttctgctttgggaaagaagggatgtagcagcacggccactacacctttaataaaggaaccactgcttaataatgttgttaatcagggagggtcaagtctagggaattattatgttctagcctttcatggtagttgtgctgatttttttggggtgggctga

SEQ ID NO: 10898 - DNA, 1425 bp, Zea mays
  Peptide Sequence Number=SeqID_54273
atggatggatgtatgtatgtttgcacccgcttagagaacgatccggttgaagagcccgaggaactcgcaggagaagcccctgagcagcagtcggttggtggaggcaagtgtcccttgacctatctatgtcctattcattatttaattcacctcccgctttacatatttatgcctaaggtggttatgagattgatggttttggttatgattatggtgctggttgtcagcattgcaaccactgctcaggcgaagatgaagctgtggaaggagacttccaggagttccaagactacgacgagttctaggtgtgggttagcggcaacccccagtcggctgcctgtgaaggccgcgttatctacgtttcttttccgcactttgatttattgtaagaactatatggacgtctcagacatggctcgacttagacacactacacgaaagtcagtcatccccttcttaccctcccgccttgctgagcgtccgcttcgccgtcccgtggccggacagtccagccacttggagagactacaccaccgcctgcgtgaggagcaggaacgtcgacgacaggagcagcagagctcttccctctcgctccaccaggagatagagtctgtgaggagctgctcccctgtgcttcctctggagccgccccctgcaccaccactgggcgccccagcctctggagtagctgctggaggagacccagacgacggaggaggcgacgacagctcgagccatgacaccgacttctctgctaaccctgagccggaaggatgggttgctcgacccatcactcgcgacgctgctcgcgggtgtcacttccatgatgcgctcgacaccctgctacgtcgggcatttgaccggcatacttggtccgtcgagtatcgctgtgtggtctaccagcatagtcgcggggtctacccggaccgctgggaggcgacttgcttggtgcgctgcccggaggacagtctccagggtgcagaggcctgttcagagcactattctatctctgagcgggactcagctgaggcagccatgcaagatgctgcacggcgtgcgctttcgcactactgctcggttttcggtggggcagctgacggccttgacctgaagtattacccccgccgttcatctggcagcacaggaggcgtgattgtctcacctgtcggtgagggcaatcctaggttgagcagcacagtcaacctagccgccgtgctaaacacggagctggaccatgcactagacgagctgagtagggctcgtgctgagatcgccctgctgcgggctgagcgcgcggagcgtcgttatctggacggtggttcccccgctcccgtcgggactcagcacccgtaccgctcacctcagcgtggacaccagtcttatggcaatcccgcctgcaagaccaagataaacctagaaccatag

SEQ ID NO: 10899 - DNA, 387 bp, Zea mays
  Peptide Sequence Number=SeqID_54274
atgcaggatgctgcacggcgtggactttcacagtactgtttgttgttcagtgggttggctaacgaccttgacctaaagtattacccccatcgttcgaccagcggtaccggaggtgtgattgtctcacccgttggtgtgggcaatcccagattgagcagcatggtcaacctggtcaccatgctcaacaccgagctggaccatgcccttaacgagttgggcaaggctcgggcggagattgcggaactgtgtgctgagcgcatagagcgctgccatcaggaggatggttcccctgcttctgttgggactcagcacccttatcgctccccccgtggtcatcatgcttatggcaccgctgactgtaggacctggataaacttggagcgctag

SEQ ID NO: 10900 - DNA, 807 bp, Zea mays
  Peptide Sequence Number=SeqID_54275
atggagcgtctgcttcatcgtccggtgactagtcagtctagtcatttggagaggctgcaccaccgcctgcacgaggagcaggagcccgctggagtagctgctggaggagaccccgacgacggaggtgacgacaacagctcgagccacatcactgaccttttagaggagcaggagccggagggatgggttcctcgacccatcactcgtgacgccactcgcggtcgtggggtttacccggaccgctgggaggcgacatgtttggtgcgccatccggagaatagtctccgaggtgcgtatgtctgctcggagcattactctatctctgagcgggactcagctgaggcggccatgcaagattctgcacggcgtgcgctttcgcactactgctcggtgctcggtggggtggccgatggtctcgacctaagtcaacctataggtagctttgccgagagttctcctgtgccgagtgtcctacactctgtaaaccagctcattgttgagagcaggaattcgccgagtgcggctctcggcaaagccgcctttgccgagtgcccgaaacaaggcactcggcaaagcggccgacactcagcaaagtcttggattccggtagtgctagccaccatgccaaacacggacctggaccatgccttagatgagctgagtaaggctcgtgctgagattgcccagttgcgtactgagtgcgcggagcgccgtcacctagaggatggctcccccgcccccgtcgggactcagcacccgtaccgctcacctcagtgtggacaccatgcctacgacaaccctgactaa

SEQ ID NO: 10901 - DNA, 378 bp, Zea mays
  Peptide Sequence Number=SeqID_54276
atgcaacatgatcaacaggagatcctttacggtaccaagctcgatgctagtgccggtaaaaggaatgggtatctcaacccaatactgatatcagaggaaagccacactttcagaatcagaaaagacaatgaagagttaaagggaaagacggacaaagaagttgaggagcgtctaaaggttatgaagaaggatttcgatgcaagattcgccacctacatagcaaacacaatgcttcaacttcaagacagggaagccataatggcccgtacaactttaaggaccactggatatgcttcctcatttatcctaaggttgggcaaggtgctggtgctcgactccttgaactacgaccctttcgacctatgcgaaatttcttaa

SEQ ID NO: 10902 - DNA, 444 bp, Zea mays
  Peptide Sequence Number=SeqID_54277
atgaccgcggcggacggcacatctccgtgggcggggatctctacgcaaccctcgatgttgttatttattgttcatgttaagatcattacgttaattggaatatggagaaccacccgggaaaaacagtgctaccacaagggtgattcagatgtgaagaagagggaccgtttccgaaggggactcaacaccaaccttcgtgagtgcctcaacactattcgtgctaacagctacaatgaactggtcaaacttgccatatcactggaagactgcatcgtagcccaccgggcagagaagaagaggaaggcactaatgtcaggatcctcagctccacctcagaggttccagattgtctccaacaatcagagcagggagatgggtcatcaggccgccacagttgtagcagcaagcacccaaccgtttccccgctcccgctcccaggaataa

SEQ ID NO: 10903 - DNA, 234 bp, Zea mays
  Peptide Sequence Number=SeqID_54278
atggcgtgggcgcgggggcaagcgctgcagtggccagcccgcgctcggtcgtgctcaagtggatttgatctcgggttggcgagttacgaggaggtgaagttggagggtgtggcagaacctcccaagttattgggcccacatgaacctgtccttgtctcaaagacctcagacggctatgcatgtgcaccagataacttaactggatccgtccagtgtcccaaggaccccgaataa

SEQ ID NO: 10904 - DNA, 1241 bp, Zea mays
  Peptide Sequence Number=SeqID_54279
cacttaaatttaaccctcttccagagatgtcttcacccacccccgccaatggaggagacacccgcttcagctttgactacctttcccacgatggctttccctctatcttgtgggaggtgctctgctccgctggataccccacaccccctttgtacacggtgcagctatacgaggagcatcgagtgccacgttgcagggtttggctgaccctggagtctcaccctctacagcctgggtggcgttcccttgatgccgagactgacgggttcaaggcggacgacaccactgaggccgcaacaataaaggccttgatgaccttctacggatatcatctcctggagatgatgatgcagccacttggactcttccccaccgaaaagagggatgacccaatgtggtgcaacagagtgagtcacgtcaaggatgtgtgggccatgcatcccgaccaggatgggaggatcaccgtccagtgcatgagtgcactgtaccacctgcaggccttgaagagcgacaccatgacacacctcaatggtctcgctcaggctacgaagatcaccatcgacaatcaggaggacttcgtagtcaacttgtctttggaattggtggagaaagatctacaggtggaacagatgaaccagcgcatcctgactctggagcagcaggtggagatccgggataacaccatcgatatcttggaaatccagctccacgatgtgcaggaagagcttgcggaggccaacgctcacctgaaaatgcaccaccaagacatggaagcaaatgaggcaggcagtgaaggagaggaggatcccgaggagatagagccaacttccggaccgaacgtggctccctccggagtgcccctactcctgcatccagtgttgcctctaccaatcatggttagacggatggcagctagacctcgtcgcgggcagaacgagcatgttcctccgccacctcctccagctcctacgatgcaggagctaatggctcagcaaaatgagatccttcggcagctggtgcagcgccagccctaccctcagcagtttggtggaggccagcaacaatgcccaccggctgcggcgacatatcaggagttcttgagcacccaaccgccactgttcaccaaggcggaggactcgctagacgccgatgtgtgcctcagggttgtggagtccaagttcccactcctcacgggagcttgccctgatgccgcaaagacgactcgcttcgccacacagtag

SEQ ID NO: 10905 - DNA, 237 bp, Zea mays
  Peptide Sequence Number=SeqID_54280
atggcgtacttcttcagtggcttcgtcaatctgcctctaaaggggccttcctcttctggcttcgggcctctcgaagagaaaagggtctcctggttcgggtccagcggctgcagagcggcagcccctgtcgctgaagctttcttcggtggcatgacgaaggctagctcagagacgaactcgctgctcttgggaatcgccaaggacgctgtggctaaaattcaccggactatccagtga

SEQ ID NO: 10906 - DNA, 162 bp, Zea mays
  Peptide Sequence Number=SeqID_54281
atggtgggtacaagtgcggtcactgcattacggcagtcggggtcagtggggcattgttctctggaggacatggttgctggagtgacttggccgtccatcttgccaccgggttggacagtcgagtgggaccctacctcggctaaggaggagcatgaggagtga

SEQ ID NO: 10907 - DNA, 1113 bp, Zea mays
  Peptide Sequence Number=SeqID_54282
atggccaggcagtgcatggtttttggtgtgcggcggggtcgaactccccctcgcgctccatcccggtgtcagcccctcacctcagtcgcccgcgacgtcgtgcgaccacctccaagaactggggtggtgcttgaggtgatccacctcgaccatgccaatgtctccaaggcggagttgaaggagaggcttgccaagatgtacaaggtgaaggaccccaacaccatctttgtcttcaagttccgcaccagttccactggctctggcctcatctacgacaacctctactccaagaagttcgagcccaaatactgcctcatgaggcgcaagttcgctcagtggcggaagaggttcaagtcaatggatttgcaccccactaagccatggttccaccccaacatacatcttgatgcacgcaattcgataatcaacaaagagctaggccagcttcttataagtcacattaatggtttatcctttatctttctttcaggctttttaccctcttcgttcaaaaagaatttatttattcagttgttaaccactgcaggaccagcggtacttgatcgagaagatgcatatttagctcaagttgtttttgaacatatgcaactagatgacaatgaggtggttctaggaggtggtcaggatgcaatgaatgtgactatgatagactgtcgtgttggtaaatttgaggctaaattctatcacaagtttcccattgggatagactctgattgtttcaagcgagcattggagctcctagcattgaaaaggcacataagtgaatttatagaatgttttgctggtcgaaaggtgtttgtttttgtggcagcagagtgtgagaatccacatgattctttgaatcaaaaaactgacatatgtgaaggagaagtcccttgggctcctcactcagaattttgtcaagctcttcctcaccatggaggatcagtggtcttctccataaagagactcgacataccttcccaatttacaagatccactaaagagtatattgacataaaagatggaggaaaaaggaatgtgaatgatattggtcaatccagaatagtaacagtctgcatgccacatgcaaatcataatccaaaagcataa

SEQ ID NO: 10908 - DNA, 516 bp, Zea mays
  Peptide Sequence Number=SeqID_54283
atgaccagcccgattgagcatgcttcctttccatccggccagacggttttggattttctcgatcaaaggttggacatgaattctctggagtgcccgggtgtgaagttggaggcccagctcttctcaaggttggtgaccaagcccgaggcgcaaccaaaagcgtgcaggatgtctttgaccgccaggaggtcttctctagaggggttgataaagatagcagcatcatcggcatacagagaagtcctcagttttgctgtagttagcggaatgggggaaatgatcccatttctggctgcaaggtccaggatacgctgcagcggatcaatggcaaggatgaacaacataggggaaagggggtctccctgcctaacccctctcctgtgttggatgtttgctccttgttggccattgaggagggctcgagacgaggcggacccaaaaaggatggaatccactcacgccaacaagggccaaaacccatggtttggaggacttccaggagataaccccaattaa

SEQ ID NO: 10909 - DNA, 711 bp, Zea mays
  Peptide Sequence Number=SeqID_54284
atggcgctccctgttgacgtggcgggcccgcgcccgaggccgggcgacgtgggggctcctccgaagctggggtcgaatctgtcttccgttgccgaggccgagtccgagcccctgggtcgggcgaggcggaagtcgttcggcagaggccagggcggagtccgagccctggggtcgggcgaggcggacccgagtccgagccctgggtcgggcggagcggagttcgccgtcttccgggtcttagcccgagtccgagccctggggtcgggcggagcggagttcgccgtcttccgggtcttagcccgagtccgagccctggggtcgggcggagcggagttcgccgtcttccgggtcttagcccgagtccgagccctggggtcgggcggagcggagttcgccgtcttccgggtcttagcccgagtccgagccctggggtcgggcggagcggagttcgccgtggcgcctttggcaaggcctgactgcctgtcagactcactctgtcgagtggcaccgcagtcggagtggcgcaggcggcgctgtccttctgtcagactgcaactggcgcgccggttgcttgacgcgtgggcctgggcttccaagctggcgtgtcagaagtcggagaagcgcgtccacctggcgcggttgcatgccgcctgcatggctgcccgccccttccgcccgttggtctgggcaaaagtggggggtcgctcgtaa

SEQ ID NO: 10910 - DNA, 984 bp, Zea mays
  Peptide Sequence Number=SeqID_54285
atggacaaggatcgccaagatgcggcacggaagcgccaggcgttcactagggtcagggaccctagtcgcgaggtgaagcgggcgcggggaggcgtgaagtccactgcccctggcagcagcaaaccactgcaggcggcgaagcctgctgtcctcgggcccagcaagtcttcggcgggttcgagggctgttgcttctggcatgggcaagctgcccttggctgagcccacgaaggagcgaaggccgctgtcgtcggtgcgcaccgacgaagcggcggcaggtggtgctgacttcgacacggacatctgcgtggagaattacctcgttgggtcagatgcggggcagctggctgttgtcccggctccggaggcggccacttcgcctgcggcggcggttggagcgaagtgtacttcacaagacccatggtccaaattctgcgccagcggtgagatttcgtctgccgccgccgccaaagacgtggcgggctctgtgtcccagcagttgaggcatgcgtcgcggcagctgaagcatgcggtcgccttcgccaaccatgttacgtcaggcaccctgacttcggagttcgctgctgagaggcaacgactcgagggcaggatcgagcgcctccgagcgcagcatacagatgttgttcgggacaagtcagctacggagaacaagagccgcaggctggcggagaggctagcggctacggaggccaagaaggcggatctcaggcgtcagttggtggaggagtggagggacgcaaacaaagcttgtgctgaggcgcagtctgcgcaagccgaggccaagcttgcacgagcggtggccaatctcgcccgccagcgcgccgaggagatggagacgaggctcggcagcctgcgcgaccgtctggacaagatggaggcctcgacacgcgcgaaggttgagcggacgcatatgcagctggtggacacgtacggggagctgggtgcgcggaccgctcccttctaa

SEQ ID NO: 10911 - DNA, 414 bp, Zea mays
  Peptide Sequence Number=SeqID_54286
atgaccgggaaaaagaccacggcttcctcagacggcgacactccaaagaaagccaaggtggtggtggaggatgaggaagaggcgactgtgacactatccgtggagaaggacgcgctggatgcaagaacgggcattctggatgtgcaaagtgctgcatccgcacggacgggagctattgttctgccttgtccatcgtggcatacccaggtcatcgaattgcgtgggatgcttcgctcaacgtttcttatcttggttggatggtctatgaaaagagacatgtcgatgaactggttaaaatcctctaaatcagatacaccatcaactcctatagcttgttgttttccaggaaaaactacatgcttcggtttgtcggtgcttttcttctcattgttagaaatgatctgttcagcatag

SEQ ID NO: 10912 - DNA, 267 bp, Zea mays
  Peptide Sequence Number=SeqID_54287
atgaggactttacaaagttccactagcttccgaaaacccgctacagtttatgggaagagcacttgcaagaatccccgtctgaccgccatcgcagcaaaatcaacccgagaacctccttgcatgcaactcccctactgcccttgcccctttcgggacgagtgccctagtggccagggtgtcacgctccacaagatcgtgacagccataggaggtggtgtatcggttgctaaggcgcagcgtctttggaaggctgtagtcgggccgtga

SEQ ID NO: 10913 - DNA, 450 bp, Zea mays
  Peptide Sequence Number=SeqID_54288
atgcaggcggcatgcaaccgcgccaggtggacgcacttctccgacttccgacacgccagcttggaggcccaggcccacgcgtcgcgcaaccagcgcgccagttgctgcatgcaagcaaccgcaccgccacttgtgccgccgtcgcacctcttcggttgcggagcctatgccgcgactcgaggcgacctagcgcacgacccagcagcgccagcctggcgcgttgggaccgggaaagggggataccccgaaaaggatccttctccgcgaaggaactgggctccgagcccctccctactgatcagaggttcgaagactggccctccgaagggttcaacagtcgcctctgatcgcgtgggcccgacacccactactggtcaggggttcgaaggccagccccccgaagggttccatggccgcctcaggctactcgggctccgcgcccactactga

SEQ ID NO: 10914 - DNA, 420 bp, Zea mays
  Peptide Sequence Number=SeqID_54289
atgtccggtgcaccaggggactccaactcaaactcgccaccttcgggaatttccagaggcactcgcgctataattcaccggactgtccggtgtacaccggacagtgtccggtgcgccaaggagaagcagcctcaggaactcgccagcttcgggaatccccaacggctggtccgctataattcaccggacatgtccggtgtgcaccggactgtccggtgcaactccggggcaacggctatctccgcgccaacgactacctgcggcgcattaaatgcgcgcgcagaagtcaggcgtgcccatactggcacaccggacagtaaacagcgactatcaccagggtcctacaagctaagggacatggaagggaatgatattccaaggtcttggaatgcggatgagcttcaaagatactatgtataa

SEQ ID NO: 10915 - DNA, 636 bp, Zea mays
  Peptide Sequence Number=SeqID_54290
atggcacactcatcttcagccgcagccacctacgtcctccttccatcattgagcgacacctcaagtatctctctcttcgtcatcccttctcccttttattcgagaggggacgatcccgacgacgaggatgagcttatgtgtgatgaggcagaagagcaccctaggatgaggccgaccgtcagctccggcactgtcacctgctcctgtcatgggggcactgccttatgtgcgggccaacaacaacctcccgtgtcgaatcgtcaagatattttttacagaaggaaaaaagcaaaggttagggcactggtactatttcagaagctattggtgagtacttaccgctatgatggacaacacttttatcagttcttttttagccagactgtggttagatcaaatggcaccatatcaaaagcaacgcttcggcaatctgctacttcaggtggaatggtgacatacgaggtccagatcgtagtggggagcttcgatggcgatggaaagaagcgacagtatcttgctcagtcaccggtgccactaaagctcatgccgacggttgtggcgacagggttctatacttcaggttgtaacagctgtatcagcaaagactactattccttgtatattagaggccagtga

SEQ ID NO: 10916 - DNA, 411 bp, Zea mays
  Peptide Sequence Number=SeqID_54291
atgggcgcggttcaggtcaaggcttcgtctacccaaggggcgcgatctcgcctcgcccgagcccagcctcaggcgggaactgtagccccggacgaagttacgtctcgcccgagggcctcctcaggcagtgggcacaccctcggcacgcccgaggcccaactcgagcaggcttcgtcgagaagcaaccttggccaaatcgcctctccaaccgaccgtatcgcaggaaaacagcgtcgctcgctccgctccgactgctgtgccacccaccagggtgaggctgacaacagccaagttcagcctcaggcgcaacaggaagctccgcctcgcccgaccttaggcctcggcctcggacggaggtctccgcctcgcccgaccccagggctcggcctcaaccccggcctcggaaggtga

SEQ ID NO: 10917 - DNA, 378 bp, Zea mays
  Peptide Sequence Number=SeqID_54292
atggaggtcgctgccacgctgttggtgcagcggtcgccgaaccttcggccgctctacgatgagctggagccagaggcagcggtgtcggcgtggacagaggcggagtcggctcgagaagaggctttgtcggcccaggagcaggtggcttcctgggccgaggaggtgcagcagcggcgactggggcttggccaggtcatccgcgagcgggaccaaccccggagtcatgctgccgaggccgtgagccgggctgaggtcctcgggggacagctggctgaggttacggagcagccaaccgatgtgtctgcccgggccggggccctggcggaggccctggctgcgatggcccaagcgcggtgctggcgtcctccttcgaggtag

SEQ ID NO: 10918 - DNA, 543 bp, Zea mays
  Peptide Sequence Number=SeqID_54293
atggcccctcggaagggttcgacagccaccccaaagcactcgggcttcaggctcattactgatcagaggttcgaaggctggcccctcggaagggttcgacagtcgcctcatagcacttgggctccgtgcccactactgatcaggggttcaaaggctggcccctcgaagggttcgatagccgccccagaacacgcagagcgagggatgactctggatgaggctgacagcagccgagtccagcctcaggcaccacaggaagctccgcctcgctcgaccctagggctcggcccccgcctcggccttggaaggtggtctccgcctcgcccgaccccagggctcagcctcgacctcagcctcggaagatggactccgcctcacccgaccccagggctcggcctcgacctcgacctcgaaaggtggtctccgcctcgcccgaccccagggctcagcctcaacctcgacctcggaggagtctccacctcgcccgaccttgggctcggcccgaccacgccacaggggggaacatcattaccctacccctag

SEQ ID NO: 10919 - DNA, 534 bp, Zea mays
  Peptide Sequence Number=SeqID_54294
gttcggggttttgggcctgcgcacacaaccgctactgacaatactaattttgtggctttgaccggggttgctggagacaattctgatgattctgtgtcaaagttttttggatttgatgattcttggagttcgattgtgtggacagaggggtcttcggatgaggacttagactattttgtagcattggatgtggttgcagcgaagacttctctgcgtgtgacgggtgaggatattccttgtgcgaatgctgggcgtaggcatcgaagggcggtggcgaagcggagggtgagcgggttgtcacgaagtgataggcgtcatggtgaggtggagggtggttgtcttcgagtggacgggactgccaaacgagaattgttgtcttcgccggctggggcaagtgtaggtgagggggagctgcgaaatctttttgagggtgaggaattgaagataatgttgttcaactatagggagatgggtatcacccccgacgacagaaggcaagggtggccttccggatttgctctcaacgccccctag

SEQ ID NO: 10920 - DNA, 975 bp, Zea mays
  Peptide Sequence Number=SeqID_54295
atggcgcctcctgttgacgtggctggcctgcgccctaggttgggcgatgtggaggctcctccgaagccgaggtcgagtctgtcttccgtggccgaggccgagtccgagcccctaggtcgggcgaggcagaggtcgtcggctgaggccagggcggagtccgagccctggggtcgggcgaagcggagcggcgctgtccttctgtcaggccggtcagtggagcggcgaagtgacggcggtcacttcggctctgccggggggcgcgcggcctcgggcgagccggaaatatgttcgccgttggaggggggcctcgggcgagatggaaatcctccggggcctttgcagctttatgctgatgggggttaccagctgagaattaggagtcttgaggccgttctcggttgcattttgtttcggtgggtgcgcgcgagcgcacccgccgggtgtagcccccgaggcctcggaggagtggtttcactccttcgagatcttaatgcctcgcgtaatgcttcggctggtctggttgttccctcatgcgagctggccgtagcccgggtgtacggtcgggtcccaagttcttgggctggtatgttgacgctgtcaacggttcggccggagccaggtttgcgagagcagcccccgagcctccgcacagggcgagagggcgatcagggacagactcggcttttttacatacgcccctgcgtcgcctttccgcaaggaggaggggggaaagcgccatgttgccctcgatgggcgccgaacatggtgtctccggtgagctgcaagcgggtaatccgagtggacgtccgtgccccgttcgttaggggtcggctaggggcccagaggcacgcccaaaagtacctgcgggtgatctgccggacccggtcccctggcgacggggtccgagggctcgatgcctccctccgatgggattccgttacaagatcgttcccgctggtctcggaaatgtcctag

SEQ ID NO: 10921 - DNA, 660 bp, Zea mays
  Peptide Sequence Number=SeqID_54296
atgaggcggaaagacggtgggtatcccccatccgggggcttggaaggtggaaagacacgatgcataagggagagcgaagacatgaccagcgggcgaaaggggcgggcagccatgcaggcggcatgcaaccgcgccaagtggacgcccttctccgactcccaacacgcccagcctggaggcccaggcccatgcgtcatgcaaccggcgcgccgaatgcttcgtgcatgcaactgcaccgccactcgcgccactaccgcgcctcctcgactgcggaaccaataccgcggctcgaggcgacccagcgcacgacccagcagcgccagcctggcgcggcggtcagtgcggccaaaaatgaccgcgtcagtaaagggaccgggaaagggggaaaccccgaaaaggatccttccccgtgaaggaaccaggctccgagcctccctactgatcagaggttcgaaggctggccccccagaagggttcgacagccgcctcagatcgcgtgggccctacacccactactggtcagaggttcgaaggccgacccctcggaagggttccacggccacctcaggctactcgggctctgcgcccattactgatcaggggttcgaaggctggcccccgaagggttcacaactgcctcagacgccgagcgagggatga

SEQ ID NO: 10922 - DNA, 129 bp, Zea mays
  Peptide Sequence Number=SeqID_54297
atggggggaggcacattgcttgctctgccgaggctgagtgccgaggttctttcgttttgcttttgtaaagaagaaggcgtcgaggtggatctccaggagttccaggacttcgacgagttcgaggattag

SEQ ID NO: 10923 - DNA, 228 bp, Zea mays
  Peptide Sequence Number=SeqID_54298
atggacgagggagaaggagctgacgggtgggccctggctgccagtgagaggggtctgcgcgagagagagggcgagttgagcaatagcataaagctaaacaataataacccaaaaggtaatcaaggacaaggtcagaggacacttgccttcaccaaacagatgctcagggtctttgatctcatagaactcgaagagttcgatcacttggtcgccatgcttaatcgttga

SEQ ID NO: 10924 - DNA, 324 bp, Zea mays
  Peptide Sequence Number=SeqID_54299
atgtcgcgtcttctcgactgcggaaccagtaccgcgactcgaggtagccctgcgcgtgacccaacagtaccaattgagtgcaacgatcacgggggtttgaaggttgcgccctccggggttcggcaaccgccccagagcactcgggcttcgtgccctttactaatcaggggttcgaaggctggcccctcagaagggttcgacagccgccccagagcacgcagagtcagggatgaccctgggtacgtccgttacatggccgaggctcgggctacgctcccgaggtacccaaggacatttccgagaccagcgggaacgattttgtaa

SEQ ID NO: 10925 - DNA, 657 bp, Zea mays
  Peptide Sequence Number=SeqID_54300
atgccgcatgtccatgatgttgatggaggcctttgcccctgcaatgagaaattgctagaatcaggaaaagaaaaggattggaaaagagttggatgtgtacagccaactgcagctcagtctggcacaccggactgctcagtctggcacaccagactggactccggcgaactggccactctcgggaaactgtggcggcgaacggctataattcaccggactgtccggtggtgcaccagactgttcggtgagccaacggccgccagcgcaacggtcggccgcgcaatctacgcgcgacgcgtggccccagccaatggtcggctgggggcaccggacagtgtacggtgcgccaaccagcctgaagatccaatggtcgactgcgccaggaatggaaggagatccacactggacatgctacagtggctgtccagaggtgcaccggactgtccggtgcgccacccgacagaaggcaagaattgccttccaagaatgcctccaatggctcctagctgccttggggctataaaagagacccctaagcgcatggaggagatacccaagcatactttgagcattctaaatcttccacactccgtctccgcgcacttgattgactttcttagtgatttgagctccgttctagtggtgaacttgttgtga

SEQ ID NO: 10926 - DNA, 702 bp, Zea mays
  Peptide Sequence Number=SeqID_54301
atgcttgagcgaaaggtgaccaccaacaccatttccgccatccatgcgaagacgagggacacgacgttcgactccttccacgcagatctggagcaatccctaaaggagcgccgacacaaacatgtggagggcatggaggcagctgcttgggatcacctaaacgagtttacggcggacacgactacttgtgtcaccgtcttggagaatgtcacctcgatcttcgagccttggaggcctcggatcgagtctaccgttgatggcatcaagcactctgtcggcaacgttcgagcggaagtttccaaggtgtcccatcttctcaagcgaggcgtggtcgaggactccttcaatccggtgggcattctcggtcaaactctgtcggcggcgaggcacccatctatagcattgttgaacgttgacgacccaattgggcattgcgccgactcacaacaatgggagtgtggttttgggtgtgtatatacccatcaccatatctcggccaatggtatgcacaaatctcctcctctacctattgctcccgacatttcctcgcatttcccctttagaggagcctctgaacctggttaccaaccacccccatcaacctttgggagccgtgcttatgatgcccaattcaatagttacttaggtcaattgcctaaactaaacttccctgaatttgatggcaccaaccctaagatgtga

SEQ ID NO: 10927 - DNA, 789 bp, Zea mays
  Peptide Sequence Number=SeqID_54302
atgaggagggagcaccaggtgaatgagatactgggtcacgctaacgtcgaagctggcggtcttggtgcaggcgtggtcggcgacgttgacggcctggcaggctgggacggtggccaggctaggcttgtagctgaggcccttgcagtggcaccaaaggaaatagggggcggatggcggatgggaatctggggaggatctgggcggaggattcggcttctatggagagcgcggcgtggacgcggatcgagaggaaatatgtcatgtcacgggttgggcgcggcacctacctccttccgtgaggttgttgcaagcggagctggaggagcgctcgctgctggaggggagcgagctcgtggtgctcgtcttcgcctgctgcttctcctgctcctcatctccgcgtcaatcttcttctcctcctcccacgcgctgctcatttccttctcgccgctcccctctgcggcctccgccgagcccctcttcatcgaggccaatctccgcaagcagatgcgggctgaggagcgccccgcgcggggcgccgtgcccaggatcgcctaccttgtctctggctccgcgggggacgatactgcgcggttgtggtgggaggggcatggcgggctgcttccatcgcgcgtgggacggtgcacaggcaggcgggggtacagcaggggctggccgagattgggggcatggtcgagattagctgttgtgacgagcgcgagatccacggggggcgagatccgcggcagggcagcgggggaagagtggaagggcaggcgggggctggcgtga

SEQ ID NO: 10928 - DNA, 297 bp, Zea mays
  Peptide Sequence Number=SeqID_54303
atggtctccgcctcgcccgaccccagggctcggactcaaccacgacccggaagacgacgaactccacctcgcccgaccccagggttcgaactcggcctcgactccgaaagacgacaaactccgcctcgcccgaccccagggctcggactcggcctcaaccccggaagacgacgaactccgcctcgcccgaccccagggctcggactcaacctcgacctcggaggaatcgccacctcgcccaaactcgagttcggaccagccacgtcgccaggggggccatcattgccctacccctag

SEQ ID NO: 10929 - DNA, 219 bp, Zea mays
  Peptide Sequence Number=SeqID_54304
atggaggatgaggcgagtcggggggctgcccccgcgtgggtcggctgcccttttcttcccctggcgtccggggaagaatggcatcctccagtttcgcggagacttcctccagccatgccggggaaggcgaactgttgctgcccagctaggatgcaacattccgccccctccctcgcattcgcggcgaggacggcagcgaggacctgccggtgcgcttag

SEQ ID NO: 10930 - DNA, 2010 bp, Zea mays
  Peptide Sequence Number=SeqID_54305
atgccatcctcttcttcttccgccgacgccacaccgccggccgccgcctcgtctgaggagacgttgagtgacgtgatggtggaggagttgcgcgccggcgactctgttgaatttggtgtgtcacggatgacgtcagcccgtattgaagatatgcagcggttgggctacttcggcggcggagtcgcccgtgctccggggacggaggaagtccccgagccggagggcgagttggttgttttcgaggcgttcttcgtcgccggactccgcttgcctgcgcaccgggtcttcgaattaaatcaactgccgtacgacggctaccccggtcaagacgaagcggaccgccgtgggaagaaaccagcggtggagactggaggcgaccctgcgctggtggccgccgcctcctcgaaaaagagaaaattagtgatggacaaggatcgccaaggggcggcgcgaaaacgccaggcgactgtgagggttcacgaagcccggccgaaaaggcagcggggaacggcgaaggctgaggcctccggcggaggcaagccgccgctgccggcgaaggtgggcgcctctgcgcccggcaaggcgccggaggtgacggtgggcgtcggaggccccaagctgacgaaggtggtgtcgtccgtcagcggagtggcggaggctgcgaaggcggcccgaacgttaccgccgcccggcaaacgcgttgccgacttcggcaccgagattaatgtggaggactatcttggggggtcggacgagggcccgcttgctctagttgtgcctggcgcggcgatcgcgacggctgcgccagcgccgaaggtggggggagagacccttggcgccggaggcgaggtgtctgccctcgcgctggtcagggacgaggcgggcgtggcgacccgccggctgaagggagcgacggaggcgttgagtcgagcgacggaggcgctgagtcaggtggctgacttcaccagccacaccgcgtcgggggcccttacggcagctttgactgccgaggtcgagggacttcggacgcaacatgctgacgctgtccgtgagaagtcggcctccgacagcaagtgccgcaaactggcggagaaggtggccgccctggagaaggagaaggctgacctccgtcgccagctggctggggagaggagggaggccaacgaagccatcgccaaagagcaggctgctcaggcggaggccaggctagcgcgggcggaaggcaatatcgccaaggagctcgccggagagctgcagcggcggcttactgccctggagagccgcgcggagggggccgaggccgcgatgcgagcggaggccgaacggacgcgcacgcagctcatgactgcataccgcgagctaggtgtgcggacgggtgacttcgaggtgccggagcgagaggccggacttcgctgtctggaatgggtgcaggaggaactgcaggagctccccactgtcttggcggggttgatggcgttcacctccctggtcacctgcgaggcagcaatgaacgcgctctctcgcgaaggctgccggcactttgaggccctcgaccaggcagatgaggattttgggcgagatatctttgaggtcgaagaccccgtggtgaaggagtccgccgaggccctctatgaccggatgtggagttcatacggttgtgaggtggtccgggcgcgggccgaagctgcgagggctcaggcggagcgcggcgagcgggtggacgacttcggggcgctgaacagcgcgctgcctgacccggagacgacccccgcggaggccgcgactggagtcgccccgggaccgaccccggagaccgcggaaaatgcaccatgcgcccctgcacctgctgcggccggcgaagaccttcccccaaaggtggccgaaggcgcgcccgatgcccccgcagctgctgtgccgagcgctgaagatccagcggaggtgggggcgggggcagcggcggaggcctcggcggaggctcccgcagcggcagggccttcgcaggtggcatag

SEQ ID NO: 10931 - DNA, 555 bp, Zea mays
  Peptide Sequence Number=SeqID_54306
ggtggaggccgggctgagccggagctctacctccctcgcgggttcgtgggtcaccttctccctcaccactcaggggagagggtgctcaccggcttagcggaaggggcggacttcgacaacgtggggccgaatggccgcaagcgtcgtcagctcccgcgtgcccggttcgctggctcagctagctctggcgcagcttccggtgccaccttccatcgttgggcggatcacggctatctgcccgacgtgcgggcggctgtcgcgccgcgcgcaccgggggaccgcccaagatgtcgcgcgctgctagggcggcgttcgtgttcttgggctatcctgcctttgctccggtacgacgcccctgcgtggaggtcggtgttcgcccgtctgggaggacccgggtggggatctgccggtgggcagacggctgccgtcgttggtgccgaggtggtggcggctgaagaagtcctcgtcgccgacgagatcgccgccaccatccacgctccgggcctctggctctttggctttgatagcttgtcctcgcccctcgagtggggatga

SEQ ID NO: 10932 - DNA, 478 bp, Zea mays
  Peptide Sequence Number=SeqID_54307
aacatctttcatgcttttcgactacttcgaaagtgggatcctaaaaacgacggagtacaagatcagacatcagtgggggagcagcagcaccctcggcatcgactccaccttcggcggagtccgacccagcctcggacggcgacatggtcgaagggtctccaccccaaaccagctgtcccccgaggacatcagcccggctcgtggcctcggcaacccgactccggcgtcggtcccgccagtggacggcccggccagggctctggccgacgaagcttcttttcgagccaactctgcctctgtccgtgctgacaccgctgcctccggcttcgggctcatcacagagcggctgagggtttctttaactaagcaagagaagcctcggacggcaaggccgaccgagctgagggactcctacgcctccgggatacggatacctcacacgtcacctttccgcacgaggcaactcacacttggttaa

SEQ ID NO: 10933 - DNA, 846 bp, Zea mays
  Peptide Sequence Number=SeqID_54308
atgaccagcttcgtcgccaagaacccgctgctggcggccgcggcgcgccgcagggcgctgcctcccctcgccgggcgcgccctgccgttctcgccgctcaccaccgccagggccccgcgccgccgcgggctcgggaccgtcacgtgcttcgtgccgcaggacacggagcacccggcggcggcggcaccggccccggtcgctcccgtgccggagacggcgctggacgaggaggccagggccgcggcggcgcggcgcgtcgcggagaggaaggcgcggaagcggtccgagcggcgtacctacctggtggccgccgtgatgtccagcctcggggtcacgtccatggccgtcgccgccgtgtactatcgcttcagctggcaaatggagggcggcgcggtcccggtgagcgagatgttcggcacgtttgcgctctccgtcggcgcggcggtcgggatggagttctgggcgcggtgggcgcaccgggcgctgtggcacgcctccctgtggcacatgcacgagtcgcaccaccggccgcgcgagggcccattcgagctcaacgacgtgttcgccatcgtcaacgccgtgccggccatctccctcctcgcctacggcttcttccaccgcggcctcgtgcccggcctatgcttcggcgcgggcctcgggattacgctgttcggcatggcctacatgttcgtccacgacggcctggtccaccgccgctttccggtcggccccatcgccaacgtgccctacttccgccgagtggctgccgctcacaaggagctggaggaggtcggtggcctggacgagctggaaaaggagctcgcgcgaatcggccggaccatctga

SEQ ID NO: 10934 - DNA, 297 bp, Zea mays
  Peptide Sequence Number=SeqID_54309
atgttcgtgggggtggccccctgcacctccctcttccgccatttcttcgtgttggtgaagtctgggaaggctaaggaccacctcggcgcctactacttccagacaagcgacttcctgaagcgccggatcgtgcagctgcagaggagggcgcgcctgtgttgctggttcaccgacccgaacgacatcggacggatccagcgcaggccgggtaccgacctatcctgggaggagctggaactcctagtgaaggcgattacttgtgagtccttcgtccctatgtccctaatcctcccctag

SEQ ID NO: 10935 - DNA, 225 bp, Zea mays
  Peptide Sequence Number=SeqID_54310
atgaggttgaactgtgtctttgaattgaataaattgccttatggtccctacccggagggggactccactgatgccagcgatgatcgaggcaagcaagtgaaacaccggaccgacgagggcacctcaaaggagaaggctccggttgcagccacccgaaagaggaaattaggtatgggggatgatgagactgagccaagggcctctgggttttttgttagtagttaa

SEQ ID NO: 10936 - DNA, 330 bp, Zea mays
  Peptide Sequence Number=SeqID_54311
atggccatgggcaagcacatcggcggggctgaccatccaggatacgggagctttccggggcttccgggctacgcaggggcgctggctactgggcacaggggcttgctcggcagccaggaacggaaggccaggggctgctcggctgccaggagcggagggagggacgcacgagagggagaaggcgagggctcatctgtaaccgctcaagggacgtctggatctagaaaagctctcggcccgtcggaccgcggcatcttccaggagattcttgagctctccctggatacgccgcccctcggtggtggatggttccggcatcgctcggagtag

SEQ ID NO: 10937 - DNA, 138 bp, Zea mays
  Peptide Sequence Number=SeqID_54312
atggggtccaggcacagtgcttgctctgccgaggctgggtgccgaggttgcctttggtgcaatctatgcttaggtaaagaagaaggtgtcgaggcggatctccaggagttccaggacttcgatgagttcgaggattag

SEQ ID NO: 10938 - DNA, 708 bp, Zea mays
  Peptide Sequence Number=SeqID_54313
atggtcgccttccaagggggtcaccctccttttaaaggcgactctccctacttgcgtccccagccgtcgcgggctgagtcttctccaacacgctccaaggtcctcccctgcggcgcgggggctgggtcccacacgtcatgcaagccagctcagagcagaagaagccaaaccgccgtgcgcggtgcgcacaaccgcccagcggttacaagtgactctccacttttgcccagaccaacgggcgaaagggctgggcagccatgcaggcggcatgcaaccgcgccaagtgggcgcgcttctccgactcccaacacgcccagcatggaggcccaggcccacgcgtcatgcaacctgcgcgccgaatgcttcgtgcatgcaactgcaccgccacttgcgccaccaccgcgcctcctcgactacggaaccaataccgcgactcgaggcgtcccatcacacgacccagcagcgccagcctggcgcgacggcggcgcccctggcaggagaagcgggcgatgcttcgccttcgccataatgaccgcgtcagtaaagggatcgggaaagggggaaaccccgaaaaggatccttccccgtgaaggaaccaggctccgagcctccctattgatcagaggttcgaaggctggcccctcggaagggttcgacagccgcctcagatcacgtgggccctacacccactactggtcagaggtttga

SEQ ID NO: 10939 - DNA, 174 bp, Zea mays
  Peptide Sequence Number=SeqID_54314
atggcgcgcatgctgaggtggtcgccactgctggggaggcggcccggcgcagaggtggtcgccgccgctgaggtggtcgctgccgtcgatgcagaggtggtcgcctccgctggcgagccgctcggagctagctacccacgcggccctactggtgtggaggtagttcatacctga

SEQ ID NO: 10940 - DNA, 396 bp, Zea mays
  Peptide Sequence Number=SeqID_54315
atgctgccactaccaccatttcctctgttcccagtgttcatttttttctttgaatcctttgtttcaggttctaagggaaaggttttcacattgcaactcaaacatggacgcgggccaggggcgccgcgcgatcgggatcgcctcagcaagaagcagcagaagaaggacgccaggaaggcggagaaggctgggacggtggcgcagccccagcagcagcatctgttcaacaccgaagacctattcgcggccaactacggtgatgtcgccgtcgaggtgattaagttaaaggccatctccgaccgcttgtggtcccaaatcggcgacctcgacgagtccgctgcgggctgcaaggtgcttatccgtggagcctctattcaaccttgcatcccatgctaa

SEQ ID NO: 10941 - DNA, 423 bp, Zea mays
  Peptide Sequence Number=SeqID_54316
atgggagttggtacctttcagccatcgttcggcttcaaggattttcatcacacagcccggttgcaccccccccccccccgccggcggtcacccaagacagtgaccaccagcccctgggtggggagaagcaagccgggctgcgatcttggtcccaccctcagcttcaaggatgttcatcatcctcgctggggcggaggccgggctgagccggagctctacctcccgcacgggttcgtgggtcaccctctcctgcggcgttcgagggagagggcgctcgccggccctgcgggcgggtcgacggcgggcgtcgtcggccccagcgtgtcgagctcgtcggcttggctcccggtgccccctcctgccggaaggcggctgccgcgccgtgtgcacgggaggaccgcccaagatgtcgtgcgctgctag

SEQ ID NO: 10942 - DNA, 885 bp, Zea mays
  Peptide Sequence Number=SeqID_54317
atggctcgtcttagacacactgcacgtaagtcggtgattcctttcctgccgtctcgacttgcggagcgtcctctgcaccgcaccgtgtccggacagtcgagtcacctggagaggctgcaccactgcctgcgtgaggagcaggaacgccggcgccagcacggagagcagcagggctcttcctcctcaccccagcaggaggtggagaccgtgaggccccgttcctctgttgcccagctggaggcgccccttgtaccgccgcgggacgccccggctgttggaggagctactggaggagatcccgacgacgacgactcagaccacaacacggagtcttctgagccgcaggaggcggaaggatgggtcgcccgacccatcacccgtgacgccgctcgcggttgtcacttccacgacgcactcgacaccttgctgcgccaggctttcgaccggcacacctggtcgatcgagtatcgttgtgtagtctaccagcacagtcgcgggaggatgcagcacggcgtgcactctccccagtactgttctttgttcggtggcgtggccgacggtcttaaccttcggtactacccccgccgccctactggcagcacggagagtgtggttgtctcacctgttggtgaggctaaccctaggttgagcagcacagtcaacctagtcgcggtgcttaacactgagctggatcactctctggatgagctaagcagagctcgaacggagattgcggagttgcgtgctgagttggcagagcgccaccaccaggagggtggttctcccgcacctgttgggactcagcacccataccgctcaccgccacgtggtcaccacacttatggttcccctgtctgtaagaccaggatagatctggatccttag

SEQ ID NO: 10943 - DNA, 285 bp, Zea mays
  Peptide Sequence Number=SeqID_54318
atggtgcgtgcggaagcacgtcggaacaaaaagagagttatacaggttcaggccgctgaaatacatgctcctgctcattcggagttcggtcgcctttcctccgagtatctagctcttcaagtacatgcgaattgtgagcgcgaagcatcagcgctccttctgcgtcagctgcgcacagatagtgttcttgtgccatactttctggaatcatttccttgttctgttgccacccttattggtcggattcgttcagcctggacgcggcccaacgacacaccttgctag

SEQ ID NO: 10944 - DNA, 1080 bp, Zea mays
  Peptide Sequence Number=SeqID_54319
atgattgccacccatctctccccagcccccaagcagtaccgcttcccatccctgctccactccacctctcacaatcaccaccttcccgtgcacctctcgctcccccgccgccaccgcaacttcgctaagcccaccgcggccgcgcaagacctcctcgccagcgtcgagtccgtggcctccgcggcctccgtcctggccgccatcgtgctcgtccatgagtctgggcacttcctggccgcggcgtcccggggcatccacgtctcccagttctccatcggcttcggcccgacgctcgcccgcttccgcctcagccccgtggagtacgcgcttcgcgccatcccgctgggcggctacgtaggcttccctgacgacgactcggagtccgggttcgcgcccaacgacctcaacctcctccacaatcgccccatcccagaccgcctgctcgtcgtctccgccggcgtcgccgccaacctcgccttcgccttcctcatcgtctacgcgcagttgcgctcaccatcggcgtccccgtgtaggcgcagctccctggggttctcgtgcccgagtttcgcccgggattcgccatggatgccatgcaggcggctgagagggcaccaaccgaggcaaggccaacaagcccagcccgatcccgcggctgtggccacgccagacctcctcgccagcgtcgagtccgtggcctctgcggcctcctccgggcacttcctggccgcggcgtcccagggcatccacgtctcccagttctccatcggcttcggccccacgctcgttcgcttctgcctcggccccgtggagtacgcgctccgagccatcccgctggacggctacgtaggcttccccgacgacgacccggagtccgggttcgcgcccaacgaccccgacctcctctgcaaccgccccgtcccggaccacctgctcgtcgtctccgccggcgttgccgccaacctcgccttcgccttcctcgtcgtctacgagcaggcgctcaccatcgtcctgcggcggtggcttggccatggatgcggagcacacggaggcaggcgggcgagtgatgaggatgtgatgtag

SEQ ID NO: 10945 - DNA, 2007 bp, Zea mays
  Peptide Sequence Number=SeqID_54320
atggacaaggatcgccagggagctgcacaaaagcggcaggcggccatccggcttgttgaagctaggccgaagaggcagcggttgggtgcgaaggctgcggcccccagcggaggcaagccgccgctgccggcgaagtcgggcgcccctgcatctagcaaggtgccggaggcaacggcaggcgccgggggctccaaatcggcaagggtggtgccgcctgccggcggagtggcggaggtcgcgaaggcggcccaagcgttgccgttgtcaggcaaacgtgtcgccgacttcgccaccaacattagcgtggacgactatcttggtgggtcggacgaaggccaacttgttatggttgcgcctgccgcggcgacagcggttgctgccacagcgccgaaggcgaagggcggggctcttagcgccggaggcgaggtgtcggccctcgcggttgtcatggatgaggcgggcgctgcgacccgccggctcaaggaggtgacagaggcgctaagtcaggtggctgacttcgccagccgcactgcgtcgggggctctcacggcagctgtggctgccgaagtcgagagacttcggacacaacatgctgacgccgtccgtgagaagtcggccgccgacagcaagtgtcgcaagctggcggacaaggtggccacgctggagggagagaaggctgacctccggcgccagctggcgggggagaggagggagaccaacgaggctcttgttaaggcgcaggctgcgcaggcgaaggctaacctggcacgagcggagggcaatcttgccagggagcgcgccgagcagctgcaggagcggctcaccgccctggagagccgcgtggagagggccgaggccatgtcgcgcgcggaggcggagcggatgctccagctgcttgtggacacataccgtgggctgggcgcggggaccggtgatttcgaagtgccggaccgggagtccagacttcgctgcctggagtgggtgcaggaggagttgcaggctctccccactgtcgtggaggggtttatggcgtatgcctccctggtcacctgcgagggggcgatgaatgcgctctcccgggaagggtgccggcacttcgaggtcttcgaccaagtcgaagaagattttgagcgagatatctttaaggttgaggaccccgtagtgaaggaatccgccggagctatcttcgaccggctatggggcgaacacggtcgcgaggtggcggcgcgtggcgagagggtcgacgacttcggggcgctgaacagcatgctatctgacccggagccagccccggcggaggccgtgcctgggcccgtcctggggccgaccccggagactgcgggagacgcgccgggtgcatccgtagccgctgcggccggcgaaggcctgcccccagaggtcgccgaagtcgcacctgatgcctccgcggcggctgcgccgagcgccgtagatcccgcagcggtggtggcggagataacagcagaagcaacggtggagccaacggcggaggctcccgcagcgtcagggccgtcgcaggttcaagattttgggcctgcgcacacaaccgctactactaaaattttggcggcttcgaccgcggaagatggtaatgaatgtggtgggtctgcatctgagtttttggattgtgctgactctgggagctcggttgagtggactgaggagtcgtcggaggaggacttggactactttgtggccttggatgtggctgcggcggaggcttcgccgcacgtcgcggacgcaggagatgtgccaggtcctagcaccgggcgacgacgacgaagggcggttgcgaagcgtagagttagtgggacggagggggctcggcttcgtgtgagtgggactggccggcaggaactgttgtctttgccggccgccgtgaatacgggtgaaggggaactgcgaagtctttttgcgggtgaggagcttaggataatgttatttaattatagggagatgggaattattcctaaggttgagccgatgtag

SEQ ID NO: 10946 - DNA, 159 bp, Zea mays
  Peptide Sequence Number=SeqID_54321
atgacgaccgacaggccgcttgagctactccacatggatctattcggcccgatagcttacataagcatcggcgagagaaaaatcacaaacccaagagaccttaaagggattcttgagatgggctcaaaacgagttcggattaaggaccaaaaagattag

SEQ ID NO: 10947 - DNA, 300 bp, Zea mays
  Peptide Sequence Number=SeqID_54322
atggcggcaaatgctattgtggtcaatatcactcttgatggtcaaaattatccggagtgggctttctgtgttgagactgcactctggagacatggattactcttccatttgactgatgcggcaactgttcaagaagacatgagagttattgggtacctgggaacagggtacccaaagaaggccccaagacctacaaaaaacggcccgcctgccaagtatgacccatacactggaggggttgggcaatatgtcgtactaggcatgcgtctacacttgatgaaatatgacactaggagatga

SEQ ID NO: 10948 - DNA, 236 bp, Zea mays
  Peptide Sequence Number=SeqID_54323
gtggttatgagattgttgattctggttatgactatggtgctggtggtgacgaggatgatggttttggttatgcctatggtaatggttgtccgcgttgcaaccactgctcaggtgaagatgaagtcgtggaggaggacttccaggagttccaagagtactatgtcaaagaagatgaggtatgtagcgaggaggtcactagggataaggagtatctcgaggagcagctctacaagtga

SEQ ID NO: 10949 - DNA, 252 bp, Zea mays
  Peptide Sequence Number=SeqID_54324
atgggccggatcgtacgtgggcctccgaactggacgaggccgcacggtgggaggacctcgtcgcaggccttcgtctggcgtcataccgagcgaagggtgtccctgcccgttttgtcttcgtcggaccggcggcaccggcgaggacttcgagcggagggtggcggctatgccttcgccccaacatcgagcgagcagaagaaggacatgcctacccagtgcaacatcctgtttacttcatcagtgaagttctag

SEQ ID NO: 10950 - DNA, 760 bp, Zea mays
  Peptide Sequence Number=SeqID_54325
atgaacgaaaatggagatttgcaggatagaattgggattcagatgggtcaagttaagatggtagaaatcaaggaggccgcagaaaaagggagaaatgggaagaccgaggtcgcggagaaggaaaggagcataaatcacggactcatgggtatcctcagttgggacagtaaccccatggcaaatccgccaagaacagagtaccctcggagggagaaccccgatggacacgaggtggagaagttcgggctcagagataacggacatgtgacaggattcgggagcaagaaagcaagaactagggcacagaaagcagaggcggctaaaagcgcagcacttatgggatattcccgagccagataccgtttcaaaaagcgccagggcgactcggctataattcaccggactgtccggtgtacaccggacagtgtccggtgcgccaagggaggtcagcctcaggaactcgccagcttcgggaaaagccaacggctcgtccactataattcaccggactgtccggtgtgcaccggactgtccggtgcgcctccgaagcaacggtcatctccgcgccaacggctctctgccgcgcatttaatgcgccctctgcgcgcgcagaagtcagaatcgcccatgctggcacaccggacatcaaacagtacctgtccggtgtgcaccggacacccaggcgggcccacaagtcagaagctccaacggtcagaatccaacggcagtgatgacgtggcagggggcaccggactgtccg

SEQ ID NO: 10951 - DNA, 849 bp, Zea mays
  Peptide Sequence Number=SeqID_54326
atgcctcgctcctcttgcattcatcacgcccttccgccttccaggcctccagatggggtgcgccggtgttctctggagggattcgcatcagggccgccccctccggcgatctcactgccggagagctcacgctcgtggtggtgctgccgatcgtgtcttcttcttgctgctgttagaggagcgcaaccccatgggggttggcgctcttccgccatcgctcggcttcaaggattttcatcatgcagcccggctgcaatctcccgccagtggtcatctaaagggatgaccaccagccttgtggtggagagaagcgagccgggctgcggcctccccctgccctcagcttcaagaatgttcatcatccatgctggggaggagggcgagccgagttggggtctcgccttttgcatgggctggcggctcgcttcttcctccagcattcgggggagaagggcgttcaccagccttgcgaaggaggcaaacttcgggtacgcgggaccggccgactgcaggcgccgccggccgccgcgtgcccggtttctcggcttggatggcttcggcgccgcctccgacgctgcctcctgccgtttggttggggcgtggctgtccatccaccgcacgggcgacggtcacgccgtgcgcagtgaggacgggagcgaggacctcttcacgcgtactgaggcaaccgccgctggtgaggctgcccgttgcagaggtggttgccttcgctggcgagaccatcagtgccacctaccgccgagcctccaactctttggctttaatggcctcgttgtcgccccccgtaggaagacgggggcgaggaccctctcgcaatggcgcacatgctga

SEQ ID NO: 10952 - DNA, 570 bp, Zea mays
  Peptide Sequence Number=SeqID_54327
atggccggcgattccaatccgcacaatccgttgattattccccaattcggtatagccacactacgcggagagaacgagggatccaagggtcagctcattacattggattctgcggggaaggaacacggaggttgcgaggacctggagtcttcccgtgatccgcggcacaagccttcccccggcggccgcgtgatttcagcggattcagttatctgcccaggcaatggcgcaaggtggatgccggacctgagcagcggggcccgcaagtctgtggcacggggcgcgtgttctgttccgaggtggacggacgagctgacaatgggccccactaatcagtgtcgtgagcatcaccagagagtgaggccggcttgtggccccgccgaatcaaacgaagacaacgagcggtgggaggatgatggcaaggaggatctccaggaaggtgcagcagcgaccatcgtcatcaggatctccaggaaagtgcagcagcggttgtccaccatcgggatccttgtggtcggggccctgccatggggatcagaccgcatgcgggtgcacagatcagagggctag

SEQ ID NO: 10953 - DNA, 1299 bp, Zea mays
  Peptide Sequence Number=SeqID_54328
atgtaccgtgaggagttgtggcagaagagaggtcgtcctcgggagttatatccggacgtatctagtaaggatgctcctattcctcctgaattccccgtgcctaactgtgactgtggcagactggcttgggggcatcagaggtgtttctttttccagtggatcgacggtcctgataaatttgaccctcgatatcttcttttcgtaaattggttgagtggaaggaccagtcatgagcgttttaagcgttgggtacctcctcccccgaatcctccaccaatgacggatgcagagaaggaggtagcaacagaaagacggatggactcaccgcctcgatgtgattgtggagaccgtgctgtcatcgacgaagactatgagaagcagttctgttgttcgaacattgattatccatacgggtggcgtaagtgtcgtttcagagagtggttgtatggtcctttgtcccattggccagagccagaggtaaaggaaaagagatacaatcagtggcccgaagaagaggtcaaatttgatccagtactctgcaaatgtggtattgaagctaagtatggattagttccttccgagcttggtgttggatatttttgtggacatatggtcgattacgatgaggagacgaggaaatgcagttgggagagttacgacgacaaaggagaggtgatgcacacaatagagtccaagagaataatgggacagaagatgcgttgtggatctcggctcgttgattcgtacattaacgatcgcatacgcgacatgcgtagggaagcaaaatctgccttttatgatggcccgaagcgtgtagagtataggaggttgaaggcagcagttgagaagagagcacaggatgcaagggaatgggaagcggctcaagccgagaaacagatgttggataatcttgctgatcgcctcaagggaaagattggaagcggcgtaaactatttggctgatgaggcgcatgcgagatatgaggacgacacatcaaggttgagtgagctcatcgcactagctgaggcaggattacatgctcaagaggaagaggatgagtttatgtctcaggccgccgaagaggtagaggcagcttattacaagaagaagtctaatgaggctgaggctgaggatgagctattctcccaagctgcagatgaagcagaagctaattattacaagagaactggtgacaagtgtgatgcaggacaatgcagcaagtggaatgaggttgtcgttgaggattgcgcgacggatgactccgaagatgagttactcatagattgtgattcagactga

SEQ ID NO: 10954 - DNA, 540 bp, Zea mays
  Peptide Sequence Number=SeqID_54329
atgaggccgatctttgtggggaacctggactatgacacccgccactcggagctcgaccgcctcttctaccgctacggtagggtcgagcgcatcgacatgaagtcagtcatcacgacgttctccggggcagtggcaagctctattggtaggaggcccatgctgattgcctgggatgtccttcactttgttactgggttggttacgtctgcaaaatcagctcaaacgacaatcatccatattgtcgggtattctggtagtgacctgagagccttgtgcgaagaagctgcaatgatgccaacaagagagctcgatccacataatattcttaccgtcaaagcaaatcaggttagacctcagctggccgagacggaggtagcgcacataggtcaagttgctctggtgacacaacctaaatggcttgaaacatctatggaaccgataaaatcaatcagtaggatgatcatgaactacaggaacagtggcaagttcagacacaacgcattgcagtgcgttctctgtggtctggaattggaaatgtga

SEQ ID NO: 10955 - DNA, 630 bp, Zea mays
  Peptide Sequence Number=SeqID_54330
atgcgcctccgcagccgggcaatctttcccctcgtccgcaccaccgccatcaccacgtcggccgtgtcttcgccgccggcggtgctgagcgtaggccacgcgctgcgcgagcgccggcgcttcacggaagacgatgtggcggcgtacgcggcggtcagcggcgaccgcaacccggtgcacctcgacgacgccgttgcccgcgagctgagcgggttccagcgaggccgcgtggtgcacggcatgctcgtggcatctctcttcccttccgtcatcgccgcaagcttccctggcgcggtgtacgcgagtcagacgctcaagtttgccgcgccggtgtatgtcggggatgaggtggttgctcgagtcaaggcactcaacatcaggatgataggtgatttcacaaactccctgtatgaaccatttgcatctcgccaaaatggtgttggcaactggaataatgctattgttgaagtttggaaaactggtagcgtaaatactctagttgacatttatcagcatagcaaatttcaaaggaataaggatcacaatgctttagttatcattgacttgcttcttggcattctctggtactggcttaccatttcgtttccttttcgtgagatcaaagaatag

SEQ ID NO: 10956 - DNA, 303 bp, Zea mays
  Peptide Sequence Number=SeqID_54331
atggccacgtttgtggcactggcgaatggaccccaccggacagaaactcctcttccctttccccacgtctacgccgccagagacttcgtcttcctcgggcaggcgttcttccgccgcggtgtcattcccagtggcagcggcgtacaccggctcagccattgccgcgcgtcgtccgagcttcctcgccgacgagcagccgtaggggctgacgacctgcacgcccagcctgagacttcggcgcgggcggggttggccgacaatggcactgccgccctgggcgctgctgttactcttcttgcccag

SEQ ID NO: 10957 - DNA, 48 bp, Zea mays
  Peptide Sequence Number=SeqID_54332
atgagaatttttggagaagtcgatttactagatgcagtgtttatctag

SEQ ID NO: 10958 - DNA, 309 bp, Zea mays
  Peptide Sequence Number=SeqID_54333
atggccatcattttccagcacaagatcgctctctgccctggatccgtgttctgcttcggaaccatcttgtccgtggcagacgaagaagggattctgcatcgtatagtggatccactggagaagaagtcttccttgaaaatatccaaaaaaagtcggaacgaagcaggaaatagcgcaacttccagcgctccaggcaaagactacctcctgcaagccaggagcagagaattcgtttacctagagaaccccgttgtccacctcatccacgaaaagatggacacggattacaaggaaaagagaagcaaatga

SEQ ID NO: 10959 - DNA, 1197 bp, Zea mays
  Peptide Sequence Number=SeqID_54334
atggtgaagacgacgacgacgaccaataaggaggagctggagagcccgtcctacaggttagcagcgttcaagagcctcttctcgtgcaggaacagccacgcgcggccgcgggcgccggacaccggcaccggcagcaggagcaagaggctgggctgctccgcgccgtccatctgcaagctcaaggacgacagcgtgcccgtgccgcccaaggaaaccacgggcacggcgtcggcaggcgagccctgcaagcgccgcgcgtccgtgagcgggagcagcgatcggtgcgtgaagaagccccaatgtggcgctggcagcaacaagcagctgcagcgtggcgggtcgtcgtcgtcgtcgggcgggtcgtcgttcagggccggcatgcagctgaggcggctttcggggtgctacgagtgccacatggtggtggcgggcagcgcctccatgagggccaccaccatctgcccctgcccggactgcggcgaggtgttcgtcaggcaggagagcctccagctccaccagtccatcaggcacgcagtgtccgagcttggcactgatgacacgagccgcaacatcatcgagatcatcttccagtccagctggctcaagaagcagagccccgtgtgcaaggtcgaccgcatcctcaaggtgaacaacacgcccagaacgctggcccgcttcgaggagtaccgtgacgctgtcaaggccagggcgggcgccgagcagctggcggtagcggcggccaacagcaacaggcacccgcgctgcaccgccgacggcaacgagctgctccggttccactgcgccaccctggcctgctcgctcggcctcaacggcgccacgcacctctgcgacgccgcggggacctgcgcagcgtgcggcatcatccgcgacggcttcagcagcggcggggtgctgaccatggccacgagcggccgcgcgcacgacgctgcggaggctggcgccggactggatgaggaaaccactccaagggcgatgctggtgtgccgggtcatcgcgggaagggtgaagcggcccaaagaagcggtaccagaggaggaggccgtcgccgacgccgccgaggagtcagagtacgactcggttgcggggtcggccggggtgtactccaacctggaggagctgctggtgttcaaccccagggccatcctcccatgctttgtcgttgtctacaaggcttag

SEQ ID NO: 10960 - DNA, 87 bp, Zea mays
  Peptide Sequence Number=SeqID_54335
atggagcgggcccacaggcaccctgagacatttcttcagctgagatacatgaaagacatcgtgaacatccacgagatgatccggtaa

SEQ ID NO: 10961 - DNA, 249 bp, Zea mays
  Peptide Sequence Number=SeqID_54336
atgggccgagtcagaagattctccagccaacatattgagtacaacatctatttctgcatcatctggactcaccgacatctcaaaatgaactcacctctcatcattgggaagatcacaaagaggagcaaccagagcctcaatgtcttcaggagagggtcgcactctaagacccagaccactatcaccagcaggagggttggacacgaaatgaaaaaggacctaggaggtggcagattccaagcagagtag

SEQ ID NO: 10962 - DNA, 516 bp, Zea mays
  Peptide Sequence Number=SeqID_54337
atgacgcatatccttgtggtacgggcactaggtgtcgaggatgtcgtccaatgttcgttcgcctccgtggggtgcccctcgggcacaagagacgggtggtccagtggcatggacttcttcacgaggcctcttctcccagcgcttgtcggtttgctagttcgtgtcatgccgtggtgcagatggagcgggcttcgttcccccgatgaggtcctgggcacgctcatcagcgatgatatagagtatggctcggacgaaggccgagtcattagatcctcggtagaagtcctcgatcactactgcttcagcaacctcgggaatacgatttctcatggtctgaaagcttttgaggtacgaccgaagagtctcattgtgacagaacctcccaagtcattaggcccacctacagttgtccttgtccaacggacctcagacaaccctgcaggtgcacctgatcacttgacaagctcagtatctgaattccttaccttcccaagagcgttttacctgtcacgctga

SEQ ID NO: 10963 - DNA, 360 bp, Zea mays
  Peptide Sequence Number=SeqID_54338
atggccggagtcggtcggtccacgcgcgcaggcggggatgctcgtcggcggcgaggagtccgacctggtcacggcgagatagttcaattggatgggtcagagaggtccatggggtgccagagaagatatgagcgcaaggaattgggcggagactcactggatagctcggtccacgcgcggcggcggaagaccgaagtccggatgtgttcaagggaatttggcacaactttgatatttggatctcctggctttgagtttcgaaaaacagagaacgcagatgatctttgggaagaggtttggcatttgagagaaaccctaggtgacactggggtgtcacactacgctccagaggtaccctag

SEQ ID NO: 10964 - DNA, 204 bp, Zea mays
  Peptide Sequence Number=SeqID_54339
atgggcgcgattaaggtcaaggctcagtccactcaagggacacgatctcgcctcgcccgagcccagcctcgggcaaaggcagccgaccccggaggatccacgtctcgcccgagggtcccctcaagcaacggacgcaccttcgactcgcccgaggcccagctcggacaggcttcgcggagaagcaaccttggccaagatcgccac

SEQ ID NO: 10965 - DNA, 669 bp, Zea mays
  Peptide Sequence Number=SeqID_54340
atgggcgcgattaaggtcaaggctcagtccactcaagggacacgatctcgcctcgcccgagcccagcctcgggcaaaggcagccgaccccggaggatccacgtctcgcccgagggtcccctcaagcaacggacgcaccttcgactcgcccgaggcccagctcggacaggcttcgcggagaagcaaccttggccagatcgccactcacttcgccgctccactgactgacctgacgggaaaacagcgcgcctgccccgcttcgactgctgtgccactcgacagagtgaggctgacagcagctaagtccaacctcgggcgccataggaagctccgcctcgtccgaccccagggctcggactcagcctcgacctcggaagacgaactccgactcgcccgaccccagggctcggactcagcctcgacctcggaagacgaactctgcctcgcccgaccccaagtctcggactcagactcgacctcggaagacggactccgcctcgcccgaccccagggctcggactcagcctcgacctcggacgacagtctctgcctcgcccgacccccgggcccggactcaacctccacctcgaaggagcctccgcctcgcccgaccttgggctcggaccgaccacgtcacaggggggggcatcattaccctacccctagctag

SEQ ID NO: 10966 - DNA, 57 bp, Zea mays
  Peptide Sequence Number=SeqID_54341
atgggggtgatcgctggggagatggcatggctttatagccgcaggattcaaatttaa

SEQ ID NO: 10967 - DNA, 87 bp, Zea mays
  Peptide Sequence Number=SeqID_54342
atggcgggcggaattgagctcgccggagctaagggaaagtggctggccggtgagggatgtgttcaagggaatttggcacaactttga

SEQ ID NO: 10968 - DNA, 261 bp, Zea mays
  Peptide Sequence Number=SeqID_54343
atgggccctgactgtgttgagacagtcgcggagcttagtgttgaggcccctcctgaacctgtgtctcttcttttcatcaatgtcagcatggtagcctgcatactgacacaggtcattgaaagcttgggcgtactgcaacacggggtacctagttcatgtgagttccaagggaagatcgggtctggtttgggagatatggtggcgccaagtcagggtatctcactgttcaacctgagacaaaacttgtgtcaacccatgtaa

SEQ ID NO: 10969 - DNA, 336 bp, Zea mays
  Peptide Sequence Number=SeqID_54344
atggctgccccgcgaaccactcgtcctgtcgcattaactctgcggcaggacaggcggcacctttggcaggcgaagcaggcgacgcttcacctccgccataataaccgcgtcaaaaaaggctggcccctcggaagggttcgacagccgcctcagagcactcgggccccgagccctcctactgatcagaggttcgaaggctggcccctcggaagggttcgacagccgcctcagagcactcgggctccacgcccaccactagtcagaggttcaaaggctggcccctcggatgggttcgacagccgcctcaggccactcgggctccgcgcccactactga

SEQ ID NO: 10970 - DNA, 570 bp, Zea mays
  Peptide Sequence Number=SeqID_54345
atggccggagtcggtcggtccacgcgcgcaggcggggatgctcgtcggcggcgaggagtccggcctggtcacggcgagatagttcaattggatgggtcagagaggtccatggggtgccagagaagatatgagcgcaaggaattgggcggagactcactggatagctcggtccacgcgcggcggcggaagaccgaagtccggatgtgttcaagggaatttggcacaactttgatatttggatctcctggctttgagtttcgaaaaacagagaacgcagatgatctttgggaagaggtttggcatttgagagaaaccctaggtgacactagggtgtcacactacgctccagaggtgacgcaggggcgtatgaaaaaagctgagtctgtccttgaccgtcctctcgctctgtgcggaggctcgggggctgctctcgcaaacccggctctggccaaaccgttgacagcatcaacataccagcccgagaacttggaacctgactatgcacccgggctacgaccagttcgcatgagggaacaaccagatcagccgaagcatcacgaaaggcattaa

SEQ ID NO: 10971 - DNA, 501 bp, Zea mays
  Peptide Sequence Number=SeqID_54346
atgggcgcgattaaggtcaaggctcagtccactcaagggacacgatctcgcctcgcccgagcccagcctcgggcaaaggcagccgaccccggaggatccacgtctcgcccgagggtcccctcaagcaacggacgcaccttcgactcgcccgaggcccagctcggacaggcttcacggagaagcaaccttggccggatcgccaccctcaggcgccataggaagctccgcctcgcccgaccccagggctcagactcagcctcgacctcggaagacggactccgcctcgcccgaccccagggctcggactcagccttgacctcggaagatggactccgcctcgcccgacccccgggcccggactcagcctcgacctcggaggagcctccgcctcgcccgacctcaggctcggaccgaccacgtcatagggggtccatcattaccctacccctagctagctcaggctacggggaacaagaccgacgtcccatctggctcgccctg

SEQ ID NO: 10972 - DNA, 231 bp, Zea mays
  Peptide Sequence Number=SeqID_54347
atgggtcagagcgaggccgagcgcgaaggggggagaaaggtggccggagacaggcgtgagagaggtggaaatcccgcggccttcgtgttcgtcccacgcccaggtcgggccggcgtgccgtgcctgggccgcgtctgcggcacgtgggccgattgggcacggcccgattatgtgtcgggcctgacgggcccgtgccgggtcgtgctgggccgcccgtttgggcaactctag

SEQ ID NO: 10973 - DNA, 564 bp, Zea mays
  Peptide Sequence Number=SeqID_54348
atggacaaagtgcaaatcaagagtaaaggagaaatcgagtcagagaaaagttggctgtgtacagccaaaaggctgttcggtcgggagcaccgaactgtccggtggcgcaccagacagtgtccggtgcgccagactgactcgggcgaactggccgctctcgggaatttaccggcgacgtacgactataattcaccggactgtccggtgtcaaaggttcatctatatactaaatcgactgtccggaataccgtagattattccggacaggagaagctttttggaaaaacaggccaagcgcggactgtctgggcccctacggcggacagtccgcgacaccaggatacccttcggacagaaccaatgcaaaaatacatgtttccactacggaccgtccggaggaaaagcaaggaccgtccgagccttcgcgcggaccgtccggcctcaagcgcggaccgtccgccgttattgctgaccgttgcgttttcagccgttgatctacaggggcggaccgtccggaccaggcgggcggaccgtccgcgctcagcagaatggagcaacggctag

SEQ ID NO: 10974 - DNA, 327 bp, Zea mays
  Peptide Sequence Number=SeqID_54349
atggcggccgacagcccgcccaccggcggcgaaatcgacgacgtctcccccgtgtggtggaagaacaacattcaagctcgccccgtcccctcccccgccgacggaggaggaggcggggcaactgaaagggaaatgtgcccttgggccatttctaaagactgtccggtgagccaacggtcggccgagccaacggtcggccgcgcgatctgcgcgggacacgtggccgagccaacggctagaagggggcaccggactgtccggtgtgcaccggacatgtccggtgcgccaacggctccaagtctgccaacggtcggcttcaccatttaa

SEQ ID NO: 10975 - DNA, 450 bp, Zea mays
  Peptide Sequence Number=SeqID_54350
atgggcaagaacaacaagcgcaagcgtgagccaactcctccatcgaaggattttggtgactcggagtactcagaggaggagttctcctctgagtctgaggggtctccggctcccatccccctgcgtgagtcgtctgacgactcccaggggctcgcgacggaggtctggacgtacatctgggccgtcgagcgctccgggctcgagggctcggatgagtcggagtactcctcggatgaggaggactcggacggtggcggcgaggacgaggacggcgacgacgacgacgacgacgacgaagacggtggcggcggtgacggtgacggcagcggcaggggcggcaacaaggacggtgacggcggcagcagcaggggcggcagcggcggtggcggcggcagcaggggcagcaacaggggcggcagcggcggcggcaacaacagggccagtggctag

SEQ ID NO: 10976 - DNA, 321 bp, Zea mays
  Peptide Sequence Number=SeqID_54351
atggcagcggtcgagaggacgaagaagaagaaggtaatcatctacaccgaccccggaatgcacagtccactaattgatctattgtttgaccactacctcgacgacatgaacatcggtgctgcgcagaatgccaccattcgcgttgtgctcgtcgtcttccagtggtggggattgaacgttgctatcatcatcaacaagtggaacttccaggtgctccttacaatgccaaccacaccaacagatcggatgaaggaaattgcacaagcttcacaagaatttctttatattgatgctgacgggagggctactgatgttgcttaa

SEQ ID NO: 10977 - DNA, 315 bp, Zea mays
  Peptide Sequence Number=SeqID_54352
atggcgctccgcaagctctatgacgacggcggccccccggctctcttacggaagcaggacaacgtcagcagggactcgatcgctccaacagctgtccctccatcaggctccgccgcacctccgacagccacgacatcacgccagcagggtgcccagatctctccggctgccacattggcatctgagggatcttttgtaccatccacggagaaggcagcttcggcctgggctagggttttgacatggtcgcaacccgccttctccaggatggctgaaattcgtcttgcaccggagaacgctcagacatccccgtga

SEQ ID NO: 10978 - DNA, 1248 bp, Zea mays
  Peptide Sequence Number=SeqID_54353
atgcaggcggcatgcaaccgcaccaagggggtgcaccctttcgacttagacgcgtccagcatggaggcccaggcccacacgtcatgcgggcggaagcagctgtcaagtcgtctgcaggctcacgtcccctcctgggacagcgagagaaccctctcccacggcgtgaagacgacgcgcccgtgttccgttcctcgaacggctcgcgcacgcacagcggctgccccgcgaaacactcgtcctgtcgcattaactctgcggcagggcaggcgacacctttggcaggcgaagcaggcgatgcttcacctccgccatgatgaccgcgtcaaaaaaagggaccgggaaaggggatactccgaaagggatccttctccgcgaaggaagcgggccccgagcccccctactgatctgaggctggccctcgaagggttcgacaaccgcctcagaacacgcagagcgagggatgactctgggtacgtccgatacatggccgaggctcaggctacgctcccgaggctcgggggctgctctcgcaaacccggctccggccaaaccgttgacagcctggtaacccccatcagcacaaagctgcaaaggcctgatgggcacaattcaggtcaaggctccgtccactcaagggacacgatctcgcctcgcccgagcccagcctcggacaaagatagccgacccaggaggattcacgtctcgcccgagggtctcctcaagcaacggacgcaccttcgactcgtccgaggcccaactcgggcaggcttcgcggagaagccaccttggccagatcgtcacgccaaccgaccgtatcgcaggagcattcaatgcaaggatcgcctgacaccttatcctgacgcgcgctcttcagtcgacagagccgaagaagacagtgtcgcctgccctgctccgactgttgtgccacccgccagggtgagactgacagcagtcaagtccagcctcgggcgccataggaagctccgcctcgcccgaccccagggctcggactccgccacgcccgaccccagggctcggactcaacctcgacctcggacgacggtctccgcctcgcccgaccccagggctcggactcaacctcgacctcggaggagcctccgcctcgcccgaccttgggcacagaccgaccacgttacagggggccccatcattaccctacccctagctagctcaggctacggggaacaagaccggcgtcccatctggctcgccccggtaaacaagtaa

SEQ ID NO: 10979 - DNA, 810 bp, Zea mays
  Peptide Sequence Number=SeqID_54354
atgcctgggttcgctggctcaactggctctggcacggcttccggtgccacctcccaccgctgggcggagtgcggctatctgcccgccatacgggcggctgttgcgctgcgcgcaccaggggaccgcccaagacgtcgcgcgctgctagggcggtgttcgtgttcttgggctgtcctgcccttgctccggcacgacgccttcgcgcggaggttggtgctcgcccgtccgggaggacttgagtggggatctgccagcgggcaggcggctgccgtcgtcggtgctgaggtggtggcggctggagaagtccttgtcgccgacgagatcgccgctgccatccgcgctccgggcctcggctctttggctttgatagcttgtcctcgcccctcgagtggggacgtgggcgagggccttatcgcagcagcgtctgccctgaggtcatcgctgctgttgtttggccgcccggagcggaggtcgttgtcgctgctgccggagtgggcggcggcgagccacctgggattttgtcgtcccgcaggccctccaatgtggggggttgagtccctcggctcggtcggccttgccgcccgaggcttctcttgcccggttaaagaaaccctcggccgctctgcgatgagccggagccagaggcagcggtgtcagtatggacagaggcggagtcggctggagaagaaacttcgtcggcccaggagcaggagacttcccaggccgaggaggcatagcagcggcggccggagcctggccgggtcgtccactggcgggaccaaccctggagtcgggctgccgaggccatga

SEQ ID NO: 10980 - DNA, 1335 bp, Zea mays
  Peptide Sequence Number=SeqID_54355
atggctgccccgcctcctcctccgtcggcggggaaggtgacgggacagacccggatgttgctcttccgccacgtggggaagacgtcgtcgattccgccgccaacgggcgggctgacggccgccattgtcgttgtcgcgcggcggaggaaggagtatcatgtcgtagctgccgtcgagggacatgaactcaagactcccgaaacggaataccgtcctgggttggagaggttactggagactacccatctggagcttgacgggaagctgctcgtcaacacgcaacaggcccctacctggcgcgccaactgtcggcgtttcgaccccgaggggtccctggaccgacgagtaaattgtcgttgcgtgtcccagcccagatgggtcggcgcgagacggaacacaagggggaaaacacgtggtcggtccgtgcccaaggtcgggcgaggcggaggctcctccgaggtcgaggttgagtccgagccctggggtcgggcgaggcggagaccgtcgtccgaggtcgaggttgagtccgagccctggggtcgggcgaggcggagaccgtcgtccgaggtcgaggttgagtccgagccctggggtcgggcgaggcggagaccgtcgtccgaggtcgaggttgagtccgagccctggggtcgggcgaggcggagaccgtcttccggtgttgaggttgagtccgagccctggggtcgggcgaggcggagaccgtcttccggtgtcgaggttgagtccgagccctggggtcgggcgaggcagagcttcctatggcgcccgaggctggacttggctgctgtcagtctcaccctggcgggtggcatagcagtcggagcagggacaacgctgttgatcgcaactcgatggtgcgtgcggaagcacgtcggaacaaaagagagttatacagatgctcctgctcattcggagttcggtcgcctttcctccgagtatctagctcttcaagtacatgcgaattgtgcaaaaggttcaacacaaaccaataaaaagagcaagttaggcttcaaagaaaggagcaaaaaggaaaccgaagtgtgccctggtctggcgcaccagactgtccggtgtgccaccggacagtgtccggtgcaccagggtgaatcagctcaaactcctcagcttcggatttcccagacgcagctctgctataattcaccggactgtctggtgtgccatcggactgtccggtgcaccagcggagcaacgactatctgcgcacaacggtcgactctgacggatgaacagtgcagcacaatacctcagcagaagtcagagcagcaggtcagaggggcaccggaatgtccggtgtga

SEQ ID NO: 10981 - DNA, 1077 bp, Zea mays
  Peptide Sequence Number=SeqID_54356
atggctcgaagaagatcccaaaagaacaagaagacacctctaaatgaatacaatgaggtaactcttgagatactacttcacgattgttctaattatgattcatggtctactagggtgataaatgcttttagaaccatagatccacaattagaacaaattttagacaagagtatcattcctcctaactatgatagggaaaatgcttccgaggaaaatctaagatgtatacgcttaaactatctagcttatcacatcttaagtaaatctcttagcaaagaagactatcgtgccttcataataaaatatgacgaacctatttgtgatgtgcatgatatttggactagaattaaaattaaatttgatgagtccaaacatgatggttcattttgtgcttctacttcctttggtatttgtgaaactaaccctttgaaggaagaagaagaaaatgaacgatggagaccaaacgatgaatccacctctccaaaagaagataaggcggtcatgctcaaacttctaaaaagagcaagagagcaaagcgaaactcgtcaaatgctagaagatgttctctccatgaaaatgctacgctttgacgagttgactaaagaacatgaggagctaaagtgctctcatgttgatttggtccaaagcaaatcttcctttgagctagaatttacaggaacaaaagatgatacatatcaaaagctcaaagaagagaatgagaggctaaagatgagcttgacacaacttaaagggaagtgcattgctcaaccttctcaagataaccgtgatcacatggtgaagaagcttgagacgggaacaaccatggcatgcactaaatcccttaaagaaaatttcaaggacttgaggattgtcaagaggaaggaacaaaagaagaaaatcaatacctctgccaaaagcctcaaccatgcctccattcaaggtaacatccaaggcaacccaaaattgcaacttgtgctagaaagaaacagaaataacatcgaattacaaatgtaccttcagcttgacggagatgaaagtacaagcgtgacgcaaaagcgaatgtcaaaatcagcgtga

SEQ ID NO: 10982 - DNA, 447 bp, Zea mays
  Peptide Sequence Number=SeqID_54357
atgggcaagagcaacaaacgcaagcgcgagccgactcctccgtcagaggactttggcaactcggaatactcagaggaggagttctcctctgagtccgaggggtctccggctcccgtctctcccccagcatcgtccgatgactcggacgactctcaagggattgccgcggaggtctggacgtacatccgggccgtcgagcgctccgggctcgagggctcggatgagtcagagtactcctcggatgaggaggactcggacggtggcggcgaggacgaggacgacgacgacgacgacggcggcggcggcgacgacggtgacggtgacggcagcggcaggggcggcaacggcggcagcaggggcggcaacggcggcagcaggagcggcagcagaaggggcagcagcggcggctgcagcagaaggggcagcagcaacaaggccagtggataa

SEQ ID NO: 10983 - DNA, 477 bp, Zea mays
  Peptide Sequence Number=SeqID_54358
atgtggagccccttctgcgtggaagttgcccacaagcgctttgttgcagagttgaaggcaaggaaagagtacgaggacaatgcgaagactagggtgccggaacctgtggaggccaaccttgtgacggccgtgctcgtgcagccgcccacagggtctgctaccccgacggggggacctcgtgtcgcagagccttcgcctggtgacaccgtgggcgaacaagcgaaggtatgttctaccctagtcaattgtgtttcagagattacgcttggggccatggatgttttgatgattaggaaccttggacaggaccagcaaggactttggaaaggcctaggtgttgaggaggagcagcaagggcgccacaacaggaaggagatcaagtccgactcggctgcgactccatctcgggttccaggaccagtctgcactaaaattgacgcccaagatgcatccggactccgattgcaacagacttga

SEQ ID NO: 10984 - DNA, 1203 bp, Zea mays
  Peptide Sequence Number=SeqID_54359
atggccctcatccaaagcctcctgaaccataccacattagaaactgataccgtcctattcaaacttgttaccgctgttccagagcaacaaaagcagcctgtgcaatcttatgatacagatatattttctaggcatgatcaaaagctcttaaaggcttcagcatttttacctactatagaatccccatttgttccaaattcgtttaccgggaagagaaaatcaactgttggtaattctcccgtagtccaacctcatgttggatcacgggctgtccatgagtaccagttccttcctgagcaaccaagtgatacatatgagagggcaagtcctcactactatgacactccagtggaagcttcaaattccaggataccttctctcacatcaggatcacaacttctccatggatctgaggaggctgcgcctagttatgcttttcaaggtcacacatctggttctagcctgttgcctccttccagcaggccccaggtgtttccagtagcaccaacagattatgagatgacccagtttaatagcaaccttagttctgttcctgttgaaggccagtttgatacgtctcaggttgctgcatttgaagacccacctgtatcgtctgaaagaagagcttatcatgatgaagatacttctcgagtggaaagaaaacgaaaacataatgaagaagcaaagattgcaaaagaagttgaagctcacgaaagacgaattaggaaggagcttgagaaacaagattttttgaatagaaagagagaggagcaaaggcacaaggaaatggagagacttgagcgtgagagaagaaaagaagaggagagattactgcgtgagaggcagagagaagaagagaggttccaaagagagcaaagacgtgaaaatgagcgcatggagaagtttttgcagaagcaatctagacgagtttgtttctgggttcctagaatgttaattgaagagaaacaaagacaaaaggagcaactccgaaaagagaaagaggcagcaaggcaaaaggctgccaatgaaagggctgctgcacgtagaattgcacgggactatatggaactggtggaagatgagcgtttggaattaatggaattagctgcacaaaacaaagggttgccctcaatgctgtatcttgacagcgacacattacagcagcttgattcttttcgagaagtaatatttcatttcaaatga

SEQ ID NO: 10985 - DNA, 153 bp, Zea mays
  Peptide Sequence Number=SeqID_54360
atggagattggtggtctacgaggtggaaattggaataaggattatggtcctctggaggacatggttgctggagtgatttggccgtccatcttgccaccgggttggacagtcgagtgggaccctgcctcggctaaggaggagcatgaggagtga

SEQ ID NO: 10986 - DNA, 159 bp, Zea mays
  Peptide Sequence Number=SeqID_54361
atggcgagagtagagtgtgccctccatggcaagaggctggacggtggtgtatctgtgctctcggtgaggaagcaaccagcttttgttgcttctattcaaaggtggtacccaaagaagagaaccaagactagagctgcgggagggaaggccctccgttaa

SEQ ID NO: 10987 - DNA, 585 bp, Zea mays
  Peptide Sequence Number=SeqID_54362
atgccgccgcgcacgaggaggactgcgcgcaaacatactggaccgattggtgtgccatgtcaccagctggccccaagacatgataatagtagtagtggaagcaacgatccgataggggatctcgaagcagaagtgagtcggctccaagcggaactccgccgcaggacggatatatgggtcgcagatggcgaccgaataaatgagttgagaagagacgtccgccatctgcgagatcagctcgcggaccgggatttggcactcgactgggttgtgcaatctcgttcgcttgcctgggccaaggaggaaaccgctcaagctcgagtagcagagctcaacttggccgttgataacctgcagacatattgcaataccttacatgaagaagttcatgtattatattcgcaactgcatcccagtgaacctgcggatcctgtcaagtcggaagccggaccctcgcatgttgcgggagaagcgcttggtggtgagttggacctttttaggccccctccttctatgaggctggtcgatgaatggtctcccacacccgacgacgaggctgccaagagcaaccggaagcaggaatag

SEQ ID NO: 10988 - DNA, 180 bp, Zea mays
  Peptide Sequence Number=SeqID_54363
atggctctctggctgccaacggtcggcttcgccgtagaaggaaagaaatcgggcaccggacactgtccgaagtttgcagatgaagttatgatgctgagctccatggatgctagtctagtgatacccctggtcatcttcttatggatggatgtccatgtttcgctgtactttgatgaataa

SEQ ID NO: 10989 - DNA, 414 bp, Zea mays
  Peptide Sequence Number=SeqID_54364
atggagcaagcagtgccacaattaggaattaaggccctaattcttctgtttggttcttattgccaaaggggagaaattaaggacaaagcaactggatcagctaacacttgtgattttttcaaaattctaagtagtaacatgacaaatgagcaaaggtacatgaagcaaattgagcttggaagaggacatagtgcaaatctatacagaccaagtaagaagggactttatgaagtcaagacaaaaggaacaaaagagaacaagaaagaaaaaggagaaagtgtgctggactacgtagcaccagacagtccggtgcacgatccagccaactgcctgctctcgggaattctagccaacatcggctataattcaccggatcgtccgcgtggagcgccgaacagcccgtgtgccagctag

SEQ ID NO: 10990 - DNA, 390 bp, Zea mays
  Peptide Sequence Number=SeqID_54365
atgtggcacatggaggatggatgtggactcaatgggtggctccgatggagggagaatgcggaattgttcactggagcacctacatcgtgcatcgagggcagcagtgatttccgcctgaaacgccggaaattaagaaaggcaatagaaataaatgaacagaggatgaacatatttttcctagtctccttaagtaatgaggaacttaggaaaaatacagagaaccctagtccaagactaatccaggattgcaacctcgctgacggagagtacgtgctcatccctgagcaaggagctgtccacgaggaagaccaggagccagctcccgagcctgccatcgaggatctccccacagccccagcaattgaaggcaagccccggttatatgcataa

SEQ ID NO: 10991 - DNA, 2385 bp, Zea mays
  Peptide Sequence Number=SeqID_54366
atgagtagcgagcgcgaccttgttgaggagtttgtcgggtatggggtatggcccttggcgcatggctgggcgctgggcgaagtatgccctcgccagatgccctcccttggcgggatgctggtgcggagtcctgccttcgcactggatttgcatggccgagatcccgccgcattcgtgcgtgaagcggaagacggtacggtgaggatcgtggggcgctacgtgccgaagacagagggtctgcagagctgggatatccgtgggtccaatgataggctgaatcgggtcttcgaattgaaccgtttgccgtacggttgttatcccggggaagacgccgccgaccgccgagggaagaaaccgatcggtgggaccgaggaagggacttcgcaggtggctgccccggccactaagaagagaaaattaggtactatagtggggaaaggggtgtctgataattttgctgtggagttgatggggacatgtgcggcccccgggggaaggatgtcttcgcccgagctccgggagtctttggcgcgaatgctagaggatactgggggtcagtggccaaagaatcttccgatcccctgggcagagggcgaagacatgtctacatctcgtatagctcgtggattgaggattttcccttacggatggaatattgctactgttgtgtcggcaaagcgtcgggcggtcatcaggctccccgatcctagacgtgaagcgaagagggcgcgggggagcgtgaaggctgccacccccggcggtagccaaccgacgctggccgcgaaaccggccgcacccggatctagcaatgtgccagagagcacgaaggccgtcgtctccggcggaaccaagtccaccccgggtgaagctgcgaaggtccgggagctgccttcgccggggaaacgcgttgccgacttcgccacgaatattagcgtggacgactatttcgtcgggtcgggtgaggggcaactggttgttgtcctgtctacggtggcaaccacggcgtcaaccgcgatgcttggggcggccgacttcgccgaccgcgtggcgtcgggtgcccttacggcagatgtgtctgccgaagtcgacagacttcgggtgcaacacacgaacgctgtccgggagaagtcggctgcggagagcaagagccgcaggctggcggagaaggtggccgccctagaggccgagaggacggacctctggcgccagctggtggaggaaaggagggaggccaaccaggccatcatcgaggcgcaggctatgcaggcggaggccaaattggcgcgggcggagggaagtctcgccagccaacgcgtcgaggaatgggaggtgcggttcaacgctctgcgcggcctagtggagagggctgaggcctctacgcgctcggaagttgagcggacgcgcacacagctcatggactcgtaccacgagctgggtgcgcggactgctgacttcgaggtgcctgaccgagaggcgggccttcgcttcctcgagtggctgcaagaggaattgctggcactcccgaccatcgtggagggtttcatgtcctttgcctccctcgtcacctgcgaaggggccatgaacgcactgtctcgcgagggctgcagacactacgaggtcttcgaccaaacagacgagagctttgaacgcgagatctttaaggccgaagaccccgttgtgaagcagtcagctggggcactttttgataggatgtgggggcgcatgatggagcgtgccgaggacgtcgaggacttcggaggtctaaacgacgcgccgcccgaggctgcggagggcaaaccggtgctgccctcggatgctggtgaaggcccatcggacgtgctcgtgcctgctgctaccggcgaagaccctgtgtcggcccctgtgccgacggtcgaaggcgctcaggaggtggttcagagttttgggcctgcgcacgcaaccgctactgaaagtgctaattttgtggcggcttcgaccgtggttgcggaaaatgattcgggtgattctgtgtctaagatttttgagtctgatgattctgggagtttggtggtgtggacggaagagtcttcggatgaggatttggattattttgtggcattggatgtggctgcggcggaggcttcgccgcgtgtgatgggtgctgaggttcccggtccgagtgctaggcgtaggcagcgaagggtggtggcgaatcgcagagtgagtgaggtggagggtggttgtcttcgtgtggacagggctggcaagcgggaattgttgtcctcgccagctggggcgagtgtaggtgagggggagttgcgaagtctttttgagggtgaggagctgaggataatgttgtttaactatagggagatgggtatcatcccgaaggttgaaccaatgtaa

SEQ ID NO: 10992 - DNA, 996 bp, Zea mays
  Peptide Sequence Number=SeqID_54367
atggggagtgcccgcgtcgctttcgtcttgctgctgttggaggagcgcaacttcatggaggttggcacctttcagccattgctcggcttcaaggattttcatcaggcagcccggccgcatcccctcaccaatggtcacgcaggaggcttcaaggatcttcatcatccttgctggggcgggaggcgagccgagccggagctctacctcccgtacgggccgacgggccacctcttccttcagcattcaggggagagggcgctcaccggcctagcggagggggcggacttcgacaatgcggggccgatcggccgcaagcgtcgtcagctccagcatgcctggttcgctggctcagctggctctggcgcagcttccgtcggagaaggcttccccaccgacgagaccgtcagcgccacccacggactgacctccggctctttggcttttttagtttgtcctcgcccctcgagtggggacgcgggcgagggccttgtcgcagcaacgtctgccctgaggtcatcgctgctgctgtttagccacccggagcggaggtcgttgtcgctgctgatggagcgggcggcagcgagccaactggagtttgttgtcccgcaggccccccgatgtggaggttgttcatacccgcgggagtggaatcggagttccgtttgtaatggcaccttgagtgtcggtgtctgttcattgtggctgtcggggcctgaacatcaagaaaccctcggccgctctgcgatgagccggagctggaggcagcggcgtcagcgtggacagaggcggagtcggctcgagaagaagcttcgtcggcccaggagcaggcgcggtgctgacatcttccttcaaggtggagatcctccgaccgtgtcgctgtccgaggtcgggtcagattccgccgaaggtggagtcgacaccgagggtgctgctgctccccctattgatgacttggtcgtcggtagcagaattgcttatctgagcgagagttactaa

SEQ ID NO: 10993 - DNA, 210 bp, Zea mays
  Peptide Sequence Number=SeqID_54368
atggtgccgacttctaaggcgtgggacaagattaaaaagaccaatccccaaccgagatgcaggagcgcaaatggagagagccctcttgtaaccacactcgtatacccaccaggacgtagggtgttacgcacttctaagcggcccgaacctgcaaatcttgtccactgtccctcgtgcgatcggcacgaaccattttgctacagtcgttga

SEQ ID NO: 10994 - DNA, 255 bp, Zea mays
  Peptide Sequence Number=SeqID_54369
atggcccccctcgatttggagcatattgagcgtataaataagatctcgcaccaaccacatttgtttttcaagcttcctaagcttcggttagaaagacacatttttgtcatttctgaaggaaaaaatgtctcaagacaagaagtgacagttatgatgcagaaagtggaggcgaagattccgaggatcgaacttggagaccaagtcatgcaattttcggaaaatcgaccatcaagcaaagtcacctcgaaaacatga

SEQ ID NO: 10995 - DNA, 1137 bp, Zea mays
  Peptide Sequence Number=SeqID_54370
atgaggatgatccgcaagattaatctaatgggtgtgcccctgcaggtagaggatattctatttaacattgacaggaaaaagcaaagaaagagagaatgcttcacatgtggggagaagggccacttcagggacaactgtccaactatggccgaacccaaaaaggggaggagtaaaggcaaggcgctaacaagtgtcaaaacttgggatgattcttcaagcgaagatgaacctccaaggatgcgcagccaccgatcctcatcacgttcatcacgatcatcacacaaatgccttatgtcaagaggtaaaatgagcattccatcctctagtgatgaaagtagtagtgatgatgaaggtgagggaaagccctccgtagatgagcttgcggaagccgttaaattttttcaagatgtatgcactaaacaaaaggctcaacttaaaactttgaaaaataagttgattagctctcaaaatgattataaagggaaaatggaaattcttagcatacacaataatgagctaactactaagctagaaaacattggtagcaccccagaagtatctttggttgaaatacctgaaattattaagaaagatgcttcctcttcctggtttgatttaattgatgattctaactcttgcaaccaagttcttgttgagaatattgttgtagaaacatgttcgaatgaggttgcaaaggaaaatgagcaattaaagcaagaagtggatcgccttggaaaagccttgtatgacaagaaaggcaaagccaaacaaatccaacctccacaggataacaccactgcgggagtgaacaagcctgtggagggcgaatctgtgatttgtaggctatgtcacaaagaaggacacaagtctttccaatgcaaagcgaagaccagggataaacaaaaggaaaagctcaagcaaaatccaacaagcaaaatctacaacacctacatcaaaaaggtggataaaaaggttgctacaccatatttgatcaagaaaaagaatggaaaggtgatagcaatcaaggccaacaagcaagccaataatgggaaaggggccaaacgcatctgggtgccaaaggaaataatttcaaccatgaaaagcaccaagaaggtttggatcccaaaagggaagtga

SEQ ID NO: 10996 - DNA, 909 bp, Zea mays
  Peptide Sequence Number=SeqID_54371
atggggagcgcccgtgttgcctttgtcttgttgttggaggagcgcaacctcacggaggttggcacccttcagccatcgctcggcttcaaggattttcatcaggcagcccggctgcattccctcaccaatgcttcaaggatcctcaccatccttgctggggaggagggcggggcgagccggggcgagccggggcttgcctccgcgtgggctggcgacccgcttcttcctctggcattcgggggaggaagacatcctccagctctacggaggaggcgtcctccagccatgcgagggaaggtgaactgccgctgcctggccagggtgcagcattccgtcttccgtccgggcgactgtggccggctgcaccggggggtcgcacaacacgtcatacgccgcgagggcggtactcgtgttctgggatggtcccgttctcattcttgtggcgagaacaggagtgaggacctaccggtgcgctttggggcggccggcgctcgttggtgcggtgttggtgggcaggtggctaccggagaaggtttctccgccgacgagaccgtcggtgccacctacggcccgggcctccggctctttggctttaatggcctgttctcgtcccccgcgaggggacgtgaacgagggcctttcagtagcagcgtttgccctgaggccgtccatgtagatgtcttgtcgcccgagacggaggtcgttgtcgctgctgcagtggtcggcggcgagccacctggactttgttatcccacaggccctctgaaccctcggctgctctgcgatgagccggagccggaggcagcggtgtcagcgtggacagaggcttcgtcggccccggagcacgtggcttcccaggccgaggaggtgcagcagcggcggctggagcttggccaggtcgtccgctag

SEQ ID NO: 10997 - DNA, 1092 bp, Zea mays
  Peptide Sequence Number=SeqID_54372
atgcaggtggcgtgcaaccgcaccacgagggcgcaccccctcggcttcgacgcatccagcatagaggcccagacccacacgtcatgtaaccggcgcgccggttactacgtgcaagcaaccgcaccgccacttgcgccaatgtcgcgcctcctcgactgtggaaccggtgccgcaactcgaggcaaccatgcgcatggcccaacagtgccaatcgagcacatcgatcacgggtcagtcagccgtgggaggagggaccgggaaaggggatattccgaaagggatccttctccgcgaaggaagcgggccccgagccctcctactgatcaggggttcgaaggctggcccctcgaaagggttcgacagccgccccagagcactcgggctccgcgcccactactgatcaggggttcgaaggctggcccctcagaagggttcgacagctgccctagagtacgcagagcgagggatgactctgggtacgtccgatacatggctgaggctcgggttacgctcccgaggaggaggtctctgcctcgcccgacccccagggctcggcccccgcctcagcctcggaaggtggtctccgcctcgcccgaccccaaggctcggcctcaacctcaacctcgggtggaatcgcgtcctcgcccgacctcggtctcggcctcaggaggagtctccgcctcgcccgaccttgggctcggaccgaccgcgccacaggggatacatcattaccctacccctagcgagctcaggctacgggggaacaagaccggcgtcccatccaagcttgccccggtaacaagtaatgatggctccccgcatgcgtccatgacgacggcggttctcagccccctatggaagcaaggagacatcagcaaggtcccagcagccccgacagctgtgcctctacagggctcaagcgctcctccgacggccacgacaccgcgtcgggcgaggcggagacttctcctgaggccgaggctgggcttgggcgaggttgtgactcctcccgaggccgaggctgaggccgaggcctggggtcgggcgaggcggagatcttcttccgaggcggaggcggaggccaaggcctga

SEQ ID NO: 10998 - DNA, 1419 bp, Zea mays
  Peptide Sequence Number=SeqID_54373
atggatccagatgatgatagcgactggctgcataggaatgagggttttcaggcaaacgacattgtcgcaacgacagatcttctaacaccaggcagtgttcatgaatctattggtgtcattggggaaccgggtatacgcgtgagagagtctagtcttaaatgccttaggttgtataatcatacaccaaggcggaaagaggcaaagatagagtatctaagaaaacttagagcactacaggctaacactttgaatcacacatccatcaccatggaggacccaacatatacccctaaggttgtacaccctaaagcagatgcaacaaaacctgctggatcctcagttagtgtcgacaactgggttgtccctaaattcatcaggacacctttcttgccagcttcaacacaaaccgaggatgtcggttcattcgatttgtctactaaagtagtaagacataaacatcatgtgacgcatggggaaagacaagctatcttagcccgtcaaaaccagcaatttgaagcatccattgcaaagaacatggctactttgattggggatactatcagtgatgctgatatcaacaacaatgcacaatgtagggttacatgccaaggcgctaccttgcccactaatgggagtgcagacataaccgaacaagaaagtggggtggagcatttaagagcgaagccaagggtcatttacaatggtgatgatgatgatgaggttgtcatattcggagaagatgacgatgatgatgagggatacatatttgatggccaatatgaggagactgacgaggacaatgatatcgatggtactcaagatgaatctattgccactgatgtgcctgacccgtacaataacctccctgaagaagcacatatgctaaagcctattgctgactacggttattgcactgcgcagaagtttgagtatgagccacctaggtgttgttgtcatggtgggaaggttgagctagcaccactggatacccctccccaacttaggaggttgtgggatagtgtagtctctaatgctaagcactttcgtgataacattaggttttttaatagccatttctctttcacttccctgtattgttgcatcgatagtatgacaactaatgagagagattctggtatatacacgttccgggcacaaggcatgatgtaccataatatcaaatcattcggtaaggaaggtgggtcggagcataaacatctagagctttatttttatgatggtgatcccagtctcgagcatcggtatcgtaagtgtcgtgaagagcagcttcagaaagacaaagaggttattaaacagatagttgacatactccatggaaacccgtactccgagcaccttaggagcatgggccatgttgagaaccttgatgactatcatatcacattgaaccttgactag

SEQ ID NO: 10999 - DNA, 456 bp, Zea mays
  Peptide Sequence Number=SeqID_54374
atgcccgtgtcccctgctcgcgcccacgcctataaagccccctcaggcgtcgaccgtactcctccgcgcacgctcgacctcactggagcccgaaaccaccggcgtttgcccagcaaacggcgtgcccgcggccacccgagcccctgccaccgtagaccggccagcagagcccttcctagccacgcccgaccctcggaagagaccgtgcatgcgtcggtgaagctccccgagcaaggaatcggaccttgcttcgccggagaagctagtccacggtcgccgggacttcacccgaccgctggtgaacgtagaccggattgcaacctcgctgatggagagtacgtcctcgtgccggagcaaggagctgctcaggaggtagccccggatccagcaccagagcctgccccagaggatctgcctgccccagctttggaaggcaagccccggttttatgcataa

SEQ ID NO: 11000 - DNA, 717 bp, Zea mays
  Peptide Sequence Number=SeqID_54375
atggccgtcgttgtcgctgccgcgccacggaggaaggagtaccatgtcgtagctgccgtcgagggacatgaactcgagactcccgaaacagagcagcgtcccgggctgaagaggttgctggagactacccatctggagctcaacgggaagttgttcggcaacacgcaacaggcccctacctggcgcgccaactatcggcgtttcgaccctgggggggtccctggaccgacgagtaaaaattgtcgggggctgagaaccgccatcgtcatggacgcacgcgggggagccatcattacttgttaccggggcgagcctggatgggacgccgtccgagcccaaggtcgagcgaggcggagactcctcctgaggccgaggccggggtcgggcgaggacgcgattccgcccgaagtcgaggttgaggccgagccctggggtctggcgaggcggagaccaccttccgaggatgaggcgggggccgagccctggggtcgggcgaggcggagacctcctcctgaggccgaggcccaaggtcgggcgaggaggagcttcctattgcgcctgaggctggacttagctgttgtcagcctcaccctggcgggtggcatagcagtcggagaggggcgagcggcgctgttttcctatcaggtcggtcagtggaagggtgaagtgactgtggtcacttcaaccttgccgactgaggcacgtgtgtcaggataa

SEQ ID NO: 11001 - DNA, 1746 bp, Zea mays
  Peptide Sequence Number=SeqID_54376
atgacgaacaccctcaacactgagggcgggatcgggatcacagcccgcgagggcgtgtattctggcctcggcggctgcagaaggcacacgctacaagacactctgaccctgcaggctcgagtcttgacgctggaagggggcagcaacaccctcggcatcgacgacaccttcggcaaggcccgacctagcctcggacggcgacgcggcccgaggatctccgctccgaaggacgacgtcgtcaccacgcccgggcaatcgctgccagggacttctccgggaatccggcccgagcaggcggctcagccggtcacccctggggcctcggccgaccatctcccaagggcgctagcccgacctgaggcctcggctgatcaactccgacgtcggtcccgccaacggacaacccggctaggctccggccaaccaggtttcattctcgagccgactccgcctctgttcatactgatatcgctacccctggcctcggctcatcgaagagcggccgagggttcgccttccccggcatggctggaggacgtctccgccgtagggctagagggcgattgccaccaccagaagctggaagaagaggtggtccgccgacccgcgcaggaggtggagccccggctcgcctcgctccccgccccagcgaggatgacgaacaccctcaacactgagggcgggatcgggatcacagcccgatcaacgggcgaaagaggcgagcagccatgcaggcggcatgcaaccgcgctaagtggacgcgcttctccgactcccgacacgccagcatggaggcccaggcccacgcgtcgcgcaactggcgcgccggatgctgcatgcaagcaactgcaccgccacttgcgccaccaccgcgcctcctcgattgcggaaccaataccgcgactcgaggcgacccagcgcgcgacccagcagcgccagcctgacgcggcggccaacgcggccaaaagtaggccggcagtaatgacgggggcaggcgcgcgggagcagcggtcacgtcgtcagccaagctcacgtcccatccgggggcagcaagagaaccccctctcacggcgtgaagacaacgcgcccgtgatccgttcctcgaacggctcgcgcacgcgcaacggtcgccccgccaactactcgccccgtcgcattaactccgtggctggacaggcggcgcttctggcaggagcagcgggcgacgcttcgccttcgccgaaacaaccgcgccaaaaaaggctccgagcctccttactgatcagaggttcgaaggctggccccccgaagggttcaacagccgcctcagatcgcgtgggccctacacccactactggtcagaggggttcgaaggctggcccccgaagggttcacagccgcctcagacgccgagcgagggatgaccaggggtacgttcgatacataaccaaggctcgggttgcgctcccgagctcatcggagacaccatgttcggcgcccatcgagggtaacatggcgctctccccccccctcctccttgcggaaaggcgacgcaggggcgtatgtaaaaaagccgagtctgtccctgatcgccctctcgccctatgcagaggctcgggggctgctctcgcaaacccggatccggccaaaccgttgacagcgtcaacataccagcccgagaacttgggccccgaccgtacacccgggctacggccagctcgcatgagggaacaaccagaccagccgaagcattacgcaaggcattaa

SEQ ID NO: 11002 - DNA, 534 bp, Zea mays
  Peptide Sequence Number=SeqID_54377
atgactgtgagcatggctagtataccagttttacactctacagaggttgcgcatctttacccacaagtcatgttacccatctaccaagagacggccaatcccatacacctctaccgaggaggcgaggcaggtgcaggaatccctcgcctgaccgccatcgcagcaaaatcaacccaaggacctccctacactgaccactcccctactgcccttgcccctttcggctacttctacttgttgaacctcagaatccacagtggcttgctcgactactcgtgtcggcgtttcgagaccggggggtccctcaggccgacgagtgagtgccgcgtgccccagcccagatgggtcgagcgcgtgggcgagcgcgaaggggggaaaggagcgaggcggcccgagaccggcgcgagagaggtgggaatcccgcggccttcgtgttcgtcccgcgcccaggtcggacgcaaggagaggatccaggtgtacaatgggggtgtagcagagtgctacgtgtctagcgagggagagctagtgccctga

SEQ ID NO: 11003 - DNA, 438 bp, Zea mays
  Peptide Sequence Number=SeqID_54378
atgccactgacaattcagaaaaacccctggggttttactaaacctcacctgaggtccttccctcaattaaacagtatccgcggcagaggaaagggcggaggggcttaccagcggcgagactgctccggtgaggtggtcgagggtgtagggaaggtcctgagggtcacggcgatgtgcgggtcgccgtcggggatggtcggagtcggccggtccacgagcgcaggcaggggagctcgtcggcggcgaggagtccggccaaaccagggcacgattggtcaatcgaatgggtcagtgagcttcaccagggatcaaggaaggcgggtgaccgaagttcgacgaggacaatcttggttctccagtgaagttctgccgggtccgagcgcttggaaagcttcacgggctaccggtgaagctaaccgaagggcaggcgcggcttga

SEQ ID NO: 11004 - DNA, 621 bp, Zea mays
  Peptide Sequence Number=SeqID_54379
atgagtgagtgttcagccgtgttgaagaagagagagagggggtctatttatagtcacggctcaaaaactagccatttgaccaaaaaccccgttgaaaaccggttgaaccgccccctagggcggttgaaccgccccctgataggtcagcagtctgtctgccagtctgactgccagactgactggcagactgacctgcaggcgggtcagacaggccaggaccggttgaaccgcccccctagggcggttgaaccgccccctaacacccctggcgacctgactgccagtctgactggcagactgcagatcagaagtcagaggttggtggagaaggacctacaggtggaaagactgagccagcgcattaccaccttggagcagcaggtggagatccgagacaacaccattgatgtcttggagaaccagctccatgatgtgcagtgggaactcaaagaggctaatgaccacttggacatgcaccagttagaaatggaggccaatgaggccggaagcgagggagaagaggctcccgaggagttaggaccagcccctggtgccaacgggactacctccgtgatgcccccttcacccgcatccagtgtcgcttccgccgctcagggttga

SEQ ID NO: 11005 - DNA, 192 bp, Zea mays
  Peptide Sequence Number=SeqID_54380
atggacttaccacttagtttaactaagcttgaccctaaattactaaattgcaatctcgctgacggagagtacgtgctcatccccgagcaaggagctgtccacgaggaagaccagaagcaagctcccgagactgccatcgaggatctcccagcagccccagctattgaaggcaagccccggttttatacataa

SEQ ID NO: 11006 - DNA, 276 bp, Zea mays
  Peptide Sequence Number=SeqID_54381
atgactcaccggattgctcggtctacgcgtgcaggcgggcgaccgaagtccggcgaggatgatcttggttctccagtgaagttctgccgggtccgagcgcttggaaagcttcacgggctaccggtgaagctaaccgaagggcaggcgcggcttggaagcgactggagtcggctggccacggtggccgaggcttgggaagtgatggcgggcggaagagagctcgccggagctaaggaggggcgtctggtcagcgagggtgagcacgggttgaggtga

SEQ ID NO: 11007 - DNA, 324 bp, Zea mays
  Peptide Sequence Number=SeqID_54382
atgggcatgccgtccctcgttcgcctgatgtgcctcttcatcctcctcccccggagatcaatgagtggcaccagcaggcctacggggtgccttttatgtcggcagacgatgaagatgaagaagtctatgttgatgatcgcgaggagtttgccccgcctccctaccatggggatccgggtcaatcatcctcccaccctccgcctccttaccctggtccgggacccattcctggtacagctgagctttccagctgaacttaacttcagctgtgatgagcttcttcagctgcagctgagcttttcagctgagctggacttcagctga

SEQ ID NO: 11008 - DNA, 750 bp, Zea mays
  Peptide Sequence Number=SeqID_54383
atggcgaacgacgagcaactgccgctgcagtgggcggaggtggcggtggtgcctccaaatcgacgtccatgggggccgatgcagacgatcccgcgtcaaacaccggcgctggtggcgacggggatgcagtggggagaccacactccaccaccggtagcggaaccaccgctgtccatccatggagaacgcagaagtgcacattttgcacttgcacacggcgttcagggatctcgtgcaccgtgctcagtggcaaatggaaaacaacagagacaaatgacagagaatcgtgtatttattgcagagatagatgaaaacagcaccgctcgctccgctccgactgtcgtgtcagccaccccggcaacgactgacaacaagtcacgatcaatcaccgagttcagcctcgggcgcaacaggaagctccgcctcgcccgacctcatgctccggcctcaggaggaggtctccgcctcgcccgacctcaggctccggcttcgggaggaggtctccgcctcgcccgaccctcagactcggcctcgaccccggtctcgggaggaatcgcgtcctcgcccgaccccggcctcggcctcaagagaagtctccgcctcgaccgaccctgggctcggactgaccgagctaataggggatgcatcatttccctattcctagcctgctcaggctacaaggaacaagaccggcgtcccatctggcttaccctggcgacgggtaatgatggtgccccgcgtgcaccatga

SEQ ID NO: 11009 - DNA, 174 bp, Zea mays
  Peptide Sequence Number=SeqID_54384
atggagagtcatgatctccgggcaaaaagggaatcacggcttgtgggtggctatgagatcgatggtttcggttatgtctatggtgctggttgtcagcattgcaaccactgctcaggcgaagatgaagctgtggaaggagacttccaggagttccaagactacgacgagttctag

SEQ ID NO: 11010 - DNA, 2742 bp, Zea mays
  Peptide Sequence Number=SeqID_54385
atggatcccccgcggcggcggctacccgccgcgctcgtcgtcttcctcctgctcctcgccgcggcctctcccgtcgcgcgcgcgtggaagaaggacgagtttcgcaactgcaaccagacgcccttctgcaagcgcgctcggacccgcgccccgcactcgctcgacgcgccgctctccctcgccgccagctccctggccatctcccccgacggctctatctccgctgagctctcccacccgtcccgcccgcggcccctcgtgctccgcctctctgcgctgcccccgcacgcgctgcggctccagatcgatgaggactactccaccgccacgccgccgcaccgccggtttcacgtccccgatgtcctcctcccggacctcgaggcccgcacgctccacctccccgagcccaagactgccgctggcgtatccaccgttgcgctctcctccgaccttgacgtcgtcgttagacacgatccgttcgagcttgccgtccgccgtgctgggtcgggcgatcccgtgctctccttcaactcccacggcctcttcgacttcgagccgatgcgggagtccaagccggaggacgacacgtgggaggagcacttccggagtcacaccgacaagcgcccccgcggcccgcagtccatcaccttcgacctctccttctatggcgcggacttcgtctacggtctcccggagcacgggtccacctcgctcgccctccgccccacccgcggcccgggggttgaggagtccgagccctaccgcctcttcaaccttgatgtcttcgagtacctccacgaatcgcccttcggtctgtatggctcgatccccttcatgattgggcatggcggccgggcgtcgtctggcttcttctggctcaacgcagcggagatgcagattgacgtgcttgcaccaggttgggatggggtcactgaccatgagaacgggcggatcgacacactgtggatggctgaggctggtgtcatcgatgcattcttctttgttggttctgagcctaaggatgtgatcaagcagtacataagtgtcacgggcacaccttcaatgccacaacagtttgctactgcgtatcaccaatgccggtggaactaccgggatgaggcagatgttgacggtgtagatgctggttttgatgagcatgatattccatatgatgtgctctggctcgacattgagcatacggatggcaagcggtactttacatgggatcattctgctttccccaatccagaggagatgcagcgaaagatagcagataaggggaggaagatggtcaccattgtggatccccacatcaagcgtgacagttcattccacctccacaaggaggcaacagacaaggggtactatgtgaaagatgcgaatgggaatgactttgatgggtggtgctggcctggatcatcatcctatcctgacatgttgaatcctgagatacgtgagtggtgggctgacaagttctcctatgaaaattacaagggatcaactccaacactgtacatttggaatgatatgaatgagccatctgtcttcaatggccccgaggtcaccatgcccagggatgcaatgcattatggagatgttgaacaccgagaattgcataatgcatatgggtactactttcatatggctaccgcagatggacttctcaagcgaggcgaggggaaagatagaccctttgttttgtcaagggccttctttgctggaagtcaacggtatggtgcagtttggacaggcgacaactccgcagactgggatcacttgaaatcttctatcccaatggtcttaactcttggtcttactggcttgcctttctctgtttcaacaggcgcggatattggtggattctttggaaacccagaaccagacctattggtgcgttggtaccaagtaggagcattttatcctttctttaggggtcatgctcatcatgacaccaagagacagcgaagaactgccatcataagggaggcgatacatatgcggtattcattgttgccctacttctacacgctgttcagagaggctagtgtaaatggcattcctgtcatgcgtcctttatggttagaatttcctgacgataaagaaacttataacaatggcgaggcatttatggtggggcccagccttttagctcaaggaatatacgaagagggccagaaatcagtgtcggtctaccttcctgggaaggagtcatggtatgacttgagaaatggatctccatacaagggaagcgcgacacacaagctacaggttttagaagatagcattcccagcttccaaagggctggtacaattgtgccaagaaaggacagattcagacgcagttctactcagatggtgaatgatccatacactctggtgatagcactcaatagctcaggtgctggagaaggcgaactttatgtggatgacgggaaaagttatgagtaccagcaaggggcattcatccatcgccgatttgtctttgcagacaataagctaacttcattcaatattgggcctgacgatttgggcaagaaatttagaagtgattgcgtgattgaaagaattataatcctcggtttacgatccggagtgaagaaggctattattgagcctggaaatcaagaactagaaattgaatcagggccaattagtttaaggagtggttccagcccagtcgcgccaacaatccggaggcccaatgtttgcattgcagacagttggactataaggatagcataa

SEQ ID NO: 11011 - DNA, 1611 bp, Zea mays
  Peptide Sequence Number=SeqID_54386
atggaggacaacggtgccgccgccgccgccgccgctcccgcgacgagcatgcctgccgagaagcgtgtggcggtcatccagggggacgcgccgccggagccggcggcggggctactgccctgcgggccgaggaagacggggctccacctcttcgtcatgaacatcaggagcgtcttcaagctggacgggcttgggtcggaggtgctgcgcatcgcggtgcccgcgtcgcttgcgttggcggcggatccgctcgcctctttggtggacacggcgttcatcggccgtttaggttcggtggagatcgccgccgttggcgtttcgatcgccatatttaaccaagtctccaaggtctgcatctaccctctcgttagcgtcacaacgtcgttcgtcgcggaggaagacgcgatcatcagtaaggccgtccgaggaaacagcagccaggaggaggacgtggagaaagcctcccacgtgggctttgatccggagaccagcaatctgcatgcatctggtatggcagaatgcgtgaactcgtgtatccctacggagtgcgcagcagatccctctggcaggcaagggcggtgcgagaagaggtacgtgccgtcggtcacgtcggcgctaatagtcggttccattctcggcctgcttcaggccgtcttcctggtcctttcggccagattcgtgctcaacatcatgggtgttaagtccggatccccgatgcaagggcctgcggtgcgctacctaacgataaggtcccttggtgcccccgctgtgctgctgtctctggccatgcaaggggttttccgggggttcaaggacaccaagacaccgttatacgctactgtggttggcgacgcggcgaacatcatactggacccgattttgatgtttgtttgccatatgggcgtcactggtgcggctattgctcatgttgtttctcagtacatgataacgttgatactgctgtgccggctcgtccagcgagttcacgttatcccacccagcattaaatctctgaaatttgggaggtttcttggatgtggtgagataccgttggaatccagagcccggataataatatctaccctcaggaaggagattgaactttttgtttctgcttcaggattcctgctgctcgcaagggttgtcgcggtgacgttctgcgtcacgctggcggcgtccctggccgctcgccatggacccaccgtcatggcaggcttccagatctgctgccagctctggctggccacgtctcttctcgccgatggattggccgtggcaggacaggcggtgcttgcaagcgcgttcgccaagaacgacagtaagaaggtcgctgccgcgacatcccgtgtgttgcagctgagcattgtcctgggcatgggtctcaccgtcgtgctgggacttgctatgaggttcggggctggcattttcacaagcgacgtgcccgtgatccaagtcattcacagaggcatcccgtttgtcgccgggacgcagaccatcaattccctggccttcgtgtttgatggcatcaactttggagcgtcagactacagatactctgcttactccatggatgtcagtttaataccatacatcggtaaagtgtctctctag

SEQ ID NO: 11012 - DNA, 1707 bp, Zea mays
  Peptide Sequence Number=SeqID_54387
atggagcgccgcgcgcgcgggctcgagtccgcgccggcgtcgccgccgtgctcccgggcggtgctgcggtcgcaggaggacgccgaggaacaggaggagaagtggcggtttcaggcggagatcctccgcgccgagtgcaacttcctccggatggagcgcgaggtcgcgctccgcaagctcgaccgccaccgcggccagatggaggccgcgctcaagtccgccgtcgaaacgctcgtatcgggtaggaagaagatcgatgggaagggcgacgtcggcctggcggcgacgctggacgaggggatcgaggacctcgaggagatgatggaggagctgcgcgtggaggagagcgggaggagggcgatgagcggtgtccgtgagctgcagcggagccacggcaggaacttcgatcggcaggcgtcctcgctccgccgccgcctcgagaagatgacgccggccgaccccgagccctgcatcaaggacatccgcgagatcgccctgcccgtccctgcgccaccgccaccaccggccgagcgaagcgacgacgacgaacgcgtccacggcgccaacacccccgatgtggaaatgctgaggatgaagatggaggggatgtcaaagggcatgcgcgagcggatggcggagtacagccggcgcctggaagccgtcgcctccggcgacaacactggctgcgagtcagggaaatgcggcaaccggcacagccgaaaggcgagcgcgagcagccagagaagctggagcggcggcagcacggcgagcaacggcaacgcgccgtcgaccctcgacgccggcccgcacggccgcagccgccagaacgtggcggccgagaagcgccagcagcagcagacgtgctggtcacttgacttgaaaaatggtgatgccgttaccgtagccgcaccttattgttttgggatgaacgattcgctgtcaatgggaaactttgaatacacatgcccaaaaaacaatttgccctgcacattagaaactgcaaggagtatctggggtccaagtatgacctttcgcataggagatgttgcccccacaacgagaaaagcaaagcttttcctggtcggtttaaaaggtctgggccaggcaaggcttaggaaagttttggcgataactgttccttttttccagcagattatggctggagagtgcaaactggtgggctcggcaagttgctgccactgcagggaaatcgtgtggaaggtaatggagcaagtaaaggcagaatctgatcaatggactgagatgcaagaaatgttggagcaggtgaggttggagatgcaagagctgcaggcttccagagatgcatggcagcatcgggctatggcttctgacatcagtctacgctccttgaattcccaagtactggagtggaaaaaccgggcacaagcgtccgaacagcgtgtagaagagctgcatagggagattttagagctcgaaagcaagctacacactttcaaagcccacttaccagctccagctgctattcctaaccaaaagcaatggtcggatgcgtgcaagatggagtacccgagagcaaagcctcagcacccgcggtcccaggaatccggcaaggaggagatcaagaagcacgtcctcatctgccgcgtgaagcgctcacccagcagcgtgctctcgaagcggtcgccgttccaggagataggcaacatcagcttgccgcggcattag

SEQ ID NO: 11013 - DNA, 162 bp, Zea mays
  Peptide Sequence Number=SeqID_54388
atggggctcggtgtatgcggctcgctctgccaaggtggtgacgaggatgatggttttggttatgactatggtactggttgtccgcgttgcaaccactgctcaggtaaagatgaagtcgtggaggaggacttccaggagttccaagagtacgatgagttctag

SEQ ID NO: 11014 - DNA, 786 bp, Zea mays
  Peptide Sequence Number=SeqID_54389
atggcgagaagttccgaggcgccgaagctctacggcaacacttccgccagcattggacccccccgcgcgagcagtcatcatgggacgctccaccgcgccccgcgatatttcctggtttcgcccgatgccttgaccatggaggatcgacggcgcggagcggctccgcgcgctgggaaggcggcggcagaggattccgagctgagtcgtccgaagttccagccgagttctgcgctcgagctgttacgatgcaagggagaggatagacctgacgaccaggacccacgcgaaataaattacattattaagaaagaaaaggttgatgatgaggacgaagatgtagcactaatcgaagtcacttttggcgatgctccatcccctgctcagcttgaagtcctttcctacaccaatggaaatgaacttcttctctcaaggtacaacaacgctttgctacaaggatgcgcgcaagcaagctatcatgcccttgcacattgtcttgagttcatgttttcccctttgaacgcagatgagcttggcggcctgtttgatgttgactttccaagtttctgggctcagatggaggaggacgaggcgcgtcgcaagagcgaagaaggcgactgcgagaaggccctgatcgtgtatggcaatgtgcagacggtcgcagagataccaggacgtcggggcggtgggtcgtcgtcagggacgaagaagaaggaactaacttttgagcagttgtctcggcacttctccgtgccgatcaagcaggcggcgcaggagctcaacgtgggg

SEQ ID NO: 11015 - DNA, 138 bp, Zea mays
  Peptide Sequence Number=SeqID_54390
atggcgacggctggggcctcaggtgcttggatttgggcaaagcagaatcagacaccaggtgctgaacttgtggccaggggtccagccgtccagggcacagggcaggctgattacaagagcttgattggactggagtga

SEQ ID NO: 11016 - DNA, 120 bp, Zea mays
  Peptide Sequence Number=SeqID_54391
atggcgcaccggacagtccggtgcgccaacgggaaatcactgccgtggaccagcctggccccacctggcagagggtgcaccggacagtccggtgcacaccggacagtccggtgcccctaa

SEQ ID NO: 11017 - DNA, 258 bp, Zea mays
  Peptide Sequence Number=SeqID_54392
atgtgccatgttactatacagaagcaaaaggaaatagctgaagcagcagcacaacaagcccagccgaagcaggtttgcgacaataaaaaggaccttcggactatcgaaagtcctttgaagcaacgaaaagtcgttctaagaaacgcagacttcattcagaagccgattgacgacttcgtccataatatcttcggccatctttttaatttcgtcgtcccccttcggctgagggcccgaaggcgctttagtcggatctga

SEQ ID NO: 11018 - DNA, 600 bp, Zea mays
  Peptide Sequence Number=SeqID_54393
atggctgaaaggtaccaactcccacggagttgcattcttccaacgacgaggcggaaagacggcgggtatcccccatccgggggcttggaaggtggaaagacacgatgcataagggagcgcaaagacacggtcgccttccaagggggtcaccctccttttaaaggcgactctccctacttgcgtccccaaccgtcatgggctaagtcttctccaacacactccaaggtcctcccctacagcgcgggggctgggtcccacacgtcatgcaagcaggcccagaacagaagaagccaaaccgccgcgcgcgcgggaccgggaaagggggataccccgaaaaggatccttccccgtgaaggaaccaggctccgagcctccctactgatcagaggttcgaaggctggcccctcggaagggttcaacagccgcctcagagcgcgtgggctccacacccactactggtcagaggttcgaaggccggcccctcggaagggttcaacggccgccttaggctactcgggctccgcgcccactactgatcaggggttcgaaggctggcccccgaagggttcacagccgcctcagacacagagcgagggatga

SEQ ID NO: 11019 - DNA, 426 bp, Zea mays
  Peptide Sequence Number=SeqID_54394
atggtaaggacatcaatgatgactacttctgaggttacactctctactaatgatctcacatccgaggtagatgagccaatgactgatttagctagtctggacatgttgcttaggcttgtgatacatgaggaaggttacaagaacaagtatgaggccacacttaaggagcttgagtttgttagagcttttgtggtattgtatgacgagactgagtgtgatgagaggagatttagtggaccagggttaggttttgctgctaagggtgtgagtgatgatctttatggcaaggttgatgggtgtagtcccttgacatcttctgaaaaacctatatccactcccaattccataaaagtcaccccaccaaaatctaccactctagctatgagagatggagtgttcgaggaacatcccagagctccaccttaa

SEQ ID NO: 11020 - DNA, 300 bp, Zea mays
  Peptide Sequence Number=SeqID_54395
atggagagtcatgatctccgggcagaatgggaatcacggcttgtgggtggttatgagattgatggttttggttatgactatggtgctgtccactacagccaaacaggatactttgctgagtatgttgatgtgtactcaacccttgctctacacaccaaaccctcccccaggttcgtcagcattgcaaccacctgctcagccgagatgaagctgtggaaggaagacttccgggagcttccaagactacgacctagttataggttgcgggttagggccaaacgatttaggtctgctttgtga

SEQ ID NO: 11021 - DNA, 501 bp, Zea mays
  Peptide Sequence Number=SeqID_54396
atggacgcacgcgaggaaccatcattacctgttaccgggaaccttcggtcgctctgcgatgagctggagccggaggcagcggtgtcggcgcggacagaggcggagtcggctcgaaaagaggcttcgtcggtccgggagcatgtggcttcccaggccgaggaggtgcagcagcagcggctggagcttggccaggtcatccgcgagtgggaccaaccccggagtcacgctgccgaggccatgagccgggctgaggtcatcgggggacagctggctgaggctacggagcggccagccggggtgtctgctcaggccagaacccttgcggagagcctggccgtgagggcccaagcgcggtgttgtcgtcctccttcgaggtggagatccttccgcccgtgtcgccgtctgaggctgggccaggttccgccgagggtggaaacgccgccgagggtgctgctcctcctcctacctatgtctgaacctgcaggaacagtttgtttgtag

SEQ ID NO: 11022 - DNA, 657 bp, Zea mays
  Peptide Sequence Number=SeqID_54397
atgtcaggtcaattcacagctccatccagagtgatgacagaggaagtcaacagcagagactgtagtattcttcgcaagcttcgggacagcaacaaagctctttccgtccgccagctccaagaggtagaggcgccaggggcttcggaggaagatatggggaccagcctaggaaaatctactgcctattctgtggtgaagacaagggccacaatacaagaacgtgtcaaatcaccatccaaaagcaaaaagaaattgcagaagccgaagcccagaaaaaccagccgaagcaggtcctgcacactgctttgtgtcattcaccctacataccagaatatgtgggtaatcatcccgcagcttctgttgcttcggctagtcagccgcaagtttcttggccacagcttccacctccgccgccactacagcctgcatactcacgagactcacgagaatgccgaagctacaaagagatattccttcgggaatgcagtgctaaaaatcgcagtaaaagtttcaccgaagctagaaaaagtcattcttaaagaacgcagcgtaactttgctgatgcttcgaaaagccgttcctaagggagcgcagcccagtgggtcgaatggctctagaggaggagatagttcagctgcggtagaagacatgaattag

SEQ ID NO: 11023 - DNA, 588 bp, Zea mays
  Peptide Sequence Number=SeqID_54398
atggtcattggatcccgggtggatggctcggattcaaaatcgcccagagtgagtcgcggccgccagatccggatcagacgacccgaaatcgccgtccgcaaattactacggtctaacccatctccaccacacaaattacatctaacggctcgaggcgaaatccccaaactcacagccgtggccggaacacgcgacggcgcagccaccacacggcggcgggttcaccggagctcgcgaaatccggtcctcccgagcgccaaacccaaattgaaaggcgccgcacgatctagagggcaatgcgaaccgcatggaggaaaactcaccatcaataatggcgcagagacgactgcccacggtgaagcgcggtccagctgcaagaattgggcgtcggccaccaatcgagggcttcaccgacctaggctccgcccaccgaaactccgtgcaggttcacgacaaccaggcggagctcctttaaccaactacgctccccaatttgacgcgcacagggagttttcccccaaccacggtttcttccgcgatgagttaatggcggcggggttcgagaaattaggtcggttgcggacctag

SEQ ID NO: 11024 - DNA, 657 bp, Zea mays
  Peptide Sequence Number=SeqID_54399
atgggtgcgattaagtcaaggctcggtccactcaaggacacaatctcgcctcgcccgagcccagcctcgggcaagggcagccgaccccggaggatctatgtctcgctcgagggccccctcaagcagcggacacaccttcggctcgcccgaggcccggtcttcgccaagaagcaaccttggccaaatcgccacgacgaccgaccagtgaggctgaaagcagccaagtctggcctcgggcgccataggaagctccgcctcgcccgatcccagggctcggactcggccttggccccggaggacgacgaactccgcctcgcccgatcccagggctcggactcggcctcggccctggaagacgatgaactccgcctcgcccgaccccagggctcgtacgcggcctcggccccggaagacgatgaactccgcctcgcccgatcccagggctcggactcggtctcagccccggaagacgacgaactccgcctcgcccgaccccagggctcggactcggcctcggccctggaagacgacaaactccgcctcacccgaccccagggctcggactcggcctcgacctcggaagacatactcgacctcgacctcggaagacagactcgacctcgacctcggaggagccctctgcctcgcccaacctag

SEQ ID NO: 11025 - DNA, 174 bp, Zea mays
  Peptide Sequence Number=SeqID_54400
atggagagtcatgatctccgggcagaaagggaatcacggcttgcgggtggctatgagatcgatggttttggttatgactatggtgctggttgtcagcattgcaaccactgctcaggcgaagatgaagctgtggaaggatacttccaggagttccaagactacgacgagttctag

SEQ ID NO: 11026 - DNA, 275 bp, Zea mays
  Peptide Sequence Number=SeqID_54401
atttaatctatggtctggcgctggccgaggcactcttgttcctcgttgagaaggcggtgtgggagtggaagcctcgcggggtcgcgctcgtcgaacccgtgctcgcaccacgccggaagcgctcctcgtcgaagcctcacagtggtcatgggtatctgttgtgctcgctgatcctagacgacgtcctccgtggagtcgaggaagttcgtaccagctgccccgcacgttggaccccacatgcacacatcgtgatgcggatgccatgcaagggctga

SEQ ID NO: 11027 - DNA, 300 bp, Zea mays
  Peptide Sequence Number=SeqID_54402
atgcctggtcccgaggttgagctgctccaaaaccgtgtcaaaaaatttggtttgagttcaaactttcccagaatgtgttcaagaaaaaccgtgagtgacactggggtgtcacagccttccccccttaaaggaatctcgtcccgagattcgggccagagtcctcccagggtgaagcgaaggattcgaaaggcaggaggaggggttgggggtgattacataccagcttccttaggtaggcaatcggggaagttggatcttaagaattcctcggtttcccaagtagcttcctcctctgagtga

SEQ ID NO: 11028 - DNA, 572 bp, Zea mays
  Peptide Sequence Number=SeqID_54403
atgcacccgggctaccatcagatcacacgagggaacaaccagaccggccaaggcatcacgaaaggcattaagccctcagaggagtcaaaccactcctccgaggcctcgggggctacacccggcggaaggaggtctccgcctcacccgacctcagggctcagcccccgccttagcctcggaaggtggtctccgcctcgcccgaccctagggctcggcctcaacctcgacctcagaagacagtctccgcctcgcccgaccccatggctcggcctcaacctcgacctcggaggatggtctccgcctcgcccaaccccagggctcggcctcagccccgacctcagaaggaatcgcgtcctcacccaaccccggcctcagcctcaggaggagtctccgcctcgcctgaccttgggctcggaccgaccacgccacagggggaccccccggggtcgaaacgccgacaagtttataggaagctctagtgcaggaatccctcgcctgaccgccctcgcagcaaaatcaacccaaggacctccctacactgaccactcccctactgcccttgcccctttcgg

SEQ ID NO: 11029 - DNA, 204 bp, Zea mays
  Peptide Sequence Number=SeqID_54404
atgcaaacccatgaaaaagaagtaaacccataccttttgctagtaattaaagagaaagattgtaatcttgccgacggagagtacgtgctcatccccgagcaaggacctgtccaagaggaggaccaggagcaggcttcagaggctgctattgaggatctccccgcagcccccgcaattgaaggcaagccccggttttatgcataa

SEQ ID NO: 11030 - DNA, 123 bp, Zea mays
  Peptide Sequence Number=SeqID_54405
atggccagttataactttgtcgaggacgtcaacctctttctcaacacattcgtgagccctaggaatatctttagcagaaagtttgagattcttttcaactttggccttgattgtcgcgtttag

SEQ ID NO: 11031 - DNA, 1353 bp, Zea mays
  Peptide Sequence Number=SeqID_54406
atgaggaaattcatggcagcagcaaaccttactgctaattggccatctcatgctagacgtcataggaaaagagatcctgatgttattggtatatatgtagataacgatggagtctttaaaaaggaggggcgtggtacccttaagggtatagcagcagccaccaagcgaatcaagaacggtgatcacaaacttaagattgaattttcatctaagcttggaggtcctgtaggaccaaacgctcgcacttttgtggatgaaatcgtattgtttacaaagaaaaaggcaccactcattggagtgaaaaagtggaaagatatagagctcaatgttagatcttctatagcctctgacgtactgcgaaggtgggagtttctaaccaatgaggacgcgcatgaaaagatctggtctattgctaaggagagatacaaaggatggcgatcaacgttaagctcaacatacaaggcatacaatagttatgctgaaaggatgaaaaacaagcctgaagatgtagacatcgtcgagtggcattacatgatgttgtattttggatctgagaaattccagaaaataagcagccggaactcggaaaaccgtcagaaacaaagaacgaagcatataatgggttctagaactttttcccaaataagctttcaacagagagatccagaaactggtatagaaccaaccgatctatccctttggatgattactcattgtaaaaatgatgaatggtcggaagaggcttcacgtggcatttatgagaaggcagctgagaaaattgttgagaaaatatatcaaacagaaagatttaagctaacaagagaagaggaaaatgctattttccaaacaacattcaaggaaacaacaggatgtaaggcaaacagacttcatggtcatgggtacctatcaagatatccaacaagaagtcaagtgatggaatcaaagttcctcgaacaagctcgtgccacggttgcaaccaaccaaaagaacattgaactcgaaagtcaggtccagttgttaaatgaaaaacttgcgtgtgaggttgcagaacgagaaagaatactacaggaaaaaatgcaagcactacaagaagaagaagaaagaaaaagacaagtgcttagagaagaaatgaggcaagaaatggttgctgcccttgctgctgtagcacaacagagcaaccgtgaaagcaccactccaatcgatccttcttccgttgtccctactaaacctcctgaactcatcccagctgatcctcctgcacctgcaccaagtagtgcaaacaacgttcgtacaccagacacaaacaataagaaagacaatatgcaacaaactatattagctcttacactctaa

SEQ ID NO: 11032 - DNA, 213 bp, Zea mays
  Peptide Sequence Number=SeqID_54407
atggcgcacggtggttctggcccgaccgaagtgctccggcgagcaattagtccaccaccagaggatatcctcgcctggaaggaccacgaagacgtgcgggacgagtgccctagtggccagggtgtcacgctccacaagatcgtgacagccataggaggtggtgtatcggttgctaaggcgcagcgtctttggaaggctgtagtcgggccgtga

SEQ ID NO: 11033 - DNA, 405 bp, Zea mays
  Peptide Sequence Number=SeqID_54408
atggtggtggtaataagagctggggccaggaagcttatgaatgacttgacggggcaacagaagctgcaggttgattacccacgtattctggtatatagggagagtagcacgaagcacccggatgtactcatccatcttctaaagaagcttctccagggtctgagggggtttcctggcaaagtattgagccataggtccttgccgaagccctttgatcatggcctcaatgaaaatttcattaggcactatgggtgcttatgctctcagacgcaagaaccttcggacatacgcctggatgtattcttcatggtcttgcttgcactagaacaaagcttgagcagtgaccagcttcgtatggaacccttggaaactggtgatcagcatgtccttcagcttctgctatga

SEQ ID NO: 11034 - DNA, 117 bp, Zea mays
  Peptide Sequence Number=SeqID_54409
atgttcggattacaagtggtgatgagaatgatggtttcaatatgtggtaatggtaaagaagaagctgtcgaggcggatctccaggagttccaggacatcgacgagttcaaggattag

SEQ ID NO: 11035 - DNA, 243 bp, Zea mays
  Peptide Sequence Number=SeqID_54410
atgccggagcaaggagctgctcaggaggtagccccggatccagcacccgagcctgcaccagaggatctgcctgccacagccttggaaggcaagccccggattcctgttgagatgaatactagtatgctagatcgaggttctctggaggacatggttgctggagtgacttggccgtccatcttgccaccgggttggactgtcgagtgggaccctacctcggctgaggaggagcatgaggagtga

SEQ ID NO: 11036 - DNA, 312 bp, Zea mays
  Peptide Sequence Number=SeqID_54411
atggcgtcggctggcctttggcgcgacgcggggcacgcgaggtcgggcgcgggcgtgctctggcgcgcgcagaacgcgtcgaacacgtggaagtgttcatctgcccgtgttcaaacgcctactgagatcgcaaacgtgcgaatcttggcaaaaattcggcgcagacctcttcctggcacctatggctatctctcatatgacgagtgccctagtggccagggtgtcacgctccacaagatcgtgacagccataggaggtggtgtatcggttgctaaggcgcagcgtctttggaaggctgtagtcgggccgtga

SEQ ID NO: 11037 - DNA, 201 bp, Zea mays
  Peptide Sequence Number=SeqID_54412
atgacatccaaggtggattacacttgcttaggacctagaattccaagtttggtatactttgcccaaatcagtcttcatgtgataatgggtaaaaggggtaaccctgggatggacaccctgagtaacacctggggtgttacagccctcccccttaaaggaatctcgctccgagatttcagaaggaagcccttcttaaattaa

SEQ ID NO: 11038 - DNA, 996 bp, Zea mays
  Peptide Sequence Number=SeqID_54413
atggctgaaaggtaccaactcccacggagttgcgttcctccaacgacaaggcggaaggactgcgggtgttccccacccgggggctcggaaggtggaaagacacgatgcataagggagcgcgaagacatggtcgcctttcaaaggggtcacccaacttttaaaggcgactctccctacttgcgtccccagccgtcgcgggctgagtcttctccgacacgctccaaggtcctccccctacggcgcgagggctggatcccacgcgtcatgcaagctggcccagagcagaagaagccaaaccgccgcgcgcggtgcatgcaaccgcccagcggttacgagcattcctccgctttcgcccagaccagcgggcgaaagggcgggcagccatgcaggcggcatgcaaccgcgccaagtgggcgcgcccctccgacttccaacgcacccagcatgggggcccacgcccacgcgtcacgcaaccggcgcgccggtcgctacgtgcaagcaactgcaccgccactcgcaccactgcaacgcctcctcgactgcggaaccagtaccgcgactcgaggcgaccctgcgtacgacccagcagtgccagccaggcgcgacggtcaatacggtcataaacgggccggcagtaatggcggtggcaggcgggcgggagcagtggtcacgtcgtcagccaagcttacgtcccatcctggggcaggaccgagaaagggggataccccgaaaaggatccttctccgtgaaggaaacaggctccgagcctccctactgatcagaggttcgaaagctggcccctcggaggggttcaacagccgcctcagagcgcgtgggttctgcgcccactacttgtcagaggttcgaaggccggcccctctaaagggttcaacggccgcctcaggctactcgggctccgcgcccactactgatcaggggttcgtaggctgtccctcgaagggttcacagccgcctcagacacagagcgagggatga

SEQ ID NO: 11039 - DNA, 894 bp, Zea mays
  Peptide Sequence Number=SeqID_54414
atggcggtggcaggcgggcagaagcagcggtcacgtcgtcggccaagctcacgtcacctcgtgggacagcgagagaaccctctctcacggcgtgaagacgacgcgcccgtgttctgttcctcgaacggctcgtgcacgcgcaacggctgccccgcgaaccacccgccccgtcgcattaactccgcggcgggacaggcggcgcctctggcaggagaaggaccgggaaagggggataccccgaaaagggaaccttcttcccgaaggaaacgggccccgagccccctactgatcaggggttcaaaggctggccccacggaggggttcaacagccgcctcagagcgcttgggctccgcgcccactactggtcagagagggaggcatcaagccctcggaccccgtcgaaaggggaccgggtccggcagatcacccgcagagtgaggctgacggcagccaagcccggccccaggcgctatgggaaactccgcttcgcccgaccccagggctcggactcgggctcagccccggaagacgacgaactccgctccgcccgaccccagggctcggactcgggctcagccccggaagacgacgaactccgctccgcccgaccccacggctcggactcgggctcagccccggaagacgacgaactccgcttcgcccgaccccagagctcgcactcgggctcagccccggaagacgatgaactccgctccgcccgaccccagggctcggactcgggctcaaccccggaagacgacaaactccgcttcgcccgaccccagggctcggactcgggctcagccccggaagacgacgaactccgcttcgcccgaccccagggctcggactctggctcagccctgaagtacgacgaactccgcttcgcctga

SEQ ID NO: 11040 - DNA, 714 bp, Zea mays
  Peptide Sequence Number=SeqID_54415
atgggtcggcgcgagacggagcgcgaaggggggaagaagccggagggagacgggcgtgagaggtggaatcccgcggccttcgtgtttgtcccgcgcccaggtcgggcgcaaggaaaggatccaggttcgtgtgttgtcgtggccgtcggaggagcgctggagcctgacggaaggacagctatcggggctgtcgagtccttgctgacgtcctcttgcttccgtaagggggctgagagccgtcgtcgtcatagagcggtaatgatggcgcctcctattgacgtggtcggtccgtgccctgagttgggcaaggtggagggtcctccaaggtcgaggtcgagtctgtcttccgaggccgaggtcgagtccgagcccctgggtcgggcgaggcggagaccgtcggctgaggccagggctgagtccgagccctggggtcgggcgaagcggagttcgtcgtccttcggggctgagcccgagtccgagccctggggtcgggcgaagcggagttcgtcgtcttccggggctgagcccgagtccgagccctggggtcgggagaagcggagttcgtcgtcttccggggctgagctcgagtccgagccctggggtcgggcggagcggagttcgtcgtcttccggggctgagcccgagtccgagccctggggtcgggagaagcggagttcgtcgtcttccagggctgagcccgagtccgagccctag

SEQ ID NO: 11041 - DNA, 1170 bp, Zea mays
  Peptide Sequence Number=SeqID_54416
atggagcatgtccatgacgcagccctggcggttggagcagctgaaaggacagtccgggatgttctccagccctggcagttggatcagccgaaggggacggatgtgcttgcggcgcgccaggacagacctggtggaggaaggcgctggcaccacggcaagcagagaatgacggacacgacagcggatcgatgggaggggaaaggtgctccaacaactccactgatcactattgcaatgacaaaaatagtggctagtgtattggagaagaacaacttgccaggcgcaatttttacatctttttgtgggggcactgaaattggtcaagcaattgcccttgacattaggatacctttggtttcattcactggaagtacaagggctggtctaatggttcagcaacaagttagtgcaagatttggtaaatgccttcttgaacttagcggaaacaatgccatcattgttatggatgatgcagatatccagctagctgtgcgatctgtcttgttcgctgctgttggtacagcaggacaacgctgcactacatgtcgtaggctgattcttcatgagaacatatatcaaaccttccttgatcagcttgttgaggtatacaaacaagtccgaattggggatccgttggagaaaggcaccttactgggaccactgcacactcctgcttcaaaagagaactttttgaaaggcattcagactatcaaatctcaggtgaagggagggaaaatcctttttggaggatctgccattgaatcagaaggaaactttgtgcaaccaacaattgtggaaattacaccttctgcaccagttgtgaaagaagaactctttggtcctgtcctttatgttatgaaatttcagtccttgaaggaagcaattgaaatcaataactctgttcctcaaggattgagcagttctatatttacaaagaggccagatattatttttaagtggctcgggccccatggtagtgattgtggtatagtgaatgtgaacatacctactaatggtgctgaaattggtggagcatttggtggagaaaaagcaactggtggtggacgagaagcagggagtgattcctggaagcagtacatgaggagggcgacttgtacaatcaactatgggagcgagctacctctagcccagggaatcaattttggttaa

SEQ ID NO: 11042 - DNA, 384 bp, Zea mays
  Peptide Sequence Number=SeqID_54417
atggagcgcgctgaggaggggaaacagtggaggtcccatcggctatgcgcgctcgagctaggggtagggaaaccagcaacaaccgtcaaggccgtgcgcaggaggcgtagggagctcgaccagttgaccggctactctgcaccctccggaaacgtgagaggcatgagcccgatgggggaggagttggaggacggcagtgggctggaggccgccattggagaggtggagtccgacggtgcggtgggggaggaggtggagtccgatggtggggtggaggagagggaggggaggccgctggagttgagcgcagtggaggaagagccgtcgacggtgattaggtcgaatgcgagaatgcagtcggccgcacggtgggctgcacgctag

SEQ ID NO: 11043 - DNA, 1044 bp, Zea mays
  Peptide Sequence Number=SeqID_54418
atggccgctgaccaccggacagaggcacaatcccgtggacctccaaccctgccgagccctctcagcctcttaggtgagccgccgcagccaagagcaagtgcgggcataggagctgccactgggagcaagcacggggagaaggggaagaaatgtggaaggaaatgtgcagctgtctacgttggagatgggaagaacattgtgcattcatggcttcactttgtatgtgcttgtcccaaggaatttgagcctgatgcaaacatagtggaaatcgccagggttgctggaatcgatgtttgggccagcatgggacaaaagaaagaagttggttatagaaagcagaagtttcatggattcacgatgcaaactgacatcatctatgagcactgggatattctcccccctaagcaaattaaggacccagagactaagaagcctgaggactgggatgacaaggagtacattcctgaccctgaggacaagaagccagagggctatgatggtattcccaaggaaattactgaccctgatgctaagaagcctgaggaccgggacaatgaggaagatggtgaatggactacccatttgctcgtgccattcccaaccaaaatacaagggaccatggaaacaaaaaggttaaatgaggcactttgtttgacaacaccatcatcactgatgatcttgcgttggccaagacttttgcagaggagacatggggcaagcacaaggagatactgtgttcttatgcttggagtgaagatggttgccactctgaggttcctgagcttcaagaagaagcatagggggagggaggtcactgtcatcgactgcacgtcgccgaccgtgccctggccggccgacgacgccagcggcaggtggcagcctgctagctgcttccattcaaccaatgccaccgagtccaaggtattctacctcaagatgaagggcgactaccacagtacatggttgaaatataaatttgtgttccatgttttttacccgccccctacacgtatctcttggatatctgatttctactcacgatga

SEQ ID NO: 11044 - DNA, 441 bp, Zea mays
  Peptide Sequence Number=SeqID_54419
atgggtgcattaattattggtgtcaaatatcgtggagaggttgaggatagacccaaggctattctcaaagaagttacagattctaatgggcagaccattcttttcattgatgagattcacaaagttgttggagcagttcgaattgtgatgctttggctctatttcatttcccccctcaacaatagtgatgctttggctctctttttaccatcttatatggttgctaaaatcagcatgactgtcttcattcttggtcctgctagcatgatgatcaagttgctgatatccaggctcagggattatctaaggattttgtgcagtgggttaatcaaggagaggcattttggtactgatattccaagatgggactaccatgtaaattcaagccacatgatggttgcacttgcaaaaggggggaaaataagggagaagtctacatga

SEQ ID NO: 11045 - DNA, 378 bp, Zea mays
  Peptide Sequence Number=SeqID_54420
atggccagcgcgcggcccgcacacgattccgaccaccaaccttcgttcctgatggtgctacacgaagaagaggttaaggtggactcaactgagggtttcttaccgaagaggttgatgcgggcggtgctgcccacgatgcggcttggttctacggcggaggaggattccagagagaaattacttggcgcgacggtagtcgattctgcccgccgaggccccaaacctgttcggcgtgtccaagcgaagcaccaaagtgaccggggaggacgaatccgaggccctgggcgcggcgtcgcaacagctccaccaagcggcgttccaatgctcccctatctctcctactcagtcaacgatggtgagatctggctcgatggctga

SEQ ID NO: 11046 - DNA, 165 bp, Zea mays
  Peptide Sequence Number=SeqID_54421
atggctagcatgaggcttgatgctagtgtcaaggtggggccttgcatcattgttctaaaggctgagcttgtaaccctgctttatgggaatattctggggataaactgggtgtctgagggcacatgcgtccttaacacaaggcgttgggcactcagatacctataa

SEQ ID NO: 11047 - DNA, 1212 bp, Zea mays
  Peptide Sequence Number=SeqID_54422
atgaccaccagttcgatagtggggagaagcaagccgggctgcggcctctgccccgccctcagcttcaaggatcttcatcatccttgctggggtgggggcgagctgagccgaagctctaccttcgcgtgggctggcatcccgcttcttcctccggcttctgggggtggaaaccatcctccagctctgcgaaggaggcgtcctccagccatgccggggaaggcgaactgctgctggccagccagggtgcagcattccgtcctctgtccgggcgacggtggccagccgcatcggggggtctcacaacacgtcgtacgccgtgagggtggtactcgtgttctgggacggtcccattctcgctttcgtggcgaggacctgtcggtgtgctttggggcggccggcgctcgctggtgcggtgttggtgggcaggtggacgccgccgttggtgctgaggtggtggcagctggagaaagcttccctaccgacgagattgtcggtgccatctgcgctctaggcctctggctctttggctttaatatctggttcttgtcccccgcgaggggacgcgaacgagagccttccagcggtagcgttcgctctgggaccatcgttgctgctgcagaggtcgtcgacgagccacccagagcttgtcgccctgcaggccctccgatgtggagggaacctcggctgctcttcgatgagccggagccggaggcaacggtgtcagcatggatagaggcagagttggctcgagaagaaacttcatcggcccaggagcaggaccgacgccggagtcgggctgccgaggccatgagccgggctgatgtcctcgggggacagctggctgaggctacggagcggctgatcaagccgtctgcttgggccgggttcctggaggagaccctggcggcaatggcccaggcgcggccggattctgccgaaggtggagtcgacgccgaggatgctgctgcccccctatggatgtctgaacctgtaggatcagtttgtctgtacagaatcgtttatccgagcgagagttacttatcgcggaaggtgatgagtgagcagaatcgtttatccgagcgtgagttacttatccagaaggtgatgagtgaggatcccactatcgaagtagtcgaaaagcatgaaagatggtctggcagaaagactttttccgaggaaaattttgatgcagagggggttccccccttctag

SEQ ID NO: 11048 - DNA, 273 bp, Zea mays
  Peptide Sequence Number=SeqID_54423
atggccgccgccgccacggggagggactgcgcggtgggggaaacaagggggagggggcaccgccaccggggaagtgactcctccgaggtcgagtctgagtccgagccctggggtcgggcgaggcggagaccgtcttccggggtcgaggttgagtctgagccctggggtcgggcgaggcggagaccgtcttccggggtcgaggttgagtccgagccctggggtcgggcgaggcggagaccgtcttctgaggtcgaggcgggggccgagccctag

SEQ ID NO: 11049 - DNA, 1143 bp, Zea mays
  Peptide Sequence Number=SeqID_54424
atgcatgcggaggccgaacggacgcgcacgcagcttatggatacatatcgtgagctgggtgcgcggaccggtgacttcgaggtgccggaccgagagcccgggcttcgctgtctgcagtgggtgcaggaggagctgctggaacttccagccgtcgcgggggggttgatgtcgtacgcctccctggtcacctgcgagggggcgatgaacgctctatcccgcgaagggtgccggcacttcgaggccttcgaccaggcggatgaagaatttgagcgagatatctataaggtcgaagaccccgttgtgaaggaatccgccggggccctttatgaccggatgtggggtctgtacggtcgtgaggtggtcagggagcgggccgagactgcgagggctcagcgagcgcggcgagcgggtggacgacttcggggctctgaacagcgcgctgccagacccggagccgaccctcgcggaggctgtgactggggtcgccctggagccaaccccggagaccgcagcgatcgcgacggctgcccccacatccgctgtggccggcgaagacctgcccccgaaggcacccctgatgcccccgcagctgctgtgccgagtgctgaagatcccgcggcggtggcggcggagccaacggcggaggctcccgcagcgtcagggccttcgcaggttcaagattttgggcctgcgcacgcaaccgctactactgagtttttggcggcttcgaccgcggaaggtgggaatgaatatggtgggtctgtatctgagttttttgattttactgactctgggagctcggttgagtggactgaggagtcgtcggaggaggacttggattattttgcggccttggacgtggctgcggcggaggcttcgctacacgccgcggacgcgccagacgtgccaggtcctagcaccgggcgccggcgacgaagggcggttgcaaaacgtagggttagcgcggaggagggggctcggcttcgtgtgagtagggctggtcgtcaggaattgttgtctttgccggccgctgcgagtacaggggaaagggaactgcgaagtctttttgcgggtgaggagcttaggataatgttatttaattatagagagatgggacttattcctaaggttgagccgatgtag

SEQ ID NO: 11050 - DNA, 123 bp, Zea mays
  Peptide Sequence Number=SeqID_54425
atggcacggctggttgggttggccacttcgagcttttcgcttgccatgaacatgaagcttgcaccggacaggacgaacaagttcatggagatcatcagcgtggttcaggcgcatcaacgctga

SEQ ID NO: 11051 - DNA, 915 bp, Zea mays
  Peptide Sequence Number=SeqID_54426
atgggtgtgacattgacctcatcgtttctttttcatactgaactgcgaccacaagatggtaaggaggctgaaatgcaaattgggttcccgacggatgtaaaacacgtggcacatattggttgggatggtcctggctccacgaacaacaacaacaataacaacagcaacaacaatagtggcggagcacctagctggatgaaggattaccactcggcaccgcttgactcgtcctcttttaggagtgagagtgggggcacggctgctgcaaatccctgggcttctcaaggttgtcttcgccactcacaaatatatacagctcttgctggtcttcgatcttcatcctcctcttgttgcaaacctattaatcaatgtggaagttacatttatgctagcaatgatgtcgccttgaataaaaatactatgagatcattaatgcttttattgtgtgcacaaacacatggacaccctcgtctatgcctgatgacagagatagtcatggatggagcaagcgtcggagaaacctccttcagggacacgaaaagcgaggcaggcgtcgacgtcggcgggggcgactccccaccgtcccccgccacccgccggtcgagacggcaccgctctcggggctccggcacctcatccatggacgccaccggcggcgagggcgaggagaagactaaggagaagagcaagaagggcacccgaaagaaccgcaagaagcaggacaagtcggccggcgacgacgcctcgggcacatgccaggacctccccgccgttcccaagaagtccaaccgccggaaaaacaagggaagctccgaggggagcggtagcgccgcggccaaggacaccaccgcggccgcgccggaggaggtggcggcgtcggcgtcggcgaccgcacccgccgtggacgacgactag

SEQ ID NO: 11052 - DNA, 171 bp, Zea mays
  Peptide Sequence Number=SeqID_54427
atgaccctcaacggtgttgggagctacagtctgattgaggccaaagattttatgtttgttgaatcgaccatcaggacaaaaaatatggccacaacattcttcatcgctgaagtagaagtgcatgaggatgcatcggctacgaatcaagctgattcatcagaactaagatag

SEQ ID NO: 11053 - DNA, 216 bp, Zea mays
  Peptide Sequence Number=SeqID_54428
atggggctcggtgaagaccggagccctaggttccgcatgtgtgggatccggacccccaggagcgctcggggaaggggtccaatgcacgatgaagtcagccaggacctggctcttgacagcgtggcgaggctagaagtccagttggaactcagcaagctccacggcccacttggcgatgttgcctgtggtgttagagttgtggagaatagcccttaa

SEQ ID NO: 11054 - DNA, 765 bp, Zea mays
  Peptide Sequence Number=SeqID_54429
atgaacaacagtgtaatcgcgctcgccggagttcgtgaacccgccggagcacgtggatcgggagccgccgacgacctccgccgcctgcgctcgtggccagggcagctccgacaacctctgacaccgacccgcacaccgacccagggatcgcgggttaggtttaggttaagtccagggggttttgtgcaagatatgccgcgtacgaggaaatctgcacgcaagtccactggacctattggcgtgcctcatcatcagttggcccccagacacgaagggagcagcagcggcagtaacgatccaatcggagacctagaagcccaagtggaacagcttcggacggagctacgtcaccgaaacagggtgtgggcacaggacggtcagcatatcaatgaattggcagctgacgtcagacgcctgcaagacgagcttgctaaatgggatttggtggtcgattgggccgtcaactcatgttcagtttcttgggaccgcgaagctaaggctcgtgctcgtgtgactgagcttagtgcggccctcgataacttgcatgtgtactgcaatactttacatgaggaagtacatgtattgtgtgcccgactacgcccagaggtgcattccgacgctgctttaggagccagaccgtcaggaacagcaaacgaaggacttgacgaggagttggacctttttcagcctcctccttccatgaacctggctgacgaacggtctcctgcggcaggaaatggagcagcaaagggtgatgaagactag

SEQ ID NO: 11055 - DNA, 216 bp, Zea mays
  Peptide Sequence Number=SeqID_54430
atggccatgatggattcaacatcggaaaagatgtacctctgccaggtactagactttgggtttttaaatgataaagctgagaccggactaataccagaaatgccaacacacaatgggagtggagagatggcgagagtagcgtgtaccctccgtggcaagaggctagacggtggtgtatctatgctctcgattggcgtgaacccggtctggtcttaa

SEQ ID NO: 11056 - DNA, 291 bp, Zea mays
  Peptide Sequence Number=SeqID_54431
atgaaggcgtcccggagggagaagaaagtggccaggagggaggaggccgtgacccagagggaggccctcacgatagagtaccaggccaagctgagtgctctggaccagactctggaagcccagtgggcccagcagcaagagctcgagggcaaggccagcgatgtcgccctcaccgacgaaaaccttagggcgaaggagcagtccttggataggcgggagacggacctcgccaggcggcgccgggacccccaggcgatggaggccaccaggaaggcccttgaagatctctag

SEQ ID NO: 11057 - DNA, 252 bp, Zea mays
  Peptide Sequence Number=SeqID_54432
atgaagctacaaaaaagtcgttcccaagggagcgtagcaagggaaggtgtttatcgccttcagctcaaaagggacaagtttcgtccacatcaaagcagttcatacatggatggaaagggctcttttgcagcagattcatcacttcatcattacttattaagcttcggcttactgatcttcggcctcgtcatcctatacaaaacaaagcggtataaggaaagtgcaaatttcaaggagaaggtaaagcagtag

SEQ ID NO: 11058 - DNA, 180 bp, Zea mays
  Peptide Sequence Number=SeqID_54433
atggcgggcggaaatacgctcgccggagctaaggaacggtggctggccgatgagggtgagtgcggggcgaagagaggaagtaatggctcttggtgtggctttttaagagaaaccctaggtgacactggggtgtcacagaggaagaggcggggttggaggatgaggaagaggcaacaatag

SEQ ID NO: 11059 - DNA, 708 bp, Zea mays
  Peptide Sequence Number=SeqID_54434
atggccaaacttgccttctgtcgggtggtgcaccaccggacagtcactatagttgtccggtgcgcgatctccttccatatctggcgcatccgaccgttggtcctcggggtcggttggcgcatcagactctgtccggtgcacaccggacagtccggtgtgcccaaccgaccgttgctgtgggccacgcgtcgcccgcagattgcgcggccgaccgttggcgctggcgaccgtttgctcactggacagtccggtgcaccaccgtacagtccgatggtccataccattcaaaccactcggatcaacaccaactacatccctccgccacgacaagttcctgtctacctagtggtagttgaggaaatccctgtggatctccctcgcattcaagtggagaacagagtcattttggaggacaattcggaggagtttctgcctacgcccaccccgttggtagaatcactagccttcgcagccggatggtcagcttcagcactgccaacaccagtagtccaagccccttctcccggatgcgacgacccagacaactctggtgacgatgatgaagacaacaaagaagaagaagaagatgaggaaaaccccaacgaggaagccaacgaagatcagcaggaccactacgtggggttatggcctgtcattgaacattacacctcaatgttcgagacagggcactttcctaacctgctgtag

SEQ ID NO: 11060 - DNA, 297 bp, Zea mays
  Peptide Sequence Number=SeqID_54435
atggccgaagtaggtcggtccacgtgcacaggcgggcgagctcgtcggaggcgaggacttcggcctatccagggcggtatagttcaattgaacgggtcagagagcttcacccgaggtcagggaagacaaaggcacgaggaattggaaaatggctcaccagatagctcggttgacgcgcggtggcaggtgatcgaagtccgacgagggcgattctgcttctccgttgaggcaatgcctcggctcaagcttggagaagcttcacagggtcttggggaagctatccaagggcttggttga

SEQ ID NO: 11061 - DNA, 1578 bp, Zea mays
  Peptide Sequence Number=SeqID_54436
atgccgtcctcttcctcttctgctgccgatacaccgccggccggtgcatcgtccgaggagacgctgagcaatgtggcggcggaggagttgcgcaccggcgacatagtggagtttggcgtgtcgcagatgtcctcggtccgtgtgcaagacatgcaccagcttgggtattttggcggcggagtggcacgtgtcctgggggcagaggagaaaaggaaaatcggaaataagattgctcaatttggatcttgcacatttacgccgaagaccggcaagacttcgatggaagtcgttgagttggttccctgcgcccgcaataaatggggcaactggtgggaattttggttctacgttgccgaaggcacagtcgaagaccatccggggatccccgtggctgtcatgtgttcgcattattactcagcgtacccgcagtttgaggtagcggaggaggatgaagacgaaggggccctgcggtgcgcgacccacatgagtagcggatgcgatctggttgaggagtttgtcgggtatggggtatggcccttggcgcgtggctgggcgctgggcgaagtatgctctcgccagatgccttcccgtggcgggatgctggtgcggagtcctgccttcgcactggatttgcatggccgagatcccgccgcattcgtgcgtgaggcggaggatggggcgggatttatgtcctttgcctccctcgtcacctgcgaagtggcgttgaacgcgctgtcccgcgaggggtgcagtcactatgaggtcttcgaccaatctgatgaagattttgggcgcgagatttataaagtcgaagaccctgtggtgaaggactccgcgggggccctctttgaccggatgtggggcccctacgttcgggaggtggtcagggagcggtctgaccgggcgagggatcagatggcgcgtgccgaggacgtggaggactttggagccctgaacagcgtgcagcccgaagcggaggccaacccggttgtggccgaggctgaagtcgacccggcaccaccctcggaaaccggtgaaggctcccacgctgcccctgcggctgctgtgtctggtggaggctcgtcgccagccactgtgccgatggtggttcaggattttgggcctacgcacgcaaccgatactgctaattttgttgcggtttcgaccgtggtcgctggaaatgaattggatgagtctgcgtttaagttttctgattttgatgactctgggagtttggttgagtggacggaagagtcttcggatgaggacttgaattactttgcggccttggatgtggctgcggcggaggcttctccgcatgttacggatgctgaagttttgcctggtctgagtgctgggcgtaggcggcgaagggcggtggcgaagcgtagagtgagtgaagtggatggcggtcggcttcgtgtgggtagggctggcaagcgggaattgttgtcctcgccggttggggcgagtgtaggtgagggggaattgcgaagtctttttgagggtgaggagcttaggataatgctatgtaactatagggagatgggaatcattccgaaggttgaaccaatgtaa

SEQ ID NO: 11062 - DNA, 1053 bp, Zea mays
  Peptide Sequence Number=SeqID_54437
atgcaaatccagtgcgaaggcaggactccgcaccagcatcccgccacgggaaggcatctggcgagagcatacttcgcccagcgcccagccacgcgccaagggccataccccatacccgacaaactcctcaaccagatcgcatccgctactcatgtgggtcgcgcaccgcagggccccttcgtcttcatcctcctccgctacctcaaactgcggggaaccaactcaacgacttccatcgaagtcttgccggtcttcggcacaataatacttcgcgaagacttcgaccgagggctgctcgccgtacgaagtcgttgcccagacatattttgccagggccaccacgacattcggtgtcagctagtggacctggacgtcgaatctacgcagaacttctcccacaaatcgatgcgcgggcagacgaacgccagcggagaaaaaagcctcgaagacgaccaactcgccttccggctaggggacctcctctgcccccaggacacgtgccactccgccgccaaaatacccaagctggtgcatgtcttgcacacggaccgaggacatctgcgacacgccaaactccactatgtcgccggtgcgcaactcctccgccgccacattgctcagcgtctcctcggacgatgcaccggccggcggtgtatcggcagcagaagaggaagaggacggcatggctacgtaccatcggcggcggcgggtggtctgcttcacatgagccagatctccgacgagcaagagcaaggagggcagacgagcagcgagcagtttgagaaggaacttaggcgtctccaccatctagcgacgccttcggcaccagatgacttggtcgaactggtccctcggagtgcaaatgttggggcgaaggcgaacacactacccttcgctcgatgccttcgccagtctcgctgcgccaatggagacgacgaccggcagtcttcgctcttcatccggcacgccgaaggacgaagacctatggtgaggtcaccccatcccgcggcgtcgcccaacactggagcccacgtgcaatccggcccgtcataa

SEQ ID NO: 11063 - DNA, 153 bp, Zea mays
  Peptide Sequence Number=SeqID_54438
atgggtttggaaaccctcagtacggagtgtactttcgcaagtcttacccgtctaaggagaaagactctcaaggatatgctggcttttgggaatcaagaggtactctttttggatgttgaacccatcatggccatgatggattcatcatcataa

SEQ ID NO: 11064 - DNA, 309 bp, Zea mays
  Peptide Sequence Number=SeqID_54439
atggctgcacctgggcagcgttattgtgagagtgaaagtggacgtgctgctactcccctcattcccaacatgtatcaagcgtacgacggagaatcgtcagatgtggagtccttggacaatgatgacgacccgatgtctggacattggatgggcatggtctcctcggatgacaagaacgacgacgacggcagcagtgactacggcagcagtgacgaggacagcgagggcagtggcgacgatgacggcgatgatgatggcggggcaagccaatgtgatgagatgcctcccagcaagcgtcgtcggctgtag

SEQ ID NO: 11065 - DNA, 345 bp, Zea mays
  Peptide Sequence Number=SeqID_54440
atggaccctgcggatgccatcacagcgcggctcaaggcacgtacactagcggagcggctggcaacagcgcggctcatgcatcgccgccacctcgagctccggcgccagtcgaggctcaatcatcaagacgtcgtatgccgtattttcgtgtgcgcctcaagagttctctcgaagcgtcgccgccaccgtcaacgcgccattatgggctcctcggcttcgacgaatgcacgtgaggttgtctccgcgcccgtgcatctggagccggtagcgccagtcatcatcctctccgacaatgaagatggggagatcgattggacggcactgatggacgacgacgacgagtag

SEQ ID NO: 11066 - DNA, 522 bp, Zea mays
  Peptide Sequence Number=SeqID_54441
atggatgggatgttttcaaaaataaaacttgatggtggatccatcatggccatgatgggttcaacgtcggaaaagatgtacctctgccagacggagctacgtcaccgaaacagggtgtgggcacaagacggtcagcatataaatgagttggcagctgacgtcatacgccttcaagacgagcttgctgaacgggatttggcggtcgattggaccgtcaactcacgttcggttgcttgggaccatgaagccaaagctcatgctcgtgtggcagagcttagtgcggccctcgacaacttgcaggtgtactgcaatactttacatgaggaagtacatgtactgtattcgcgactgcacccggacgtgcctgccgaccctgttgcaatgggagtcggtccatcagggacagtaggtgaaggaactgatggggagctagacctttttaggcctcctccttccatgaacctggctgacaatcggtctcccacgacaggaaatgaagaaaccaaggacgacgaagactag

SEQ ID NO: 11067 - DNA, 450 bp, Zea mays
  Peptide Sequence Number=SeqID_54442
atgaccgggaaaaagaccacgacttcctctgacggcggcactccaaagaaagccaaggtggtggtggaggatgaggaagaggcggggttggaggatgaggaagaggcgactgtgacactatccgtggagaaggacgcgctggagtgcgacatcggctgcctacccttccagtccgaagttttcatggcaagtcagattaccatgcatgtatatatacagtacatattgatcggtaggctccagcatgatgctctgctctgtgtaaaatcagtgcaagaacgggcattctggatgtgcaaagtgctgcatccgcacggacggaaaaactacatgcttcggtttgtcggtgcttttcttctcattgttagaaatgatctgttcagcatagaagacctgtgcaacacgattagcaaggatccatgggtcatctttgtaacctaccttacttaa

SEQ ID NO: 11068 - DNA, 273 bp, Zea mays
  Peptide Sequence Number=SeqID_54443
atgccgaagttgtatccgtgggtgcagagaatcaaggtcgaagaaggattcgactttcaagagcccactacgaagctaaaattttatcaccaagtaaagggtaaagtgcttaaccctagatcaggtttatggatatatgggaagcccaaatatgtgaaaacttcaaaagacatgagaaatgatcataagatatcacatttaatggactttggtggcaccaaaaccctaaatgtgcctaaaaccgtagaaacaaaccctagaaacctaaattga

SEQ ID NO: 11069 - DNA, 951 bp, Zea mays
  Peptide Sequence Number=SeqID_54444
atggctcccaatatcccaagcctagatctaatcttagtcgtctatcaccaatcctatggtcgcgagcccatcttcctcactcaatcaccagggcggcggcgcctgaccgcaacatggtggagccacgccagtgagcggtggtctagtccactcaagacctattccctgcccaaaaaggtgtcacgcgctactaatcctacgacgaacttgaccgtgtggttcttaccggcaattgatgtcgcgacaacccctacctccacgtggtggcagaagacagactacagttgtccacattgcaaccactgctcaggagaagatgaagtcatggtggaggatctccaggagttccaagattatgatgagttctatgcgtggacacacagcacagaagtcagtcattcctttcttgccttctcgtcttgcggagcgtccgcttcgtcgcccagtgactggccagtccaaccacttggagaggttgcaccagcgcctgcacgaggtgcaagagcgtcgacgccaggacctagagcagtagggctcttcctccttgccttagcaggaggtagagtctgtgaggcgttgctctcctgtgcccccactggaggcgtcccctgcaccaccactgggcgccctagccgttggagtagctgctggaggaccaaagaccctaacaacggagacaatgacgacagcagtttgagccacaacaccgacctcttagaggagcaggagccggagggatgggtcgtccaacccatcactcgtgacgccgctcgtgggtgtcacttccacgatgcgcttgacaccttgttgtgccaggcacttgaccagcataattggtccatcgagtatcgctgtgtggtctaccagcacagtcgcgaggtatacccggaccgctgggaggcaacttgcttggtgcgcggaggtctgatcggagcattattctatctctga

SEQ ID NO: 11070 - DNA, 264 bp, Zea mays
  Peptide Sequence Number=SeqID_54445
atggcagtccatgaatcaagagatcacatgctgcaaggtttgttagagcagcaggtggaaaagaacaaagtcatatatgaggatgtctccatggagagaggagcttttctggtgcagcaagccatggggatatcgaccttaaaacaacaagatctagtggagaagggcatcttcagcagttatgaggacgtcgagaagctgttgcaggcactgtccaaggaggaggaggaggccgtgcgggcgtgcctggtcaccttctactag

SEQ ID NO: 11071 - DNA, 327 bp, Zea mays
  Peptide Sequence Number=SeqID_54446
atggccgccgccatggccgcccgcctggccgcccgctcggccgcccgcctggccgcgcgccccggccgcccgctcggccgcccgcctggccgcgcccccgaccgcccgcctgacccctggccgcgccccctggccgctcggccggctcagccgccccggctcggccgcccctgcgcgccctgcccccggccgagacattgtggtacaggtggttatgagattgatggttatgattatgctatggtgctgcattgcaaccactgctcaggcgaagatgaagctgtggaaggagacttccaggagttccaagactacgacgagttctag

SEQ ID NO: 11072 - DNA, 522 bp, Zea mays
  Peptide Sequence Number=SeqID_54447
atggctgcctcggtcgtgactgcgcccttcgccgtcgtcctcatccacctccacggtctagggtttgagcaggaacagatgaaggagcacgctctgcatttgcttgtactctcccacgtcttctcggtgccgtctctgaagacggtctgcgtcgaccaactcgagaggggcttcctcgctcctgacaacgtggtagacatgctgcagcttgccaggctgtgtgacgcgccccgcctcgcgctcgcctgtgtccggatggtcatcggggatttcaagaccatctctctgacggatgggtggaaagtgatgagacgagccaatccaagtatggaacgtctgaactctgaattgatgcagagaaggcaggaaagagctaaaaagatggaagaaaagaaagtgtatctgcaactgtacaaagcaatggaggttacgcctaatctttatggcaatttggtggctaacatggctgcaggtattgttggagggatgggcatcatgcctggaggtagggattgcagctaa

SEQ ID NO: 11073 - DNA, 480 bp, Zea mays
  Peptide Sequence Number=SeqID_54448
atgggcaagagtaacaaacgcaagcgtgagccgactcctccgtcggaggacttcggcgactcggaatactcggaggaggagttctcctccgagtccgaggggtctccggctcccgtctctcccctggcgtcgtctgatgattcagacgactcccaggggattgccgcggaagtctggacgtacatccgggccgtcgagcgctccgggctcgagggctcggatgagtcggagttctcctcagacgaggaggactcggacggcggcgaggacgaggatgacgacgacgacgacgacggtggcgacggcgacgatgacggcagcggcatcggcgggggcagcggcggcaagggcagcaccagaggcggcagcagcacgggcagcaccagaggcggcagcagcaagggcagcaccaggggcggcggcggcaacggcagcaccaggggcggcggcggtggcagcagcagcaaggccagtggctaa

SEQ ID NO: 11074 - DNA, 72 bp, Zea mays
  Peptide Sequence Number=SeqID_54449
atggctcaaaaggatatgtgggctgccagctgcattaggtttccacagaagggaatcctagcccaggcacag

SEQ ID NO: 11075 - DNA, 471 bp, Zea mays
  Peptide Sequence Number=SeqID_54450
atggtggtcggaggaggtcgctccacgcgcgcagtcaggggagctcgtcggcggcgaggaatccggcctaaccagggcatgatagatcaattaaatgggccagggagcttcaccagagatcaaggaagatgtgagcgtgaggaatttgagaatggctcaccagatcgctcggtatacgcgcagccgcgggcgaccgaagtacggcgaaggcgatcttgggtctccggtgaggttctgttgggtccaagagcttggcttgcaggtttcgctgactggatcaagagatatggagggttgaagttgggtttgtctcactaccaaacacagagagaagatcccgggtttgacgagtccagagcacgtgtcccgatgccatcttctgagacgcttctcaataagaatggcattagcctagtgagaatcgacctttggacacatcagcgaatcatgaagagcgagatctatgattaa

SEQ ID NO: 11076 - DNA, 345 bp, Zea mays
  Peptide Sequence Number=SeqID_54451
atggcgccagggaagctgtccacggagggtttaggggaaagggaagggagagcgcaaccgttatatggtccatggaggtgcccagctagcaacggcgtcaacggaaaaggggagaggagctcgctggggaactcgcgatttctgttgaggaggaagagcgagctgcaccagcggtcccacgcgccagagaaacaccgcgcaggcgcgggcgcaagtggaatcaggctgttccactgggatgtgggtcccacaggcagcgcgcggtgcatgtctggctctggccgcgcgaaggtgtactgggccgagttccagcaggttgcattgagtatgggcaaaaacacatag

SEQ ID NO: 11077 - DNA, 375 bp, Zea mays
  Peptide Sequence Number=SeqID_54452
atggccgattctaaagatcacaccgatatctccccagacaatatcctaaagctggctattgaaagtctgacggccgatgagcaacagcaatacgaggactacatgcgtcaagcgaaggagaaatttttgtcacaatacatggtgaatcgccaccagaaacttgtcaaacatggagagaccgacgtcgcatctcttctatattctcttcaagtccccaacataagtaaacccgacacatccaatctattaaacaatggggatttgcagcctcagccattatatggtatgccgatgaattcatattcagggcaagtaccatcaccgccgtccctgcttggcagatcggcgcccctggacacggtcgaacccgtctga

SEQ ID NO: 11078 - DNA, 333 bp, Zea mays
  Peptide Sequence Number=SeqID_54453
atggagagcaggactaggcaaaccatcctagggggcttactgggagttgaggcggtgacactaccggtcgatagtgaactgcagatccagggcagagctcaacttcggcgagagattcccaacaccgcagctgtcctcggcgcgattattcccgcccacgactttgacaaacaccgtcaaagtataaatgatcttgatagggtacttggtataagtcagatcatcttgaacactaatctcctccataggcagttgctcttctggtaccctgaggcacttcttcaattgggatacatggaagacatcatgtacatccacaagatggtcgggtag

SEQ ID NO: 11079 - DNA, 870 bp, Zea mays
  Peptide Sequence Number=SeqID_54454
atgacttcccacggatcctcgaacgaagggaatgcactatcccacactgacgggcttgcacgagagggctttccccgtattttgtgggaggtacttcagggggctggttacacgacgcctcctcagtacgcggtgcagcagtttgagaagcaccgagtgccccgctgtagggtgaggatgagcctggagcctcatcccctacagccaggctggcgttcactggactctaagtcttttggataccgggctgaggatacgatcgaggcgattgcccttcacggactgaccactttctgcggattccaccccttggagctgtccactcatcccattggcttgttcccccctgagaaggaggacggcccaatgtggaaggaccgagtggagcatgccaaggacatctgggctatctacccaggtcagactgctcacttgacagtgtggtgcatgaatgccctgtaccgtctgcaagtgatgcgtggtgaggcaatgtcccatctgatggcattgttggaggcaactaagatcaccctggataacagagaggagcttgtggttgacttgtccactaagatggtggagaaggacttacaggtggaacaactgtcaaatgagatccaagagcttgaggagttagtagggaccagggagaacaccatcgaggttctcgaggatcagcttatcaacactcagcaacagcttgcggaggctaacgagcacctagatatgcatcaccaggagatccaggacatggaggccaacggggatgtcgacattgagggaggagaggaacctgcctccagcttggacactgctggctcagggagaccaccttcccccaagtcgagtgttgcctcgttcgctcactag

SEQ ID NO: 11080 - DNA, 471 bp, Zea mays
  Peptide Sequence Number=SeqID_54455
atggaccagaagggctggtccgcggtggtcgggttcgggtggctcttggcgggcggtggagctctctgttttcaagcggttttccggtggccgagcgcaggcaagagtgagggggttacggtaaggatgtctgagggaccaacgacttatctaggcatcgacacggggaaggcgcgtgggtggactgaccgtgcacgtgcgcgcgggttgggcgagctctggcctgccgaccatggtcgaacacgtggtggcattgcgtctgcccctgttctagcgagccgccgacgacccccgccgcctgtgctcgtggccagggtagctccaaccacctccgacgccgacccgcacgccgacgtgaccgtcgtgacctccccgacgtcactgaccaccccgccggagctctactgctgccgggggttttgtgcaaagtcagtgacccatgccaatagtagaccgaggactgttttgtga

SEQ ID NO: 11081 - DNA, 1060 bp, Zea mays
  Peptide Sequence Number=SeqID_54456
agcacgctcgcgcgcgcccccgcatgcccagcgccgcgcccgagccaaaccagcgccgtggcccgcgcccgagcttataaagccctcccaggcttcgactacacccttccgcgcaccctccaaacctcaccggagttaactcgtcgccgtttgcccgtgcgtagcgagtccgctgccgcccaatccctctgtcaccatagacccgccagtagagccattcccaaccccgtccagccctcggagaaggctgtgcacacctccgtgaggctccccgagcaaggaatcggagtttacttcgccggagaagccagtccacgctcgccggagctctcgcccccgctggagtacgtggaccggggggccggatacacgacaccccctcaatatgcggtgcagcagttcgagaagcaccgggtgccccgctgtagggtgaggatgaccttggagcctcatcccctgcagccaggctggcgctctttggactccgagtccttcgggtaccgagcagaggacacgctcgaggcgatcgctctgcatggattgactactttctgcggattccatcctttggagctggctacccaccccattagcttgttccccgctgagagggaggacgacccaatgtggaaggatcgggtggagcatgccaaggatatctgggccatctacccaggacagaccgcgcacttgaccgtacgatgcatgaatgctctgtaccgtctgcaggtgatgcgcagtgaggcgatgtcccacctgatggcattgttggaggcaacaaggatcacattggacaacagagaggaactcgtggttgacttgtctcaagaaatggtggagaaagacttgcaggtggagcagctatccactgatattcaggagttggaggagctggtaggcactagggagaacaccatcgaggttctagaggatcagctccttaacactcagcagcagcttgctgaggctaacgagcacctggacatgcaccaccaggagatccaggatcaggaggccaacgaggacgtcgacatcgagggaggagatgagcctgcctcca

SEQ ID NO: 11082 - DNA, 174 bp, Zea mays
  Peptide Sequence Number=SeqID_54457
atgccgttaatggggctcggtgtatgtggcttgctctgccaaggtggtgacgaggatgatggttttggttatgactatggtaatggtggttgtccgcgttgcaaccactgctcaggtgaagatgaagtcgtggaggaggacttccaggagttccaagagtacgatgagttctag

SEQ ID NO: 11083 - DNA, 192 bp, Zea mays
  Peptide Sequence Number=SeqID_54458
atgctggtagactacacaacggtactcaatagaccaagtgtgtcgggcgaaggctcgatgcagcaaggggaaggtgcctcccagactccacctcctgctgaggcgagggagaagactgttgttgctcttgctccaggcatcggcgctcctgctcctcgtgcaggcgatgatgcagtctttcaaggtggctag

SEQ ID NO: 11084 - DNA, 225 bp, Zea mays
  Peptide Sequence Number=SeqID_54459
atggcggcctcgcgccccggcggccgcgcgtcccgacggccgtgcacccaggcggccctgccccatgcccccgataacggccagttggcggagtccgaaggagttacaggtgaagaccctgagcagcagtcggttggtgaaggcaagtgtcccttgacccatctatgtcctactaattcttataatttattccccgcatttacacagtttatacctaaggattga

SEQ ID NO: 11085 - DNA, 630 bp, Zea mays
  Peptide Sequence Number=SeqID_54460
atgacaaaggaggccagttccagaggccacagcacagctcacagtcttcaggacagcagcaaagctccttcagaccaccagctccacggggcagaggcggtaggggcttcggaggcagatatggggatcagcccagaaaaatctattgcttgttctgtggcgaagataagggccacacgacaagaacatgccagattaccattcaaaagcaaaaagagatcgccgaagcagaagcccgacagaatcagccgaagcaggtcctacatactgcttcgtgccactctccctacataccagaatatgtgggcaaccaacctgcagcttctgttgcttcggcaagccattcacaagcttcctggccccagctcccaccgccaccaccattgcaacctagttacacccgaagccaatagccagaagggcgccagcacccccaacagcaacgtgacttcagggaggagtccgaagctcatttacgaagctcaaaagtcgttcctaagggaatgcaaagccaacataaacgaagctacaaaagtcgttcctatgggagcacagcttttgttacagaagaagcttaatgctcattccattgccccatacgtcaagcatttcacaatattattacaatag

SEQ ID NO: 11086 - DNA, 162 bp, Zea mays
  Peptide Sequence Number=SeqID_54461
atggggctcagtgtatgcggctcgctctgccaaggtggtgacgaggatgatggttttggttatgactatggtaatggttgtccgcgttgcaaccactgctcaggtgaagatgaagtcgtggaggaggacttccaggagttccaagagtacgatgagttctag

SEQ ID NO: 11087 - DNA, 552 bp, Zea mays
  Peptide Sequence Number=SeqID_54462
atgcgcgtgcgcgccggtgccacacaccccgcacgcgcgcgtacgtcgtcggtgctgctggctgcctgctctctgctcctcctccgtccgggtctcctcacctacctgctcatcattcgcaatgccagtgaaccgcaccggacggcgccgcgcagggcttgggtggatagtagtttcattggcacaggtcgtcgaaggcaagtaaagaaagtgttgggcaacatatgtcgtatgaaatggcctggattggtgatagaggatggtaaggaggtccctgtcacaagatgggatcaatatgcccttgcaataaatgtgcaacatgggaatgcacaagctgtagtttggcacgacttttgggtgattagtcaagccatgtttggtagtgaagggcgacgtccagagagtaagaacgaggcgacacagtatggactcgatatgactaagcaacaatatcttgagcattcgattccatggatagctgccaatgatgctgcttggcatgcgttatgtcgttacagggcttcggctgaattcaaggcgaagtctgtgtga

SEQ ID NO: 11088 - DNA, 258 bp, Zea mays
  Peptide Sequence Number=SeqID_54463
atgagtaagaagtgcaaatcaaagaacaagaaacagtgccaagaaaagaagaaaggagttggagaagagtttgctgtgtacagccaaaaccagctcgggtctggcacaccggactgtccggtggtgcaccagacagtattcggtgccctaggctgctcgacgggtgagaggctccaaattgtggagattcctcgcaaacgggaagaatactcaaaaggaaaagaccgtggtattcaagttgatcattgcatcacttga

SEQ ID NO: 11089 - DNA, 798 bp, Zea mays
  Peptide Sequence Number=SeqID_54464
atggcggcggcaggcgggcggaagcagcggtcaagtcgtctgcaggctcacgtcccctcctgggacagcgagagagccctctcccacggcgtgaagacgacacactcgacaggcggcacctttggcaggcgaagcaggcgacgcttcacctccgccataatgaccgcgtcaaaaaagggaccgggaaaggggatactccgaaagggatccttctccacgaaggaagcgggccccgagccccctactgatcagaggttcgaaggctggcccctcggaagggttcaacaaccgcctgagagcactcgggctccgagccccctactgatcagaggttcgaaggctggccccttggaagggttcgacagccgcctcagagcactcgggctccgcgcccaccactggttagaggctggccccgaagggtttgacagccgcctcagagcacacagagcgagggatgactctgggtacgttcgatacacaaccaaggctcgggctacgctcccgaggccaagcctccgctcaaaggacacgatcccgcctcgcccgagccctacctcgggcaaagacgaactccgcctcgcccgaactcagcctcgacatcggaagatgaactccgcctcgcccgacccccgggcccagactcgacctcgacctcggaggagcctccgcctcgcccgacctcgggctcggacccgccacgtcatagggaaggccatcattaccctacccctagctagctcaggctacggggaacaagaccggcgtcccatctggctcgccccggtaaacaagtaa

SEQ ID NO: 11090 - DNA, 345 bp, Zea mays
  Peptide Sequence Number=SeqID_54465
atggtcaagtgggcagtactttgctccagtttcctgatcatgcagaactgcatgctgatggctgaaatcctggaggccgagctcgcggccaagaagaccgagctccagaggtgcagggacaccgcagagcgggtggaagccgagaacgggtggctgtgcgccgagctcgacgctgccgcgctggagttcacgagcaggaagcagaggatcgtcgagctggagaaggagatggcggagctgaggacacggcagcggacgccgacaactgctcctcgtccgcttcggcgccaagcgagcgtctcgagagctccagcgctgcgccaaagccaaaccgcgcgagtttag

SEQ ID NO: 11091 - DNA, 531 bp, Zea mays
  Peptide Sequence Number=SeqID_54466
atggtggggagaagcaagccgggctgcggcctctgccccgccctcagcttcaaggatcttcatcatccttgctggggcggggggcgagctgagccggagctctacctcccgtacgggccggcgggccacctcttccttcagcattcagaggagagggctctcaccagcctagcggagggggcagacttcgacaacgcggggccgttaaggaaccctcggctgctctgcgatgagccggatccggaggtagcggtgtcagcatggacagaggcggagtcggctcgaaaaggggcttcgtcggcccaggagcaggcgacttcccaggccgaggaggtgcagcagcggaggccggagcctggccgggtcatccgtgagcgagaccatcctcggagttatgctgccgaggccatgagccgggctgatgtcctcgggggacagccggccgaggttacggagcagccggtcgaggtgtttgcctgggccaggaccctagaggagaccctggcggcgatggcccaggcgcggtgctga

SEQ ID NO: 11092 - DNA, 1224 bp, Zea mays
  Peptide Sequence Number=SeqID_54467
atgccgcgccttctcgactgcggaaccggtgccgcaactcgaggcaaccccgcgcatggaccaacagtgccagccgagcacgtcggtcacgggtcagtcagccgcgagagaaggcgcgacggtcgatatggccaaaagtgggccgatagtcgtggcggcagcaggcgagcggaagcggcggtcaaaccatctgcaggctcacgtcccctcctggagcagcaggggagccctctcccaaggcgtgaagacgacacgcccatgttccgtccctcgaacggcttgtgcaacgactgcctagcgaaccacccgtcccgtcgcattaacttcgcggcagggcaggcgacacctttggcaggcgaagcgggggttcgaaggctagcgcctcggaagggttcgacagccgccccagagcactccggcttcaggctcagtactgatcagaggttcgaaggctggcccctcggaagggttcgacagccgcctcagaccacttgggctccgcgccccactactgatcaggggttcgaaggctggccccccaaagggttcgacaaccgccctagaacacgcagagcgagggatgactctgggtacgtccgatacatggccaaggctcgggctacgctcccgaggctcggggctgctctcgcaaacccagctctggccaaaccgttgacagcgtcaacataccagcccgagaactcggaacctgaccatgcacccgggctacgaggcctgatgggcgcaattcaggtcaaggctccgtccactcaagggacacgatctcgcctcgcccgagcccagcctcgggcaggaacagaaaacagcgccgcttgccccgctccgattgctgtgccactcgccagggtgaggctgacagcagccgagtccagcctcaggcgccataggaagctccgcctcgcccgaccccagggctcggcccccgccttggcctcgaaagacgggctcagcctcaacctcgacctcagaagacggtctccgcctcgcccgaccctagggctcagcctcgacctcgacctcggaggagtcaccgcctcacccgaccttgggctcgggctgaccacacaacaggggggggaccccccggggtcgaaacgccgacagataacacctgctcagaaaaacctaaaccctatcgggaatggagacgctctcggcgaagcaagagggcacggtggacgtgaagctgaagccgacttctaa

SEQ ID NO: 11093 - DNA, 210 bp, Zea mays
  Peptide Sequence Number=SeqID_54468
atgaccgcgtcaaaaaagggatcgggaaaggggataccccgaaaaggatccttccccgtgaaggaaccaggctccgagcctccctaccgatcagagctgcctcagatcacgtgggccctacacccactactggttagaggttcgaaggccggccccccggaagggttcaacgaccgcctcaggctactcgggctccgcgcccactactga

SEQ ID NO: 11094 - DNA, 156 bp, Zea mays
  Peptide Sequence Number=SeqID_54469
atggcctacattgccccccctgaatacgaggtggacggcctcagggggacagcagccgacaaccggaagccggacagcacgctggacggggacagcagtggcggcggcggccgtctgcgaaacggagcggcggccggcggtagattctgctcctag

SEQ ID NO: 11095 - DNA, 2367 bp, Zea mays
  Peptide Sequence Number=SeqID_54470
atggacagcccactgttccatcgtaaatacaagaattgggaattcgcgtgcgcgtgctcctcctggggtccttttgtgctgctcctcagcatggttggagggcagtcgcgcacctcctctcctctaccactgtcgccccctcctcgccgccattactgctcgctgcgtcctggatctgcgagctcctcactcgccggtggcctgcccctcggcggacagcctcgccagtcgcgcggcctccctgtgctgcacatcgcgcagttgcatgtaaagcaacaccagtcgcgcggaggacctgtgctgcacatcgcgcggagagcccgtcgcggttgcctcggactcgagggagctggcggcgcaaacgtcgtgcggccaaaatcgagatccccaccatccgaatcgagtttcctactgatctgcggctgcgcaggaaggcattctcttttttgccgtaccatggatgcaccggatgttcaacagagcatgggatataaggagtccaggggtgctctgaatcttgcatcttatgggggaagtcatgctcttaaactatcaaaagaggatgtctttctttattcagctaaggttattcctagaaatgagacacgggtaatgaagatgatggatcgtctcactgatcttggcccaaaaattatcatgggtaaagattctggcctgcatacctctaggcatgcctaccgagaggagctggtaataaaaaatggagaaatgcttggtgtatcgcatctaagaaacagaagagttttgtccaatgggtttgtttcattagggaaggaggatcttcagctcatgtatagtgatggtgataaggcttttggtacatccactgatctctgcattgatgagagactaagaatcgcatctgatggcattatttttgtcggcatggagatcttccgacctcagaaggaacatggtttaacgcagactggtttgaaaggaaaatttaagattactacaagatgtctatggcttgataatggaagattgttggacgcactctacaaagcagctcatgctgcattgtcaagctgtcctgtgaattatccacttagtcacatggagaggatggtagctgaaatcttgaggaaaatggtacggaagtatagtgagaagaggcctgatgtcattgcggttgctatggagaacaccacaacaagtttctcaaaacacctcgatgctaaatcatctagaaattttgaaccttcctcagctactagccatctgagcaggagtccagctatgagtcttgaaggcagttataaaacacacccagacaacccagaggtggatgctgaagaaacccttcctgaggccacgagaacaacaccggatgatgcaaccacaagttccaatggtgaagcattcttctcttcagatttacatcagcctaaaacattggagcacttatgggagtcattcaaatctcctatagctgttaaaattgcacggattgtcaatggggggaagaagcaaaatctcggcaagattggcataatgggtaaggactcatcaatccagtcaactcccgctccagctaaatcttcaaaaaagaacaagtggaaacctgaggaaatcaagagcttaatacagatgcatggcgagatgaatgagagatttcagagcgtgaaaggaagaatggtcctgtgggaggagatttccgacaacatgttgaagcaaggaataagtcgtactccggcacagtgcaaatcgctttggacatcgttagttcagaaatacgaggacaggcgggtcaggtcgcgcgggaagatcaggctaggccagtttcagttcgtcgtttgctcgtgcgtgctggcgctggttggccggccggtcaatttgagtttgcccgtcgccttcgtcattccaattcgccagttcacccgtgtggttgtgcggtcgtgcgctgcctcgcctcccgctcagagcttcagagctgtagtgcacgcctcgcctccccttcgttgtccccttacccacccgaggctgcagagacccggccatacccccgcctcgcccccacctgcggctgcagatgcacgtgcttcggcgccgctccacccgcatccgcgacatgggcgggatttccaacccacccacggctgtcgctccacccgcatcggccacgaacgtgagcgagggaagcgcagccaccaaatctccgacactaaccctaggtcctacaaaagccctagatcagcaagcctccgcctcggcgtgccttcacccgagcacgaccgcgtccaggagacccacgactgctacaacagctgcgccgccttcctcttcgacagcatgcgtcggggtccgcctccatcatgctcaccacccacaacgtggatttag

SEQ ID NO: 11096 - DNA, 534 bp, Zea mays
  Peptide Sequence Number=SeqID_54471
atggtcgacccgtgcccgcaaatcccgccgtggccactgcagccgccagttcacccgtgtggttgtgcggtcgtgcgctgcctcgcctcccgctcagagcttcagagctgtagtgcacgcctcgcctcccccttcgttgtccccttacccacccaaggctgcagagacccggccatacccccgcctcgcccccacctccgcgctcctccgacccacctgcggctgcagatgcacgtgcttcggcgccgctccacccgcatccgcgacatgggcggcatctccaacccacccgcggctgccgctccacccgcatcggccacaaaccatgcgtcggggtccgcctccatcatgctcgccacccacaacgtggatttaggtaactggccgagcaagcaatctatgtattgttgtcggcgtttcgacccccggggggtccctggaccgacgagtaaattgtcgtcgcgtgccctagcccagatgggtcggcgcgagacagagcgcgaaggggggaaagccagagggagacaggcgtaa

SEQ ID NO: 11097 - DNA, 1341 bp, Zea mays
  Peptide Sequence Number=SeqID_54472
atgggcgcggagcccggttccttcacagagaaggatccttttcggggtatccccctttcccggcgaagcgtcgtccgcttctcctgccagaggcgccgcctgtcccgccgcagagttaatgcgacggggcgagtgcaactggcgcgctggttgcgcgacgtgtgggcccgggcctccaagccggcgcgtcagaagtcggagaagcgcgtccacctggcgcggttgcatgccgcctgcatggctgcccgcccctcccgcccgttggtctgggcgaaagtggggaatcgcttcctggttgctcccctccgccggcggtcacccaagacggtgacctccagctcctggatggggagaggcaaaccaggctgtgatcccgccccagtatcggggcttctggtggtggcaatcgccctcccgtgctgcgacggagacgtcctccagtcatgccgtggaaggcgaactgttgctgcccagctaggatgcaacattccgtccttcccctcgcattcgcagcgaggacggcagcgaggatctgccggagcgcttgggagcggcctgctctttggctttgatggctggtccgcgtcccttgagcgggaccgcgaacaagagccccccagtggccgcgtccgcccgggaccatggctgctgccacagaggtcactggcgagcctcccgatgatcgtcgccccgcaggcccgaggccgctcgtacccgcggggacggaaccggagttccgtttgtgatggcactttgaacgccagctcctctagcttagttaaagggaccccttggccgctcttcgatgagccgaggccgggggtagcgatatcagtacgaacagaggcggagttggctcgaaaatgggaacctggttggccggagcctagccgggttgcccatcagcgggggtcgacgccggagtcgatcacccgaggcctcgggtcgggctggcgcccttggaagatgcttggccgaggccccaggggtaaccggccgagccgcctgctcgggccggattcccggagaagtccccggaccgtgtcgccgtctgaggctgggtcggaccttgctgaaggcgtcgtcgatgccgagggtgcatctggactttccgtcggtaacagggatgtttgtgtgggcgagagttgcttctcgcggaaggtgatgagtgagaaggtgatgagtgaggatccgcttttcgaagcagtcaaagagcacgaaagaaattctgctaaaaagagatcctttttcgaggaaaaattcgacgcagagggggtctccccccttttagcccccgagggagggtcgggctttgccgaggctaggccgacccttccttga

SEQ ID NO: 11098 - DNA, 363 bp, Zea mays
  Peptide Sequence Number=SeqID_54473
atggaggggattggtggctgcggtggtggggtatcagcgatggcagtggaggggaccagcagcggagatgagcgcaccgccctgccctaccggcccggcatcggcgtgaagtgcggcacctggtgcctcatgcggtcgcagagcggcttactcatgcctgacacgcctttacccgcacacgccggcgtcatggacactgcgttccactcgaggcactgcactcagcggcgcggctcgacggagaggccgaggctgtttccggcaggtggtccgtgggcgcccaaccttttatctttggagatggtgagcggcgactgtgacatggcggcggcagcgggttacggtggcaccgccttgacttag

SEQ ID NO: 11099 - DNA, 168 bp, Zea mays
  Peptide Sequence Number=SeqID_54474
atgccgaactatgcattctttgattgcttaggaatgcaggtggctatgagaatcgatggtgttggttatgactatggtgctggttgtcagcattgcaaccactgctcaggcgaagatgaagctttggaaggagacttccaggagttccaagactacgacgagttctag

SEQ ID NO: 11100 - DNA, 447 bp, Zea mays
  Peptide Sequence Number=SeqID_54475
atgcgcgcaactgcccagcggttacgagcattcctccactttcgcccagaccagcgggtgaaagggcagaccgccatgcaggcggcatgcaaccgcaccaacggggcgcaccctttcgacttcgacgcgtctagcatggaggcccaggcccacacgtcatgtaaccggcacaccggttgctacgtgcaagaaactgcaccgcaactcgcgccactaccgtgcctcctcgactgtggaaccagtaccgcgactcgaggcaaccctgcgcatgacccaacagtgccaaccaggcacatcggtcacggggcaggcggcacctttggcatgcaaagcaggcgacgcttcacctccgccataatgaccgcgtcaaaaaagggaccgggaagggggatacctcgaaagggatccttctccgcaaaggaaacgggccccgagctcccctactga

SEQ ID NO: 11101 - DNA, 393 bp, Zea mays
  Peptide Sequence Number=SeqID_54476
atgtcaaccagccactctcaggattccagggcgcgctccgctataattcaccggactgtccggtgtgccaccgaactgcctggtgagccagcaggcaacggctatccagcgccaatggtcgattgcaaaagtacctgccacggtgaacagtgtgcggcaaagtcagagcagcgaagtcagaggggcaccggactgtccgttgtggcaccggactttccagtgccacaagaggacaaagcctccaacggtcgaccagctcctaaccctaacggttacgtgacgtggcggcacaccggacaaggaacagtgcatgtccggtggtgcaccggactgtccggtgcgcccatcgccagcaacctccccaacggctatggaagtggttgtgggctataa

SEQ ID NO: 11102 - DNA, 441 bp, Zea mays
  Peptide Sequence Number=SeqID_54477
atggacgagggttgcactcaacccctttcaagtgatccaatgatcaacttaaataccacgactttcttccttatagtcttcttcccatttgcgaggaatctccacaatttggagcctctcgcccttacaatattaatcacaaagaacgcacaagagtgtcaaaggttcatctacaactatactaaatcgactgtccggaataccgtagattattccggacaggagaagctttttggaaaaatagactatgcgcggaccgtccgggcccttgcggcggatagtccacgacaccgagttgactttgaccaggaactacaaatcagggacagtccgactaaaccgcggaccgtccagctacaacacgcggaccgtccggctataattcacggaccgtccggctataattcacggacctggttcagcccgaaggtgacaagttga

SEQ ID NO: 11103 - DNA, 291 bp, Zea mays
  Peptide Sequence Number=SeqID_54478
atgagggtcaataacagtaaaagacctgagcataagtcggacgacgttgtggtccgtccatctcgtgctcccatagctcctaatcttgttgaccagggtcttgagcctgttgttagggctggacgttcggtgtgcttcactatagtcccgttgccccctgcagtgcagtcctgtacaggtatagttgtgctcctgctccagtcggttggcggcgatgcacgggcaggcactgggcgacatgctgatggacagttggtcggcggcgatgcgcaggcagcagcatgcaggtga

SEQ ID NO: 11104 - DNA, 238 bp, Zea mays
  Peptide Sequence Number=SeqID_54479
atgtccggtgtaccagaggactccaacgccaacttgccaccttcgggaatttccagaggcactcgcgctataattcaccggactgtccgaaggcaggcgtgcccatactggggcaccggacaaggaacagtagatgtccggtgcaccaccggacacccaggcgggcccacaagtcagaagttccaacggtcagaatccaacggcagtgatgacgtggcgggggcaccggacatgtccg

SEQ ID NO: 11105 - DNA, 93 bp, Zea mays
  Peptide Sequence Number=SeqID_54480
atggcggcctcccctaggtgcgagcggcgtcggatcctagaggcgcgtgcggcgggcgatggctcccttagggctttacgcaaacatttatag

SEQ ID NO: 11106 - DNA, 87 bp, Zea mays
  Peptide Sequence Number=SeqID_54481
atgcgccaaggtgcgccgctgcccaatctcgaccgaaatgctcaacggacatcacatcacgccgtggaagaagggtgtcttttctag

SEQ ID NO: 11107 - DNA, 510 bp, Zea mays
  Peptide Sequence Number=SeqID_54482
atgcaggcggcatgcaaccgcgccaagtggacacgcttctccgacttccaacacgccggcatggaggcccaggcccacgcgtcacgcaaccggcgcgccggatgctgcatgcaggcaactgcaccgccacttgcgccaccgtcgcgcctcttcggttgcggagccaatgccgcgactcgaggcgacccagcgcacgacccagcagcgccagcctggcgcgacggtcaatgcggccggaaggacccgggaagggggataccccgaaaaggatccttccctgtgaaggaaccgggctccgagcccccccctactgatcagaggttcgaaggctggccctccgaggggttcaacagtcgcctcagatcgcgtgggccctacacccactactggtcagaggacgagtgccctagtggccagggtgtcacgctccacaagatcgttacagccataggaggtggtgtatcggttgctaaggcgcagcgtctttggaaggctgtagtcgggccgtga

SEQ ID NO: 11108 - DNA, 1140 bp, Zea mays
  Peptide Sequence Number=SeqID_54483
atggcggcggcaggcgggcggaagcagcggtcaagtcgtatgcaggctcacgtcccctcctgggacagcgagagaaccctctcccacggcgtgaagacgacgcgcccgtgttctgttcctcgaacggctcgcgcacgcacaacggctgccccgagaaccactcgtcctgtcgcattaactctgcggcaggacaggcggcacctttggcaggcgaagcaggcgacgcttcacctccgccatgatgaccgcgtcaaaaaagggaccgggaaaggggatactccgaaagggatccttctccgcgaaggaagcgggccccgagccctcctactgatcagaggttcgaaggctggcccctcggaagggttcgacagtcgcctcagagcactcgggctccgcgcccactattggctggcccccgaagggttcggtagccgcctcagagaacgcagagcgagggatgactctgggtacgtccgatacatggccgaggctcgggctacgctcccgagaatcccaccagagggaggcatcgagccctcggaccctatcaaatgggaccaggaaaatagcgccgcctgcgctgctccgactgctgtgccacctgtcagggtgaggctgacagccgccaagaccggcctcaggcgccataggaagctccgcctcgcccgatcccagggctcggactcaacctcgacctcggacgacggacttcgcctcgcccgacccctgagctcggactcagcctcgacctcggaagacggtctctgcctcgcccgaccccagggctcggactcaaccttgacctcggaagacggactccgcctcgcccgacccctgagctcagactcagcctcgactccggaaggcggtctccgcctcgcccgaccccagggctcagactcaacctcgacctcagacaacggtctccgcctcacccgacccctggggctcagactcaacctcgacctcgggcgacggtctccgcctcgcccgaccccagggctcgggctcaacctcgacctcggaggagtcaccgccagggctcgggctcaacctcgacctcggaggagtcaccgcctcgcccgacctcgggcttggaccaaccacgtcacaggggggccatcattaccctactcctag

SEQ ID NO: 11109 - DNA, 447 bp, Zea mays
  Peptide Sequence Number=SeqID_54484
atgaagagcatgggagatagggggtctccctggcgaagtccacgccgatggacaggcataaggttcaccattgacaaggatacgggtggaagatgtggaaagaagcagacaaatgaggttgaaccagcgctgtccaaaacccacatatttcatgatctccagcagaaaaggccaagaaatgaagtcgaaggccttagagatatccaatttgaggagcacatgagcttcttttttcttgtgcaaggctctgaccattcgctgaacaaaaatgaattatcatatgattctgatgaagacgacgattttgctgaagaattaggtgacaaggatgcagatgattcttttatggaatcatattcagatgctttaaataaagagctaagcagtaccactcttgagaaaagctttgctcatgcaccacgaccggaaactaacaatgaggcttaa

SEQ ID NO: 11110 - DNA, 1020 bp, Zea mays
  Peptide Sequence Number=SeqID_54485
atggctcgtcttagacacactgcacgtaagtcggtgattcctttcctgccgtctcgacttgcggagcgtcctctgcaccgcaccgtgtccggacagtcgagtcacctggagaggctgcaccaccgtctgcgtgaggagcaggaacgccggcgccagcacggagagcagcagggctcttcctccccaccccagcgagaggtggagtccgtgaggccccgttcctctgttgcccagctggaggcgccccctgcaccaccgcgggacgtcccggctgttggaggagctactggaggagatcccgacgacgacgactcagaccacagtacggagtcctctgagccgcaggaggcggaaggatgggtcgcccgacccatcacccgtgacgccgctcgcggttgtcacttccacgacgcactcgacaccttgctgcgccaggctttcgaccggcacacctggtcgatcgagtatcgttgtgtagtctaccagcacagtcgcgggaggtacccggaccgctgggaggctacctgcctagttcgccgtccggaggatgacctccggggtgcggaggccgtctcggagcactactccatctccgagagggacactgcggaggcggctatgcaggatgcagcacggcgtgcactctcccagtactgttctctgttcggtggcgtggccgatggtcttaaccttcggtactacccccgccgccctactggcagcacagagagtgtggttgtctcatccgttggtgaggctaaccctaggttgagcagcacagtcaacctagtcgcagtgcttaacactgagctggaccactctctggacgagctaagcagggctcgaacggagattgcggggttgcgtgctgagctggcagagcgccatcaccaggagagtggttctcccgcacctgttgggactcagcaccccactacacgacggttcactttcagcgacctatggttggttgctaaaacggccttcagcgacctacggttggtcgctaaaaacttttag

SEQ ID NO: 11111 - DNA, 690 bp, Zea mays
  Peptide Sequence Number=SeqID_54486
atggaggtcttgaacctcgcccggaggtccagtctgtgcattcaggggtccggcactttcccgtgggggtccagacccactatcgtcaccttggagtatatcgtctcctctggccacatggcggccccggagccgcccacgtggaggggtcgggtgttgttcaccgcgcgactagagatagctgcgtggacactatgtcttcatactgtagtaaggggtacccctgatccagggtaccgacagtggccccccgggctcgcctcaagggaggatacgagcctgcaggaaccggtgcccaaggaggatgactcatgggcccaggcccccgcggcagagaatgggctgttggtttcggtagaggtgaagaggcgcactaccgcaggcggtggcgtgctcctcacgtggtggcggtggcgtgctcctcacgcggcggttcgccttctccgcacacggaggccgacgcccaaggagtatgactcgtgggcctgggcccccgtgccagaggctggtccgctgcttttggtggaggcccgggcccctgggccagaggctggtccgctgctttcggcggagatgaagaggcgcactactgcaggcggtggcatgctcttcacgcagcggttcgccttctccgcacaaggaggccgacgcccaaggagcatgactcgtgggcccgggcccccacgctag

SEQ ID NO: 11112 - DNA, 369 bp, Zea mays
  Peptide Sequence Number=SeqID_54487
atggccttgctagatcctcccgagcgccttcagcccgaggtggcactcaacttgatgtgcaacctgctcggatggggtgtgtcggtgtccgccggaaagatccatgtcggtgcctctcctctcggcgatcttgccgccggagagtttgcgttcttcgtctccaacctccccagcgggttggcgctgccgatctcgtttttcttcgtgatgctgctggaggagctcgtcctccaacctcagcacttcatgccctacttaatccttcaggcggctatcatctcctaccttcgcaatatgcctatgggggcgatgcttcttctcacttcttcctccagcattcggagggaaggatgttcaccagccttgtga

SEQ ID NO: 11113 - DNA, 183 bp, Zea mays
  Peptide Sequence Number=SeqID_54488
atggggctcggtgtatgcggctcgctccgccaagttttgttcgccccttggggaggagtgcgagatgttcggattacaagtggcaacgagattgatggttttggtattgactctggtaatggtaaagaaggcgtcgaggcagatctccaggagttccaggacgtcgacgagttcgaggattag

SEQ ID NO: 11114 - DNA, 834 bp, Zea mays
  Peptide Sequence Number=SeqID_54489
atggccgcgcagcgagcgagctcgaggaggacgcgaggggaggggcggggccgcgccatgcgggggcagaggaccgccgcgcagggagggccaccacgccggggccgggcgcgccgggactgcgccgaggcggacgcggcgagccgcgcacagggcgagggggtgcgtgcgcgccagggccggccgcgccaaacgttgggcgccggcgccgcgccgggccgagctggggcaggtacgccacgtggggaggggaaggccgagcgaggctcgccgtcggtcggcaagagccgcgtcgagcgggatgagggagagggggaggaggagggcgctgcatgcgtccagcggttggagaagggcggcgtcggctgctggctggagcgctcccacgcgcgcgagctgggccacaggggagggggcaggagctgggccgcgaagttgagcgcgggaatgggccgcgcgatgaggggcgcgctgggctggcgctgctggatcgcgggggaggttgggccgacgcaggccgagaggggaagacacggtgcccacgcgactatctctagccgcgcggtgaacatcatccgacccctccacgtgggtagctccggggccgccacgtggccagaggagacgatatactccaaggtggcgacagtgggtccggaccgccacgggaaagtgccggacccctggatgcacagcccggacctccgggtgaggttcaagacctccaaaggtacaaaccagacccctaggacgggtcccagacccctcaggaggggtccgggctactcaaagtggggtcccgggattccaaggcaaagaatacccaggccttaa

SEQ ID NO: 11115 - DNA, 273 bp, Zea mays
  Peptide Sequence Number=SeqID_54490
atggcgtgcgatggctacggtgtccgggtccgcgtgaaaggatggaagagaggaggaacgggtcgcggggagggtacttgtagacccgcgatgccaagtccgcagctggccaagtacaccggtcgtccgagatctccgcccgcgccaccgctggacgcggtgtggttgttcgtggggaagccgcatccgacagatgtaatcgtggacattactccacaactcatcacactcaatcaaagatccaaatcagacatgtatcacaagaacaaataa

SEQ ID NO: 11116 - DNA, 357 bp, Zea mays
  Peptide Sequence Number=SeqID_54491
atggcgtgcgatggctacggtgtccgggtccgcgtgaaaggatggaagagaggaggaacgggtcgcggggagggtacttgtagacccgcgatgccaagtccgcagctggccaagtacaccggtcgtccgagatctccgcccgcgccaccgctggacgcggtgtggttgttcgtggggaagccgcatccgacaggtgggcccggaccgcagtgtcccagacatccgcccgcgagagggaaacgtggaatggggactgactcaggggccccagttgtcggcgcatgcgggctggcgaagtgggctgcgatgggtggcttcatctggtgggccaaatgtggattccgaggcccagagtag

SEQ ID NO: 11117 - DNA, 255 bp, Zea mays
  Peptide Sequence Number=SeqID_54492
atggccgttcctcattggcgctgcgacttgaagcataaggcttgccctgagatcttcgtggagtttcctggagtgaagttgggaccgtcctgctgcccaacagctggtatgaagctttcctccgagctcacctttgacttcgctgcgcatagcatcaagccaggctcgatttggggcgtcgaggccctggatgacctgtattccggcgaggctccgccgtacctagcgcatgtgtctctgcctgggctgcgggag

SEQ ID NO: 11118 - DNA, 1468 bp, Zea mays
  Peptide Sequence Number=SeqID_54493
gagccccgatcttagagcatctgcatttcttctagatccactgtatcgctcggcattcatagacctagacaaaggctgtggatcaggtagttgtttaaccatgagatctgttgatcgacctccaactaatccaaaaagactaaccattgagtcaagtcaggagaaattgaatatccgctgcattccttatgatgttattgtctcaacttggataatgagcgatcggcagcgcgatgcagtcgctaggttgggattttctagtatatttgatttgcgaactgatgtcttagagagcagatctctcatcaggtggttgatggataaattggatccacatgacatgaccatacgcccaggggctggcaaggaactgaagataacaaaagagacggttcgtcttattttgggtttgccatgtgctggagggggcagggagtttactgattggtatggtgaagtggatgctgctgcaaaactgagacgtgatctcaaaatttgtaaagaagaatttgatgttatcaagcttcaggacaagatagtgcttggcaatgatgatgagttatcaatcagatgcttttttctgattctattcaatcgacttctttttccatctgcttcatggggcattacaaacaatgaggtactaatgacttcaaacatggcccggatggctgatattgactggtgtcaactagtttacacggatttgtgtgatgctgccacacgttggcacaaaaggaacaaaacaaacattacagcaacaatatatggatgttttgttctaatttactatcttgatcacttacatcaccctgcatctcctgataacaaatatggtactccccgcattaagttttttgataatgagaccataagagatttggctaggggtgacagacgtcccccgccccccgtaaaactgtttcgtagccgttcagaaacgtgttacgtcattgcaccagaacggcccgtttctgacgttttcaacatatatgtgccacgtatcaagcatttgattggcaacaagctgaaatgtttgccctccccgcatcgaccaatgtttgaatcaatgtttgatgctcatgacaaggagatatcccccactacctcaatgcctccaacaaatgctccagtatccactccacctgttccaacccctgataatcagcaacatgatcaggaaatacatgttcctactgatgatatcaaagtatcagaacaggaaggacaaaaaactgttaaacatgatactcccgtatatggtgcaccacattttgacaaaaccccattgacagaaggatttatcgattgtattcgtgatgatgatttattatacaatccagataccataatcaacactctaatactgaatgtcaatgttgggactgttttgaatatcgaggagttcgaacagcacagttcaaatccccagcccttctcaacatcagttcttaaagaacaactgtaa

SEQ ID NO: 11119 - DNA, 408 bp, Zea mays
  Peptide Sequence Number=SeqID_54494
atgggcctgggtccgcccgtggggcagacgaaggggaagtgctcacctcggacggcagggtcagggacagtggcggccacggcgaggccgagcaccgcgaggccgaacacggtcgggtgggcgacgaactgtggctggaacgacaagggaggggagagtggatgggcgagcgtgcagttttatgcaagcgatagtggtgggcggttgccagacgcatcgtgtcgtggctggcctgggcgggagatgtggttcggtggagatgaagatggcaacctcagcctcgggagaaggtctccgcctcacccgaccccaggcctcagcctcggcctcaggagaagtcaccgcctcgcccaacctcggcctcagactgactacgccacaggggatacatcattaccctacccctag

SEQ ID NO: 11120 - DNA, 393 bp, Zea mays
  Peptide Sequence Number=SeqID_54495
atgacttttggaagaaaagtcacggttaagaaagctaaatctggacctatggagcgaggtgaccgggcgccgggcgggcgaggtgagccgcaggcggcaccgtggcaggccacagccgcagccgcacggcgcgtccggcgtggccggacgggcgactgccgactgggcgagccggcgaggccagacgaggccgcacgcccgcaccgcgccaccgccgcagcccgcagggcgcgagtgcgtgacgccgacagcgcacagtgcttggccgggcccgggcgaggacggggttacgggacgtcgggagtgcgccgtgcgcgtggcggtggccggcgactcggcgaggacagaggcggcggccgcggcgccgtggcgggctggcggctagggttctga

SEQ ID NO: 11121 - DNA, 315 bp, Zea mays
  Peptide Sequence Number=SeqID_54496
atgccgagaaatatggtaaattgtggactttacccctcacgtgacctaagacgtgtctcccattccggttatggtgggtgcaagtgcggccactgcacgacagcagtcggggtcagtgaggcattgtacgccaaggcgataggttctctagaggacatggttgctggagtgacttggccgtccatcttgccaccgggctggacagtcgagtgggaccctgcctcggttgaggagacgtcgagcaatccgaggttcctgagtgtgttgttggagacctccttgagcaacaacctggtgaaggcaagtgtcctctaa

SEQ ID NO: 11122 - DNA, 375 bp, Zea mays
  Peptide Sequence Number=SeqID_54497
atgaaatttggtgtttacatttttcaaataacaaaggaatattgtatttattgtggacctcaaattttaggacagactacagtgacaaatagtaacccacgtggactttacccctcacgcgacctgagacgtgtctcccattccggttatggtgggtgcaagtgcggtcactgcacgacagcagtcggggtcagtgaggcattgtacgccaaggcgatagctagtgcttttggcaaccaaacccctcagccaaacagctgcatgtctagaggttctcgggaggacatggttgctggagtaacttggccatccatcttgccaccgggctggacagtcgagtgggaccctgcctcggctgaggaggagcatgagtga

SEQ ID NO: 11123 - DNA, 132 bp, Zea mays
  Peptide Sequence Number=SeqID_54498
atggcttttactggccaaccgctctccaggatgcagctgagatgggccgtcggtgggtacgggttcctcttcatcgccatcgataagttcaacaagtggccagaggccacccctgtggtcaatatcacctag

SEQ ID NO: 11124 - DNA, 393 bp, Zea mays
  Peptide Sequence Number=SeqID_54499
atgtccatctccgacgcgctcccggtgctggactccgccgccgaccgtctccaacgcctggaccaaattctgggcacccttctggaggtcgagggcggaagactctgccgggcggtagtcgagtacatcttgacgtgcttccggagccacgacccaaccatatccttggagccggtgatcgctggtccggtggccgacactgaagatgccgcccgagagggtattaaagacgccgtggagctggtggccgagcgcttccagcaggatcctgctgatgacgagctcgacgtgtcaaggctggatgccagtatacttaagaaagaattggtgacctggcccccaagaggtagtctcgactgggacctggacctgcgcacagccttggctaggtag

SEQ ID NO: 11125 - DNA, 1275 bp, Zea mays
  Peptide Sequence Number=SeqID_54500
atggcctacatcccctcccttggtggcgcaaggtgggagaactggcgcggcgactgggtgattgctagcacgaaggccaacgaccgcctcgccctgccgagcgacgggccaagactcgaccagaagcagtggagggccaagccgtccctggcaccggagttccagcttgtactggacaggatcaagagcttggcggtgcagcgcgggccagggaccgacctgtcctgggaggagttggaggttctggtgaaggggataaccggtgagtccttcgtccctgagtcccttatccttgccgagggcatccttgcactctgcgacgacacagggttgaggacggtgattttgtccacactatcgaccctcgatgagagcggcgtggcggttcgccagaccggtggccggaacccccaccgcgggatccagatctccgatgcaccggatggaggccctcagtctgccggcgtggctcctagtgcctccgccagagcttcccacgcctccgtcgcggccccccaccccttggacaagggaaaggggctgcaagcagctcctccgccccaggcggcgttggagtatcggaggaagagaggcggtgccggctgcgtcgccccgacagatcgtttgtttcggacccccccattggggtcgaggaggccggctccgagaaacgttagaggactgctggcgggaccgaggagaccggctcctaggcccagggtgcgcagaggcgcgtcagtcctccgccaccacaaccatcaggctcgccaccaccacaaccgccaccacaaccgccaccaccaccacccaggggcgatctcccccagggacaccagtagcagtagcaacaacagcagcagcaaaagcagcggacgccccgcttccagggtcgttggaaggtccaaggccccaacggcgccaacaccaagcgatgccacaacggcggagggggtcccctctgctccgacggctgccacagcctcaacaacggtgatgccgtcaagtacaccgtcggtagcggcagaggaggccccagctgcgtccgcctccgccatcgaggtcgacgcggggggcgtgtccagctccatcccgccgcccactccggaggagacggaggtgatttttgggcagcggctccggtccggcgccgagccagaagcagcgccagttcccctcccccggctggaggagcgcaccaaggcagcgtcccgccagtttgcctccgagcggtccgagcttgagcgggaccacaaggactacaagaaggacctctag

SEQ ID NO: 11126 - DNA, 276 bp, Zea mays
  Peptide Sequence Number=SeqID_54501
atgcccctttgtatttgctctctcctgctccacacctgcgccgccgccgatgccatgacttcacttggccaacccgaccgcttccagaccgaggcgacgctcgatgtggtgcaccacctgcttggatggagtgcgtcgacgctcgccgagaggatccgcgctggcgccgtccccctcggtgacctcgccgcaggggagttcattttgttcacctcctacatctcctacgggttgggcgctgccgatctcgcctttcttcttactgctgttggatga

SEQ ID NO: 11127 - DNA, 2742 bp, Zea mays
  Peptide Sequence Number=SeqID_54502
atgaggaagctcttcttctccgagtcggcctgcaaagagaccaagcttcactccgcgccccactcatggctgcccctcgagagggggaagctctccaagttctccggccatgccgccgccggctcctccatagagtccttgatgaagatgccagagccggctgtgcttccgcacttcaagcccgcggactatgtcgacgtactggctcagatacacgaggagctggagtcctgcccccctgacgacaagtcctccctgtacctcctccagtatcaggtcttccgtggcctcggcgaggccaagctgtctcggaggagcctccagtctgcgtgggagaaggggagcaccatacacgagaagctcatcttcggggcatggctcaagtacgagaagaaaggggaggaggccatctccgacctgctcagctcgtgcagcaagtgcttgcaggagttcaggctgctggatttcgtgttgcaggtctccactgggtcacatgtgataaactacgatggtgatgatgatgagtttcggggttctgcggtggttcatttccggataagagatgatatggttgcgtgcgatcgtcggaagctcgcggcgctgtcaactccactgtatgcaatgcttaacggtggatttagggaatcatatctagaggtcattgacatgtctagaaatggtatctcccctattggcatgagggcaatcagtaaattcagcctatcaggaagactaccgtatttgtcagctgatgctatcttggagattcttgattttgccaataagttttgctgcaagggcctcaaggatgcctgtgagcgaaagcttgcttctttcgtctcttcaaggcaagatgctatagacttcatggagtgcgctcttgagctgggctgttccatccttgctgcttcatgcttgcaagtgctcttgaatgagcttccagagtgcttgaatgatgaacaagtggttaggatattctcttctgcaaataaggcacagagattgacaatggttggcaatgcatctttctccctatattgtcttcttagtgaagtctccatgagtaccaacccaacatcggatgtcactgtaagtttcttggaaaagctggtagagtcggcatcagattctaggcaaaatcagctggccttacatcagctggcatgcaccaaatttctaaggaaagattaccctgaatctgagcgcctgttcaatgctgcattttctgccggccatctctattcgatagtgggtttagctagattggcctctctgaggggtaataagcattttgctctcaagttgctagactctgtcatgtcatctcggtggcctcttgggtggatgtatcaagagagagctctatatttggatggtgataacaagttagaaaatcttaacaaggctactgagttggaccctactcttacatatccctatatgttccgagctgcatctttgatgaaaaggcaaagtgttgaagctgcattgatggagatcaaccggatacttggattcaagctggtgctggagtgcttagaactaaggttctgttgctaccttgcccttgaggattatagggctgccttatgtgacgtgcaggcaatactcactcttgccccagattatcgtatgattggtggccgggttgctgccaagcagctgagaatgctagtgctagagaatgtagagcagtggacagctgctgactgttggatgcagctttatgatcgctggtcatctgtggatgatatagggtccctctctgttatatatcaaatgttggagtcagataccgccaaaggagttttgtactttaggcaatctttgcttcttctcagattaaactgtcctgaggcggcaatgaggagtttgcagcttgctcgtgagcatgctgcgagtgatcatgaaaggcttgtctatgaaggatggatattgtatgatactggccactgcgaggaaggattgcagaaggcagaagcatccattgcaatacaaaggtcatttgaggcattttttctgaaagcttatgctttggctgattcgagtcttgatccttctacctcagcaacagttgtatcacttctagaagatgcattgcggtgtccctcagatagacttcggaagggtcaggctctaaacaacctcggaagtgtttatgtggattgtgggaagctagacctggcagctgaatgctacattaatgcactaaagatcggtcacaccagagcgcatcaaggccttgcaagggttcatttcctacggaacaacagagctggtgcatacgacgaaatgaccaagctgatagagaaggccaggaacaacgcttcggcatatgagaagagatccgagtactgtgaccgggagctgacgaaaacggacctgcagatggtcaccaaactcgaccctctgcgagtttatccttacagataccgtgctgctgatatagctcatctgctcaacttccagtattggtgctactttaacgaaccagctaccctggttcctaacataaaagctgtgctgatggacaaccacaaggagaaagaggcgatcgcggagctgaccaaggccatcgccttcaaggcggacctgaacctgctccacctgcgcgcggccttccacgagcacgtgggcgacgtctcgagcgccctccaggactgccgcgcggccctctcggtggaccccaaccaccaggagatgctggagcttcaccaccgggtgaacagccaggaaccctga

SEQ ID NO: 11128 - DNA, 1200 bp, Zea mays
  Peptide Sequence Number=SeqID_54503
atggaattaccactagacgcgcaaagcagcggaagacgtctcgatgtagacgaacgcgtcgagcagtgtcgtgcagttgccggcgtccttcacgtccttgcacggttcgtccaagtgctccagatgcagcacctccgagacctgaataagagaagggggtgtctgttatacaaaaatgaaaaagaagatgactctggaagcccatcagatgttgagatattagaaaacccaacagattctaataagaggaaactactccacatgcttgatgatagcgaagtagtgtatgaagatgaggaaggccctattactcaagcagacttgcaaaggtggtttgttgatgattgggataaaagagctcctgtaaaagtctctaccgattggtgcacaaatgattttttaatgatacttgatatagactacaggagaacatgggtgcgaagtttcaatccttttaagatagaaatatctgtcaaagacctgcaaaacatattaacgataaatcaagatatgattataagatgttttgacatggttgttcggctgcttgccaataaagagtcacgtaggccgaaagaagaaatcataaataatagaaagcattatatggacatgcgtttttggagaatggttggttatggtaaacttccaaaataccatcaggatcctacaacagaagagttagccaaaacactcgattgttggccatcaatgaattattatatcacgggttgtagatatgttatcatgtcatggaaattcaatggatgtcacgcccttttcgtaatagatcatgttaaaaagcatgtgacttttatcgactttacaccgactcaagattggtgtaaacacatgccatacaagagattcgcggaagcgattatcatggcctcaaaaaaatataagattgcttacagcaagaaacgttctggatgggcggaggatatctttaagtgggaacatacaattcagactggtgttccaattgacttaagagggtttaatactagctacctcgttctacaagctatggccatgtgggggaatgacagacgactgaaatttgttgggatgagtgatgcaaagactattcgaaagaactttgtgattgatctgttaagttatgaggataattcgtgtcgatatgccatccctgcaaatatacaacagagacttatcgatatcgctaaaaaggattag

SEQ ID NO: 11129 - DNA, 2091 bp, Zea mays
  Peptide Sequence Number=SeqID_54504
atgcaccgcgccgccgccgccaccgtggcggcgccgcaggcgaccgacgcgcagctcctggcgggcgcggtggaggcggcgatcgccacccgatccgcgcggctcggccgagcggcccacgcgcgcgcgctcaggctgctgtccccggcgctcccgcccttcctctgcgcgcacctcgtcaacctctactccaagctcgacctcccgggcgccgccgccgcgtcgctggccgccgaccccagccccaccgtggtgtcctacacggccttcatctcgggcgcggcgcagcacgcgcgcccgctccaggcgctctcggcgttcgccgccatgctccggctcggcctccgccccaacgacttcacgttcccttccgccttcaaggccgccgcctccgcgccgccgcgcagcgccgccggaacgcagctgcacgccctcgcgctcaggttcggatacctccccgacgacgccttcgtctcgtgcgcggcgctggacatgtacttcaagacgggctgcctcgcgctggcgcgccgcctgttcgacgaaatgcccaacaggaacgtggtcgcctggaacgcggtcatgaccaatgcggtgctcgacggccgcccccttgagacggtcgaggcctactttgggctccggggtgctggtgggatgccgaacgtggtctcggtctgtgcgttcttcaacgcgtgcgctggtatgacgaacctgtcccttggggagcagttctatggttttgtggccaagtgcggctttggcaaggatgtctccgtgtccaattctgtggtggatttttatgggaagtgccgttgcgtggggaaggccagggcggtgtttgatgggatgggagttcggaacaacgtgtcctggtgttctatggttgttgcatatgcgcagaatggggcagaggaggaggctttctttgtctacttgggtgcaaggagagctggggaagagccgactgacttcatggtttccagtgtgctcaccacatgtgcaggcctgctaggacttgaccttgggcgtgctctgcatgcagttgctgtccgttcctgcattgattcaaacatttttgttgcaagtgccttggttgacatgtatgggaagtgtggcggaatcgaagatgctgagcaggtctttttcgagatgccacagcggaatcttgtcacatggaatgcgatgataggaggttatgctcatattggtgatgctcacaatgcactttctgtgtttgataaaatgataatgggtcaagaaacagcacctaactacatcacacttgtcaatgttctcacggcatgcagcagaggaggtttgacaaaggaagggtatgagttgttccagacaatgaagtggaggtttgggattgaaccaagaattgagcattatgcttgtgtggtggacttgctttgccgtgcaggaatggaagagcgagcttataagatcatacaggggatgccaatgagaccttccatttctgtctggggagcactacttggggggtgcaagatgcatgggaagacagaactaggaaggattgctgctgagaagttgtttgaacttgatcctcaggattcaggcaatcatgttttgctctcaaacatgcttgcatctgctggcaggtgggcagaagcaacggatgtgagaaaggagatgaagaatgttgggatcaagaaggacccagggcgcagttggatcacttggaaaaatgttgtccatgttttccaggctaaggatacaacacatgatatgaatagggagatccaggcattgttggccaagctcaaagggcaaatgcaagctgctggatacatgccagacacacaatatgctctctatgatcttgaggaagaagagaaagaatcagaagtgtttcaacacagtgaaaagcttgctctggcttttggattgatatgtataccacctggcatacctataaggatcatgaagaatctgcgaatttgtgtagattgccaccgggcttttaaattcatatctggtattgctggtagggagataattgtgcgggacaacaatatgtttcatcacttcaaaaattatgagtgttcatgcaaggattattggtga

SEQ ID NO: 11130 - DNA, 816 bp, Zea mays
  Peptide Sequence Number=SeqID_54505
atggcgacgcctcgccatctcccgctccacctcatcctcgtcgtcgtcgcggccgccgccttcgtcgccacgggtactgccaggactcgctggccgggctggaagagtgcgggagcgccctcggccgcgtgctgcgcggcgtacgaggccgccttcgacgccgaccccttctgcctctgctacgtcgggcgcgccacgggggactacgtcgacgtcgcccgcgcgctccagatccccgcccgctgcggccaggtccagccgcccatcgagctctgcagcaggcacgccggcgaccgcccacgctccggacgcacagcggccttcggcttcaagtacgtacgtgcggtagggtgcatcggatcaatcgttaccgttgcattgaaaacgtcgtgctacagcaggtgtggctttctcccgttggaaccggagagcgtttggcttggtttaataattgtgcatgggatcacctcatggtcgtcgtcgtcgccgtggttgcccgtacactaccggaattcggctctttgccgagtgccggtggctttgccgagtgctttttatcgggcactcggcaaagccgactttgccgagcgccgcactcggcaaagtcctacgctcggtaaagatcttatttaccgagtgcgggacactcggcacagcccaacactcggcaaagactgctttgccgagagtcaaacactcggcaaagagggctctcggcaaagggccgttagcggccgtctacagctgacggtcgtcaggccgagtgccacatattgggcactcggcaaaggacgctttgccgagtgtcttctctag

SEQ ID NO: 11131 - DNA, 267 bp, Zea mays
  Peptide Sequence Number=SeqID_54506
atgagcttgagtcgaggacgactccacttcaagaggggggaggatgatgaggacatcactcccatggattcaaacaacactcccctagttgatgttcaaggaatgaaggaaaggaccagcaaggacatggtgaaggacttggaggcgtggaaggctagcaaggacgttcggatcaaggtggaggaattagccctcatggtgaggtcaatcgcgcagtgcatggttgataaccagaggagaagtggtgctgcgattgcggggttctag

SEQ ID NO: 11132 - DNA, 1779 bp, Zea mays
  Peptide Sequence Number=SeqID_54507
atgaacaaaaacactggcattcaaagtgccattacaaacggaactccggttctgtccccgcgggtatggacaacctccacgccggggaagcccgtggagcgacaagctctgggcgaatcaccagcaaacgcgggtcgccccaaagcgcatcggcaggtcctcactcctgtcctcgccacacaagcgaggaagaggacagaatgttgcatcctagctagacagcaacagcccgcctccccagcatggctggaggacgtctcctccgtagaactggaggatggtctccaccaccagaagctggaagaggaggtggtcggccgacccgcgcggggggcagagcaccggctcagcccgacccccgccccagcgaggatgatgaagaccagctgggggcggggccaagatcacagcccagcttgctcctccccatccaggggctggtggtcaccgtcttgggtgacccccggcgagggggagcagctgggctggctgatgaaaatccttgaagccgaacgatggctgaaagggggtcaccctccttttaaaggcgactctccctacttgcgcccccaaccgtcgcgggctgagtcttctccaacacactccaaggtcctcccctacatcgcgggggctgggtcccacacgtcatgcaagccggctcagagcagaagaagccaaaccgccgtgcgcggtgcgtacaaccgcccagcggttacaagcgactctccacttttgcccagaccaacaggcgaaaggggcgggcaaccatgcaggcggcatgcaaccgcgccaagtgggcgcacttctctgactcccaacacgcccagcatggaggcccaggcccacgcgtcatgcaaccggcgcgccgaatgcttcgtgcatgcaacagcaccgccacttgcgccactaccgcgcctcctcgactgcggaaccaataccgcgactcgaggcgacccagcgcacgacccagcagcgccagcctggcgcggcggtcaatgcggccaaaaatgggccggcagtaatggcggtggcaggcgggcaggagcagtggccccgtcgtccgccaagctcacgtcccgtccgggggcaggaccgggaaagggggataccccgaaaaggatccttcctcgtgaaggaaccaggctccgagcctccctactgatcagaggttcgaaggctggcccctcggaagggttcgacagccgcctcagatcgcgtgggctctacacccactactggtcagaggttcgaaggccggcccctcggaagggttccacggccgcctcaggctactcgggctccgcgcccattactgatcaggggttcaaaggctggcccccgaagggttcacagccgcctcagacgccgagcgagggggctcggactcgggctaggccccggaagacggcgaactccgctccgccagacccagggctcggacttgggctaagccccggaagacggcgaactccgctccgcccgacccagggctcggacttgggctcagccccagaagacgacgaactccgctccgcccgaccccagggctcggactacgccctgacctcagccgacggtctccgcctcgcccgacccgggggctcagactcgacctcggccacggaagatagactcgacctcggcttcggaggagcttccacgtcgcccaacctagggcgcagaccagccacgtcaacaggaggcaccatcatcaccctaccccgagctgactcgggccacggggacaagaccggcgtcccatctggctcgctccactag

SEQ ID NO: 11133 - DNA, 328 bp, Zea mays
  Peptide Sequence Number=SeqID_54508
ccctgagtctggcgcaccggactgtccggtgtgccaccggacagtgtccggtgcaccaggggactccaagccaaactcttcaccttcgggaaaactcaagaggcgctccgctataattccaccggactgtccggtgtaccccggaacagtgtccggtgctccagaggagagcgactctgaactcgccagcttcaggaatccgctccgctatatttcaccggacatgtccggtgcacaccggactgtccgggaagttttgttcccggttgatttgagaagagaaagctcactcggtccgagggactgtttgagagagggaaggggttga

SEQ ID NO: 11134 - DNA, 588 bp, Zea mays
  Peptide Sequence Number=SeqID_54509
atgtcgaccgtctcgagcctgcgctcatcccctcgcatctataaaacctcgatcccgctattcccatccaaatcggacacctgtcgcccaacccctattgcagaccgccatggagggagaaggaggaaaccgcggaccatcacggcggttgtcgggggatcacggtgcctcaacggtttgggcctcgaaataacatctagggatgatctccagaccccgtggatgttgtacgcgcgcttgattcgaacaaaggttggccgggacccagaacaagaggaagaatccgtagtagaggaggaagttgtctctcagaccgagaatcctccggtggagaacaatttttacttcgacatctgcggcgctacagcccgcacaacgggaggtggagaagctgcggtggaagtgactcgctcgggggagagggatcgcaagctctccaccctccgggccaaggctgatcgtctcgatagtgaggcaacacgcctccgctcgaggcgcgatgagaagaagttctctgaggcccatgacgctatgaaagcggccgaagaggcgaagaaggaggcggtggatgaagtgaaagggaaatga

SEQ ID NO: 11135 - DNA, 570 bp, Zea mays
  Peptide Sequence Number=SeqID_54510
atggagccagcagctcggcctctaccgtcgccagcgatccaagtcacgcactcacgcgtgcatgtaggggctattagtggtgaaggtgctatcggtggcaagggtgctatcgatctaggcgcaccagaactgggagctcgccgaggtggtgctcaaggtccatgtacagcgacgctgcatgcgttgcgcccggccacgtaccgcgacgccagccacaagcccgaaatggccatttcttcaaccccaccaccatgttccgcccatggcgtgccaacgcgtgtgtcggacacgattttttttcttcaattcaacagaatgagcatcgcgtccgtgaggctgccggagtcccgcaacagtttggacctcccagccacgccacctatgacgccgctaccggctccgaggacgagccagaccgagcgcccaagattccggttcatgggagaggtccgccgcgagcgcgagcggaaacgctcccgatcccggtctccgtcggcggatcgggaccgctaccaccgccgccactctcagtcgcgtcgaggccttcggcggtgggtgacggctaagtga

SEQ ID NO: 11136 - DNA, 594 bp, Zea mays
  Peptide Sequence Number=SeqID_54511
atggcttctgccccaaacgccaggaagaaaggcatgcagcctatcaccttggatgacgtgcttaaagcccctgaacttttctttgagcttacgtacctcatcgtagtacccgcacatttttggatcacatggcttgatttccttcatgacctgattgacaaccaatttggagtcgcccctaaccaggagttgtcatgctcccacttcgcccacgatctggagcctgttgatgaaggcttcgtattcaatgacgttgttggtagcgtcaaagtggaggcgatggacatagttgatgtcaagtccgttgagctcaaggaaccacttcgagatgcgcccggacgcatcccgattctagacgatcttgccaaggggtgcagtggacaccatcgacaaggggtgccagtcgaagtagtggatcagcttccgcttggagatgaggaccacatagagcaacttctagatctgaggccaaaaaggctgcttggtctgggtgcaccggactgtccggtggtgcacccggacagtgtccggtgcgccaggctggttctggtgaaaaggcccgtcctcgggaaatcatcggcggcgtacggctaa

SEQ ID NO: 11137 - DNA, 123 bp, Zea mays
  Peptide Sequence Number=SeqID_54512
atggtccaagaactggattatggatacatgatggacatcacaagtaagatggacattgcaaaagtgatactcgggatgttggagctaagaaatgtcaatctagatcaagtcaagccaacttga

SEQ ID NO: 11138 - DNA, 267 bp, Zea mays
  Peptide Sequence Number=SeqID_54513
atgagcaagaacacaagagatgcaagatttatcccgaggttcggtcacaccatcaaggtgccctacttcctcgttgaggtgcccacaaagagccgggtctctttcaaccctaaccctctctttgccgaccacaaagggccagttcaaccacctggtggcaggctgacatacaatttgccatttagactggcagactataggtcagactggtcaggtgatcctgacactggtttaactgccttaaggccggttcaaccgtttgactag

SEQ ID NO: 11139 - DNA, 243 bp, Zea mays
  Peptide Sequence Number=SeqID_54514
atgaagctccccaagccctcaaacccagcagaacctcgccggagaccccaaatcaccctcgccggacttcttccgctcaccggcaaacgtggactggatttcaatctcgctgatggagagtacgtgctcattcccgagcaaggagctgtccaagaggaagtccaggagtcagctcccgagcctgccaccgaggatctccctgcagccctagcttttgaaggcaagccccggttttatgcataa

SEQ ID NO: 11140 - DNA, 2430 bp, Zea mays
  Peptide Sequence Number=SeqID_54515
atggcttccgccgccgcggaaaccctcgcctcgttcccaatcgcatccccgtcccgctcgctcctacgccccttccccaggcgaccagccggcgctaggacaggcgcaccgtcgatccggatatccgccgtgccgccgcggggcctcgggctcgcgctcgtacaccgccgctgcccgccagcggcgcgcgcgaatgttgagcgcgacggcgacggcgcctccgggaacggcgagccgtcgtcctcgtctggggatggcgaccgcgacgcggctgcggagtcggggggcgatagcaccagcacgagcaccacgagcacggccgcgacaccgccgccgccctcgtcgaagaggaacgaaaataagtggcggcggaggctgactaagggaggcggcgtggggcggtggctatgggagcccatagtccagggacgggagatgggcttcctcctgctccagctgggcttcgccatatttgcgctacgcatgcttcgcccagagatcgcgttgcccggttcagagccccgcccacagacgacgtacgtcagtgtaccatacagcgacttcctggccagcataaacaaggaccaggtgaagaaggttgaggtggacggggtgcatatcatgttccgactccgcccagaggtggagtcccaggtccgtgttgagcagacaccgacacagcgcggagcagattatgtcattgataatgctggagtttcaaggagaattgtgttcacgacgactcgtccagtggacataaagacaccatacgagaagatggtggaaaacatggttgaatttgggtcaccggacaagaggtctggcggcatgctcaattctgccctggtaggtcttatctatgttgtattgattgcggtagttttgcagcgcctgccaataagcttttctcagcaatcacccggtcagttgaggaataggaagaattctaattccggcggagcaaaagtttctgaaagttcggatatagttacatttgctgatgtggctggagtagatgaggcaaaagaagagcttgaagaaattgtggagttcttaaggaacccagaaagatatattcgtctcggtgctcgccctcctcgtggtgtcttattggtgggtcttccagggactggaaagacacttcttgcaaaagccgtagcaggagaagcagaagtcccattcataagttgctctgctagtgaatttgttgagctatatgtaggcatgggagcagctcgagtacgtgacctatttgctaaggccaaaaaggaatcgccatcgattatttttatcgatgagattgatgccgttgcaaaaagccgtgatagtcgatatcgcattgtcagtaatgatgaacgtgagcagacattaaaccaattgctcacggaaatggatggctttgataccaactcggctgtcattgtattgggggcaacaaatcgagctgatgttttggatcctgcccttaggcgccctgggagatttgaccgtgtggttatggttgaagctcctgataggtttggaagagaatcaattctaaaagttcatgtgaaaagaagagagcttccactgagtaaagatgtagatctagccaatattgctgcaatgacaactggttttactggagcagaccttgcaaacttggtaaacgaagctgctctgttggctgggcgattaaataaagaaatagtggaaaaggttgacttcatccgtgcggttgagcgatctatagcagggatagagaaaaagcatgcaaaattgaagggtaatgaaaaagctgttgttgcgcggcatgaagtaggtcatgcactcgtgggaactgctgtagcaaacctccttcctggacagccacgtgtggagaaattgagtatattgccaagatctggaggtgcattaggcttcacgtacacccctcccgtcacagaggatagatatttactctttgttgatgaactacgtggccgtttagtaacactactgggtgggagggcagcagaggaagttgttttagcaggacgggtttcgactggtgcacttgatgacataagacgtgctactgacatggcctacaaagctgtagcagaatacggtcttagtcagcgcatcgggccaatatcacttgctacactgtcaaatggtggtttagatgactctggtggctctccatggggaaaggaccagggacatctagttgatctcgttcagagggaagtaaaagcgcttttacagtcgtcactggaagtagctctttcagttattcgtgctaatcctgcagttttggaaggcctcggagcatacttagaagagaaagaaaaggttgaaggcgaggagcttcaagagtggctaaaatcggttgttgcatcaaaagagttgacctcttttatcagaggacagcaagagcaagttcttcagctggaagcaggctcctag

SEQ ID NO: 11141 - DNA, 540 bp, Zea mays
  Peptide Sequence Number=SeqID_54516
atgaggattgaacaagaccaccaccagatgaagaaattacttacttccttttgtgattatgggtggagtatatatatagtgagcgaggaccccgagctataccaccgtttggccggccgatcccgtgtgctggaggagtcatctcacgtgtgttgggtcggtgttgacctggacctggcgctgtcgcaggttccaaatttgaaactgacaggtcctagccttgctgttctgctggtggatcctttgactattgaggctgatctgaaagttaaaggtcgtactgaatccgacgataaacacttgagctttctaccagtgccattcttgaacatgatcccgctcgagtcatgcctgcgtacaagagatttcacctgcaagctgatcagcacactgaggtttgctctcgccattgttgttttctcagtggaggctacagttagtgtgcgagttcgtggtgggtcatggcctgatggtcttcgtggtgggtcttgcttgattctggggacgatgaactgcctactcccttcgtttttttattag

SEQ ID NO: 11142 - DNA, 354 bp, Zea mays
  Peptide Sequence Number=SeqID_54517
atggccaggggcatgtcgttggcggcgctaccattccgcagcaacctcgagccccgcggcgttagtgacggcgacgacgtttggtcagggatcagtccattcgagggactcgatcacgcctcgcccgagcctagcctcggacaagggcagccgaccccggaggatttccgtctcgcccgaggcccccctccagcggcgaacatatttccggctcggccgaggccctgtcttcgccaagaagcaaccctgaccaaatcgccgcaccgaccgaccaaatcgcaggagcatttaatgcaaaggcggcctgacacctttatcctgacgcgcgccccccagccgatagagccgaagtga

SEQ ID NO: 11143 - DNA, 1536 bp, Zea mays
  Peptide Sequence Number=SeqID_54518
atggcgcctcctgtcgacgtggctggtctgcgccctaggctgggcgatgtggaagctcctccgaagccgaggtcgagtctgtcttccgtggccgaggtcgagtccgagcccctgggtcgggcgaggcggaggccgtcggctgaggccagggcggagtccgtgccctggggtcgggcgaagcggagttcgtcgtcttctggggctgagcccgagtccgagccctgggtcgggcggagcggacccgagtccgagccctgggtcgggcggagcggagttcgccgtcttccgggacttagcccgagtccgagccctgggtcgggcggagcggagttcaacgtcttccgggacttagcccgagtccgagccctaggtcgggcggagcggagcggcgctgtccttctgtcaggccggtcagtggagcggcgaagtgacgtcggtcacttcggctctgccgggtggggggcgcgcgtcaggataaagctttatgctgatgggggttaccagctgagaattaggagccttaaggagtactttccacctatttactcatcgtcggtatattatcctgttcaaacattgaatggcacgatgatgaatccatggctgtggtgtggccctctctgctcgggcctcggggggtcagggacgaacaagtggagacgtgacgacactgtccctcgcacgcagtcgcggggcgcccatgctctgcctcagccctcagctatagccccggcccctccccgccccaccttctgggcggtttctggccgccagaagctgaagctgtatccaaacggccagcttctcgggcggcttttcgtcgcagcgcttcgcatagaagcgacccgcctacggtgcccgagaagcggccatcagttggcttcttcgcaacgcttaggatacgtcgctagggttgtcgcgctcccaccgagtcgccgtcgctccctctcctccccacaccgtcgctccctctcctccccacaccggcggcttagcagggttgccgcacgcacgccgccatggcagctccgtcctgaagccttctccccgtcacgtcgtcgtctgcgcagattaccgcatcaacatgggattctacgacttcggttccaacctccagtgaagctaaagttcactaaccacctaaatccacatcagatggattcagcagactccatagccgacaaggcaattggaaggatgcaagagattgcagacaagatattttccgtagctcgtgaaacaatccgtccaggacgcgggttgacctcatttgaggctaccaaattacgtgtagcattggaggacattgcttgcatgcttgagcaagactctctggtgttgcaagagaatttggacaatgtgaacaacgttaacaaccctggtgacagcagctacgaaccgccagccttgtcctcaccacccccagctaacgagtaccttagtccggattggaactttgctgagcactttgaaaacttctggggtcttgaatatgactccgaccagatgccatcgtttagtgacaatgaagtttaa

SEQ ID NO: 11144 - DNA, 639 bp, Zea mays
  Peptide Sequence Number=SeqID_54519
atggccggttctaaggatcacaccaagatctccaccaccaacatcatcaagctgaccatggaggcgctcccggctgatgaccaaaggccctttgaagacctcgtaatgcgcgatgagaaggaggtgatgcggcaatggaacgaacaacgcgacaaggaaaaggcggaactgctgcataaactctccgaacggtgcaaggaggcggcggacaagtacttgtcacacttcacggtagatcgccaccagaagatagtccgtcaaggggagatcgatatggaatctctcctacctccacttcagggtcccgctccgcaaccactaggcacgcggcaggtactggacgcgaccggaccgtccgagcatcatcttagacagtccggttataccgcggaccgtccggcgtgtttcgccggaccgtccgacccaatgcagacccgcacacaaaacactcaggtcgcaccgtacatggccggaccatcagggtacaaccccgaacaattcggccccatcacggaccgtccgacgcatcacgccggaccgtccggatatgttgcggaccgtccgccatcttacgtcggaccgtccggatatggcatgaaccggccgacgtattacgccggaccatccgactctacatga

SEQ ID NO: 11145 - DNA, 510 bp, Zea mays
  Peptide Sequence Number=SeqID_54520
atgaggcggaaagacggcgggtatcccccatccgggggcttggaaggtggaaagacacgatgcataagggagcacgaagacatggtcgccttccaagggggtcaccctccttttaaaggcgactatccctacttgcgtccccagccgtcacggactgagtcttctccaacacgctccaaggtcctcccctgcggcgcgggggctgggtcccacacgtcatgcaagccgactcagagcagaagaagtcaaaccgccgtgcgcggcgcgcacgaccgcccagcgggaccggtaaagggggataccccgaaaaggatccttccccgagaaggaaccaggccccgagcctccctactgatcagaggttcgaaggctggcccccctagaagggttcgacagccgcctcagatcgcgtgggccctacacccactactggtcaggggttcgaaggccggcccctcggaagggttccacggccgcctcaggctactcgggctccgcgcccattactga

SEQ ID NO: 11146 - DNA, 201 bp, Zea mays
  Peptide Sequence Number=SeqID_54521
atgcagcaaagaaggctcttgctagtgttgctacgccatctccttccccatgtccagctgcagctgagacagaagagcaacctcaagagcgacaaattgaagaacaaccgtctatccgatcagtgttattcacaccagcaccaccttcaggctatgacatcaatcgtctccaacttgatccagaaaatagtgaagaagtga

SEQ ID NO: 11147 - DNA, 294 bp, Zea mays
  Peptide Sequence Number=SeqID_54522
atgggcagcggctacaccagcacgcacgaagaggtcttcgctcccgtcctcactgcgggagtggggacaagaccatccaagaacgtcgccgccaccatgggggtacgacgtcttgtacgacctcccggtgcgaccgatggcgcgggagaagccgtggatgtggccaacccgcgcgcggcgcgaccgtcacccgtgcggtggacgggcagccacgctccgccccagcggcaggaggcagcgccggaggcggcaccagagccacccaggccggggagccaggcacgcggcagctga

SEQ ID NO: 11148 - DNA, 3639 bp, Zea mays
  Peptide Sequence Number=SeqID_54523
atgtcgtctcgcttccaccacggcggcggcgacgaccaccgcgtgggcgacgcgggcgacgccgccctcgcccgcgacatcgtcacgctccacaaggcgctctccctcgacccttccacccaccgccgccgcaccctaccactcccctccccatcccccgtcgtcactgagcagccgcgtaacaagccccgtctcaagccctcctcctcctcgtcgtcgtcgcgtaagctcctgccgtccacccctaactcctcctccgcttccacttcctcgtcctcgtcttccttctggaagaagtccctgactgccatttcgcacctgggccgccgccgcctcgacttcgcgttcgcgctgcatgtgcactccgtcaacggcctccccgctgcgctcgatgggtctgcggtctccgtacgcttccgccgaatgtccgtgtccgcctccacccgccccgtcgtggcggccctcggcgccgccgcgttcgaggaggcgctcacgctgcggtccccggtctacttctcccgcggcgcaaaggccgtggtcaagtacgagccccgttcctttgttgtctccgtcgccgcctccactctcgagcttggtaagcacgaggtcgacctcacccgcttgctcccgctctcgttcgacgatctcgaggacggcggcgactccggcttcgggaagtggagcagcagcttccggctgtccggccccgcccgcggcgcgcggcttaacgtaaccttctcttgctcgctcctcgcgggtggcgtcggcagcgagcagcacaaggccgtggaagtggcgggggtgcggcgcggatcgatggcgcggccggtgtcagtgcaggcaccaacgcctgtgcccgcgcggagcagggacgtgagggtgctgcacgaggtgctgcccagcttgaggtctgccaggtcgctgccttttgttggtgatgggggtcttgatgcgaggaaggaggaggtggcagcactggactgcatggaggacgggtctccggaggcaaagcactgcacatcagtagaggttaagaagggggacttggtgcgcccagatggggattgcagcacgatggagttcaatgttgttgggcatggagttgaggttgcttcatatgacccacaaaggctcaaacatgtggaaaccagcaatgaggctgatcaaaatgaggatccagggttcaaaattgacgaagaggtatcattcaagcctgtgctagtatgtggtgatgtcgctgaggatcagactgttggagtgaagactgaggtggcagtctgtgatgttgctgttcaaagggagaatgtggaagacaaacatgatggaataatcaaagccaattcactgcctacctctgctctcgaagcagaggatcagttgggagcagatgtagaactggaggacctggaatgtattttgaacgagctcttagttgctaagccggaggaatttgaatcaccagtagtagaagataagtattctaggcgattgagttgcacagctgatagttacaagtctgacagtaggaagggcagatcacgcagcatggatatttcaacagattctgttgctaatgagttcttggatatgcttgcaatagagcatatcccatttgggcaaccctcagatagtgatcccgagtcaccgagggaacgactttggaagcagtttgaaaaggaagcactagcatctgacaaagctattcttggtttggactttgatgatggaattgaaggacctatttgtgagaatgttgtggaggatttcgatctctctgcaatgatacatgaggctgagctcgagcttcagaatggaagtcaacccattgataccaaatttcgagctaagtcgctggaagacgaagaaactgaggccttaatgcgtcaatttgggctaaatgagaagtccttccaatcttctcctcctgaaagtagaagtgggtttggtagccccattaacctcccacctgagcaacccctggagctaccaccattggctgaaggtttaggtccatttattcagaccaaagatggaggatttctgcgatcaatgaacccagccctgttcaaaaatgcacaaaacagctgcagcttggttatgcaggcttcttccccgattgtactgccggcagagatgggatctgggattatggatatattgcatggtctggcatcagttggaattgagaagttatcaatgcaggcaaacaaacttatgcccctagaagatgttaatggtaaaatgatgcagcagattgcctgggaggctgctccagctctggagtctgctgaaagatatgacccgttggactatcatagcgttgatgctttggtaggagggggtggaaatgctccctccagtaagaagaagaaatgtaggtgtgctgatctttcatcatccttgggtggggagaatgcttcagaatatgtttcacttgaggaccttgcaccattagctatggaaaagattgaagccctttccattgagggtttgaggatacaatctggcatgtcagaagaagaggcaccctccaatatcagtgcaaagcctattggggaattttcatctctgcaaggaaagtgtgcagagaatacctggtcccttggtttagagggaactgcagggttgcagcttctggatgttaagcagagtggagaagaagttgatggattaatgggcttatccatcactctagatgagtggatgaggcttgattctggggtggtggacgaagaagagcaatacagtgaccggacatcaaagatacttgctgctcaccatgcaaaatccatggagttagctgctgagaatcggaatggggacagaaagaacaggagatctggtagaagatggggcctgttaggaaataactttacagttgctctcatggttcaactccgtgacccactgcgcaactacgagccagtgggcacaccaatgcttgcattaattcaagttgaaagggtttttgtacccccaaagcccaaaatctacagtactgtctcagacaaaggcaacagcgagcaggatgatgaggaacccaagaccgaaaaggttccagataaggcattggtcacggaagagaaggctgaggaattagaggatcccattccccaattcaaggttacagaagtgcatgtcgctggtttcaagagcgaacctgagaagaagaaaccatggggcaatcaaacgcagcagcagtctggctctagatggttgcttgcagctggaatgggcaagggaaacaagcatcctctgatgaaatccaaagctatagtgaagccaaccaaagaggcagctggtcaggcaggagacatcctctggagcatttcttcacgtgttcatggagccgggaccagtaaaaatatccatccaataatagacgacgacggccaggtgacagcccgctggaatagctcctgcgaggactccgtcaagcacgacatcgcctgcaactgcaagctcattggcgccaggtttttcagcagggacatgttgctcaacaacccgatggtggtggacggaaacttgacatgcgacatcgagggccatgacaacttcatgccccgtgccagcatctttggctatgacaccagcaccgctaaaagcggcacgctgcgggcgcgcatcgccacctaa

SEQ ID NO: 11149 - DNA, 63 bp, Zea mays
  Peptide Sequence Number=SeqID_54524
atggggaagcctgtcccatcactcctcatgctcctcctcagccgagtacaatggatcaagtag

SEQ ID NO: 11150 - DNA, 306 bp, Zea mays
  Peptide Sequence Number=SeqID_54525
atggccgaggctcgggctgcgctcccaagggaaagactaacaacagtcacggccactcccaagttcagcctcaggcgcaacaggagctccgcctcgcccgaccccaggtctcgacctcagccttggcctcgggaggtctctgcctcgcccgaccccaggcctcgacctcgacctcagcctcggcctcgggaggaggtctccgcctcgcccgacctcagcctcggcctcagggggagtcgccgcctcgctcgacctcggcctcgaatcaactacgctactggggatccatcattaccctacccctag

SEQ ID NO: 11151 - DNA, 813 bp, Zea mays
  Peptide Sequence Number=SeqID_54526
atggaggttcgctgccaaaccagcttttgccagaatgaagatggtttccccaagttgctgagagcatgcatagttcgcctcggaatcaggagccagccagagtatgatggtcgtgaattcgttgagcatgacacagagaagtgtgtcgtgactgtatacattggatccagtccgcaccatgtggaatggagtgtcactgttgctgggcacagattcaaagacacctgccaagtcgtcgcccgcaaggcattgagggccctgtgtcagatctatgaagaagaagtggctgacaccccgctcaaattctttctgccctttcagagagaccgtcccgtttggatggccagaatgcgtgcattggaagggcagcagctgcttgaggacgacccctcagtccaccaccgtcagatgattgcccgagcagaagatgcagagaagctcaaccgtaagctccatgtggatctcaccacaactcaagcccgtgtagctgccttggaaagtcgtgaagccattgcagttgaagccctaaagcaagccaaggatgagcatgtccagaagttgatggaggcctgcttggtaacccataaccaacgtagagccctgtggatccaagagctcgcttcatccaacccagttcaacccatcagagctgaagacccccagattcttgaaggtcacccggtctctatcagaggaaagaagaaggcttgggaactcccggaaggagccatagtcttggaaggggttctagtcttccctcaggctatggataagcaagagcaccccgagtcctcccgagatcccccgccatag

SEQ ID NO: 11152 - DNA, 288 bp, Zea mays
  Peptide Sequence Number=SeqID_54527
atgaagtatgaagtcctgcaagacgaagtgctaacctccgaagcaaaaagtctaagacagaacaccaattttcaagtgatgaaagcagaaggagacagtaagaaatcgtttttaccagattacccagagagtacttcctgttacaaacacagaccgcaagctggacttaggatctctcggccgattatttcaaaatcagcccaaagagcgggggcttgtgggggacagatatcccccgggtccactggaaggataaaagacctcacgaacggcctgaggggtttttaa

SEQ ID NO: 11153 - DNA, 537 bp, Zea mays
  Peptide Sequence Number=SeqID_54528
atggatgtggataatatttgtgatattgacaacaatgtgtctaatgaagatgagatacatggtattgggggggggggggatgttaatggcaatgacagtgaccacatggaggaggaggatcatgttcttacacctactggtagtgaggtgaatgtcagaaaaaacaaatccatagatggagacaatcgtgtggtgaaacgactactagcaaccaagtcaactagtacctctacaagcaagtttatggcatcagcatttaaagcaacaaggtcaaacaagagcacagatttagtgcctcaacctcaagtttcgaaagttgcacaagatgcaagtgcgagtgcaagtgaaaatgcaagcatagctgcaagtgtccaaataagcactgaagatgattgtgatgaagaattagatgtcaagaaaaagaagctcacttcatgggtttgggagcattttacaaggtatgatgtagaagtggagcaaaatgatggttccattgttaagcaaaagtgggcaaaatgcaaaaaaatgtgcacataa

SEQ ID NO: 11154 - DNA, 101 bp, Zea mays
  Peptide Sequence Number=SeqID_54529
gtgacaatgagattgatggttctggttatgactatggtactggagaagatgaagccgtggaaggagatttccaggagttccaagactacgacgagttctag

SEQ ID NO: 11155 - DNA, 618 bp, Zea mays
  Peptide Sequence Number=SeqID_54530
atggaagcccgacccagcaggatagagtgctcagaacccaacgagcagcccgagccgaaggaccccggccgggtgttccacgccgagcgcgtcgccccgagggacgccacggagtcggtaaccgagaagctggcgcacggcggttgcggccacgacggcgtgatcgacgagacgtacgacacgaggatcaagatcgcggaggcactggaggcgtcggccagggccatcggggacaagcacgtggagccgtccgacgccgcggcgatacgcgtcgcggaggcgagcgccgcggggcgtggggcgatcccaggcggcgtctccgagcgcgcgcaggccgcggtggcggccaacgcccgcgccgcgcgcgacgaggacaaggtcaccatggccgacgtgctgacgtgggaggcgacggtgaagctgccgacgggcaaggccgtgactggcgaggtcgctgcggccgcggcagaggccgaggccgaggccgcgaatgatccccgagcgaagacgaacccccgcggggtgagcgcggcgctgggcatggccgcgaagcacaactgtggacacgagagcgcgcgcacgggcacggcctttccggatgaagctaagcaggattaa

SEQ ID NO: 11156 - DNA, 480 bp, Zea mays
  Peptide Sequence Number=SeqID_54531
atggcggaagacgcagggggcgcgtccaacgccatcccgccgcccattccggaggagccggagaaaccgcgccacctcccctccctcgggtgttgtcccacgctcatcaggctctccgggaaaaccgaggcggcgatcctgcgggagtgggaggcactcgagactgagcaccagcgccttggtgattggcgcacccagctggaggtgcgtaccaaggtcgtgtcttgccaatttgcctcggagcggtccgagcttgagcaggagcgcgaggacctcaaggaagacctggagaaggtgctcgaccgggagcgggaggtgacccgggaggagaagaggctagtcaagaagaaagagcacttggaccagagggaggcggtcaccacgaaattccatgagaagctgaaagcttataatgcgatgctggagaagcagcgggatgagcagaccgtgatcgaggcggctctgcaaaaactgcggtag

SEQ ID NO: 11157 - DNA, 414 bp, Zea mays
  Peptide Sequence Number=SeqID_54532
atggtgtcgtcttccgtcaggatcatgccactcttgcggccactttgcattcatgcgcttctgaagcaaaagcttgggcaatttcttagtgattgcaaatcttgcaacaataccttcgtggcgtggcatgcagactatgtaagccacactttggagaataacttcggagaagatcgggtcagggagggtggtgacctgaatgtaacctttgcagacaaattcctgaaaacacacaagtccctgtcacagacaagacgcgagtacgtgacaacaggacacgagatgtccactggtttcccacggccaccatcatccatgcctgccggttccggtgtcaggtgcttccacgacggaggctaccgcccacgtggcaatgactggatggcatcagttctttttgacagtggtggatag

SEQ ID NO: 11158 - DNA, 822 bp, Zea mays
  Peptide Sequence Number=SeqID_54533
atgtggagaattgcagacgtccgatatccgggcgaggagtcgggctcgcgcgggggtgaaaaatccggaggcgctgttgtgccgtcgctggcgacttcgatccatctcggcgagggggcctcgcggcgctgctcctcggcgccgccggccaagctgggctcaaagaggccgtgctcgagcgggtccggaggtggaccgctctcggtggctggaggcaaggaggtggccgccgacgagtcaaagatccaaggagcgggtgtgaccgtcggtgttcgtcgccgtcgaaccgccatcgccaagaagctgagaagatccacggcgccgacgaaggaaggtggggagaaacacaagcgcatctcgacgtcgccatcatcatcgtcttccattcggtcgggtggtccagatccgaagacaaaaaggaaatttctttgtgctagaagctttgttcatataggaatcgagaccatggattcgaagaacgcaaagctccgaagagtactcgctcatttaatcagagtagtggagcagcgttgtgccgacatcgtcgatgtcgtccacggtgccttccaaccagttagcggaccagtcctcaatgaaatgaatcgtgctttagttcagatcgaggaccttgccaaggaccttgatcaccttgcactggaaaaagactgggagatggagcacatggccccttctccaattgctgaatcatcagaaacagaggatgagcttctgcttgattatgattcagagttgaatcctgacgatatcgtcggctacgacgacggacgcgactactccaccgacgacacctatccctactag

SEQ ID NO: 11159 - DNA, 628 bp, Zea mays
  Peptide Sequence Number=SeqID_54534
atgtccggtgcacaccggacagtccggtgctcccttctaaccgttggctcggccacgtgtcccgcgcagatcgcgcggccgaccgttggcccggccgaccgttggctcaccggacagtccggtgcacaccggacagtccggtgtaaaaaggttcacactcagccaataaaaggaccaagttttggattcaacaaaggagcaaaggggcaaccgaaggcacccctggtctggcgcaccggactgtccggcgactccgctataattcaccggactgtccggtgtacaccggacagtgtccggtgtgccaagggaggtcagcctcaggaactcgccagcttcgggaaaagccaacggctcgtccgctataattcaccggactgtccggtgtgcaccggactgtccggtgcgactccggagcaacggtcatctccgcgccaacggctctctgccgcgcatttaatgcgcgctctgcgcgcgcagaagtcagaatcgcccatgctggcacaccggacagcaaacagtacctgtccggtgtgcaccggacacccagtcgggcccacaagtcagaagctccaacggtcagaatccaacggcagtgatgacgtggcagggggcaccggactgtccg

SEQ ID NO: 11160 - DNA, 1029 bp, Zea mays
  Peptide Sequence Number=SeqID_54535
atgaaggcggcatgcaactgcaccacggggatgcaccctttcgacttcgacgcatccagcatggaggcccaggcccacacgtcatgtaaccggcgtgccggttactacgtgcgaagaactgcaccgccacttacgccaatgccgcgccttctcgactccggaaccggtaccgcgactcaaggcaaccctgtacatggcccaacagtgccaaccaagcacatcggtcacagggaccgggaaaggggatactccgaaagggatccttctccgcgaaggaagcgggccccgagccctcctactgatcaggggttcgaaggctggcccctcggaggggttcgacagccaccccagagcactcgggctccgcgccaactactgatcagaggttcgaaggctggcccctcggaagggttcgatagccgcctcagagcactcgggctccgcgcccactactggtcagaggttcgaaggctggcccctcggaagggttcgacagtcgcctcaggccactcgggctccgtgcccactactaatcaggggtttgaaggctggccccccgaagggttcgacagccgccttagaacacgcagagcgagggatgactctgggtacgtccgatacatggccgaggctcgggctacgctcccgagtcggcagggccgaagtgactgcagtcacttcgcccctccactgactgacctaacaggaaacagcgccgcctgccctgctccgactgctgtaccacccgccagggtgaggctgacagcaaccgagtccagcctcaggcgccatagaaagctccgcatcgcccgacctggggctcggcccccgcctcgacctcggaagacggtctccgcctcgcccgaccctagggctcggactcaatctcgacctcggaagacggtctccgcctcgcccgaccccagggctcggactcagcctcgacctcgaaagacggtctccgcctcgcccgaccttgggctcggaccgaccacgttacaggggggcacatcattaccctacccctag

SEQ ID NO: 11161 - DNA, 174 bp, Zea mays
  Peptide Sequence Number=SeqID_54536
atggtgaaggacttggaggcatggaaggccagcaaggatgttcggatcaaggtggaggaccaaaccgacgtccgtaatctgtcttggcaggaattagccctcatggcgaggtcaatcgtgcagtgcatggttgataaccagaggagaagtggtgctgcgattgccgggttctag

SEQ ID NO: 11162 - DNA, 1530 bp, Zea mays
  Peptide Sequence Number=SeqID_54537
atgggtgtcctagtatctggaactgtgattcagggggtccgggcacacgacttggcttccaaggccaaatcctgcaggtctaggtcccagtcgaggctacctcctggaggccgagacaccaactcttccttaggtatgctggtatctagcctcgacacgtcgagcctacatcccaagggggccaggtatgacctactcgacatcagtagggtcgcgctagaagcgcgcgaccgccatctccgtgacatcttgtacgaccttctgggtggcgtcttcagtaacagcagccgggccagcggtcaccgttggaggcggcaccgaagccatcaaagccaaagagatggagccgcagctcagctcgcatcccacctcatggagttggagctagaccagttcatggtggtgtaccatgggatgctggtgaagctcacgcgaaagatggagccgcagctcagctcgccttccgcctccggaaggtcgctgcgcaacacctattcctccgaatgctggaggaagaagcgtcacccccacagacttcttgcagaggtaggcgatgatggccacctgaaggatgaagcagggcgtgaagtgctgaggttggaagtcgagctcctacagcagcagcacgaagaaagacgagatcggcagcgccaacccgcaggagaggttggagacgaagagcacgaactccccggcgcgagatcgccaaggcgaatcaccgcgggggagcaagccgccgcctgcggtaagaagtcgatccgccgctcgcgcctgtaccgcgtctcatcgaggccacaacagaagacagagaaggtgaattttcaaaaccaatgcagcggtatcgaggcaccccgcgcgtggctcagcaaaaccatcaagtgcgaaggcctggggctcgtttcctcccctaaggcgagcccgggggccactatcggttccctgaatcagggggccgccacgtggctagataagacggtatattccaggatatcaacagagggtccgaaccctcatgggaaagtgtcggtctgggccactcacagcaaggtcccgggattccggaacaaagaatacccaggccttgaccaaggccaggcggggggcgggtgcattccgccacccggccggagatttcctctccgacaaaagtacactcaggatatacttaagaactttggaatgaagaatgccaagcccatcaagactactatgggaacaaatgggaatctcgacctcgacacaggagaacacgccaagagggagatggtcaccggtgaaaatctcgaaggctcgggaaggaagaacgatgaacagactccatcaaaggagaccgacgacaagcacaaggaggaatccgcttcctccatcaagtcacataggaagggtgacaagaagaaaaagaaaacaaagaaggcggtctactatgagaccgactcttcatcaccttccacatctgcaaaggcaccacaggtaggcgacgaggactacaactccgatgaggccgcccaaataaagcattttaatttctaa

SEQ ID NO: 11163 - DNA, 513 bp, Zea mays
  Peptide Sequence Number=SeqID_54538
atgcagggtggctgggccatcgcccgccagtggagtggacagggcgcattaaatgctgaggcggcacatcgccaccagtggaatggacaggactcattaaatgcgggggcagcacatggcccaggagccttacgtcaggctccgcccgttggcttacgtcacgggcatcggccacgcggcaacaacgggtctccgcctgagcggggagcggaagcgtacgcggtatggtctggacacgtgtcagcttcagacccccgcctagccttggtcaaggcctgggtattctttgttccggaatcccaggaccttgctgtgagtggcccggaccctacacagggggggtccgggacccgtcccaggggtccgggcacgcccgtggaggttctggaccttgcccggaggtccggtgccctcttggagttgcttgatttggaatctaaggaaatacttcaactcccccatcaaggactcaattttttgcatcataattctactaaactcttcacaagatga

SEQ ID NO: 11164 - DNA, 441 bp, Zea mays
  Peptide Sequence Number=SeqID_54539
atgggcaagaacaacaagcgcaagcgtgagccgactcctccatcggaggagtttggtgactcggaatactcggaggaggagttctcctccgagcccgaggggtctccgactcccgcctctcccccggcgtcgtccgatgattcggacgactcccaggggatagccgcggaggtctggacatacatccgggccgtcgagcgcgccgggctcgaaggctcggatgagtcggagtactcctcggatgaggaggactcggacggcggcgacgagggtgaagacgacgacgacgacgacgacgacgacggcgacggcagcggcaggggcggcggcgacggcagcagggacagcaccaagggcgacagcagcaggggcagcaccaagggcagcagcaggggcagcaccaagggcggcggcggcggtaggggcagggccagtggctag

SEQ ID NO: 11165 - DNA, 153 bp, Zea mays
  Peptide Sequence Number=SeqID_54540
atggcgtcaagcatcgggagtcgtatgcgacaagagagtgccacagaagttgaaaggcaatacattcctggaaccaagatggtattccctggactgaaaaagccacaggaacgtgctgatctcattgcatacctgaagaatgccactgtctga

SEQ ID NO: 11166 - DNA, 441 bp, Zea mays
  Peptide Sequence Number=SeqID_54541
atgtccggtgcaccagaggactccagtgcaaactcgtcaccttcgggaaattccagaggcaactccgctataattcaccggactgtccggtgctccaaggaagagcggcctcaggaactcggcagcctcgggaattcgcttcggctgctccgctataattcaccggacatgtccggtgtacaccggactgtccggtgtaacagcggggcaacggctacttcaggcgccaacggctacctgcagcgcatttattgcgcgccagcgcgcgcagaggtcaggcacgcccatgctggcgcaccggacactctacagtacatgtccggtgcgccaccgaacatccaggcgggcccagaagtcagagctccaacggtcggaacccaactagagatggcaacgggtataaacccgccgggttttgctatcccaaacccgtacccgtga

SEQ ID NO: 11167 - DNA, 207 bp, Zea mays
  Peptide Sequence Number=SeqID_54542
atggtgggagtggtgtctggtgtggaagatccgccactggaggcagcgaaggagtggcgtgacggggcaagcacgggcagggccggtggcggcacatctggaggaggtgctggccagagaggaggacgcctgtgcctgccgatgggggaggttggcagcatacgagaaaagagccgcgtcgagcagaggaggtcgcgcgccgactag

SEQ ID NO: 11168 - DNA, 1563 bp, Zea mays
  Peptide Sequence Number=SeqID_54543
atggcgttgccggcgggcacggtggtggtggcctacaacgccgccatctcccggtgcgcccgcgcggggctgtacgcgcgcgcgctggcgctgttccgcgagatgcgcgggcggggcctgcgcgccgacgagtacaccctcccgccgctcctcaactccgcggcgcagctgcggggtccgcccgaggcggtggccgcgctgcacgcgctcctcctccgcgcgggcctcgcgccccacctccacgtcgccaacgcgctcgtcgacgcctacgccaggctgccccacgcgggcgccgccgcggcgcgggccgtgttcgacgaaatgccgcgccgggacgtcgtcacctggacctcgctcctcacggggctcgcgcgcgctggcgcccacggcgcggccgtccgcgcgtaccacggcatggtcgcctcgggggtccagcccgacgagttcgccgtcccggcggccctcagctcgtgcgcggcctccaccgcgctcgacctgggccggtcggtgcacgccgccgcggtccgcctcgggctccggccgttccgctccgtcgagaactcgctcgtgtccatgtacgccaagaccggcgcgctgcgcgacgcgcgggcggtgttcgacgcgatgccggcgcggtgcacgatcacgtggacggccctcatcgtcgggtacgcgcagaacggccgtggcagacagtcgctcgaggtctacgccgatatggtccggtccgggtgcaggccggactacgtgaccttcatcggtctgctcttcgcgtgcagccacgccggtcttgtcgacgccggccgggctcacttccgttccatggtgcccgtctacggcatcgctcccggaccggatcactacgcgtgcatggtcgacttgttaggccgggcggggaggctggacgaggccatggacctgctgaaccggagctccacggagctggacgccacggtgtggaagtcgctgctgggcgcgtgtcgggtgcaccagaacgcggagctcgccgagcgcgcggccgagatggtgtggaggctggacccggcggacgccgtgccgtacgtcatgctgtccaacctctactcccgggcgaggagatggggcgacgtcgcgaggatccgcgcgctgatgaaggcgagaggggtcaccaaggagcccgggtgcagctgggtgggcgtgaacggcatcacgcacctgttccacgtcgaggaccgcgatcacccgcgggcggcagagatctaccgcaaagtggaggagatgaccgaaaggatccgggtcgagggttacgtgccggacacggactgggcgctgcaggacgaggtgccggagtggaggcagagggggctggcgtaccatagtgagaggcttgccgtggccttcgggctgctcgctgtgccagcggccgcacccatccgcgtgttcaagaacctccgggtatgtggcgactgccacactgcgatcaagatggtcgccaaggtgtacggcagagagattattttgagggatgcgaactgcttccaccacatgaaagacggagagtgttcttgtggtgattactggtag

SEQ ID NO: 11169 - DNA, 150 bp, Zea mays
  Peptide Sequence Number=SeqID_54544
atggccgacgtggtggaggtggcggtgctggtggctgcaaaaaaattcatacatttggacccctcgcctttaagtttccagtctgcaaaggagttgttctctttgaagtggatgctcgagattgcactgtcgcctgaacgccctacataa

SEQ ID NO: 11170 - DNA, 714 bp, Zea mays
  Peptide Sequence Number=SeqID_54545
atgcgcgacggtgaagctgcgcagaaagcgaaggtcgcggactgccatccagtgcctggcttcaggatgagggtgaacccgacagtcccaggacggacgacagaacttgggctacatgttgccgccgtcccctgtaattctttggatgctccccccatcacgatccagacacagaacgcacagttggatcacgacttagacatgtcgctcacgggtgattttttagtagtgggctactgccctgtttccaatgcccgtggtgtagcgacggtgcttgaggagccggaaaccgagggcggtcgtcgtgccccgaaccaggcagttgtcgtgggcccggcaccattgactgaggccatccccgtctcctccatggaggatacgggggcgagagacgccgcacctaccgtggcgtcgtccactatctcagaccttctgcgagccatccccgacaccctcgacgccacgtgggcctgtggggcgggggttgtcgaggaggtcggtcccttggagcgacctaggaaaccggtcgaggagtacatcatcctgcctcctatcgttggggtaggcggcgacctcgttcgcgctaggccagacttctcgacatggggagggccgactctgacatggatggccaccgacggcgacccctactttgtcctcgacaatacaaagagggagatgtgggtggagtttgtaacggaacctcccaagtaa

SEQ ID NO: 11171 - DNA, 279 bp, Zea mays
  Peptide Sequence Number=SeqID_54546
atggggcgtggagcggtggcgagagtagcgtgtaccctccgtggcaagaggctggacggtggtgtatctgtgctctcgcatacccttgagagtctttcccttagtcgggtgaggaagcgacaaagttttgttgcttttgctccaaggtggtatctaatgaagaaaaacaagaatgaagatacgggaggacttggtcctccacataggatctttttgtttgataattattgggaggagtttttgcctcccttgatatgtgtactcagcactcgtttatag

SEQ ID NO: 11172 - DNA, 636 bp, Zea mays
  Peptide Sequence Number=SeqID_54547
atggcggtgaactcgttccttattgttgaagctaatcattccttaaatgaggtgcatcaagaatcaatgacagaaaccaaacgaggcgtccagaaactgccgagagagtttcgttctcaattagaactcctttctattcctctatttaagcaactagcagccaccaatgaacttgggtttttgtttgatattgcttgcaggttcaaggctgttcttagcacggcaagagcggcaacaacaggagacgatgtaactatcgctaaggcgcaacacccttgtggttgttgtagtcggatagcacaacgtcgacctccaccccaaatcgtagttatcaggagacggtgtacctatcgctcaaggcgccacaccatcttggttgtggtagtcgggcagccaacgtcgttctccaacaagttttccacctccatcatctctcatcgaaagatcgggcacccttctacccattgggtttatcaagtggtatcaaatttcaggttgctcggtgatatggagatttttgagccaaccgaacattatattcaaggcatcattcgacacgtgccttcatataccggtaaattcgatcctcatgcatacattgattgggagctaaagatgaatgcatggaagatgtaa

SEQ ID NO: 11173 - DNA, 659 bp, Zea mays
  Peptide Sequence Number=SeqID_54548
atcccatcgacggtggtgtccaatttcgcaaggtcgtgctggcggccggagatgaggaaggactctggcgccacggtttcgtgtcccactgccgtggcgggctcaccggcatcggtgagatagcagcggggaaacacgatgacacgacagaggcgcttatggtgaactctgtggccaagttgctctttgttcgccgtgaatgcgatgtttgggccatcctgcaacgccatcaggccaagcatcatgttaacgaacagttggcgctgaagagtgccgaggtggcagacctattgtcgctatgcaccgagctaaaagatgatgttgcgactgagcgagggaaggtgcccccgctggaggaggaggtgcgacgtttgagggcaagggtggccccgctgcaggaggaggtttggctattgaatggaaaccttccggcggtggccggagagcaagacgagtctcggcgtcaggtcaccgaggcctccctccgcgtcgactcccttacgagggaattggaggtcgagcggtctgagggccaagccctaagggcctggatgggggagctcgagaaggatctagagactatcgctcagacctctctgacgctctccgtaacccctggatggcttccccgagaggcggtgaagctttcccaagcatga

SEQ ID NO: 11174 - DNA, 1293 bp, Zea mays
  Peptide Sequence Number=SeqID_54549
atggccccatgtttcaggcgaacccgcggcaaaagaggccccacatgtgaaccagagtccgcgcgcagagctcaggcggagaccgcggagcccgccgcgttgattggagatgacgattctggacagtgggccccacacggcatcgaggcggctcggggtcagcttctggtcgtcgggtgcgtggcgaggttggcggccgtcgaggtcctaggccggcttggggcgctgctggcgtctccaggcggtgctccaacaacgagaagtccgaggttcccgagtgtgttgctggagacctccctgagcaacaaccttgtgaaggcaacctggcggagcgtccacttcgtcgcatggtgccaggtcagtccaatcacctggagagactacatcgtcgtctgcacgacgagcaggagtgccgatgccaggagcaggagcagcagcagcaagactcttccccctcgcctcagtaggaggtggagtctaagaagccgccttcccctacaccttagccagagatgtcccctgcaccaccatagggcatccccggctgctggaggagaccctgacggagacggagacgacgatgatgccgatggcagttcgagccacgacacggagctctcggaggagccggagccagagggatggatcgctagacccatcactcgtgacgccgctcgcgggtgtcacttccacaacactctcgacaccctgctgcgtcgggcctctgaccgacacacttggttcatcgagtactgttgtgtagtctaccagcaacgttgcgggttatacccggaccagtgggagcctacttgcttggtgcgccatccggacgatgatctttggggtgcagaggccttctcagagcactattctattactgagagggatactgctgaggcagccatgcaagatgcaccacgacaggcactttctcagtattgctcgttgttcagcggggtagctgatggccttgacctgaagtactaccctcgccattcgaccgacagtgctagaggtgtgattgtctcgccagttggtgagggcaatcccaggctaaacaatatggtcaacctggctgccgtgctcaacatagagctagaccacacccatgacgagttgggcaaggttcgggcggaggttgcggaattgtgtgctgagtgtgcagcacgccactatctggattgtggttctaccgcccctgtatggattcagcacccttaccgttcactgccctgtggtcgcttcgactatggtaccccagactgcaggacccggatagatttggatccctag

SEQ ID NO: 11175 - DNA, 576 bp, Zea mays
  Peptide Sequence Number=SeqID_54550
ctcgaggctgacgaggctgcgaaggcagcactactggccgcaaaaaagggcaaggccctcgccctcacccactccacccaccaagaggctactgaagacgacgttctccgcacctgcgaagacgacgctctccgcacctgcggccctgaaggacaaccgcaacctcccccaggcttcgccccaccagagggcgcggacctcaccgaagacggcgaagtcctcgacatctcagcggaagaacagctacagctgcgcgccttgcgcatcaagaaccgcaatctccatatgcaaaaagagatactggaggccaagcgccaacgtgtgtccgcactagccaaggtgcggcaaatgatacgcgacgaagagcagaaggcccaggaccttgagcaggagatcgcgctgatgcagcgcgaaggccacctcggcctgcagcacgggtgttggaacttgctatcagtagcaagaaggccaacaagggtacctgaacgcccagcgccttgtgctaaggacgcatgtgccctcagctacctaggttatccccagaatattcccataaagcagggttacagactgtaa

SEQ ID NO: 11176 - DNA, 465 bp, Zea mays
  Peptide Sequence Number=SeqID_54551
atggagtacacgaaacacgcgctacaagacaatccgatcctgcaggctcgggtcttgacgctggaagggagcagcagcaccctcggcatcgacaacactttcggcgaggtccgacctagcctcggacggcgacgcggtacgaagatctccactccgaaggacgacgtcatcgccacgcccgggccatcgctgccagggtcttctccgggaatccagcccgagcaggcggctcggtcggtcaccccggggcctcggccagctgtcctccaaggacccaactctacctctgttcatgctgacaccgctgcccctggcctcggctcatcggagagcggccgaggggttcctttaactaagctagagaagcctcggacaacaaggccaaccgagccgagggactcctacgcctccgggatacggatacctcactcgtcacctttacacggggcgactcacgcttggtga

SEQ ID NO: 11177 - DNA, 1599 bp, Zea mays
  Peptide Sequence Number=SeqID_54552
atggacaaggatcgccagggagctgcacagaagcgccagccggtcgtcaggcttcatgaagccaggccgaagaggcagcggggggctgcgaaggctgctgcccccggcggaggccagccgccgctagcgacgaaatcggctgtccctgcatccagcagggcgccggatgctgcggctgccgccggtggttccaagtctgggaaggctgcaccggcgtccatcagggtgccagaggctgcgaaggcgggccgagatttgccgccgctgagcaagcgcgtcgccgacttcgccaccgacattagtgtggatgactatcttgttggggcggacgaaggccaacttgtcgtcgttccgcctgccgcggcgaccacggcggctgccgtagtgccaaaggcgaagggcggtgcccttagtgctggcggcgagatgccgacactcactgctgtgagggacgaggcgggtgctgtgtcccgccggctgaaggagatgaaggaggcggctaacttcgcagaccgcgcggcgtcgggggccctgacggtagttgtgtctgccgaagtcgagagacttcggacgcaacatgctgacgccgtccgggagaagtcggtcgccgacagtaagtgccgcaagctggcggacaaggtggccgcgctagagggggagaagactgacctccggcgccaactggcggaggagaggaacgaggccaatgaggccctcgccaaggtgcaggctgcacaggcggaggccaatttggcgcgggtggagggcggtcttgccagggagcgcgccgagcagttggaggagcggctccacgctctgcagagccgtgtggagagggccgaggccgcgacgcgcatggaggctgagcggactcgcaaacagcttatgaattcataccatgagctgggcgcgcggaccgttgacttcgaagtgccggaccgagagcccggacttcgctgcctggagtgggtgcaggaggagttgcaggcgctccccactatcatggaggggtttatgtcttatgcttccctggtcacctgcgagggggcgatgaacgcgctctctcgcgaagggtgccggcactatgaagtcttcgaccaagctgatgaggatttcgagcgtgatatctacaaggttgaggaccctatagtgaaggaatccgccggagccctctacgaccggatgtggggcccccacggtcgagaggtggtcagggaacgggccgagacggcgaggggtcaggcgacacgtggtgagagggtggatgactttggggctttgaacagcgtgctgcctgacccggagtcgaacccggcggaggccgccctggagccgctcccgaagaccgccgaaggcgcccctgatgcccccgcagccgctgcggccggcggaggcccgccccctgagaccgccgaaggcgttcctgatgcccccgcagccgctgcggccggcgaagggccccgcagccgctgccgccgcggatttttcacttgtatattacatggctccgcctcgttaaaaacctcaccccccgggaggaaaagagtgcgggccagaataaaattgtttttgcgaattacaagggcgaatcagccctga

SEQ ID NO: 11178 - DNA, 507 bp, Zea mays
  Peptide Sequence Number=SeqID_54553
atggccagcaccggcgctggcgatgacatgccacctgtatcgtctgtgcataagccaacagcgtctgcgatcgccgtttacacaaagggtgtctatgttactccaccggtgacattgagggcacctggacatatcgataagcacacaaaaacagcagacgtggtcggcgcagagaagcacatccccatgagacatattgggccgaatgaacaggacacacctcatattcttcaaagccataaatatagggagcggaagaattgtaaatggttgaattgttcaatggaaggaaagaatgctgaaagggtagctggaaatccaaggatacgtaacacatgttcaaaacgaacacattgcaaggttgggatgaaacttaaaaaaatctacgatgatgctaaagagaatgttatttccgtctggattgatctggtaaactatgagcataatcatgaattcttgaagaaagatacagaaaaaagggcaattgcaatgcaacaaaacgcatga

SEQ ID NO: 11179 - DNA, 138 bp, Zea mays
  Peptide Sequence Number=SeqID_54554
atggatctgctatctggggccgcagatcatggcctgtttgttccggatgtagttaagaagggcctagccactattgctgatgaggtgaaccagttggctcaaagagcaagggataacaacctaaaccaagaagactga

SEQ ID NO: 11180 - DNA, 822 bp, Zea mays
  Peptide Sequence Number=SeqID_54555
atggcggacgatgagcagcagcaggcagcagcatatgcgtgcgtgccgccagggttcaggttccacccgacggaggaggagctggtggggtactacctcgccaggaaggtggcttcccagaagatcgacgacctcgacatcatcagggaggtggatctctacaggatcgagccatgggatctccaggtccaggagaggtgcggctactacggcggcggccaggatcaggaggagccgacggagtactacttcttcagctacaaggaccgcaagtacccgagcggcacgcgcaccaaccgcgccaccgccgccggcttctggaaggccacgggcagggacaagccggtgctctcctccagcagcagcggcgtcgtcatcggcatgcggaagacgctggtgttctaccgcggccgcgcgcccaacggccgcaagacggactggatcatccacgagtaccggctgcagagcaacgagcacgcccccgcgcaggaggaaggatgggtcgtctgccgcgccttccacaagcccatgcccaaccaccaccaccacatgatcaggcacgccgccgcttcctgctgctactactatcctgcccctgctgctgcgcctcccgccgccggtctgccgccgcataatggccacctgcacctccacagcccctccgcggagtcggcggtggattggaacctgctgagcagcctgctaccgcccgggcagctggatttcgtccatcacacgctgacaccgccgccggcttcttctccttcttcctgctccacgacgaccaccaccaccaccaccaggaacaataacaatgaatga

SEQ ID NO: 11181 - DNA, 147 bp, Zea mays
  Peptide Sequence Number=SeqID_54556
atggagagtcatgatctccgggtagaaagggaatcacagcttgtgggtggcaatgagattgttggttttggtattgactctggtaatggagaagatgaagccgtagaaggagaccatcaggagttccaagattttgatgagttctag

SEQ ID NO: 11182 - DNA, 852 bp, Zea mays
  Peptide Sequence Number=SeqID_54557
atggctgccccgaaccaggaaaggggatactccgaaagggatccttctccacgaaggaagcgggccccgagcccccctactgatcagaggttcgaaggctggcccccgaagggttcgacagccgcctcagagcactcgggcttcgcgcccactactggtcagtggctggcccccaaagggttcgacagccgcctcagagcacgcagagcgagggatgactctgggtacgtccgatacatggccgaggcttgggctacgctccagagtcgacaaggccgaagtgaccgtactcacttcgcccctccactggctgacctgacaggaaaacagcgccgcctgcactgcttcgactgctgtgccacccgtcatgggctcggactcaaccttgacctcggacgacggactccgcctcgcccgaccccagggctcggactcaacctcgacctcggacgacggactccgcctcgcccgaccctagggctcggactcagcctcgacctcggaagacggtctccgcctcgcccgaccccagggctcggactcagcctcgaccttgaaagacggtctccgcctcgcccgaccctagggctcggactcaacctcgaccctggacgacggactccgcctcgcccgaccccagggctcggactcagcctcgacctcggaagacggtctccgcctcgcccgaccccagggctcggactcagcctcgactccggaagacggtctccgcctcgcccgaccccagggttcggactcaacctcgacctcggaggagtcactgcctcgcccgacctcgggctcggaccgaccacgtcacaggggggccatcattaccctacccctagctag

SEQ ID NO: 11183 - DNA, 333 bp, Zea mays
  Peptide Sequence Number=SeqID_54558
atggtgcagttgcacgccacctacatggcggtatgccctttcgaccgctgcccggttgcattccctcaccaatggtcatctaggatgatgaccaccagttcgatggtggggagaagcaagccgggctgtggcctctgccccgccctcagcttcaaggatcttcatcatccttgctgtggcggagggcgagctgagccagagttctacctcccgcatgggccggcaggccacctcttccttcagcattcaggggagagggcactcatcggccttgcgaagggggcgaacttcgacaacgcgggactggtcggccgcaagcgccgtcagctctag

SEQ ID NO: 11184 - DNA, 540 bp, Zea mays
  Peptide Sequence Number=SeqID_54559
atgagcccaaactccggcggctacgacgacaaccgcgacggcgccatagacggcccctcgccgcaacacatgctcgagcccccaaccttacttctaccgggttgtacaccactatggagcgcgcgcaagtacgatggggaggttcactcaccggaaatggggtcgtgggaggccggccacgacgctaggcggtccggcgctgttgaagatatcccgaggagcaattgctctggagcagcgacgcccagagagaaattagtggtcgccgaggttttcaggtgccccgccgcagccctagaacgccccgcggatgcccgagcgtacactaactacgagttggacggcggcggtccaaatctctctctcctccccctgtctctctcaaactgtttcctgacgaggttggtagaggcgtggcgaaaagagagggttaaggcttcggctcctccgcacttaaatcccttcagactggtccaagcgcacgcaacgaaccacccgaagctcacggcgaagctccgccatgcgcgacgtggtggttga

SEQ ID NO: 11185 - DNA, 798 bp, Zea mays
  Peptide Sequence Number=SeqID_54560
atggctcgtcttagacacaccgcacgaaagtctgtcatccccttcttaccctctcatctcgcggagcgtccgcttcgccgtcccgtggccggtcagtccagccacttggagaggctgcatcaccgtctgcatgtggagcaggagcagcaaggctcttctttctcgctccagcaggagatagagtctgcgccccctgcaccaccactggacgccccagcccctggagtagctgctggaggagaccaagacgatggaggtggcgacgacagctcgagctatgacaccgacttttctgctgatcaggagtcggaaggatgggttgctcgacccatcactcgcgacgctgctcgcgggtgtcacttccatgatgtgctcgacaccctgctacgtcgggcacttgaccggtgtacttggtccatcgagtatcgttgtgtggtctaccagcatagtcgcggggtctacccggaccgctgggaggcgacctgcttggtgcgtcgtccggagaacagtcttcggggtgcggaggcctgctcggagcactattctatctctgagcgggactcagctgaggcggccatgcaagatgccgcacggcgtgtgctttcgcactactgctcagtgctcggcggggtagccgacggtctcaacctgaagtattacccccgtcgtccatctggcagcacaggaggcgtgattgtttcgcctgtcggtgagaacaatcctaggttgagcagcacagtcaacctagcgcgccgtgctaaacacggaactggaccatgcattagacgagctgagtag

SEQ ID NO: 11186 - DNA, 567 bp, Zea mays
  Peptide Sequence Number=SeqID_54561
atgcaacttcgtggaagttggtacctttcagccatcgttcggcttcaaggattttcatcagtcagcccggctgcatcccctcgccggtggtcacccaagacggtgaccaccagcccctgggtggggagaagcaagccgggctgcgatcttggtcccgccctcagcttcaaggatgttcatcatcctcgctggggcggaggccgggctgagccggagctctacatatcgcgcgggttcgtgggtcagcctctccttcagcattcgagggagagggcactcactggccctgcgagaggggcggacttcggcaacacggggctgatcgacgacgggcgtcgtcagcttcagcgcgttgggctcgccggcttggctcccggtgccccctcctgccgcaagggcggttgtcacgccgcgcgcacgggaggaccgcccaagacgtcgcgcgccgctagggcggcgttcgtgttctggggttgtcctgcctttgcaccggtacggcgcctccgcgcggaggtcggtgctctactcgtccgggaggatctgagcggggatctgccggagggctga

SEQ ID NO: 11187 - DNA, 369 bp, Zea mays
  Peptide Sequence Number=SeqID_54562
atggcccccaagcgagctagttcgaaggcagccccatccatcgacgaagcagcaaaggcagcgctgctggctgagaaaaaaggcaaggcactcacggacaacaccccgcaagaggccttcgaagatgaagctgtcagcaaaagacagcgccaagtgcaccccacccccgaaggcaccctacgcatctgcagctccggaggcgtaccgcaagcaccacctctagagggcgaagacgcaatagaggacggcgaagtcattggcatctcaaccaaagaccagctacagctacaggccctgcgcatcaagaaccacaacctccaaaagcagaaagacatcctcaaggccaagcgccaacgtgtcaccgcttag

SEQ ID NO: 11188 - DNA, 963 bp, Zea mays
  Peptide Sequence Number=SeqID_54563
atgtcttcgcgttcccttatgcatcgtgtctttccaccttccaagcccccggatgggggatacccgccgtctttccgcctcatcgttggaggaatgcaactccgtgggagttggtacctttcagccatcgttcggcttcaaggattttcatcagccagcccggctgtacccccccgccggcggtcacccaagacggtgaccaccagcccctgggtggggagaagcaagccgggctgcgatcttggtcccaccctcagcttcaaggatgttcatcatcctcgctggggtggaggccgggctgagctggagctctacctcccgcgcgggttcgtgggtcaccctctcctgcggcgttcgagggagagggcgctcactggcccttcgggcgggtcggacttcgacaacgtggggcttgtcgacggcgggcgtcgtcagcctcagcgtgtcgagctcgtcggcttggctcccggtgccccctcctgccagaaggcggcttccgcgccgtgtgcacgggaggaccgcccacgatgtcgcgcgctgctagggcggcgttcgtattctggggcggtcctgcctttgcaccggtatggcgcctccgcgcggagggatgtttgtgcgagcgagagttgcttctcgcggaaggtgatgagtgaggtatccgtatcccggaggcgtaggagtccctcggctcggtcggccttgccgcttacgcgcactcttacccgtccatggggctctgtcaccgactcagtcgagaaggctcgaaggatcgcttcggcagaagagcttccgaacgtgaagacttgttcggtccgcggaatcacttatccgaacgtgagttacttatcgcagaaggtgatgagtgaggtatccgtatcccggaggcgtaggagtccctcggctcggtcagccttggctgcttacgtgtactccgtcgttttcaggatccactttttgaagtag

SEQ ID NO: 11189 - DNA, 1397 bp, Zea mays
  Peptide Sequence Number=SeqID_54564
atgccgtgcacgaagaatgtgtcggcgtcagggggaggagatgacgaggaccctcctcgccccttcaggcaggtcaaggggaagactgtttatttggagcagcaggaaggccgcaagaagtggcgtctggacagagcagcccaagcagcgatagcagcagcagcagccactgagcaggcagagcgaggagctcagttacagattccttcggatcagattgcctatcgagttcgtcgtctcgcctctcgtcctcgctcctccgctcctaccactcccaccactgcctccactccaccacccacttcgcctgctcccgtcactcctgcgccatccaccacctcagccatacccgccacctccactactccagcttccactgctcctcctcccgctcccctttccgctcctcttatcccacctgctcgcttctgggagcgcgatgagactgaggtgcaacctctggctgcggatcccagactgtttgatcttcagcgtgctacagcggcacgggagtccttcttcagagcacagatgtctgcacagattgctctacgagtgcaccggcttttggaccttcctgcatttctgcttgccgccggtgctgactctgagctcatgagacggacgcttctgccacggatgggttacagggaggctgccactcatattcagctttggctacttggtgccttggtctctcactccgagtttgatgttgtggatttcctcatttgtgagatcgaggacaccgtactagatgcaccagaggatactgtgccggcaccttctccagtgattgatactcaggccgaggataccacctttcaccagttcgagactcagggcgcagcagtacctgacgatgatgatgatgatgatgatgtccttggggttccacctcctatgcctcctcgcactcatgatcatgaggctgggagttccagtggtgctgcccttgctgcccctcctgccattgaccctgctcttgcagcgatcctccagactcttactcagcagcaggctcacttggcagcgacgattcaggacaggcaggatactcttcagcagcagcttctccaggaccggactgagaacagggcattcatgactctcatgcttcagcacaccagtgtgccgattcccccagttcagtcagcaccgcctccacctcttcaggctcctattgtgccagctattcagccaggaccccctcttcctacagctggtccttcttcctcttcgctccggccggtcactctggttttcacgtcgccggtcatctgctctgtcagcactcagtcgctagtgccaccatcatatactgttaccgctgccgctgtggcggtgtctgtgattttgacggctccggcagctcctgcagcgcagcctccgcaaga

SEQ ID NO: 11190 - DNA, 996 bp, Zea mays
  Peptide Sequence Number=SeqID_54565
atggactaccaattggagcggtacccgttgacggcggcgaatgttgaggatggcggagaacgtggaagcagtcgggtcggcggagagcgaaggagcaaaagcgtcgccggagaaggtagggttttcgccggtctccggacgcagcggcgcgaatattggagcgaggattggggaccccgaggacgcgccgctcaaatgccgtttgcgactggatcgacagcgagcgacgaggggttggaagagtcgtcggaaaggggagcggagtcgccggggatggaagaatcggcggagattcctggagtcgtggcggggttgaggttttgcgatttgccatctaaacttgtgtctgtctctctgcgcaccctgaccacttccgagttccgataccgttgcgtgcgtgcctgctcgggctttgtcgacgcggcgaagaccactagtcgtctcgtcccggtggggggagtggccagtgggggcaggcagaagctgacgctgaagctgaattctctggccgctacgacgtcaactgttgtttcgtcggcaggtcgccctctcgcgtcagcgtcggaagctccgcgtcacgaccacccaacgatccggcgcaacgcgacctgcccaagtgcccatgtcgtatccggcgcggaatcggtgcggcacgtcacggtacctgagcgcccagcgccttgtgttaaggacgcatgtgccctcagctacccaggtgaggcccgtagcacacggcgaccgcgcagggcccgttacaatgggccggatcatacgtgggcctctgaacaggacgaggccgcacggtgggaggacctcatcgcaggccttcgtctggcgtcgtaccgggcgaagggtgtccctgtccgttttgtcttcgtcggaccagtggcaccagcgagggcttcgagcggagggtggcgactatgccttcgccccaacatttgccctccgagggaccagttcgacaaagtcacctggtgccgaagacgtcgctag

SEQ ID NO: 11191 - DNA, 93 bp, Zea mays
  Peptide Sequence Number=SeqID_54566
atggatggtcaccctgctgttccgcttctgatagaagttttatcaacgaatcctttgggaccttgtgctgccgataaaaacgaggatgcttga

SEQ ID NO: 11192 - DNA, 1152 bp, Zea mays
  Peptide Sequence Number=SeqID_54567
atggcgatccaaatggacaagacgtccatcatcgtttgctcggtgatcgggtctctagggttgctgagtgccatcctggggttctcggcagaggggacaaagctcactccatataccatactggtgtacggcgacgactgcctctacccgcagaacccggcgatcgggctcgggatctgcgccgccatcttcctggtggtggctcagatcaccttctcggcggtgggcggctgctgcggctgctgcaggtcccgcgccatcccttcggagaccaaaaggatcgtcagcatcgtctgcgccgttttctcatggatagcggcggtgatcgcgttcgcgctgttcatacaaggtgcggcgtggaacgccaacgtggtgcgggtggaacaagcgccctactgcccctacctcaaggacggcgtcttcgccggcgcggccgtgctcgccctcgccgccacagcgctaagcatcacctccttcatcatgcagcggacccagccagctgcggcggcgacggcgacggcgacggcatcggctgtgggcacaccgaacatgccaggagggcagtcgccgtcccccgaggtagtaatgggccagccgctgtttccgtcgggcaaggcgcatcagaacgattaccccgtaaaaccccagggatacgagcacgagcagcagcctcatcaggtgcagcaggtccctcctcctaccgactctcaccacccaccacaaggctacgcacagtccgctgcgccaaaccaccagctccctccgcgcccagccccagcggcagcagccgcagcaccggcggcggtcgcagcggcagccgcagcctcggcaccgagcgtgctgcagccggcgctcgggacggtcgccatgggccagccgctgccgctgcaggtcccgccacagtactgccttcctgtcccggcacctcagatcggaggcgtggacattcctgccgctctcccctctgctgctgctccggcggcagggagcgggtccacgctatcgacggctatccgcaacgaagtagtgagacaagggattagaatggctgcggaggtggtgaaagattccctctttcctgaaaacgggggtagcgttctttccatgatgacggattccgctggaggcgacgctgttcaggttacaaactaa

SEQ ID NO: 11193 - DNA, 3111 bp, Zea mays
  Peptide Sequence Number=SeqID_54568
atggcgtcgcagcatgcgccgccgaggcgggagctcgacctcgacgctttcctcccgtcctctccgacatcctccggggcctcggacgccgacccggccgacgatgaccaccgccgcgccgtcgacgacctgctccgcctcctctcctcctcagactcggactccgattccgaggagtctagccgcatcccaagcaccagcatccagacgctatcccgagtccaagccccggcgcctgtcgctgagccctcgccgtcgccttccccatccgcgtccccgtccccgaggagatccgcatcggccttgccgtcggagaccctctcctccctcgtcgcgagaaccttctcgagcaacggcgcttcctcgtcgtcgaagcccctcccctcgctcttccggggcgtccgccccagccccaaacccggcgccgcgcttgccgctgctgccgcagcgtcccgcgcggtcctcaccccacacgccgctgccatcaagtcgcgccgatcagtatcggcgcccgtggagaaagttctggaggaagaggggagtggctccgaaggctccaaggagttccttcccactgggagcttggaagcagaggtagaagagaagggtgattcggaagcggttgctgatgcgaccaagcaaactgcaggtgggaatgtgggtgcggaactgggagaggataaacaggcagaagtgggaggtgaagagaatgctgaggctataaagctggtggaggcaagtcctctggatgctctagctgcggaggattccagtgggcatgagcaaggtaatgatgccaatttggcggaaactgaccaagttgggaatcagattgaggctgtctatgaggaaaatgaggatgaccaaactggaggtgataatcatgttcaatcaggtcagggtatggatcttattgcgattgctttagaggaaagttctgatgatgaacatgaatttgaaagatctgacagtatcttgcaagaacaagtggaatctgggagcttaattgataaagtgattgaagatagggtagagcagctggaggccagcaggaaggctgagaacacagagaagaagctgaaggtgtcaatgaaaccgttggagtgggcagaggagcttgagaagaggcaggcctcgtctggtcaacattgggaggaaggagcagctgcgcagcccatgcaactagagggaatcggaaagggcccaccagctatcggttacatgcaaattgagatggacaatccagtaacccgtgtcatgtcctcaccgtcatttaggtcagaccatggctctccccaggtgctggctgttcataggagctatatagcaatgggcacatctaaaggtgctgtcatcgtcattccaagcaaatactccattcatcaagctgatgatacagatgcaaagatgctgttcttttggaaccaaggcgagaagactcaatcaccagtgactgccatgtgctttaaccagcaaggggaccttctgctagtaggatatggtgatggtcatatgacaatttgggatgtacagaaatctgcagcagcaaaagttatatatggcgagcatacagcaccagtagtgcatgcttgttttatccgccaatctaaagccatcactggggattcaaaaggggtagttctattgcacacattttccattatccccgtaattaatcgtttaactgtcaagggaactcagcgtctttttgatgggaatactggaattgtgctctcagcctgtcctcttgtaatggatgaatcttttggttttagtaattcatctgcccagggaaatcagacaacttcctccagtggtggtcttggcagcatgatgggtggtgttgttggaggcgtggttggagtagattctggatggaagtttttcaacgaaggctcttctccaatggaggatggtgttgtagtcatgtttattatgcatcaacatgctcttgtggttagactccgtaccaatattgaccatgttgaccatattgagaccttctctagaccagatggagcacgtgagggctccatcgcgtatgctgcgtggaaatatacatcatatttgaatgaatcgtcatcagtagatgaagaacgagtgtcatggctagcacttgcatgggaccgtcaagtgcaagttgcaaagtttgttaaatcaaagatatttaaacacaaagagtggaagcttgatagttcagctgttggtgttgcctggttagacgaccagatgttagttgtccttaatttgagagggcaactctgtttattctctaaagatggcagtgagcttcgcagaactacctttgttcctgatggccttctttttgatgacaccatattgcaccatgcacatttttttaacaggtttggtaacccagagaggcattttaacagttcagtagcggtaagaggtgctacagtgtatattcttgggccatcttttctcacggtttcccgacttcttccatggaaagagcgaattgaagcactaaagagggctggcgattggatgggtgcactagacatggcaatgaggctttatgatggtcagacacagggtgttgttgatctcccaagaacggttgattctattagagatgccataatgccttacttagtagagttgctgctatcatatataagttatgtttttgaatatatttcaattgcgctgccaaatcatactggaaaagggggagaatcaggtgttctaatagaggcagatcgatccctgcttacacaaagagatgagcagtacgctcgtgtaggaggggttgcagttgagtattgtgtccacattggacggaatgatatccttttcgatacagtcttctctaagtttgctgctgcagaaagtggaggagccccgctagggaggccggcggcagcgcacgcgacaacgctggtcagggtggccgtgctcgaagcagaagagaagaggcagcggcggattcggtcgggtggccacgacagtgacaaatccaaccaagaagacgatgattcgtccaaagagacgacagatccagccgggaaggtcgcagctgtagtgaatccggtcgggaaggttgcgacaacgacgaatccaatggaggcgacgaagagggggtag

SEQ ID NO: 11194 - DNA, 577 bp, Zea mays
  Peptide Sequence Number=SeqID_54569
ggcgaaggtggaggttcctcccgaggtcaaggtcggagtcttacttctgaggccgaggtcgagtccgagcctctgtgtcgggcgaggcggagaccgtcggctgaggccagggctgagtccgagccctggggtcgggcgaagcgggagttcgtcgtcttccggggctgagcccgagtccgagccctggggtcgggcgaagcggagttcgtcgtctttccgggggatgagcccgagtccgagcccctggggtcgggcgaagcggagttcgttgtcttccggggctgagcccgagtccgagcccctggggtcgggcggagcggagtttttatggcgcctggggcccggacttggttgctgtcagcctcactctgtcgagtggcacagcagtcagagcggcgcaggcggcgctgtcctcttgtcaggccggtcagtggagcggcgaagtgactacggtcactttggctctgtcaactggagggcgcgcgtcaggataaaggtgtcaggccacctttgcattaaatgcccctgcgatttggtcggttggcgtggcgatttggccaaggttgcttcttggtga

SEQ ID NO: 11195 - DNA, 366 bp, Zea mays
  Peptide Sequence Number=SeqID_54570
atggggcttagtgtatgtggcttgctctgtgaaggtggtgatgaagatgatggttatgattatgactatggtaatggtaagtggtattctttccgtttggaaaggatggctcgtcttagacacactgcacggaagtcagtcattcctttcttgccttctcgtctcgcggagcatccgcttcaccgtccagtgactggtcagtctagccccttggagagactgcaccatcgcctgcacgaggagcaggagcgtcaacgacaggagctggagcagcagggctcttctttctcgcttcagcaggagatagagtctgtgaggagctgctcccctgtgctcccgctggaggcgccccctgaccaccactga

SEQ ID NO: 11196 - DNA, 179 bp, Zea mays
  Peptide Sequence Number=SeqID_54571
atggcgtcgccttcaacctgggtgcgggtcaaattcagaaaccagcagacgacgttcaggcagcagcaacaatcaaggcggcaactctgggggaaacgcgcgaaagcggtggcgagcaggcaccgccggctctggctgatatttcgccaagccagcaagaagctgcgcatctgccggag

SEQ ID NO: 11197 - DNA, 213 bp, Zea mays
  Peptide Sequence Number=SeqID_54572
atggaggccgagaagacagacctccggcgccagctggaggagctgctggtgctcccgaccattgtgacgggtttcatgtctttcgcctccctcgtcacctgcgagggggccatgaatgcattgtcttgcgaggggtgcaggcactacgaggtctttgaccaagcagacgagaactttgaacgtgaaatcttcaaggccaaagacccttggtga

SEQ ID NO: 11198 - DNA, 942 bp, Zea mays
  Peptide Sequence Number=SeqID_54573
atggttgccccgcctccttctcctgcggcggggaaggtgacgggacaggcccggatgctgctcttccgccatagggggaagacgtcgtcgatttcgccgctgtcgggcaagctgacggccgccattgtcagtgtcgcgcggcggaggaaggagtaccatgtcgtagctgtcgtcgagggacatgaactcgagactcccgaaacggagcagcgtcccgggctggagaggttgctggagactacccatctggagcttgacgggaagctgttcgtcaacacgcagcaggcccctacctggcacgccaactgtcggcgtttcgaccccggggggtccctggaccgacgaggtggatgcgcttgcagtagggggttacaagcgttcgcgagagagggagagagcctgttcgtcagcccgtcctaccgcgcggccaccttctcgtacgagggccctggaccttccttttatagatgtaaggagaaggtccagggtaatgatgtacccccttgtaatgtggtcggtccgagcccaaggtcgggcgaggcggtgactcctccaaggtctgagtccgagccctggggttgggcgaggcggagaccgtcttccgaggtcgaggctgagtccgagccctggggtcgggcgaggcggagactgtcttccgaggtcgaggttgagtccgagccctggggtcgggcgaggcggagaccgtcttccgaggtcgaggttgagtccgagccctggggttgggcgaggcggagcttcctatggcgcctgaggctggactcggctgctgtcagcctcaccctggcgggcggcacagcagtcggagcagaggcggcgctattttcctgtcaggcgatccctgcattgaatgttcctgcaatacggtcggttggcgaggcgatctggccaaggttgcttctccgcgaagcctgcccgagatag

SEQ ID NO: 11199 - DNA, 174 bp, Zea mays
  Peptide Sequence Number=SeqID_54574
atggcccctggggaggccgtggagctaggagggtggcgcaacaactctctggccgctgacagcaccccaggcgcagccctagatgccctagacgatggcctgggcgccgcctgccagcggagtggacatgacacattaaatgctgagggagcatatcgtctgtcagtgggatag

SEQ ID NO: 11200 - DNA, 492 bp, Zea mays
  Peptide Sequence Number=SeqID_54575
atggtggaggcgggtgctgttcaccacgcggccagagatagctgtacaggcccccgtggtagagactgggctgttggtttcaacggaggtgaagaggcgcgctaccgcaggcgatggcgtgctccttgcgtgatggttcgcctccttcgcacccaagaactggcatgccaggtgcatgacatgtgggcctgggcccccatgccaaaggttgggccgttggcggtgaaggtgaagaggcgcactgctgcagacggtggcgtgcttcttacgcggtggttcgccttcttcatacacagaggccgacgcccaaggagcctaactcgtgggcccgggcccccgtgccagaggctggtcctcacgcggcggactagtccgctgccttcggtggaggtgaagagacgcgctaccgcaggcagtggcgtactcctcacgcggcggttcgccttctccgtatacgggggccgacgcccaaggagcctgactcgtgggtga

SEQ ID NO: 11201 - DNA, 894 bp, Zea mays
  Peptide Sequence Number=SeqID_54576
atgaacgattgcgtgaaagtgaggactagaagtcttggaatgcttagagtgtgcttgggtgactcctccatatgcctaggggtcccttttatagccccaaggcagctaggagccgttggaggccaacaaggaagggtaaagttgccttctgtcgggtggcgcaccggacagtccggtgcaccaccagacagccactgttcatgtccggtgcgcgatctccttcctattctggcacagtcgaccattgcagagtcgtggcagttggcgcaccagacactgtccggtgcacaccagacagtccgaaatggcccaagggcacatttccctttcagtgggcctgggcccccatgccagagactgggtcaccctggcgcacgatggtcgaggtcttctgcgacacttcggggcgtcagttgggggaatctctctttaaaaagggactcccccgagcgtggtagccattctcatcgctcgcagcgccctttcgccttcgagttctccgcgctcttatgtcgtcgtagccaccatggttttgctagatcctcccgaaccctccagcctaaggtggcactcaacttggtgcgtaatctgttcggatggggtgtgtcggcgtttgctggaaggatccgtgtcggtgtctgttcttacagtgacctcgccaccggagagtttgtgttcttcatctccaaactccctagcgggttggcgctgccgatcccgtctttcttcatgctgctgctgggggggcttggcctccagcttttacacgttacgccctgcttcatccttcaggcggccatcatcgcctacctctgcgggatatccgtggaggcaacgctccttcccgcttcttcctccagcattcaaggggaaggatgttcaccaacctcgtga

SEQ ID NO: 11202 - DNA, 390 bp, Zea mays
  Peptide Sequence Number=SeqID_54577
atggtcgattctaaagatctcaacggtgcttctccaaatagcgacacaagactgactaatttatcggtcgctgagcataaaagattaaaagatgacatgaagaaaatagacgaggaggaccagcgacaaaaagatcaggtgctcaaggtggcggataagtggttcctctcgcacttcagggtagattgccaccacaagaccgtccaaaagaggaaaataaatgtcgagtacatgtcagtcgtgctgcaacagctccccacgataggtgatgctaggtcagccgatgatattccatatattaaaatttcttttgataatcggattaaaagtatcaaatatgattgtcggagaggaaatctcctgccgggtggcggaatgcacccgccctaa

SEQ ID NO: 11203 - DNA, 825 bp, Zea mays
  Peptide Sequence Number=SeqID_54578
atgcgcctcatcctgcggtacctgttcttgacctgtggggggggtgagacagcaagagtgagctcacatacgttcatcgctcaacaagttgtggggaataatgtgaatgaactcgccaaaggtgggagttcatgtgaagtgaagctccaatgcagggatcccttgcctgaccgccatcgcagcaaaatcaaccaaggacctccctacactgaccactcccctactgcccttgcccctttcggatacctaaggggttctgcgcaaaagacaccaagactgagaactcccacagtgtggactgcgggttgttttaacacaagtacaggggctcttatgcaattatccaaggccgaaggggtacgcagcgatcctggccacccagatctaattctacggcccagattagattgccctaatatcgaaacgcagaccgtcttcttccttacgatcgaacaaggggtgcccagggatcgacggtggcgccaccacgcccgacggagcaccatcgcacagacgcgcaagtacatgaacctggcttcgaccagagttatgcatgaaggagaaagcgaacctttggggaggggtcttgccagcgaccgcggagtagattcagctgttcacggcgccaagcaacctggcggggtcggcctagctccgacgagcaattccattgcgatggcacaaccaccgagcgtcggaatgacacgagagcatacgagatgccaccacaatttccccaagccacccgccgaggacccattgataccctccagcaagaacgacggcggcggctgggttcttcttccgcccatcctgctatggtga

SEQ ID NO: 11204 - DNA, 288 bp, Zea mays
  Peptide Sequence Number=SeqID_54579
atgccatgcgaaggcgacgctgccgcagcagcggtggacttcgaggtgagggccttcccactcggtttcgtttcccttgcggtgcttcaaatctgtgtcacggcacaagctagagcagctcatcaggctaggagaaatctgatagaatctgaagatgctagcttcaggagctcctacagaaggatggggtctcgtgaaccttttgaaggcaatgtctggttgtctgctatgtccatgattaagaatgctctggctggattcaacacctcccttgtctgttatggctag

SEQ ID NO: 11205 - DNA, 639 bp, Zea mays
  Peptide Sequence Number=SeqID_54580
atgagaggtgacttttctttgagtggatcaatgattctaacaagtttgatcgaaggctgcagccagagccagactgctgccttcctcacatcaatcatctcggcccccgtcatcacaccggcggcggcggttccctcgggcgtgcgaggaggcgcccgtgagcaggagagccccggccgccgcggcgctctccagccggcgggttggcggtcgtggagggggcgcgaggaggagcctcagcgtccgcggcggtacagcttcaggaggcaccggtcgggcgcggcggaatgggcggcggtggtgctgttcatggtgcttgcggtcgtggtgctgctgggcgccgtggccgtccttgtggtggtgctgctgctgcagccccgcgtgtcgtacgtggcggcgcgggcgggctggcggtgctctgcgcctacccgttccgcgtgcccgccaggggcgtcctcccgctggcgtacgtggcgcgcgcagggcgccccgctgggcgacgccggcagcgccgccatggaggccgcgctccgcgacggcgtggtgccgttccgggtggatggggaggcccggacgcgatggaaggtcgcggggatcatcggcgtcgaccagtggagcgcgatcggagcgcgattttga

SEQ ID NO: 11206 - DNA, 246 bp, Zea mays
  Peptide Sequence Number=SeqID_54581
atgcagggttcctggctgaccgccatcgcagcaaaatcaaccagggacctccctacactgaccactcccctactgcccttgcccctttcggcaatagcaaactacccaagtgattcaggggtaaacaagtttatcatggcactggactgggcctcaattttcagagaatgcagggggtcggggaaagaatccccagacacagagaacagtcgcataggactgcgggttggtttctcagaagcctag

SEQ ID NO: 11207 - DNA, 225 bp, Zea mays
  Peptide Sequence Number=SeqID_54582
atgcctaacacaagttgtttcaatccttttcaggttgctgcatatgctatatcagttcctaagcaaacatgggagtttccaatccttccttgggtcaggtttgctacatcatacgatgaagaggaaatcatgaagattgttctgacaattctcctacatgtgcttaaactggatggtatcgaagagaagggcaagggacgttttgatgccagatgtttgtcgtga

SEQ ID NO: 11208 - DNA, 459 bp, Zea mays
  Peptide Sequence Number=SeqID_54583
atgaagcgactggggatcttgcctagcgttggccagccaacaaccgctgctaatggtgaagttgcactggagcactacatcaacctcttcaaggggcgttactgcttgcccatgtctcaacaaaattgcaaaattcttagttggaagggcgacgtggggtttcctccgaagccgaggttgagtcttgccttcagttgccgtggccgagcccgagccagggggtcgggcgaggcggaagtcgtccggccgaggccagggcggagtccgagccctggggtcgggcgaggcggagtttcgtcgtcttcgggtctagcccgagtccgagccctggggtcgggcggagcggagttcgccgtcttccgggtcttagcccgagtccgagccctggggtcgggcggaacggagttcgccgtggcgcttttggcaaggcctgactgcctgtcagattcactctgttga

SEQ ID NO: 11209 - DNA, 600 bp, Zea mays
  Peptide Sequence Number=SeqID_54584
atggagcccagcacaaaccctgacctcgtctcctccggatcgattcctggccaaagcgacggcgagacgctagcgacgcatgaggacggtggagtccaggggagcccgggccggctggcgcgggacgaggaggccggaggcagcggcggaatgagcgggcggtcgtcggcgggtgggccgtccggcggggagtgctacacgtgcacgcagcccggggtgccagctttccactccacgacgtgcgaccaggtgcactcgccgggctgggatgccaacgcagggtcctcgctcgtgccggtccagggccaggcgcaggcggcggcggcggcggcgccgcggcacgcggcgtggtggctgttggggcccgtgctggacccgcggagcaggcgcgtcacgcgtgcagcgctggaactgctggatcctgctgggccgcgccgccgcgctggcggtggactcgctcttcttctacgcgcttttctcgaagggctggcctcgtctccccgacgcagcggcacaacccttcgccgcggccgccgccgcctaagctcgaccgccgcgtcaatcgccatcgcggccacgccggctctcttggccgcctaa

SEQ ID NO: 11210 - DNA, 450 bp, Zea mays
  Peptide Sequence Number=SeqID_54585
atggcactcggcaaagaagtaaacctgggaaccggcaaagccatctttgccgagtgcttttgccaaggcactcggcaaatatactggcgaaggggcccactggagggttctttgccgagtgtcagtccacctgacactcggcaaagaggcctcctttgccgagtgcctgctagacctctcggcacaggaactggcggtggggcccactggaccagtctttgccgagggcctctaaagcaaacactcggcaaaattggcctctttgccgagtgccactgttggggcgaaggcagagacgccacccttcgctcgtcgcctttcgctgcagtcgctggtttgacgaagacaaaacgggcagggacacccttcgcttcattcagcaccagacgaaggcatgcggtgacgtctccccgcggcacggcctcgtcctgctctgaggcccacgtgtga

SEQ ID NO: 11211 - DNA, 1044 bp, Zea mays
  Peptide Sequence Number=SeqID_54586
atgtcttcttcctcccttatgcgtcgtgtctttccatcttccaagcccccggatggggggtatccgccgcctttccgcctcctcgttggaggaacgcaactccatgggagttggtacctctcagccatcgttcggcttcaaggattttcatcagccggcccggccgcacccccacgccggcgatcacccaggatggtgaccgccggtttctgggtggggaagagcaagccgggctgcgatcttggtcccaccctcagcttcaaggatgttcatcatccccgctggggtgggagccacgctgagccggcgctctacctcccgcgcgggtccgcgggtcgccctttcccgcggcgtttgggggtggaggcgctcgctggccctgcggacggcgcggactcagacaacgtggggctgatcgacggcgggcgtcttcacctccagcgtgtcgaggtcatcggccgggcttccggcggcccctcctgccggagggcggaggcggctcgagaagtcctcgtcaccgacgggatcactgccaccacctgcgccccgggccaccgtgccggcgtgcttgtcctcgtccctcgagcgtcggcgggggaatccctcggcccgttcggccttgttgtctggggctcctctagcttagttaaagagacccctcggccgcccttcgatggaccgaggtcagggccgacgccaaagtcgatcagccgaggcctcgggtcgggctggcgcccttggaagctggttgaccgaggcctcaggggtaaccggccgagccgcctgctcgggccggattcccagaggagtccctggaccgcgccgccgtccgaggccgggtcggactttgctgaagacgccgtcgatgccgagggtgctatggctcccttcagcgtgaagacccgagcctgcaggatcagatcatcttgtagcaaggtgatgagtgaggtatccgtatcccggaggcgtaggagtccctcggctcggtcagccttggctgcttacgtgtactccgtcgtttccaggatccgctttccgaagtag

SEQ ID NO: 11212 - DNA, 210 bp, Zea mays
  Peptide Sequence Number=SeqID_54587
atggcgtcgtcacgctgtccagctcatcatccacctgaagctcaacctgccacggtgcactttgtttggcagcccaaccaagagtcatcggtactcgccatatcgtgcgcgttcgacgactactatatcaaggactgtggcgtcatcttggcgccagaggtgaagcaaaggaggaccgacagcaatgaccactcaccatcgtcggggtag

SEQ ID NO: 11213 - DNA, 2325 bp, Zea mays
  Peptide Sequence Number=SeqID_54588
atggccgagatggacgcggccacgaacgcgagtgaccccgtgatgctcgacgcgtcctcgtcgctcgacccgtactccttcgcgctgctgctgccgccagctgaggtggtggacgcaccgaatcacgacgaggcaagttctctacctcctgcccacgacttccgcgtcgagcaagccaaaggggagaaggtacccgtcgacacgctcaccaagtgttcgacgatagacctcaaccgcggcatttactccgtcgccaacacggccactatcagagccgcgatgggcgcggtcgtggacgtgagggactccgtgaggttcccttcccttctcgccgcggggaatttcccgccgcccttcctcacgctgtcgccaccacacgacgaggcagatccggacttcggttcctgccaggacaaggagctgctcgaccatctcgaaggcgtgctggccaccgaatctgtggtggtgaagagaggccagcacatcgtgccgctcaaggggaagtgcgtcttcgtgcgcgccgacttcaacgcaccgctcgacgcgtgcagcggaagcgtggtgggctcgccctcaccgagcatgcaggtgaagagggcgcagaggaatcgaccgccgaactcctgccgcgtgcactgcgcgtcgccgctctgctcggcagcacatgcctcgacgccaccgtcggacttctgtgccgcggcgcggtgcccgttggagaacatcgagatgagctcctgtgacgcgccccacgcgtgcccgccgttgtactacgggtacggggacgggagccccatggcgcacctgaggcgcggtcgcgtcgggtggggcgctagcgcacgcgcgcccatggccatggtcgtcgacaacttctccttcgcgtgcacgcgcacgaccatgggcgagcctgtcgaggtggcagggttcgaccacagccagttctcgctgccggtccagctctcctacctcacgccatctcaccatcacgcccaccaagtgttcgacgatagacctcaaccgcggcatctactccgtcctcagcctggacctccaccgtcagctactatcaaggcagcagctacctcaaccatagaggatgaggtactcgtcgacacaaccaccaagtgttcgatgagagtactcaaccgcggcgtctatcttcgacgagggcttcaagaacaactgtcggcccgtcaccttcacctacaactccgtcgacggcgacatcaccgtcacctacgacggatactccagcgacgtgttggtgcacgagcggttcatggtccggttactggacgcgatgtcgctggaccaggatgtgactctgctgtgtgcaggcatcaccgtgtctcaccccatgaagtaccacggcctgaacaagccgaggaagcacatctgcttgatgaggctgggaggattgggccacgttgctgtcaagttcgccaaggcgttcgccaatcacagggatgccaagcgcacgttccgggagatcaagatgttgaggcacctcaaccacatgagcatcattggcatcagggacgtgatcccagcgccggtcaaaccgggaaagttgttctgatgaagcagctggctgactgcaaaccagtgcagatcactgctactcttggggatttgctcaatagaaaggtcagcgaaggtgtccgggtccttatgctagtgtgggttgatcggacttcagtcggtttgctgcagaaggatagcatgatggatacccatgcaaagtgcagcaacacatggagttaccctgtgtcggatgcccaccgcatggaaagtgcagcaatgccaatgctgaatctgctcacatggagttacgctcaatctgctcacatagcattcataaccatagattgtgctgcaatgcagagagtaacagaagggaaccttgttttcacagagcacactgagcaagatgacaagttcagagagttggctcgccgagttactgaagtcctggaattcaggtcggctgctggactcattttttgtcaccctataatgacaacaacagaattctggatgtcacacgagtgtcttcttgtgccttatgagcaagcactcacccatgaggaatttttccctagcatctattatgactgctctgcctatttcctatgggttggaaagtgcactcgccagcttgatggagggaggtcagggtcggaaatcggtgctttagatgctggtgttggaattgtcggcactggcctcggtctcattcgtttaggaattggtgctgtcgctggtcttattacctctggtttgggtactgtcagtagtggacaaggcaatttctcaatctatgtgtga

SEQ ID NO: 11214 - DNA, 855 bp, Zea mays
  Peptide Sequence Number=SeqID_54589
atggcggcacaacgacccacaccgcggcagagcgaactcgatggaggagattccggtgaggggaaagaaggttctgcgcagcctaggagccttcctaccctttatagacgcgagcccagtcgttcagcgggtccgcgcatgccgcgggtgtcaccccgccttccgatcgatgcggcaacaaggtggaagaagcaagccccgttccgggcccacacgcaagtattgttcaccccgcgcatacgaaccgggaggcaggggagtgggccccgcacggcagaaagccagtgcgccatgctcccagcgcgccacaagctcctgatcccaagggcccgcctggagggccacgtggtagctagctccgagcgactcgacagcggaggcgaccacctcagcaccgacggcagcggccacctctgcaccaacgacccgccagcagtggcgaccacctcagcacgtgcgccattgagaagaggtccttgcccctgtcttcctacggggggcggcaacgaggccattaaagccaaagagtcggaggctcggcggcaggtggctccggtggtctcgccagcggaggcaaccacctctgcagagggtagcctcaccagcggcggcgaccacctcagcaccgatgacagcggccgcctctgcaccggtggcggcgaccacctctgcaccggtggcttaccggctgttgggggccttcgtctttcgaaggtaccttcggactcagatcagaaccacagtgtgagaagcacaaagaatacgaaggttgacgtagcgccgaagctacgcgcaagggagcttcggcataacagcggaaaagggaaccaacttaaaagggaaaaggccatttag

SEQ ID NO: 11215 - DNA, 84 bp, Zea mays
  Peptide Sequence Number=SeqID_54590
atggcggcgccgattggcgctggggaaattgggcccacgcgagaagggggtcaaggagaggaacgggattattttaggatttaa

SEQ ID NO: 11216 - DNA, 390 bp, Zea mays
  Peptide Sequence Number=SeqID_54591
atggcttcgcttggtcaccctgaccgttttcagtctgaggaagcgcttaacctggtgcgcgacctgcttgggtggagcgcttcggggcttgccggaagaatccgtgtcggcgctgcccccctcggcgatctcgccgccggggagttcgtgatgttcacctcctacatctcctgcgggttggcgctgccgatctcgcccttctttctgctgctgctggaggagttcgttacctgtagaaattccgacgggttcgatgtcccgtcgtacatctccggcagtgaagtcttggtcgaggttgcgaccctcgaagttctactggcgctcacacgccctctccagagagactcgagcatcctcgcccgcacgcctgcggttgagttctgctcgtag

SEQ ID NO: 11217 - DNA, 372 bp, Zea mays
  Peptide Sequence Number=SeqID_54592
atggttcagatcgtcgagcaccgcgacttgtctcccgaggatttcctgatagaggaaggggcagcatcttctgtgccacggggctcttaccgccctgcgcctagtgctgctgctgtgcacactgtgcagcagcacactcccgtgcagacattcagggcaccatcgggggctgctcatggtggggcgttgtctgcagccagggagttgctgcgcaacccaccaagttccacggcctcgccgggggccatgaggcagtggcgcgaagatgttgactgtcttctcggcatggcccatcctggctcggccaggtccaggcctcgatcatttcggcgtcaacatgaggcgtcgcatctgcgcgctcaccctcaatga

SEQ ID NO: 11218 - DNA, 621 bp, Zea mays
  Peptide Sequence Number=SeqID_54593
atggatcaagcagtctcattagctgcgagaagcagacgattcgaatcgagtttttatcctttgaagatcagggctcaccgccttggcgtacaatgccccattgaccccgactgccgtcgtgcagtgaccgcacttgtacccaccataaccggaatgggagacctcgtctcaggtcgcgtgaggggatatgtctgcgggcaggtcctctggtgcagactctggtgctggatccggggctacctcctgagcagctccttgctccggcacgaggacgtactctccgtcagcaaggttacagtctatcgaaatgccatgaacatgcgggtgttctcgtcggcggcgagtgtaccggccaaaccacggcgatctggttcaatccaagggcacggcttcgattcctcgctcggggagcttcactggggtgtgtacactcgtctaagagggttggatggggctggggcaagctggactggcccggtctacggcggcagtggctcgggtggccgcggacacaccgcgcacgggcaaacgacggtgaactggactccggtgaggcttgagtgtgcgcggaagagtgtaaccgacgcctgggagggctttataggcgcgggcgcgggatag

SEQ ID NO: 11219 - DNA, 690 bp, Zea mays
  Peptide Sequence Number=SeqID_54594
atggagcttggagggtgtcgcagcaactccctggctgccgacaacgctcccggagccaccttcgacggtgtccgggatgtctgcgccgcttatggcacgggcgcactgtttgacaacagactggacaggcgtgtcgtctacaggatgacccctgacatcgtctgccagcagagtggacaggacgcattaaatgctaagagggcacatcgtttgccccgcccgtcggcttatgtcacggaccacaagccacgcgacagcagcgggtgtccgcctgagcggggagcgcagggcaaggcctggacacgtgccagcaccggacccttactcatgttggggttccccccgtcccgggaccttgttgtggtccggtccttactcggagagacctgggacccgtccgaggggtctggcatgccttcttgggagttctggactgtattcaagagtctggtctgtgcgtacaggggtccggtgttcctctgtggaggtccgaacccaatgatgcctcctggggtgtattgtctctccttgccacgtggtgctcctagacctgcccatgtgactggaaacgagttgaggaacgttttgaaaaaagactcggtagttggaaaggagtactcaagagacttgactacttccgctctaggttcttttcgcaaagtgacggtcaaaaacggaagtatcgtctag

SEQ ID NO: 11220 - DNA, 438 bp, Zea mays
  Peptide Sequence Number=SeqID_54595
atggactccatagtgtttgaggttgctgaattagatggagcaataataatttgtcacactaacagtaaaacgaaaggttatttgttggttttaaacgaaacagatttcggcccatgtggccaatccctccacgcggcccaaaatcatttccactgcgcgcacagctctggcaaatggggcccgctcgtcaacggctcggcttcacacgagctcacgccttctgccgctggctggtggacccccgagtcagctccctccccttccaacagacctcgcgagaatggtggggcgcgccatgggcgcggaatccgcgcagtgctcacctcctcctacctcgcgcgcatggcggaacgacgtcaatggccgaaccgcgatttccggcctcggctgacccagcaagcaacgcccgcgtccttaaatgccagctcggcgccctga

SEQ ID NO: 11221 - DNA, 1602 bp, Zea mays
  Peptide Sequence Number=SeqID_54596
atggagcgcgccggcgccactccccttggcgatctcaccgctggggagttcatgctcttcatctcctacctctcctgcgggttggcgctgtcgatctcgccgttcttcctgctgctactggaggagctcggccttcagcttcagcacctcacccccactccatccttcaggcgaccatcttcgcccacctgtgtgagatttttgtgggggtggcgcgctgtacctccctctttcgccatttcttcgtgctgcgccgaggccaacgattacctcacgctgtcgagcgatgggccaaggctcgaccagaagcaatggagggccaagccgtcgctggcgccggagttcgagcccgtactggacaggatcaagagcttggtgaagagggcgcgcctgagctgctggttcaccggcccaaacgacatcggccggatccagcgcgggccagggaccgacctgtccttggatgacctggaagtcctggtgaagggaattatgggcccagagcgcgcaaaggagcgtcagtcctccgccaccgccaccatcggatccgccaccgccgccgccatcaccaccatcggtcctgccaccaccacctggggccgctgcaactgcgccggcgactacctcagcctcaacgatggcgacgccgtcgagtacatcgtcgacagctaccgaggaggtcccagctgcacccgtccctaccacgagggcgctgaatcagaagcggtgccggttcccctcccccgggtgctgtctcgtgcgcatcaggctcttcaagagaccgaggcagcgatccggcgagaatgggaggcgctggaggccgagcaccagcgcctcagcgactggcgtacccagctagaggaacgcaccaaggcggcgtcccagcgattcgtctttgagcggttcgaactggaacgggaccgtaaggactacaagaaggacctccagagggtgtacgcccgggagctggaggcggctcgaaaggagaagaggttggccaagaaggaggagcacctgaaccagagggtggaggtcgtcacggagctccaggagaagggcctcgccttcagggaggagatgtttgaaaggcgggagaagctgctggctcatcatgagctcgaggcagagcagaaggagaaggagctagaggagcgggtccaccggttccaagcggcgcaggcagcaccgggcccccaggcagtggaggcgatgaagaagacgcttgaagatctccaggcggagcagcgcgctggggtccagcgcatcaccacctgggccggcgaggcgagcacgacactagtgccactaggggtgagccccatcccggtgtcgaggccaccaacgtccatctccgacgcgctcccggtgcgggactccgccgtggactgcctccatcgcctggaccagattctgggcgcccgcctggaggccgaaggcggcaggctctgccgggcggtgatagagtacgtcctgacgtgcttccgaagccacgacccgaccatctccttggagccggtgatcgctggtccggtggccgacaccgaagacgctgcccggcagggcgtacaagataccgttgaggtggtagccgagcgcttctag

SEQ ID NO: 11222 - DNA, 324 bp, Zea mays
  Peptide Sequence Number=SeqID_54597
atgtcctctttatcggggggagagtggaatcgtctcccgtctccaacgatgaaccgactgcacctggggaggaacctcctcagcgggaagctcgtcgatgaaggaaccgatgccgaaacgcctagtgacatcgtgaagccggagaacgagacctggcacaacctgtgtcacgagatgagatctcagtggtgggagagactccagatgaacgagtcttcagggaaaggaggaattcccgtcgacgtgatcgtcggcgagctcaagagcaggctgagtaggaggcgagacaatgtcgcgagaaccctctcctcagacgaaacttga

SEQ ID NO: 11223 - DNA, 828 bp, Zea mays
  Peptide Sequence Number=SeqID_54598
atgtggaatgacggcggagaatggggaagcagtcgcgatgccggagaaaatggggttttctccggaatagggtcccgtctcttgttgcagcagcgacgatatggacggcggagaatggggaaccatgaggcgccgctctactgccgattacgactggatcgacagcgagcggtggaaggtgcggattcgtcggggagggcggagtcggcggagagggttggggttttgcggtggtgtaggcagttatggaaactgagaccgggagaagaaagaggagctaatgatggctggccgttattatatatggaagctccgaccacctaccgaccagagagaccggaaatcggccagtcctcattctcctccacacaccgatcagtcctccaccgccatctccttcattctcttcgccgcattcatgacatcgagtcactttgtccgctcgcccaacttcatttgaaggaagcaccaaataatcgcattggaggagctgttatcagtataacatattcgttgttacatttttatagcagaggcttaatgttagatgcaatctacaagatgttatacccagggaaggagctgaaaattacaaaggacacagtgcaccttatactggggttaccaaatgccggtggtggaaagccattaggcattgatgaagttgttgctgcaaataatttaagggctgagcttggtttatccaaagaagaattcggtgttgcagctctacacgatcgattaaggaaagggtttgacgatgatctaagcatcagatctttctttctgatactgttcaataggctattgttccctactgcaagctag

SEQ ID NO: 11224 - DNA, 219 bp, Zea mays
  Peptide Sequence Number=SeqID_54599
atgaagataatgaagacaaggaagatgatcaagagattcggggtcaaagaccaccacacccaagagtccaccaagcgattcaaagagatcaccccgtcaactccattcttggtgatattcaaaagggggatagaggatgcattaagagatccggattgggttgatggcaatgcaagaggagctcaacaactttcacaaggaatgagttatgtcatttag

SEQ ID NO: 11225 - DNA, 495 bp, Zea mays
  Peptide Sequence Number=SeqID_54600
atgaaggtagtacaccatgcgagtctatctaaggctgggaatgatagagccctagagatgatggacgaactactagggttattgatgcgtgtcgagcctgatataggtactagtgagagttgtggcactagtggtggcgatgacatccaggtcgaagcgtatgaaacagaagacatagtaagagatgatttacgcaatgtagatgatgggaacgaggaaattgtaatggtgtctaatacaaatgaatgcaatactaacgatgttcaatgtaatatctcgatatgtacattggaacataacactgatatgcatctggttgatagtagtgctacggatgtggaagctagaaagaaactggagtttcatagggaaggtgtaaacatagcaagaccagataaggccaagcctaagggaagaacgatcaaaagtagtgagcaacaagttcttaagttgggtgcgaaaggagcgaagaagatgagcaggaagtgccaatag

SEQ ID NO: 11226 - DNA, 660 bp, Zea mays
  Peptide Sequence Number=SeqID_54601
atgccgctcaaacctcgtgcctcgtgcgtcgccgtcgctgtcgctgctcgcacgccgagaggcgtcgcttgctcgccgaccttagaagtgccgccgcctcggggccccagggacgccgtcgcttgcccgcaagggcccgctgtcgctcaccctttggatcgaagagccgccgccaccgacctgggaaccgctgccacaactccgaatcaaggaaccgtcgccaccgcacgtcgagttgtttcaccactacattgcaaccatcagtatcatgcagacttcgatatatgccacgatttatatggtctcatcaatggagagcacgttccacacatgctggaagaaatttcctcgtacatcgttagtcatcagacacgcaccaccatacgctcttgcttaaacaaaaagaacaacccgagagttatcgatgttggcgacaaccatgaggccctcctgcttaacgatggacaacgcggtgcagctgctctggaccacgtccaagtggtggcttcgcgggagcttgtcgtacacagcggcgcatgcgaccacgtaggactgcttctagaggtcaaactgacagtcgccaagcttcttctcgtcatcgatgagcgatgccaatgtgagtgccttctgctcatggtgtttgttcggggtttcaagtaa

SEQ ID NO: 11227 - DNA, 408 bp, Zea mays
  Peptide Sequence Number=SeqID_54602
atgcagcctggctgcacccctccgtcggcggtcacccaggacggtgacctccagttcgatggcgggggaaagcaaaccgggctgcgacctctgcccctccctcagcctcaaggattttcatcatcagtggtggggaggggagtgtgccgagttggggtcggcccctgcgtgggcggtggcccgctccttccctcagtgatcggggggaagggcgttcgccgttcgtggcgctggcagctgccgcgtgcctggctctcggacccgagtggcttcggagccgctcccggcgccgccttccactacggcagctggaagaggttcttccgccgacgagataggcggggccgcctgttagaaatatgccctagagataatcatagagatgagcatatttctttgtatccatga

SEQ ID NO: 11228 - DNA, 483 bp, Zea mays
  Peptide Sequence Number=SeqID_54603
atgaacagaacaccggcatccaaggtgccattacaaacggaactccggttccacctccgcaggtacgaacaaccccactcgattggggggcctgcggagcaacggaagaccgacgaatggctcgccgtcgcccgctccagcagcggcgacgacggcgacttctgctccgaggggccgaacagcagcagcgatgacctcagggcggatgctgctgccatgaggccctcgcccgtgcccaaactcatgaggcaaggacgggcagaaggccgtagagttggagacgaacgcgtcgagcagtgccgtgcagtcgccggcgtccttcacgtcctcgcacggttcgtccaagtgctccagatgcagcacctccgaggtatccacacgtacagggaggaagcgccgcgtaccgaactgctaggttcgcgacggcggcttggcgagggcgagaggcgagcggcggctgctggtttgccggtggcgaattag

SEQ ID NO: 11229 - DNA, 450 bp, Zea mays
  Peptide Sequence Number=SeqID_54604
atggccgggagcgcgcggctgaggcacggcggggcgcggggcacgggggaagggcgcggccgccggtgcggcgagggcatggggcgcgaggccaggcgcggccaccggcgcgcgcgcttttggccaccaaaagctgctgcggactgccaaacactcagcttttcagccagcttctataaaattcgttccaacctcctctctcgcttcaccaagaacgagtttatcctcgagtctaagtcctccatcggcattgagttcgccaccagcagtctccaggtcaatggcaagggagctaaattttgtagggctattttggcagttgccacgattggtgatctagagcaactagcacaggcccaagggatacacgtcccggtgccccccacctcccgtacattatccttggtcttcacctccacctacatctccacctaccgaacatcagtgtaa

SEQ ID NO: 11230 - DNA, 963 bp, Zea mays
  Peptide Sequence Number=SeqID_54605
atggctgaaaggtaccaactcccacggagttgcgttcctccaacgacgaggcggaaggattgcgggtgtcccccattcgggggctcggaaggtggaaagacacgatgcataagggagcgcgaagacatggtcgcctttcaagggggtcaccctccttttaaaggcgactttccctacctgcggccccagcggtcgtgggctgagtcttctccaacacgctctaaggtcctccccctacggcgcgggggctgggtcccacgcgtcatgcaagctggcccagagcagaagaagccaaaccgtcgcgcacggtgcatgcaaccgcccagcggttacgagcattcctccgctttcgcccagaccagcgggcgaaagggcgggcagccatgcaggcggcatgcaaccgcgccaagtgggcgtgcccctccgactttcaacgcacccagcatgggggcccacgcccacacgtcatgcaaccggcgcgccggtcgctacgtgcaagcaactgcaccgccactcgcaccactgccatgcctcctcgactgcagaaccaataccacgactcgaggcaaccctgcgtacgacccagcagtgctagccaggcgcgacggtcaatacgaccaaaaatgggccgacagtaatggcggtggcaggcgggctggagccgcggtcacgtcgtcagccaagcttacgtcccatcctggggcaattattccggacaggagaagctttttttttggaaaaacaagccaagcgcggaccgtccgggcccttgcggcggaccgtccgcaacaccaggatgaccctcggacagaaccaatacaaaaatccaagtctgcactatggaccgtccggaggataagcgcggaccgtctgcgacctcgctcggaccgtccggcctcaggcacggaccgtccggtaggcaaggatccgaaaaacccgaaggtgacgggttcagaagaatga

SEQ ID NO: 11231 - DNA, 927 bp, Zea mays
  Peptide Sequence Number=SeqID_54606
atgcagcccagccacacccctccaccggcggtcacccgagatggcgacctccggcttgatggtgggggaaagcgagccgggctgcggcctctgcccctccctcagcctcaaggattttcatcaccgaggctggggaggggagagtgccgagttggggtcggcccctgcgcgggcgacggcccgctccttcactcagtgatggggggaggagcaggcgttgcccgtggcgctggcagctgcagcgtgcccggtcttcagacgcgagtggcctcggagccgctcgcggcgccggcgtccgccacggcagctggaagaggttcttccgccgacgcgatagccggggccggccacgggctgacctccaactctacggccttctgcccgtccttgcctcacgagttttggcacggacgggggcctcctggcagcggcatccaccctggggtcagcgttgccgctgttcgaccccctggagcagaagtcgtcgtcgtcgccgctgctggagcaggtgacggcgcgccgttcgtcggccttccgttgctccgcaggccttccccctcggagtggggttgctcctctagcttagttgaagagacccctcggccgctcttcgacgagccgaggccaggggtagcgatatcagtacgaacagaggcggagttggctcgaaaatgggaacctggttggccggagcctagccgggttgtccgtcagcggatccgacgccggagtcgatcagccgaggcctcgggtcgggctagcgcccttggaagatggttggccgaggccccgggggtagccggccgagccgcctgctcgggccggattcccggagaagtcctcggatcgcgtcgccgtccgaggctgggtcggaccttgccgaagacgtcgtcgacgccgagggtgctacggcccccttcagcgtga

SEQ ID NO: 11232 - DNA, 517 bp, Zea mays
  Peptide Sequence Number=SeqID_54607
atgcggcttcatatccttagaggtatgaaggcagaagtcatccttgcatttgcagacatttgcactcatgagaacgtgggtaccgacgttcttaaatcagttaagttcatgtgtttttttaagaacgtgggcggccatgggcaactgctgccgctcgccggccgccgtcgcgcgggaggacgccagctctttgcacttccccgcatccaacgcgaagaagaagccgcaccaagcgtcgtgtccctgcgggaggcgtgcgaggacgagggcgccgtccacctcgtcatggagctctacgagggcagcaagctcttcgaccgcatcgtcgcgcaggggcactacaccgagcgcgctgccgccaatgtcacccgcatcatcgtcgaggtcgtccagctctgccatcagcacgacgtcatccatcgcgacctcaagccggagaacttcctcttcgccaataagaaggagaactcgccgctcaaggccatcgacttcggtctctccatcttcttcaagcctg

SEQ ID NO: 11233 - DNA, 258 bp, Zea mays
  Peptide Sequence Number=SeqID_54608
atgcggcttcatatccttagaggtatgaaggcagaagtcatccttgcatttgcagacatttgcactcatgagtttgatattattttacttgctgagatgtgtcatctcactcttgcattactcaatgcagtagcattccggggtgttggtggacctcggggtattacagttggtatcagaggatatgctttagattctacgcaatttgaagataaatttgacacacttgcacatataggaaggatattatgcaagtga

SEQ ID NO: 11234 - DNA, 912 bp, Zea mays
  Peptide Sequence Number=SeqID_54609
atggcgtccagagcccatgtgctcggcgcccttctccaccccctggacggcctcctctacaaagcagccccttctccctgtttcctgtacgtgcgcaggggcagaaactccatggccgccgagctccattcctccaagctggcggctccttcccatggacagcttccctcccctgcgcagccgttccaagctccctcaacgccggtgctccctgctctcctccccatgggcgcgtcccctgcaggcgagcagcggattccctgtcccagcggcctccagggcgcgagctccatctcccagcagccactcccatggcgtgctgctccagtcggtctccttcctccctctgtcccttgccgcaggagcagcagctcctcctcccatgccatggcgcgacgcctctgctccttctctctaccccacaaaacagccagcgcgcaggagcttcttctccatggacgccgaccaggctggtccctcgcctctgctcttccccgtggtcgcggttctgcgcagagctgcgagcaggagcacgccatggccggatctgccccctccatggacgccccttgctgttccctgcgcccggctctctctatccagcgcgtcccattttcttccatggaaaaccaacagcgagcccccttcctcgctgttcgtcgtggtgcccgccggctgttcggcaaaatgcgcaggaagccgcgcgctgcagcagccctcccgttcgatctccactcccctcgtcgcgtgtcgtcgctctcgtgctcgctgcgcagccccatccgcaacgccgtcgaaaaccgtgctagtggtcggcgccgcgcttcgcgccttgcccgttcgacgaaatgccaagccatgtggacagcccatgcgtctagtcacgacttgttcaggttgattgatttatag

SEQ ID NO: 11235 - DNA, 1125 bp, Zea mays
  Peptide Sequence Number=SeqID_54610
atggatgttactattagggaagtggtgtttagcaagcatgttaatttcagtattttgtcattaaatttactctacttcaaaaaacctgacctggaaaaaactacagagactgaacaaggggtggcgcaggctattcttcgtggaaatatcgattttaagcgcgaacccgccgccgccagcccgcccaccacgctcttcgctagctcgcccaccgcgccgccgccagccagcccatcgcgctacagacgcgctgccggtaccctctccctctccgcccggaagttcttgggtaaccatctcactacagcaccaggtataagtgtgtctccgtcggaggagaacatgcgaattattaatagatatatttatagaaggaaaaagcaaaggtcagggcactggtactatttcagaagctattggtttgtgtggcgaaagaagatagagcgtgatgtatctcagggacagaaggctgaaatagaaaaggttaagaaaagaagagaagaaagagctattgaaaagacacagcatgaagaggaaatgacattgctagctagagaaagagcatgtgccgagtttcaagactgggagaagaaagaggaagagtttcattttgaccaaagcaaggtcaggtctgagatcaggttgcgggaggggcgtacaaagcctattgatgttctccaaaagaatcttaatttcttagatgaatttgacattgagttaaatgaaccctatctggtgttcaaggtgagcatcatttgctcatccttatctaagtatgataaacgatattcatctgagcctatacctcaacagacagataaccaatttgaagaggaagatggatccttttctccacagctaatgcatggcaacgaagatgaagatgcaattgatcctgaagaagacaaagatgagctgttcgacggtacccacgttcttaatgttaagttcgacggtacccacgttcttaaagttaagaacgtgggggccgtcgaacttacttctctaagttcgtccaaaaatcgccgtcggctatattcgtcggtacacccacgttcttacggtactttatacatgctgggaatgaggagagtagcagcacgtccactttcactctcacaataa

SEQ ID NO: 11236 - DNA, 670 bp, Zea mays
  Peptide Sequence Number=SeqID_54611
cgccaggctacgccgcctccgccccaccgcctacaggccgcgccgcctccgccccaccgctgcaggccgcgccgcctccgccccaccacctgcaggccgcgccgccgccccggctcggcaccgacagcaggccacgccgccgccgtgccaccgccccggctcgcgccaccgccctggctcggcaccaccgccccggctcggcaccgacagcgggtcgtgccgccgcccctgctcgccaaccccagcggttcaaacattagctcgttttcactgctactgcattgggttctgcatagttcttccttggttgtttgatgcaagttcacgctgggagaaaagacaagccaaagtcctggagaaggtaagaaggcggatgagccaagatgattccagaaagggtggctcatggagtgacatctggggagcaccaacaagatacgagaagaacggtgctttatcatttgggacttcaattaatccacagttcattgcaagctttgcttctgctgctggtaaacgtcctcatcaagatttcgactctcaagaatctgatccagagtggggttggtggacagcaaaccatgagctgaagaagccatcaattagtctgttgtttccaacaatcatcctcctcagccgccgccatcaacagcagcagcagcgatgctaa

SEQ ID NO: 11237 - DNA, 1329 bp, Zea mays
  Peptide Sequence Number=SeqID_54612
atggaggacgactcgagcacgttcctccagtgggcaatgaaccatctccagcacccggccgccgccaccgcggtttccgccgcataccagcagcaggacggcggcgccggtgttggtgtccgcatcagcggcggcgccggagaccaggaggactccgccgccgccttcccgtcgctccaggcgctccgcgcatcccagccacaggccgtgcccggcagcgtccgagtccggaacctgacggtgcaggtggctgactacggcctgaccaacagcagcagctccggcgacagccccggcgcagccatggaccacgacgcggcggccgggtggtccccccacaccgcgcgctccaggaccacgggcctcggcggcggcagcaacagcaggccggtcagctggaacttcagcgccgcgtctgcgcagccagcggacgaccgcggcgccgtcggcgtcgcgctgccggacgccccggcggcggtcgcgagggcgcaacaacgtgctgcgtcgtctgcggggaggagagggggcggcgcgggcccatccactgctgctgcgccggcatcgtcgccggggccggtgcaggaccacatcatcgccgagagacggcgcagggagaagatcaaccagcgctttatcgagctctccaccgtcatccccggcctcaaaaagatggacaaggcgaccatccttggggacgcggtgaagtacgtgagggagctgcaggagaaggtgaaggggctcgaggaggaaggaggcgccggtggcagcggcggcatccagtcggcggtgctcgtcaagaagcagctgccgccggaggacgacgccatggcgagcagccatggcggtagcggcgaccacggtggcgatggcggcggtatgccgctcccggagatcgaggcacggctgtcggagaggagcgtgctgctgctgcggatccactgctacagcgccagggggctgctggtgagggtgatctcggaggtggagcagatgcagctgtccatcacccacaccaacgtcatgcccttcccggcctctaccgccattatcaccatcacggccaaggtgtgtttgaatgtaaagccaacaatcaagagcggaaatgggaagggtgattgtggaatcgtggaaactcgtgctttatacaacagagatataacacgtggaaattgtcaaaagggtcggggtggtggtggtcaccactttgttaagaatgccaatgcaagggtggaggatgggttcaatgccacggtagacgagatcgtgagaaggattaactccgcgctgcaccaacattatagcagcagttctgaagaaacaagaggataa

SEQ ID NO: 11238 - DNA, 1074 bp, Zea mays
  Peptide Sequence Number=SeqID_54613
atggaggacgactcgagcacgttcctccagtgggcaatgaaccatctccagcacccggccgccgccaccgcggtttccgccgcataccagcagcaggacggcggcgccggtgttggtgtccgcatcagcggcggcgccggagaccaggaggactccgccgccgccttcccgtcgctccaggcgctccgcgcatcccagccacaggccgtgcccggcagcgtccgagtccggaacctgacggtgcaggtggctgactacggcctgaccaacagcagcagctccggcgacagccccggcgcagccatggaccacgacgcggcggccgggtggtccccccacaccgcgcgctccaggaccacgggcctcggcggcggcagcaacagcaggccggtcagctggaacttcagcgccgcgtctgcgcagccagcggacgaccgcggcgccgtcggcgtcgcgctgccggacgccccggcggcggtcgcgagggcgcaacaacgtgctgcgtcgtctgcggggaggagagggggcggcgcgggcccatccactgctgctgcgccggcatcgtcgccggggccggtgcaggaccacatcatcgccgagagacggcgcagggagaagatcaaccagcgctttatcgagctctccaccgtcatccccggcctcaaaaagatggacaaggcgaccatccttggggacgcggtgaagtacgtgagggagctgcaggagaaggtgaaggggctcgaggaggaaggaggcgccggtggcagcggcggcatccagtcggcggtgctcgtcaagaagcagctgccgccggaggacgacgccatggcgagcagccatggcggtagcggcgaccacggtggcgatggcggcggtatgccgctcccggagatcgaggcacggctgtcggagaggagcgtgctgctgctgcggatccactgctacagcgccagggggctgctggtgagggtgatctcggaggtggagcagatgcagctgtccatcacccacaccaacgtcatgcccttgcgaaagcgctcaccgaagtggggtcgcttggtggatcgaagctga

SEQ ID NO: 11239 - DNA, 867 bp, Zea mays
  Peptide Sequence Number=SeqID_54614
atggcaggggatcgagaaaagggatatttcgaaaggatccttctcagcgaaggaaacgggccccgagccctcctactgatcaggggttcgaaggttgcgccctgcggggttcggcaaccgccccagagcactcaggctccgagccctttactgatcaggggattgaaggctggcccctcggaagggttcgacagccgccccagagcacgcagagtcagggatgaccctgggtacgtatgttacatggctaaggcttgggctacgctcctgaggtaccctaggacatttgcgagaccagcgggaatgatttgtaatggaatcccaccggagggaggcaccgagccctcggaccctatcaaatgggtctgggtccagcaaatcacctacagggtaaaactaacgacagtaagtcacgacctcccccgagttcagcctcgggcgcaacagggagctccgcctcgcccgacctcaggcctcggcctcagcctcggccttgggagaaggtctccgcctcgcccgaccccaggcctcggcctcgggagaaggtctccacctcgcccgacctcgggcctcggcctcagcctcggccttaggaggagtcataacctcgcccgacctcagcctcggcctcgggagaagtctccgcctcgcccgacctcggccttggaccgactgtgccataggggatacatcattaccctacccctacctagctgccttaggctacgaaggaacaagaccggtgtcccatctagattactctggcaacagcccagccaagagtcatcagtactcggtatgtcgcgcgcgttcgacgactactatatcgaggactgtggcgtcatcttggcgccagaggtgacgtag

SEQ ID NO: 11240 - DNA, 88 bp, Zea mays
  Peptide Sequence Number=SeqID_54615
atgcccatgggagacagcatatccatatgtttggttgttaggatcaacagatcctggtcgaagcctagatgcaggctgggcttagcct

SEQ ID NO: 11241 - DNA, 258 bp, Zea mays
  Peptide Sequence Number=SeqID_54616
atggtgctggtaagtggtattctttccgtttggaaagggtacatcgggttaataacttgggttaatgctaaaacttggctttctactacaacacctgaggttggacgttcttcgctggctcctactgaaccacaaaacactcttgctggagagaacttcactgctgtcgacaacaagcttatcctttcacaagatgatgaaacggatgacatgatcattgagtaccttttgaaggatccatatggagatttggtgtaa

SEQ ID NO: 11242 - DNA, 489 bp, Zea mays
  Peptide Sequence Number=SeqID_54617
atggcagccggggtcagtggagcattgtatgccaaggcgaaaggagcaaacctagctaaattaatgatgctagaattggaaaagataaaattgattttagacttagctagtgcttttggcaaaccaaacccgtcagccaaacaaccgcttggtctagaggtagaggagaagactcctcacaccggttttctcattgaagaactgcaaatgagtaaatcagatgtggctgcattcaaaatgaatcttggttttggtaaaaatagcagagggaagaaaccaatgagtcaattagatgaggaagaagagtttgaagatgactatgagtcagattctcaacatggtagtccattgtatgatgagccatgggatatttgttctgatgatgaaggaaacaactcaggcgggtatgattggttggaagataaatcgggtggtgatgtcagcaataacaaatcagattgtactgaaggtcatggtgatttcaattag

SEQ ID NO: 11243 - DNA, 641 bp, Zea mays
  Peptide Sequence Number=SeqID_54618
atggaacagtggccgcagaggaagaaaggggcggaggggcttaccggcggcgagattgctctggcgggggagctcgtcggcgacgaggagtctggcctaaccagggcacgattggtcaatcaaatgggccagggagcttcaccagggatcaaggaaggcgtgtgcacgatgaatttgagaatgactcaccggatggctcggtctacgcgcgcaggcgggcgaccgaagtccggcgaggatgatcttgggtcttcggtgaagttctgccaggtccgaggacttggaaagcttcacgggctattggcgaagctaaccgagtggctggcgcagcttggaagtcactggagggagctggccacggtggccgaggctcgggtggtgatggcgggcggtggcgcggcgtgctcgaggcgaagacattgcctcaccggagaagcaagcgcgacctcaccggacatcagccgaccataccgcgtgtggacaaggtcacatggccggagcacgcaccaccagcgagctcgaccgcctgcgcacacggccagcccacctacggtcaccacagccgacgacccgcacctcgacgtgatcgctagagacccctggacctcacccgacccttcgccggacctctaccgtcgccg

SEQ ID NO: 11244 - DNA, 231 bp, Zea mays
  Peptide Sequence Number=SeqID_54619
atggcgggcggaaaagatctcgccggagctaaggaggggtggctggccggtgatggtgccaaaggttcacacttagccaataaaaagaccaagaaatgggttcaacaaaaagagcaagggataaccgaaggcagccctggtctggcgcaccggactgtccggtgtgccaccggacagtgtccggtgcaccaggggactccaagccaaacttcgcaccttcgggaattttga

SEQ ID NO: 11245 - DNA, 762 bp, Zea mays
  Peptide Sequence Number=SeqID_54620
atggtgacctccatcttgatggtgggggaaagcgagccgggctgcggcctctgcccctccctcagcctcaaggattttcatcaccagggctggggaggggactgcaccgtgcctggctctcggacgcgagtggcttcggagccgctcgcggcgtcggcgtctgccacggcagctggaagaggttcttccactggcgagatagccaaggccggccacggaccgacctccaactctacggccttctgcccgtctttgcctcacaagtttgggcatgggcgggggcctcctggcagcagcatccgccctgaggtcaatgctgccgctgttcagccccccggagcagaagtcgtcgtcatcaccgctgctggagcgggtgacggcgtgccgtttgtcggtcttctgttgctccacaggcccacccctgtcgaatggggttactcgcctgttgattatctaaaccgcttcaccaagcatgagtcgccctgtgtcaaggtgacgagtgagcatgaacagaggcggagttggctcgaaaatgaaaacctggttggccggagcctagctgggttgtccgttagcgggaccgacgccggagttgaccagccgaggcctcgggtcgggctggcgcccttggaagatggtcttcggaccgcgtcgccgtccgaggctaggtcgaacctcgccaaagttgtcgtcgatgccgagggtgctgctgcccccttccagcgtcaagacccgagcctgcaggatcagattgtcttgtag

SEQ ID NO: 11246 - DNA, 573 bp, Zea mays
  Peptide Sequence Number=SeqID_54621
atgaacaaaaacactggcattcaaagtgccattacaaacggaactccggttccccctccgcaggtacgaacaaccccattcgacaggggtgggcctgtggagcaacagaagaccgacaaacggcacgccgtcacccgctccagcagcggtgatgacgacgacttctgctccggggggctgaacagcggcagcattgacctcagggcggatgctgctgccaggaggcccccgcccatgcccaaacttgtgaggcaaagacgggcagaaggccgtagagttggaggcggcgcttctggcaggagaagcgggcgacgcttcgccttcgccgtaataaccgcgccaaaaaagggaccgggaaagggggatgccccaaaaagaatccttccccgtgaaggaaccgggctccgagcctccctactgatcagaggttcgaaggctggccccccgaggggttcaacagccgcctcagatcgcgtgggccctacacccactactggtcagaggttcgaaggccgaccccccgaagggttccacggccgcctcaggctactcgggctccgcgcccattactga

SEQ ID NO: 11247 - DNA, 426 bp, Zea mays
  Peptide Sequence Number=SeqID_54622
atgggcaagagcaagaagggcggaagttcgtcgcaccactccagcgacaaacggaagcgcgagctgactcctccctcagaggacttcggcgattccgagtccgaagggtcgttggtccacgcctctcccccggcatcatctgacgacttagacaactcctggggggttgcggcggaggtgtggacatacatccaggccgtcgagcgtgctgggcttgagggctcggatgagtcggaggtctcctcggatgagggggactcctctgactcgtccgaggagggaagcgacggcgacgacggcggtgagggtgacggcggcgacggcgacggcgatggcggtggcgacggcagcaagggtggcggcaagggcgacggcggcagcggcaacggcaagggcggtagtggcagcggcaaggccagtggctag

SEQ ID NO: 11248 - DNA, 432 bp, Zea mays
  Peptide Sequence Number=SeqID_54623
ataaaggaggcgaacaaggtcaaggatcgtcaaactgctcttctggtacctccgccctcaaaggagaacagaaagaagctcgtcactacaacggttacattctatcccgacgtcctcttcatcgggggaagagtagaatcgaatcctgtctccgagatgaaccaaccgcgccagaagaagaacctcttcagcgggaatctcgccgatgaaggaaccgacgccgaaatattcagtgacatcacgaagccagagagcgggacccggcgcagccagtgtcacgagacgaggtctcagagatgggagagactccagaaaaacgggtcttcagggaaaggaggaattcccgatgacgtgatcgtcggcaagctcaagagcaggctgagcaggaagcgagacaacgccgagagagtccacttttcggacgaaacctga

SEQ ID NO: 11249 - DNA, 645 bp, Zea mays
  Peptide Sequence Number=SeqID_54624
atggacgaatacatccaggctgataatgacttccgccaaagaatggaggaagcatacatgttttctgaaatgactaggggcttcggaggaagacttcatcccagtcttcggccatgcaacaaaccttatacaggccaccagctccgagaggcacaggaggaagaagcttcagtggaggaaggttcgtacaaggtgtcaagcagtctcattagttgcgagaagcagacgattcgaattgagttttatccttgcaaggcgggggagctcgtcggcggcgaggagtccggcctatctagggcgaaattgaccaatcaaacgggtcagagagcttcactagggatcaaggaaggcgggagaccgaagttcggcgagggtgatctcgggcttccggtgaagttctgctgggtccgagggcttggaaagcttcacgggccactggcggagctaaccgaagcgctggcgcgacttgggggtgactggagtgggctggccacggcggccgaagctctggcggcaatggcgggcggaaaagagctcgtcggagctaaggaggggtggctgggcggtgatgagatatggagcccgaaaatccagtctatctccctgctcaaacccgaggcaaatccagggttttgtcgtgtctag

SEQ ID NO: 11250 - DNA, 378 bp, Zea mays
  Peptide Sequence Number=SeqID_54625
atgcgggggaaggtgaactgctgctgcctggccagggtgcagctgtccgtcctccatctggacgacggtcgtgccgtgcgcaggcggctgctgtcgccggtgctgaagcggcagccgccgctggtgaggcttcccaccgcagcggtcgttgcttccgctgacgagaccgtcagtgccatctgcgctctgggcctctggctctttagctttaatggctggttctcgtcccccgtgaggggacatgaacaagggccttccagcgggttcgagacagctcttgatgaggccgtcgggaactgcaaggcgcttgccgaggcggctgagcagaaggaggccgagcatgtggccatgtccgaggctatctccgctttctgctag

SEQ ID NO: 11251 - DNA, 297 bp, Zea mays
  Peptide Sequence Number=SeqID_54626
atggtggtcggcgccacaccgacgggatgggcgaaggagggccgagggcacgatgcaaccatagcgcggtgcagcccggtcgacatggtgagccttggcctcggcgcagggcggctatggtgcagccaggagaggccagcagcggccgacacgggcgaggggagcccaggcgtggccacgcccggtcccggcgaagctaccgtaggcggcgacttgcagtgtcctggcagcggtggcggaagcccctggtggcagctgggagaggtgaggcagttagagtttttcaaccctaactaa

SEQ ID NO: 11252 - DNA, 294 bp, Zea mays
  Peptide Sequence Number=SeqID_54627
atgtggaattacttatacacagtagtgggccgcgggtttatatcaatagagatcaagggttcttttgaatatttgcacagccgaaggggatccaacggtccccgccatccattccgaaacgttcctcgggatctaatcccagcccttgattcaaggatcaacggtgatggcaccatctcctccccagcgtcgttcatccacggatcaatgcaccagatccgcctgcccgacctggatgccaagagcgatcctggccgtctgatactgatccagcggccagaaagcattgcctaa

SEQ ID NO: 11253 - DNA, 372 bp, Zea mays
  Peptide Sequence Number=SeqID_54628
atggccctcttacggagggttggccgcgcggagaaggacgggacgacgctcgcgcagggccgctcgccccctcccgcgtggacgcttgtaaccccctactgcaagcgcacccgacctgggcgcgggacaaacacgaaggccgcgggtttcacctctcacgcctgtctccctccggctcctcttccccccttcgcgctccatctcgcgccgacccatctgggctggggcacgcggcgacaatttactcgtcggtccagggaccccccgggggactacaaggacaaggatggtgtcaagggcctgtgcgtcgtgggcgccatcaacaattgtacctcccagctccccacctatgggagatcttctcccccataa

SEQ ID NO: 11254 - DNA, 1656 bp, Zea mays
  Peptide Sequence Number=SeqID_54629
atgtacagtgctgtagttacactttctacacgaagcaagctttctattggtgttgtgtgtccatacaatgctcaagttagagcaatacaagaaaaggttgggaaggcctgcaggaggaatgattatttctcagtgaaagtaaaatctgtggatggtttccaaggcgcggaggaagatataattatcatatcaacaatcaggagtaatggagctggctcatgcggtgaaaatgggagaaagccacacacaccatctgctattgttattggtggtgggtttacaggtcttgctgctgctgatgcgctcagaaatgcatccttccaggttattcttctggaatctcgtgatagaattggtggcagagttcacactgactactcttttgggtttccagtcgatttgggagcatcttggcttcatggcgtctgtgaagaaaatcccttggcaccaataattggaaggcttggacttccactgtaccgcacaagtggagacgattctgtgctgtttgatcatgatctggagagctatgcactctatgacactaatggacgtcaagtaccacaggagttggtagaaaagattgggaaggtgtttgagaccatactggaagagactagcaaattgagggaaggaaccaatgaagatatgtctatcgcaaaagccattgcaattgttatggatagaaatccacagttgaggcaagaagggattgctcatgaagttcttcagtggtatttgtgccgtatggagggttggtttgccactgacgcagattcaatttcactacagggctgtgatcaggaggtgctgcttccaggtggccatggcctcatggttcgtggatatcgtccagttataaatactcttgcaagaggcttagatatacgtctcaaccataaggttttggaaattgttcgccaccggaacaaggtagaggttactgtaagcagtggccaaacgtccgttgcggacactgcagtggtcactgttccctcaccttggaaaaagggcagagcagggaaaaagggcagcagcagctgtggctatgaggacaaaactgactggggaactgagattgggtggatctattgttctgttacagaagacgttctcaccggattcaagatgcatgctcgaggctggcgatcaatctactgcatgcctaagcgaccagctttcaagggatctgctcctatcaacctttcggatcgtttgaatcaagtgcttcggtgggctcttggttccattgaaattcttttcagcaggcattgtcccatatggtatggctatggaggccggcttaaattcctggagagatttgcttatatcaacacaacaatttatccactcacatcaatcccgctcctcctgtactgcatattgccagcagtttgtcttctcactgggaatttcatcatcccaaagattagtaacctagagagtgtttggtttatatcgctctttatctcaatctttgccactgaaggtgattttgccgagctctacatgttcaagtggacaacgcttctgatcccaccaaccactattttgatcatcaacctggtcggcgtggtcgctggcatttcctacgcaatcaatagcggttaccagtcatggggacctcttttcgggaagctcttctttgcgttctag

SEQ ID NO: 11255 - DNA, 354 bp, Zea mays
  Peptide Sequence Number=SeqID_54630
atgtcggacgacattgttgttcctgtccactttgaagttggccaagaactttgcttttgcctcctggatcatccgctccttgtgctcctcgaactggagctgctccgtcagccggcaagcggagtcgccaaaaagtatgttgacacctttttggaggcgccaattactcaagagaaccagcggcggtgctctctggtcaggtgcggacggtccgcggcccagggccggacggtccgcgacctggcgcgaggcggtggtgctctttggtctggcgcggacggggcggcggaggatcgccggcggcgcctggatctcgctcccgggagggaccccgtcagggaggagagatcctag

SEQ ID NO: 11256 - DNA, 357 bp, Zea mays
  Peptide Sequence Number=SeqID_54631
atgaactactaccccgggtccaaataccgcttcgacctcagtgccacggtgttcaggaggctggccaagcccaacctcaacgacaagctccgccactctggcatcatcgacatcgagttcaccaggactcatcgtcgacattggggggtttcaaatctagtttggttgcgcggaggcatgttatgtggcgacctccggatctgtgttgccgatgtggtgctccatctcgacaataggaaaagacattacagtataggtggttatgagatcgatggttctggttatggctatggtgctggcgaagatgaagctgtggaaggagacttccaggagttccaagactacgacgagttctag

SEQ ID NO: 11257 - DNA, 369 bp, Zea mays
  Peptide Sequence Number=SeqID_54632
atgacggagacgatgacaatagcatctcgagccacaacattggcctcacaaaggaacaggaatgtcgcatggcgtgcactttcacagtactgctcgttgttcagtgaagtggccgacgatcttaacctgaggtattacccccactgtctaactggcagcactggaggtgtggttgtcttacctgttggtgagggcaatctgtcacacccagttttagaaggcaaaccgaatgcgaaccatgtacgtgccaggatcagcaattcatgtacacagcagttacataacatggacatcatcacagagtgctcaaatagtattaaaaagggaaataatagtcgattacatcatacgtctgagacgtccatatag

SEQ ID NO: 11258 - DNA, 2547 bp, Zea mays
  Peptide Sequence Number=SeqID_54633
atggctgagaaggaggaaacagagggccgctgccctgcctgccgcacacgctatgacaaggataggatcgtcaagatggccgccacttgtgacaggtatctcaaacttaccttttacattgatgatggaagcaggacagtggcagataaaaatgcggagaagaagcaaaaggcccaaagggttaagccaaaggcagcaccaacagcaacaacaacatcaaccgtagaatctaagaagcatcttgctactgtcagggttatccagagaaatctggtgtacataattgggctacctgcgcatttatgcaatgagagcgtacttgagcgcagggagtactttggtcaatatgggaaagttttgaaggtttcagtttcccgtccgactgggcctccctctcagcaggcatcagcaaacagcagtattagtgtgtatattacttatgccaaagaagaagaagccatccagtgtattcaagctgtacacaattttgtcttggaagggaaagtgttaagggcatgctttggtactacgaagtattgccatgcatggctgagaaacatgacatgtgggaatccagattgtctctatttgcatgatgtaggcagtcaggaggatagttttactaaagatgagataatctcagcatatacgaggaccagagtcccccagatggcatctagtgtttcgcaaagacgtacaggcaacatgttgcctcctccaggagatgatttctcttacagtgcagtggtttcagccaagcataccttcaagaatgcaacacttaataccaccaaccagcccagaccttcacctccaaacagtagttctgggaggtccacacttccaccagctgcctcatggggacaacgtgatgtgaacgccaggacaacagctactggggtgacatcatcacaatctcatacaaaaccaaaatcagaatcacagagtaatccattttcaagttcttcagtaatttccagtacaaaaacaccctcttcatggaatgatgatacaagtacagcagcaaaaatgtctgaaggacagcaagtgtcagaaaaagagtccaaaaccttgcagctgtataagcctggtatttcaatggcaacacaagctacatcatcacttgagttatcactgaacatagacttctcgacaataccttcagcttggaatgacgatgagattgtagtatcagatgggatgtcaaaaggaagcgatgaaaatcaagttgcaaatgaaaatggcgagctaacccatccagcatctaagccactagtcttatctaagaaagacataacaatgaaatctaccagtaccagcaaaagtcctccaaatattgtatcaagtctagcaatatctaaatcagatgtaaatactagtgatggtgaccactcacttaccaatattagccttacttcaaatgctgtagtctgccaatctaatcatgttgctggggcgaaaatattggaggatattagatccagggacactgacatggagaagctatctgttcatatatcttcagtaaaattaggtggcaatgatgagattcagattatggcaggaaatcagcgaccagatgtaatgccatgcacatctgttgatgcgcccatgaatcagaatttcgacagagaccaatctcatctcaatcttaatgagcctttgttaccttcagaaaataaggatactgttctttcttgtcaatatagttctgataagcgtcttgattggagttcagagatgcaaaatggtagtgtgactccttcaaataatatagtagattctacgatgctcactggtaaacttcatagtatactactggatgtttcagagcaaccatcatatgcccgattccctagttcattggatacttcattgtgtaatgatacagaaagtaacactgcagcaacgattgacactacaatttcacatatgcagactgagttctcttcaattaataatatgtatgccttgttaaatggaggtcaagatggactcgggactgtaaatacacacggtaatgtttctgaacagcatcctggaatgggaaatcatcaatgtagagcaatgggttcagtaagaactgaagcaatgggttcagtaagaacagatagtataggaagttttgagaagaccataagcataaataaggatgagagcagaataatttctgatatgttatcatcagagtttaatccatgggatgattcatattcgactgctaacaattttgttaggatgcttagggaatctgaaaataatgatgtccacttcgctgtgccttcatggaaatcaggaaccgggaacaaagagtctagattttcatttgctagacaggataaccaagggaacttattggattcatctctcagaaactgtggtactggtaccgagcagaatttcagtttgctaccccagaattctcgaggaaatatctaccagaatggccttgcattccaatctttggagaacgatttttcgaacagcaactctcttggtgtattagatatgttaactactggaggactgcaccattttataaattaa

SEQ ID NO: 11259 - DNA, 2673 bp, Zea mays
  Peptide Sequence Number=SeqID_54634
atggttgaggacggagttgcccagttcgggtcatgcacattcacgccgaagaccggcaagaccacaatgccagtagtggagttggtcccgtgcgcccgcaacaagtggggcaattggaatgaattttggttttatgttgctgaggctactgtcgaaggccatgaagggctccccgtgtccttaatgtgctctcactattactctgcgtatccaccttatgaagtggcagaagaggatgcggacgaaggggcccttcggtgcgccgccggtcagagcagcggtcgagatttagttgaagagttcgtggcgtacggggtctggcccttggcgcacggctgggcgctgggcgaagtatgccctcgccagatgccctttcacggaggaagggtggtgcgaagtcctgccttcgcactgaatttgcgaaaccgtgacccggctgcctttgtgcgtgatgcggagggcttggcggtgcggctcgtggggcgttacgtgccgaggacggaaggccagcgcagctttgacatccgcgggtcaaatgaacgtttgaacagggtcttcgaattaaatcaactgccgtacgacggttaccctggtcaagacgaagcggaccgccgtgggaagaagccggcggtggagactggaggcgaccctgcgctggtggccgccgcctcctcgaaaaagagaaaattaggtactgcgatgggaagacttggggtgtctgatagtttcgctagagatttaatgaggacgtgtgcggccccgggggagaggatgtcttcgcccgagctccgggagtcttcggctcggatgctgagggttaccgggggttgttggcctaaaaacattcctatcccctgcgcggctgaggatgactgttttacatctcgtatggttcatcggtggaaagtttttccttatgggcgaaatatcggtcatgttgtgtgggcagtgatggacaaggatcgccaaggcgcggcgcgaaaacgccaggcgactgtgagggttcacgaagcccggccgaaaaggcagcggggaacggcgaaggctgaggcctccggcggaggcaagccgccgctgccgacgaaggtgggcgccttcgcgcctggcaaggcgccggagacgacggtgggcgccggaggccccaagctgtcgaaggtggtgccgtctgtcagcggggtggcggaggctacgaaggcggcccgatcgctaccgccgcctggcaaacgcgttgccgacttcggcaccgagattgatgtggaggattatcttggggggtcggacgagggcccgcttgctctagttgtgcctggcgcggcgatcgcgacggctgcgccagcgccgaaggcggggggagagacccttggcgctggaggcgaggtgtctgccctcgcgctggtcagagacgaggcgggcgtggcgacccgtcggctgaagggagcgacggaggcgctgagtcgagcgacggaggcgctgagtcaggtggctgacttcaccagcggcactgcgtcgggggcccttacggcagcgttgtctgccgaggtcgagagacttcggacgcaacatgcggacgctgtccgtgagaagtcggcctccgacagcaagtgccgcaaactggcggagaaggtggccgcccttgagaaggagaaggctgacctccggcgccagctggcgggggagaggagggaggccaacgaagccatcgccaaagagcaggctgcgcaggcggaggccaggctggcgcgggcggaaggcaatatcgccaaggagctcgccggagagctgcagcggcggcttactgcccaggagagccgcgcggagggggccgaggcagcgatgaacgcgctctctcgcgaaggctgccggcacttcgaggccctcgaccaggtggatgaggattttgggcgtgatatctttgaggtcgaagaccccgtggtgaaggaatccgccggggccctctatgaccggatgtggggttcgtacggtcgtgaggtggtccgggcgcgggccgaggctgcgagggctcaggcggagcgcggcgagcgggtggacgacttcggggcgctgaacagcgcgctgcctaagccggagacgacccctgcggaggccgcgactggagtcgccccgggaccgaccccggagattgcggaagatgcaccgggcgctcatgcatctgccgcggccggcgaagaccttcccccaaaggttcaagattttgggcctgcgcacgcaaccgctaccactgagtttttggcggcttcgaccgcggaagatggaaatgaatgtgatgggtctgtttctgagttttttgatgttactgactctgggagctcggttgagtggactgaggagtcgtcggaggaggacttggattattttgcggccttggacgtggctgcggcggaggctgcaccacatgctgcggacgcgccaggcgtgcccggtcctagcaccgggcaccgacgacgaagggcggttgcaaagcgtaggattagtgcggaggaaggggctcggcttcgcgttagtagggctggccggcaggagctgctgtctttgccggccgcctcgggtgtaggtgaaggggagctgcaaagcctttttgcgggtgaggagcttaggataatgttatttaattatagagagatggggattattcctaaggttgagccgatgtag

SEQ ID NO: 11260 - DNA, 285 bp, Zea mays
  Peptide Sequence Number=SeqID_54635
atggcgactaagtacttcagagatgaagtacactggcacttgcttcttcgcttggccatcttgctttttgtgacggaacctcctaaggtattaggcccacctacagatgtccttgtcctaaggacctcggacaacactgtagatgcacataatcactcgacaagtttggtcatctgtatcatcgtcaaaccgcccaaaagcgcctcacccatcacgcagacattacatcacatcggaggaagaataagcggaagcagaatacaagaacttaatttacattcataa

SEQ ID NO: 11261 - DNA, 756 bp, Zea mays
  Peptide Sequence Number=SeqID_54636
atggcgcagtggcttacccggtctacgctcaccggcggtcagatggagtccggcgaccgtggactggcctctccggtgaagcaaaacttcgattcctcgctcggggagcttcaccgaggggtgctcagtcctctccgagggctgcacggggttgggaaaggcttggctggccggtctacggtggcaggggctcgggtggccgcagacacgccgtgcacgggcaaacgccgggagctggttacacgacgcccccagtacgcggtgcagctgttcgagaagcaccgagtgccccgctgtagggtgaggatgaccctggagcctcatcccctgcagctaggctggcgttcgctggactctgagtcttttggatacagggctgaggacactatggaagccattgctcttcacggactgaccaccttctgcggattccaccccttagagctgtccactcaccccattggcttgttccccgcagagaaggaggacgacccaatgtggagcatgccaaggatatctcggctatctacccaggctaccaaaattaccttggataatagagaggaacttgtggtagacttgtccactgagatggtggaaaaagacctacaagtggaacaattgtcaaatgagatccaagagcttgaagagctagtgggaaccagggaaaacaccatcgaggttctcgaggatcagctgatcaacacccagcaacagcttgcagaggctaaccagcacctggatatgcaccactag

SEQ ID NO: 11262 - DNA, 231 bp, Zea mays
  Peptide Sequence Number=SeqID_54637
atggagagtcatgatctccgggcagaaagggaatcacgacttgtgggtggcaatgagactgatggttttggttatgactatggtactgataagtggtattctttccgtctggaaagggacctcatcgtcatttatcaacgatcaataatgggtttggggcttttgggcgtcggattcatggtctccggcgggtgctccgccggggggctggcggcgccaccgtcaggctag

SEQ ID NO: 11263 - DNA, 1875 bp, Zea mays
  Peptide Sequence Number=SeqID_54638
atgcacctttacaccgaggactggaagacttcggtggaagttgtggagctagttccctgcgcccgcaacaagtggggcaactggtatgattattggttttatgtggcggaaggcgaagtcgaatacctcccaggactcccggcggccgtgatgtgctcccactactatgtggcgttctcgccgtttgaggtggcggaggatgatagcgacgaagggtcccttcgttgtgctgcccgcatgagtagcgggcgcgatttagttgaggaattcatcggttatggagtgtggcccttggcgcatggctgggcgttgggcgaagtatgccctctccagatgccctccctgggcgagcagcaaactctatggagttgggatatccgtggatccaacgttcgcctgaatagggtcttcgagttgaatcgtttgccgtacggcggctatcccggggatgacgctgccgtgcccgtcgaccgccgtgggaagaaaccagtggtcgtgactgaggaaggcccttcgcaggaagctgccccaggcactaagaagagaaaaataggtactgcagtggggggactgggggtctctgatagttttgctgtggagttgatggggatgtgcgcggcccccgggggaaggatgtcttcgcccaagctttgggagtcttcggcgcgaatgctgaaggttaccggtggtcgatggtcaaagaatgttccgatcccccgcgcggctggcgaagacatatttacgtctcgtatggctcgtgacttgaagatttttccttatggacggaatattgttgttgttgtatcgacagtgatggagaaggatcgtcaagacgctgcacagaagtgtcgggcggtcgttaggatcggggatcctttccgcgaggcgaagaaggcacgggggggggcgaagtctgccgcccccggcagtagcaagctagcgccggctgcgaagccggccgcccctgggcctaggaagtcttcggctggtgtgaaggctgctgcttctgtcgcgggcaaaccacccttgggcgagcctgcgaaggggcgaaggttgccttcgccaccgcgtactgacgaggcggcggcacgtgttgccgactttgacacagacatctgcgtgggggattaccttgttggtaagattttttttaaacttggtcttaaccaagatcatggtgcagggtcggatgtggggcaactggctgttgtcccgactccagtggtggccacttcaccgacggcggcggttggtgcgaagggtgcttcgcaggacccgtggtccgccttctgcgcgagtggcgcgattccgtcggtcgccgccgctaaggatgtggcgggctctatgtcccatcagctgaggcatgcgtcgcagcagctgaagcatgtggccgacttcgccgaccatgttgcgtcaggtgctttgacttcggagcttgctgccaaagtcgagcgtcttcgggcgcagcatgtggatgctgtccgggagaagtcagctacggaaagcaaaagtcgcaggctgacggagaggttggcctgtaacaccccaggccgtatctgccccggcgtctcacagttgagtgacagccctaggtgccaggaagagccctcggagaagactgtgcacgtctccgtgaagctccccgagcgaggaatcgggctctgcttcaccggagaggccggcccaaggtcaccggacttcaaccgaccgccggcaaccgtggaccgaggtacaccgtgcacctctcttcgattccttgcacggttagactccttagacctccacgaagctccctatgcccttggattgaactatgccgccgtggataggccggagcacacgcccgccgacgagctcgcccgcctgctcacgtag

SEQ ID NO: 11264 - DNA, 198 bp, Zea mays
  Peptide Sequence Number=SeqID_54639
atggatgaagtgcaaatcgacaagaaggatcacctattcaccccccccccctctaggtgctctcatgaggccgagcaccagcgcctcagcgactgccgcacccagctggaggagcgcaccaggacggcatcccaccaattcatctccgagcggtcccaacttgagcgggaccgtaaggagtacaagaaggacctctag

SEQ ID NO: 11265 - DNA, 1113 bp, Zea mays
  Peptide Sequence Number=SeqID_54640
atggtccctcttctgtcgcttcgtgtcgaagtcgacgctggaccccccagtgatcatgtggatgactccgcgatacggttgatcggcaaagtcttcttgctttggggcttgggggtggttggggtggtggatgttttgctgttgcgggtgtggaggtgtgggtgggggaggtacgatttgtacctcctagtggtgttggtatgcgtggtgcggtggatgcggagcggggccgtggatgtatggctgagggggttgttgatatgtgtgcgcgacaactctagggttgtcggctggttgcgcccgtgccatcctgtctctggtggccttcacctctgggcaatctcttgtagggtgcatgcagtcttcgccgtggaacaagcagtaaaatctgcgcggctgctgcgcacgtccccggccccgaccacgagttccgtttccgcggccttgggggggatactcctggcggcgaggggcctcgctagcggggtgctggttggcgatgttgtgtacctgctgctgattgcggccgtcccgaccggagtctgcctgcgaaggcctggtccacgtacggctggactgcggaggctcctggaggttcctgggcagatctctgatgcagtggctgtaaaggacgccggcccgaaggccactgatggcgtagtggatggcgatttgagtgaaagttcagctaaggcgtcggtgtctgggcggtacccttggaagttgagcaggaatttgtcccgaagacttctccaggagtcgatggacagcggggacaacctggtgtaccaggtggggcgccagggaactccgctcgtcaaggtagttgacaccttggaatgctgcggcgtgcggaatggcgtgtccgcgctgagggatgaccaggtcttcaatttgcgcgtgctgttggaggggtgggccatgttgcagaccgagttggccttcgcgctgcatgagcgtgatctcttgctcaagctcctgagccttttgctcttcgtcgcgtatcatctggcgcaccttagcttgcgcagacacatgttagtgtttggcctcgaggatctccttttgcttctggaggttgcggttcttgatgcgcaaggcgcgcagctgtag

SEQ ID NO: 11266 - DNA, 267 bp, Zea mays
  Peptide Sequence Number=SeqID_54641
atggcagttattggaagattatgtgcttctacccatgatgcagtaatgaaagaatgtgttgctctagtatcaaataacacttctgcaatatgggagtcgactgggaacatacctactatcatgccgggggaagacgaggtgcctgctgattctgcctctgaaactggcctcctcctgactggttgttctgacgattctgatactggtgctgagggtactgcctttggaactgctgatgctactgaggtcgacgctggttctgcctga

SEQ ID NO: 11267 - DNA, 330 bp, Zea mays
  Peptide Sequence Number=SeqID_54642
atgggtgggagtggattggattttttgccattagcaggcctagctgtcagggagcgatccgaccgaacgagggagcagatggagcgcgccgaggacgtcgaggacttcgcgagtctagtcggctcgccgcccgaggctgcggagggcaaaccggtgctgccctcgggtgctggtgaaggcccatcggacgcgcctgtgcctgctgctgccggcgaagaccctgcgttggccgctgtgccgacagccgaaggcgcccaggggtggtggtggagccggcagtcgaaggccccacggccgcggccgcgccctcgcaggtggctaagtagttga

SEQ ID NO: 11268 - DNA, 2471 bp, Zea mays
  Peptide Sequence Number=SeqID_54643
atgtccgaggataccttgagcaatgtggcggcggcggagctacatccgggtgatacgatggagttcggcgtttcgaggatttcctcagtccgcgtgccggatatgcagcagcagggatattttggcagcggagttgggcgtgtcccgggggcggaggaggtccaccagctgacacctaacgctgtggtggccctggcgaagtatgtctgggcggcgacttcgtatgccgccttcgcgttggatctgcgaggccgagatcccgccgcattcgtgcgtgaagcggaggacggggttgtgcgtattgtgggacgttatgtgcctaggacggagtcccagcggagttgggatatccgcggatccaacgctcgcctgaatagggtctttcagctgaatcgcttgccgtacggcggctatcccgaggatgacactgtcgactgccgcgggaagaggccagtggccgtggatgaggaagacccttcgcaggaggccgccccagccactaagaagagaaaactaggtactgcagtgggggaactgggggtctccgatagttttgctgtggagttgatggggacgtgcgtagcccttgggggaaggatgtcttcgcctgagctccgggagtcttcggcgcggatgatggaggttatcgggggtcgatggcccaagaatgttccgatcccccgcgtggctggcgaagacttatttacgtctcgcatggctcatgacttgaaggtttttccttacggacggaatatttctgctgttgtgtcggcagtgatggagaaggactgtcaagacgctgcgcagaaacaccgggcggtcgtcaggatcgtggatcctatgcgcgaggcgaagagagcgcgggggagcgtgaaggcttcttcctccggcagtagcaaaccggtgccgactgcgaaaccggccgcccccggacacagcaaggcgtcagcgagtgcgaaggctgccgcctttggtgggagcaagccacccccgggcgaacccgcgaaaggacgagagctgccttcaccggcgcgacgagttgccgacttcagcacgaacatcagtgtcgaggattattttgttgggtcgggtgaggggcaattagttgttgtcccgcctccggtggcaaccacgtcgccaacggcggtggttggggcgaagggtgccgcgcgggacccgtgggccgctttctgcgtgagcggcgagattctgtcggccgcggccgctaaggacgtggcggccgacttcgccgaccacgtcgcgtcgggtgccttgactgcggacgtggctgccgaggtcaagagtctcctggcgcagcatgcggatgctgtccgggagaaatcggctgcggagagcaaaaaccgtaggttggcggagaaattcgtggacgtgtaccgcgagctgggtgcgcggactgctgacttcgaagtgcccggtcaagaagcaggccttcgcttcctagaatggttgcaggaggagctgctagtgctcccgaccattgtgacgggtttcatgtcctttgcctccctcgtcacctacgagggggtcatgaatgctttgtcccccaaggggttcaggcattacgaggtctttgaccaagcagatgaaaactttgaacgtgaaatcttcatggtcgaagaccctatggtgaagcagtcggcgggggcactcttcgataggatgtggggtccgcatggtcgagaggcgatggcgcatgccgaagacatcgaggaccttggtggtctggatggcgcgctgcccgaggctgcagaggtcaatccggtgccgccctcggatgccggtgaaggcacctcagctacccccgcgcccactgcggccggcgaaggccccgcaccagcccctacgccgacgggcgaagacgccttgagggtggtggccgagccggcagccgaagaccccacagccacagccgggccttcacaggttctagggtttgggcctgcgcacgcaaccgctactgacaatgctatttttgtggcagcttcgaccgtggctgctgatgacgattcgtttggctctgtgtctaagtgttttgagtctgatgattctgggagttcgattgcgtggacggaggagtcttcagatgaggacttggattattttgcagcgttggacgtggctacggcggagacttcaccgcatgtggtgggtgctgaggatcttccgggtgcgagtactgggtgtaggcggcgaagggcggtggcgaaacggagagtgagtgaattgtcgcgaagtggcatgcgtcattgtggtgagatggagagcggtcatcttctcgtggacgggtctggtaaacgggaattgttgtcctcgccggctggggctagtgtgggtgaaggggagctgcaaaatctttttgagggtgaggagttgaggataatgttgttcaactacagggagatgggtatcattccgaaggttgagccaatgtcatatgtgatgccctcgtt

SEQ ID NO: 11269 - DNA, 366 bp, Zea mays
  Peptide Sequence Number=SeqID_54644
atgcaaggaactttagatatcacactcgctcgcattattcaaatcaaatttgtgcgtaatccatcaaggcgtaataaaattgaaggcttggcattgtggaacaatctagccaatatatggtgctgggttaaccacaacagcctgaccattgacgatgtcgttgtagatacaaacacgtatggcaccatcttggagtggagacgggaccccatctggagggagtactcgaacttcggttatattgggattatcttgacggataatattaaccgcatctacaacagcgtagccaaccagatcaggccatgtttgggtggttataccaagcttgacgacctccatcaatcagaaaaactgatgtcgtaa

SEQ ID NO: 11270 - DNA, 1044 bp, Zea mays
  Peptide Sequence Number=SeqID_54645
atgcagcctggctgcatcccctcgccggtggtcacccaagacggtgaccaccagcctctgggtggggaggagcaagccaggatgcgatcttggctccgccctcagcttcaaggatgctcatcatccttgcaggggcgaagagcgaggcgagccggggctctacctcctgcgtgggtcggctggccacctcttcttccagcttctggtggtggaaaccatcctccagctctgtggaggaggcatcctccagccatgccggggaaggcaaactgttgctgcccagctaggatgcaacattccgccctcttccttgctttcgcggtgaggacggaagtgaggacctgccggtgcgccttgcagaccgtcggcgttgttggagaggcggacgccgccgtccgtgctgctgtggtggtagccggaggaagctcccccctcgtcgaggccgtcagcgccacccacgggccggcccccggctctttggctttgatcactgagactcgccttgtcgattatccgaaccgcttcaccgagcgtgagttgcctcgtgcaaaggtgacgagtgagagttggcttcgaaaaggaggtgtggttggccagagcctggctgggtcgtccactggcggagccgacgccggagttgagctgccgaggccacaagccgagctgatgtctttgaggagtgggggccctccgaccgtgtcgccgtccgaggctaggtcagaccccgccgaaggtgtagttgatgccgagggtgctgctgcccccttcggctgtcgacgtccgagcctgcaggatcagtttccagactcatttgtcggtaacagaattgtttgtgcgggcgagagttgcttttcacggaaggtgatgagtgagggttctgttaccgacgcagtcgagaaggtccgaaaaatcatttcagcagaggagctctcgagcatgaagacttgttcggtccacggagtcacttatccgagcgcgagttacttatcgcagaaggtgatgagtgaggaaaattttgacgcagagggggttgcccccttctag

SEQ ID NO: 11271 - DNA, 654 bp, Zea mays
  Peptide Sequence Number=SeqID_54646
atgacaactgtaggtgggcctaatgacttaggaggttccgttatagctggtatcggaccgaagcccatctcttcagatattatgaagcatttcaaaaaggaaattttaaatacttatccaagaaaaatttctttcattcttcccttgtcactttctaaaagttctcatcctgcaagaccagatatggcacgcacgaggaaaaccgcgcgcaagtccacgggaccctttggtgtgcctcgccatcagttagctcccagacatgaagggagcagtagcggctccaatgaccccattggagatctggaggctaagatctccgaacgagactcagtcattgattgggccatcaactcacgctcaatcgcttggcatcgtgaagcaaaggctcgggcttgggtggatgagctcagcacggcccttgataacctgcaagtatatggtaatactctacatgaggaagtacatgtactgtatggtcgactacacccggatgtgcctgctgacgctgctgcaatggaagctggaccctcaggaacagcaaatgaaggacttggtggggagttggatctttttaaaccccctccttctacgaacctggctgacgagcggtcttctgcagcagacagtgaagcgacaaaagacaatgaagactag

SEQ ID NO: 11272 - DNA, 597 bp, Zea mays
  Peptide Sequence Number=SeqID_54647
atgcagcacagtaacgtggcagaagtcatagcagaaggtcagaggggcaccggactgtccggtgcgacactggactatccggtgccgcatgaggacaaatcctccaacggtcgaccagctccaagccctaacaacaggatgatgtggcggcgcaccggacactgtccggtgcgtccatcgccagcagccttctccaacggctacaaattggttggtggctataagtaccaccccaacgggccacttcaaggaacaaaagatgatgcatatcaaaagctcaaagaagaaaatgagaggctaaagatgagcttgacacaaataaaagggaagtgcattgctcaaccttctcaagataatcgtgatcacatggtgaagaagcttgagatgggaataaccgtggcatgcactaaatcccttgaagaaaatgtcaaggacttgaggattgccaaagggaaagaacaaaagaagaaaatcaatacctctaccaaaagcctcaattgtgcctccatgcaaggtaacatccaaggtaataaccaagccacacttcacactaagagaagtaagaagtgtagtgaatgctttgaaaagggacactga

SEQ ID NO: 11273 - DNA, 210 bp, Zea mays
  Peptide Sequence Number=SeqID_54648
atggatgctaagaggcagtactgctttctgagaggattggttgatcccctccactaccagctaatgaaccacaatttccccaccttccagcatttgatagacagagcaatcatgactgaaaggaagcgtcgggagatggaggataggaagcgcaagattagaggatctcaggccgagagtagcagtcgtccccgctactcaggaagatga

SEQ ID NO: 11274 - DNA, 399 bp, Zea mays
  Peptide Sequence Number=SeqID_54649
atgcaagatgcaacacgacgggcactttttcagtattgctcgttgttcagcggggtagcggacggcctcgacctgaagtactaccctcgtcgtttgactgacagtgctggaggtgtgattgtctcgctagttggtgagggcaatcctaggctgaacagcatggtcaacctggccgccgtgctcaacacagagttggaccatgcccttgacgagttgggcaagatgtctgagaacaggcgcagaggtgcaaggcgtgctcagtcggaacaccaggcaccccaggaggatacagcccaacaacagcagttgccaccgccacccccgatgatagttgagcagatgttcatgatgcaaactcaggcagttcaggcaattggtcagaccttagcagcgatgtag

SEQ ID NO: 11275 - DNA, 168 bp, Zea mays
  Peptide Sequence Number=SeqID_54650
atggcggcagcaggggcggcaacggcagcagcaggggcggcagcagcagcggcaggggtggcagcagcggcagcaggggcggcaacaaggccagtggctaaatgccactggggtgatggccgagttattattgtcgatatttatgtatttgacatagagtccgagtga

SEQ ID NO: 11276 - DNA, 306 bp, Zea mays
  Peptide Sequence Number=SeqID_54651
atggcagggaacagagaagacgcggcgtcgagtgtcgaggggaaaaagggcgccctatggtgtctgctctctctttcttctccttcctgcacactcgatgctctcggcgatggcgttcttgttgctggtggtcaagcagatgcaataggaggggggtctccaccggtatttataggagcaggcgagcccatctcggccaatcccaacaacccgtcaaatgaacttggccggatgggtagacgattctgttgcaacaacctcaatctaggagacgtttgcttgcatgatgaccacattgtgacataa

SEQ ID NO: 11277 - DNA, 177 bp, Zea mays
  Peptide Sequence Number=SeqID_54652
atggcccggaaaatagatgatacgaaggatccctcagctgaagcaaccttgatgggcggaaaattctataatgatgtctgggtgaatgtggtggtggcggtggaagctgaggccaagaagcttgtgaatggcttgtcgaagcaacagaggctgcaggttgattgcccacgtattctg

SEQ ID NO: 11278 - DNA, 1563 bp, Zea mays
  Peptide Sequence Number=SeqID_54653
atgccgtgcacgaagaatgtgtcggcgctagggagaggcgatgatgaggatcctcgtcgccccttcaggcaggtcaagggcaagacagtatacttggagcagcaggaaggccgcaagaagcagcgtatggacagagcagcccgagcagcggcagcagcagcatcagccgctgagaaggccgagctaggagatcagcctcagactccttcagatcagattgcgtatcgtgttcgtcgtctcgcctcccggcctcgctcctccactaccaccactgcttcagcttccactcctcctcccactttgcctgctcctgtcacccctattgcgccatccaccacctccactacaccagcttccactgctcctcctcccgctcctgtttccgctcctcctatcccacctgcttgtttccaagagcgcgatgagactgaggtgcaacctctggctgctgatccccggttgtttgaccttcagcgtgctacagcggcacggagggaccctgctgcagttgacctctttagcaccaggattcaggaatcattcttcagggcacagatgtctgcacagattgctctgcgagtgcaccggcttttggaccttccagcttttctgctagctgtcggtgctgactctgaggtgcacctctcatatctgtttggccttctgactcttttgtctaccagcggcaggtatgttgaggagtgggtccgagttttctacgcgactgtatggatagacccagatcatcactggatgaggtttcattttgagcgagaggatgtcactattactgccagccagattcgccagctctttggttttcatgagtcgtcgactcgacttcacagcttatgctacggcacctctgaccctcctcgtcgccctcacggcggtgtggctccggctgattcggcctccacagtccagggcacacttgaggcctcacgccttgtttttggatcctaccgtccagcgcctgaggatcctgtgccagcttctgctccaatttttgacactcaggccgaggatgctgctcttcatcagttcgaagctcaggatgcagcagttgatgatgattttgggattccgcctccgcctcctatgcccccacgctcacatgatcatgaggatgggagttctcgtgctacccctgctgcccctcctgctattgaccctgctcttgcttcgattctacagacactcactgagcagcaggcttacttgccagccgagcagacccgccaggcagcagcccatcagcagttatccgagaggatgctctcgatgtttcagaccatacaggacaggcaggattctcttcagcagcagcttcttcaggatcgggctgagagcagggcattcatggctcttatgctacagcattctggtgtctcggttcccccggttcagtctgcaccacctcctccgcttcaggctcctgttgtgccagcgattcagtcaggacccctcttccttctgttggtccttcttcctctccgctccggtcggtcaccctggctttcacgtcaccggttctcagctctgtctgccctcagccgctag

SEQ ID NO: 11279 - DNA, 480 bp, Zea mays
  Peptide Sequence Number=SeqID_54654
atggcgaaccgccctcccgcccgccctaccgcccgcccgacgcatgccgcacgcccacctagcgcgacccgtggaaccctacagccgcccccaaaccagcccaaagcgagaccggaggggcacgagcgccaccgccttgatcccgcccgctcctccccagatcccctcgccattgtcgccgccatgcccggattcgcgccctgctcgcccagatccgaccgcgactttgatttcccaaccgacgtaggagcggtgggctcgcacaaccgcaaagagttcgtcatgatccgccatgactgcgatgcgctgggcccggctaagcccacaaagagtgtgaatgggcaggtctgccagatttatggtgactctataggtgtttcagccacttgcgatgtctttgttgcttgcaatgagtgtgccttccctgtctgccgcccatgctatgagtatgagcgcgagaggaaccaatgctgcccctag

SEQ ID NO: 11280 - DNA, 255 bp, Zea mays
  Peptide Sequence Number=SeqID_54655
atggccatctcgaccggccgcagggcaagtggttctggtaacaccaggggtgttacatccttccccccatcaaagaatctcgtcccgagatttaaggtcctaggagcaggtgtcacacccggatttaagggacaaagccgggtgcatctcatatatgcgccaaagaagacaacacatataataacagagcgtatagagatgaatgtcacaatatcatcagagtacttattacaaagcggaagtcttacaaaataa

SEQ ID NO: 11281 - DNA, 561 bp, Zea mays
  Peptide Sequence Number=SeqID_54656
atggcccctaccgtcggtgccgaggcggaggcggctcgagaagtccccgtcaccgacgggatcaccgccaccatccgcgcttcgggcctccggttcttcgtacttgtcctcgcccctcgggcgtcggtagcgggcggcggcgagccgctcgtcagtcttctgttgctccgcaggcctttccccatggagtggggttgttcgtacctgcggagggggaaccagagttctgtttgtaatggcaccttgaatgccatctcgcctgttgattatctgaaccgcttcaccaagcatgagtcgccccgtgtcaaggtgacgagtgagcacgaacagaggcagagttggctcgaaaatggaaacttggttggccggagcctagccgggttgtccgtcagcgggaccggcgccggagttgaccagccgaggcctcgggtcgggctggcgcccttggaagatggttggccgaggcccctgaggcaaccggccgagccgcctgctcgggccggattcccggaggagtccctggaccgcgtcgtcgtccgaggctgggtcggtcctcgctga

SEQ ID NO: 11282 - DNA, 135 bp, Zea mays
  Peptide Sequence Number=SeqID_54657
atgtcgtcctcttcctcttctgctgccgctacaccgccggccggcgcgtcgtccgaggagacgctgagcaatgtggcggcggaggagttgcgcgccggtgacacagtggagttcgaaaaggaaaatcggaaataa

SEQ ID NO: 11283 - DNA, 651 bp, Zea mays
  Peptide Sequence Number=SeqID_54658
atgggaggattgggggtctccgatagttttgctatggagctgatggggacatgcgcggcccctgggggaaggatgtcttcgcccgagctccgggagtcttcggcgcggatgctgaaggttaccgggggttggtggcctaagaacgttcctatcccccgcgcggccggcgaagacttttttacatctcgcatggttcgtgacttgagagtgtttccttatggacggaatattgctgctgttgtgtcggcagtgatggacaaggatcgtcaggaagctgcgcaaaagcgccgggcggtcatcaggctgcccgaggctaggccgaagagggcgcgggggactgcgaaggctgccgcccccggcggtagccagccgacgctagcggcaaagtcggccgcccctgggtccagcaaggtgccagatgtcgtgaaggcagccggcgccggcgggaccaagtctgcctcggccggatccgcgaaggcccgagaattgccttcgtcggggaagcgcgttgccgatttcggcaccgatattagtgtggatgattatctcactggatcgggcgaggggcaacttgttgttgttcgcctgcggtggcgaccatggtgtctgtcgcggtgcctggggcgaagggtagcgctctcagcgctgtcg

SEQ ID NO: 11284 - DNA, 950 bp, Zea mays
  Peptide Sequence Number=SeqID_54659
aagtcaagagacttcgggcgcagcatgctgacgtcgtccgggaaaagtcggccgccgatagtaagtcccgcaaactggcggataaggtggccgccctggagggcgagaggactgacctccggcgccagctggtggaggagaggagggaggctaatcaggccctcgccaaggcgcagtcggcgcaggcggaggccaatttggcacgggtggagggtagtctcgccagccagcgcgccgaggaatgggagacgcggtttaacgctctgcaggcccgcatggagagggccgaggcttctacacgctcggaagttgagcggacgcgcaaacagctcatggactcataccgcgagctgggcgcgcggaccgctgacttcgaagtgcccgaccgagagtcaggccttcgctgcctcgagtggctgcaagaggaattgttggcgctcctgaccattgtggagggatttatgtcctttgcctccctggtcacctgcgaaggggtgatgaacgcgctgtcccgcgaagggtgcagtcactatgaggtcttcgatcgatctgatgaggatttcgagcacgagatttacaaggtcgaggaccctgtggtgaaggaatccgcgggagccccctttgaccgaatgtggggcccccacggtcgggaggtggtcagggagcagtccgaccgggcgagggatcaggcggcacgtgacgagaaagtggaggacttcggagctttgaacagcgcgtggcctgaagcggagtcgaacccggtggcggtcgaggtcagcccggcgccacccccggaaagtgtcgaatgctccctcgctgcccctacggctactgtgtccggtggtcgctcgttgccaaccgctgtgccgagggctgaggatcccccgaagacgacgacagagccagcagcggaggatcccatggcggctgggtcttcgcaggtggcttag

SEQ ID NO: 11285 - DNA, 222 bp, Zea mays
  Peptide Sequence Number=SeqID_54660
atggtggttcttgtggctactgccgctcggtggcccgggggaagcacggctgcccgggcgcgcccgccggctgcgaggggcagggcccccctccgcgtcgccgccgagcccgagcacaaggcggccacggtcaggtttgttgtagctatgctggcaaaatcaggtttcacggcggcatttacactgatttttgtatctgagattggagataagtgttattga

SEQ ID NO: 11286 - DNA, 417 bp, Zea mays
  Peptide Sequence Number=SeqID_54661
atgggcaagagcaagaagggtggtagttcttcgcatcactccggcgacaaacggaagcgtgagccaactcctccctcggaggacttcggcgacttggagtactcggaggagttctcctctgagtccgagggctcactgatccatgcctctcccccgacgtcgtctgatgactcagacgactcccagggactcgccgtagaggtgtggacctacatccgggccgtcgagcgcgtcgggcttgagggctcggatgagtcggagtactcctcggacttgtccgaggagggcggtggcgataatggcggtgacggcgacgacgacggaggcgatggtgacggcggcggcaaaggtggcagcggtgacggtggcgatggcagcaagggcagcagcaggggcagcaacaaggccagtggctag

SEQ ID NO: 11287 - DNA, 627 bp, Zea mays
  Peptide Sequence Number=SeqID_54662
atgggccccactgcagtctcccgccggcggtcacccaggatgatgaccgtaggcctcgtggtggggaagagcgagccgggcagtggcctctcccttgccctcagcttcaaggatgtccatcatccgtgctggggaggagggcgagccgagttggggccctgccttctgcatgggctggcgatccgcttcttccttcagcattcgggggagaagggcgttcacgagccttacggaggaggcaaactgccacctgctgcccggtcggggtgtggctgtccgtccaccgcacgggcgacggtcgcgccatgcgcaggccggccatgtccacgaccttcccatgccgccggccgcaccggggggtcgcccaacacgtcgtaccccgcgagggcggtgttcgtgttctgggatagtctcgtcctcgctcctgtggcgaggacaggagtgaggacctaccgaatcacttatccgagcgtgagctacctttcgcggaaggtgatgagtgaggattctgttatcgacgtagtcgaaaggcacgcccaagctatggccttacagcagcgtgcctgggccgcagggttcgagacggctcttaaagattccgtcaagaactgcaaggcgcttgcctag

SEQ ID NO: 11288 - DNA, 97 bp, Zea mays
  Peptide Sequence Number=SeqID_54663
gcgactatcagctgccaacatcgccgtcaccaaaggacacctcttccccaacgtcgaccacaagtgtctcatggcaaaggacggcaaaagaaagaag

SEQ ID NO: 11289 - DNA, 486 bp, Zea mays
  Peptide Sequence Number=SeqID_54664
atgaacaaaaacattggcattcaaagtgccattacaaatggaactccggttccccctccgcagggacgaacaaccccactccatgggggagggcctgcggagcaacggaagactgacgggcggctcgccgccgcccgctctgacagcgacgacaacgacccccgctccgggtggccgaactgcagcggcgcaggcctcggggtgggcgctgctgcaatcttgccctcacccacgccgacgctcgaggggcgaggacaaccccgcgttgtcgaagtccgggccgcccgcagggacagcgagcgccctctccctcgaacgtcgcaggagagggcgacccacgaacccgcgcgggaggtagagctccggctcagcccggcctccaccccagcgaggatgatgaacatcctagaagctgagggtgggaccaagatcgtagcccggcttgcttctccccacccaggggctggtggtcaccgtcttgggtga

SEQ ID NO: 11290 - DNA, 468 bp, Zea mays
  Peptide Sequence Number=SeqID_54665
atggcgtcccgcatgctctgtgacgacgacgactctcagcccccttacagaagcaagaggacgaaggaccagggccctcttagagagggttggccgcgcgaggacgaggacgagacaggcgctctcttggggccgctcgcttccctctcccgcgtggacgcttgtaaccccctactgcaagcgcacctgacctgggcgcgggacgaacacgaaggccgcgggattcccacctctctcacgccggtctccggccgcctcgctcctccccccttcgcgctcgccctcgcgctcgacccatctaggctggggcacgcggcgacactcactcgtcggcccaagggaccccccggtctcggaacgccgacaagtagtcaatcgagccactggggttctcccctacttaacctttcgcggaaggaagctgaaggagaagggtcgcatgcggcacaccaagagatgggcagctag

SEQ ID NO: 11291 - DNA, 300 bp, Zea mays
  Peptide Sequence Number=SeqID_54666
atgcgctcttggttctgctctccgcttgggaaggggtccggtgctgccatgtggctcatgggcttgcagcacaagccttcagaagggagcaagcttgccacttgcattcaatgcgagcggatgacgcatgcccctactgcacatagggtatggcagttgtgtgtcagctttgagcgaatgacttgcacagtgcgccacatgatatcgaggcaagcgattgtgtctctgcgtcgcgcatgtgggtggtgccatcatgagcagttgttgcctcaagtagtacactcaaggcattcgcattaa

SEQ ID NO: 11292 - DNA, 123 bp, Zea mays
  Peptide Sequence Number=SeqID_54667
atggctattgagcgcaacggtcaactccaacggttgcctgcaaacgtgaacagtgcgcagacagttcgcgcagagtcagagcagcgccagaaggcgcaccggacagtgaacagtgcctgtccg

SEQ ID NO: 11293 - DNA, 582 bp, Zea mays
  Peptide Sequence Number=SeqID_54668
atgccgaagcttccttgcgcacagcttcggctctgttccatccttcgttctccttgtgtttcttcatacagcgattttgacatgtccgaagggtccatgtccgagagtcgtggtagtactgagctggtgcagttcctggtccacttcatctcagaggtgccaaagattcaactcaaaaccaataaaaagaacaagacagggttcaaaagaaaggagcaaagagaaaccgaagtgctccctggtatggcgcaccggactgtccggtgccatcattccggttatgccgaccccgaggtctgcacactcaggactagtccgataggccatgagtgtgtcgcaatccaggggatcgctcagccacgcctggccctaggctcgatgcaatggggttcgaccatgggtgggtccttccagggttggcgcacctaccacttccgactaattaacggaccccagcgaccaggggctctttccttagcgcgctcactaaccggtgggtctcaaggaccaaggatcatttccccgacaaatatcaacttcgatggaccccgcaactcaccagaggaggcgcatgagttgtag

SEQ ID NO: 11294 - DNA, 606 bp, Zea mays
  Peptide Sequence Number=SeqID_54669
atgaacaagacaccgacacttaaggtgccattacaaacggaactccggttccgtccccgcaggtacgaacaaccccccacgattggagggcctgcggagcaacagaaggccgacggatggctcgccgccgcccgctccagcagcagcgacaacgacttctgctccaagcggccggacagcagcagcgatgacctcagggcggatgctgctgccataaggccctcgcccacgtccccactcgagggacgaggacgagcagaaggccgtagagttggaggtcagcccgcgggcggcaccgactatctcgtcggcggagaaacctcttccggctgccgtggcggaaggtggcaccggaggcagcgccgaagccactcggaccggagagccggacacgcggcagctgccagcgccacgaacggcgaacgcccttccccccgatcgctgagggaaggagcgggccgctgcccgcgcggagaccgaccccaactcggcgcactcccctccccagcactgatgatgaacatccttgaagctgagggaggggcggagatcgcagcctggcttgcttctccccacccaggagctggtggtcaccgtcttgggtga

SEQ ID NO: 11295 - DNA, 732 bp, Zea mays
  Peptide Sequence Number=SeqID_54670
atggacgggccgcgttggacggaagaggtggacgacctggtcgacgccggcgacgtcgacggcgccatcgccctccttgagtccgtcgtctccgatttgtcaacctccgctgctccccctgccactgaccttcgcctcgccacggcgctcggcgacctcgcgggcctgcacgcctcccggggagacaccctccgagccgacgagctccgcgcccgcgccatcgcccttcggtcccgcgccacggtccctgggactgggaccctagggacttcactcggttttgtagctgctacacagtttgggacaaggcatgtccttgttttttatgactttccgccaagtacacgcacaacagatctggaaaggatttttgagaagtttggggatcacggggttgccattcgctggattaatgatacttctgcacttgctgtttttcggactccatcagctgctaatgaggctcaagcttgcatacctccaagatacaaagtacggtcactgaagccggatgatgatctattgacaaaaatagatggtagagacctagatccgcccaagccaagaccaaagacatctgcaagaacggctcaaaggctaattgctcatgggatgggattgaaacagttcacaaactttgggtctgatgagttgaagaaacaggagggagagaggaaggacagaattgccgctagacaagcaatgcgtgatgaggcttggggttcagattga

SEQ ID NO: 11296 - DNA, 678 bp, Zea mays
  Peptide Sequence Number=SeqID_54671
atgaaggaatcaactgagccgaagatgatagaggaggaagacacccttgtagaaagtgcttatgatgccgaagacgacagtgatgaggaggatggaagtggggttacaagcgtccgcgtgggagagagcgagaggcttatgcgcgccgtcccgttcccccgcgcggccaaccttccgtacgagtgccctggcccttccttttataggcgtaaggagagggcccagggtaatgatggctccccttgtgacgtggtcggtccgagccctgggtcgagcgaggcggaggctcctccgaggtcgaggtcgagtatgtcttccgtggtcgaggtcgagtccgagccctgggtcgggcgaggcggagttcgtcgtcttccggagccgaggccgagtccgagccctgggtcgggtgaggcggagttcgtcgtcttccggggccgagcccgagtccgagccctggggtcgggcgaggcgaagttcgtcgtcttccggggccgagcccgagtccgagccctggggtcgggcgaggcggtgttcgtcgtcttccggggccgagcccgagtccgagccctagggtcgggcgaggcggagcttcctatggcgcccgaggccagacttggccgctactgggcctcggacgagccgaaggtgtgtccgtcgcttgagggggccctcgggtga

SEQ ID NO: 11297 - DNA, 273 bp, Zea mays
  Peptide Sequence Number=SeqID_54672
atggcggtggtccttgatgtccggagcactagggttttgccgctaggagtggccagctccgccagccgggtcttccgccatggctggttcgttgccagtcaacgcgacaaaggcggcacagtggtgaagatctacaggagcgcccacgaggacccacacatcagagaccccagtgaggcgacgcggaggaactggctgacccgtggtcccgcgcggcagagggcatcgagcgcgcgcgtggagaaggcgggtggatgcaaatatggctcatga

SEQ ID NO: 11298 - DNA, 813 bp, Zea mays
  Peptide Sequence Number=SeqID_54673
atggcatgcactaagactacccagcacaaatcaactgggccttatggtgtgcctcgacatcagctggcctccaggcatgaaggcagtagcagtggaagcaacaaccctattagggagttggaggtcagagtggatcgcctcagatcggaactacgccacgggtgcagggagcgtgcacgtgatagtcgccgcattgctgaactaacagccaaagttaatcgcctacagtacaaaatttcgaaacgtgatatgaccattgattgggtcgtcaactcacgctctttcgcttgggactgtgaagccaaagctcttgctcgtgtagcagaacttagcgcatccctcgagaatctgcaagtgtactgcaacaccttgcatgaaaaagtgcatgtattgtatgattggctgcacccgaacgtgccacctgatgtggcagcaatgggagttggaccatctggaatagcaaatggaggatctgatgggggaattgacctttttggagcccctccttccatgaatctggcagatggacagtctcctaaagcaggcagcggaacaactaaggatgaagaagaatatagtagtatagtttatgtattgtacctatgtaaaataagtacatcccgcggtggggaggacactcccaatccgccaccggtacctcctaccttggccgaggctatcgctgccttggtcaacaccactgctgacaatacacgctttctgcgcgaaatagcgggcaaccaatttcaacaacacggaggaagagttccccctcagggaccacgagatactacctatctgggaattctctga

SEQ ID NO: 11299 - DNA, 99 bp, Zea mays
  Peptide Sequence Number=SeqID_54674
atggacggtcgtaccgtatgccgcctaatgaactggcagaactcaagacttaattacaagactaggtcagtgcccgtgcgttgcaacagagacatataa

SEQ ID NO: 11300 - DNA, 516 bp, Zea mays
  Peptide Sequence Number=SeqID_54675
atggtggggagaagcaagccgggctgtgacctctgccccgccctcagcttcaaggatcttcatcatccttgctggggcggagggcgagctgagccagagctctacctcccgcacgggtttgtgggtcaccttctccctcagtactcaggggagagggcgctcaccggcctagcgaaaggggcggacttcgacaacgcggggccgagcggccgcaagcgtcgtcagctcccgcgtgcccgggttcactggctcagctggctctggcactgcttccggtgccaccttcccccgttgggcggagtgcggctatctgcccgtcgtacgggcggctgtcgcgccacgcgcaccgggggaccgctcaagacgtcgcgcgctgctagggcggcgttcgtgttcttgggctgtcctgcctttgctccggtacgatgcccctgcgtggaggtcggtgttcgcccgtccgggaggactcgagtggggatctgccggtgggcagacggctgccgtcgtcggtgctga

SEQ ID NO: 11301 - DNA, 822 bp, Zea mays
  Peptide Sequence Number=SeqID_54676
atggaagaaacacacctccacgtgttcgacgccttctgcccgcgccagagcacgctcacgcgcgcccccgcatgcccagcgccacgcccgagccaagccagcgccatggcccgcgcccacgcttataaaaccctcccagacttagattgtacgcttccgcgcaccctcaaacctcaccggagtctggctcgtcgccgtttgcccgtgcgcagcgagtccgcggccgcccaatccctctgccactgtagaccggccagtggagccattcccaactccgtccagccgtcggagaagactgtgcacacctccgtgaggctccccgagcgaggaatcggagtttgcttcgccggagaggccagtccacgctcgccggagttctcaaccccgccagagtacgtggaccgggtaaaccactccaccatccttcgattccttgtgcacacggtcgctacattaccccatgaagctcaccatgccctcggattgaaccagttcgccgtagtttggccggtacactcgccgccgacgagaacacccgcctgcgcgcgtggaccgggcgattccggccatccccgacgccaagtcgtacctcgacgtgaccgccagagtctccccgagccaaccccacccttcgtcggacctccctcgcagccgattgccctcctcacgcgacctgagacgaggtctcccattccggttatggtgggtacaagtgcggtcactgcacgacggccaatcggggtcagtgaggcattgtacgccaaggcggtttaccttgcaaggataaaaactcgattcgaatcgtctgcttctcgcagctaa

SEQ ID NO: 11302 - DNA, 627 bp, Zea mays
  Peptide Sequence Number=SeqID_54677
atggctgccttcggtgatcccaagggagatttcctcccgaatggaaccgttatgtggtgcagagttctctccctgtccacgacacaaaagatggttccaaagcagaagactgctcctggactgaaggtgatcatgctcttgaaggtgactgacatggagtcagctcttttcaacgtcgtagcccctacctggcgcgccagctgccagtgtttgttacccaactgcgcaccacatggttacccacgtgatgcttttgggcaggacggcgtcgttgatcgcgacttgatgcgaactgacttcctacatctcgggaaccatcttcgcccatccgcccgagttaccgccagaggcttagcctatcgggtgagcgcaactgttccgcccgatatactcgtgctctcgtggcgcctaactcgggcattggcctttgctggttcagaatgggctttctccgcctggttactttcggccggcccacctacaggaagtcctaggagggagcctgctaggtggctccagacgtgtttccatgcttgtgtggaccagagggatatccatcccccacagtcacccatcccaaattgctccaagccaagcacacttaacttggaggttctttcgagatag

SEQ ID NO: 11303 - DNA, 312 bp, Zea mays
  Peptide Sequence Number=SeqID_54678
atggtgatcaaagttgagccactggtcggcccggctgaaggagatcatgtgctccaaccatcagtacggggctggagcgctattcgtggccaccagaacctaccggtcggtgagcttctgttgcctcctgttttcatgcgctgggagcatgggcttcttgcccccgatgaggtcttgggctcgctcatccgcggtgatgtagatgtcgttcagaggtgctcgagcgaagtcagggtacatgttccgagcgaggagcgggttttcgcattggagtcgggcatcctgctcggcctgttcccgcttgtgttctag

SEQ ID NO: 11304 - DNA, 1341 bp, Zea mays
  Peptide Sequence Number=SeqID_54679
atgtaccgagaggcgttgtggcagaagagaggtcgtcctcgggagttatatccggacgtatctagtaaggatgctcctgttcctcctgaactccccgtgcctaactgtgactgtggtagactggcttgggtacatcaatcacaacatccagacacggctgctcgctgctactacctttgtggcactttggacggacatcagaagtgtttctttttccagtggatcgatggtcctgataaatttgaccctcgatatcttcttttcgttaattggttgagtggaaagaccagtcatgagcgttttaagcgttgggtacctcctcccccgaatcctccaccaatgacggatgcggagaaggaggtagcaacagaaagacggatggactcaccgcctcgatgcgattgtggagaccgtgctgtcatcgacgaagactatgacaagcagttctgttgtccgaacattgattatccatacgggtggcgtaagtttcgtttcagagagtggttgtatggtcctttgtcccattgggccagagccagagctaagtatggattagttccttcggagcttggtgttggatatttttgtggacatatggtcgattacgatgaggagacgaggaaatgcagttgggagagttacgacgacaaaggagaggtgatgcgcacaatagagtccaagagaataatgggacagaagatgcgttgtggatctcggctcgtcgattcgtacattaacgatcgcatacgcgacatgcgtagggaagcaaaatctgtcttttatgatatcccgaagcgtgcagagtataggaggttgaaggcggcagatgagaagagagcacaggatgcaagggaatgggaagcggctcaagccgagaaacagatgttggataatcttgctgatcgcctcaagggaaagattggaagcggcgtaaactatttggtcgatgaggcgcatgcgagatatgttcaggataaaatggcaacgatggaggaggaggacgacgacacatctagattgagtgagcttatcgccctcgcagaggcaggattacatgaagaagaggaggacgacacgtcaaggttgaaggaagaggatgagtttatgtctcaggacgctgcagaggttgaggcagcatattacaagaagaagtctgatgaggctgaggctgaggatgagctattctcccaagctgcagatgaagcagaagccaattattacaaaagaactggtgacaagtgtgatgcaggacaatgcagcaagtggaatgaggtagttgttgaggattgcgcgacggatgactccgaagatgagttactcatagattgtgattcagactga

SEQ ID NO: 11305 - DNA, 591 bp, Zea mays
  Peptide Sequence Number=SeqID_54680
atgggtccacaggtcccagtggggggcaatccccaaaaacccttcgcaaaccgccgcgaagatggctgcttgcgcgatggagttggggctgagattgtgcagctccaccccgtagacgtgcagaatcgcccgcatgaaacgacttgccggcactctgaacccctgctcgtgaaaagagatgaagctcagcacataccccggcggcggggacggggcggctccgctcggaggggccatccactccggctgtgggtcaccggagagaggacaaagcaaaccatcggcaacaagggcctccagatcgtccgccgtgacgggaccgggaatggggatactccgaaagggatccttctctacgaaggaagcgggccccgagccctcctactgattagaggttcgaaggctgccccctcggaagggttcgacagccgcctcagagcactcgggccccgagccctcctactgatcagaggttcgaaggctggcccctcggaagggttcgacaaccgcctcagagcactcgggctccgcgcccaccactggtcagaggttcgaaggctggcccctcggatgggttcgacagccgcctga

SEQ ID NO: 11306 - DNA, 506 bp, Zea mays
  Peptide Sequence Number=SeqID_54681
atgcaaagtccagcagcttctccagaaacagcagttcatccagctaaacatggcaaggatcatggaactccagtttcagcaccttcaaatgttagtcatcaccatgcgatgcctgcgaataatacacatggaaaaactcatggaactccagttttggcaccagaaaagagaaggcatcaccacttgcctgcaaataattcatatgtgaaaggacctgctgtttctccctcaaagtctcccatcatccacaggaaaggacatggtgttccagttgctgcacctccaaaagaacactggagctatttaccacctgcaaatcgtagacaccacaaaggttctcgtcctgctccacgtaaaagtaacaatacttctgcaccaagccatgtatatcctggtagtcctgcacctgcacctgaacgtttgctcatcaaaggaaagggcaaggaaatttctgctcatgctccacgccatcccaatcattaccattcgcatcataattctccaag

SEQ ID NO: 11307 - DNA, 732 bp, Zea mays
  Peptide Sequence Number=SeqID_54682
atggagtcgacctccggcgaggatgctccgaagcgcaacccgctcccgtccgcgctcgtctccaacctacagtccgtgctcgccgcccgccgcccgtccgcggcagaggtcagcaccgccgccacagctagcgaggctgaggctgaggctcaggaagcggaggcgtccgatgcccccgcgggagatgggacgccggcgaggcccatcgtgctgctgacctgtgccggggggatccggtcggcgggtctcgcggcgctcgtcgacgccctcgttgccgccggccgctgcgacgtccacgtgtgtgcccccgaatcggacaagcaagcctgtggccattcaattaccatccgtgaaaccatcgctgcgtcatccgtggatttcacaggcgctaaagcttttgagacatcaggcacgccggttgactgtgtctcgttggccttatctgggaggctgtttccttggtcgtctcctgctttggtgatcagtggtatcaacacgggatcaaattgtggatatgagatgaagaaggacgaaaccaaagacagtgacttcaaggatgcagctcaggcctgtttaccattgataaatgctgctttggatgacattgagaaaggaactttcctcagaggttgcctattgaatattggagttccaagaatcaagggctaccctcagcctaagacgatgcagtcgtcgaaggcaaatgagggctggttctttgtgaaggcctaa

SEQ ID NO: 11308 - DNA, 711 bp, Zea mays
  Peptide Sequence Number=SeqID_54683
atggtgggtacaagtgcggtcactgcacgacggccagtcggggtcagtggggcattgtacgccaaggcgatccgagggattgacgggttattcccatttaagtgtggtctagcctctaagacagggcttaggcacttaagtcagaataattcgggcagttccgccacagctgatgacttccacggatcctccgatgaaggaaatgcactgacccacactgacggacttgcacgagagggctttccccgcatcttgtgggaggtacttcagggggccggatatttgacaccccctcagtacgcggtgcagcagttcgagaagcaccgggtgccccgctgtagggtgaggatgaccttggagcctcatcccctacagccaggctggcgctccttggactctgagtctttcgggtaccgggcagaggacacgatcgaggcgatcgctctgcatggattgactaccttctgcggattccatcctttggagctggctacccaccccattggcttgttccccgctgagaaggaggacgacccaatgtggaaggatcgggtggagcatgccaaggatatctgggctctctacccaggccacacggctcacttgtcggtgcgatgcatgaacgctctgtatcgtctgcaagtaattgcgtggggaggcaatgtctcacctgatggcactgctagaggcaacaaagatcacgctggataa

SEQ ID NO: 11309 - DNA, 522 bp, Zea mays
  Peptide Sequence Number=SeqID_54684
atgaaggccgcgcgggggagacgctgggaaagccgcacctccgcgcccccatcaatcccgcccaccaccaagctcgccgcctaccaaacccgccagctccgcgcgagatccgccacagttatgccgcgcgagggagacggcgggatagccgccggccagatccgcttgctcgcgagggagaggaaggaagaccgctcggggggaaacgccgggagagccgctacctccgcgcccccgccaatcccgccgcccaccaaccccgtcctcgagcccgcccccctccaagcttgccccattccatactcggcgacaggattcaccgcgctcccttccgcgcctgctattaaaaggatggacacaggtgatccctccaacccatccccactctcctcagatccaccgattcacagccgttcttccatttctcagagctggtatatgcccgaggagattccgaaggtcttggaaatcagcggcgagcgcagcctcatctacaacttcttctcctaccccgtgtattaa

SEQ ID NO: 11310 - DNA, 321 bp, Zea mays
  Peptide Sequence Number=SeqID_54685
atgacctcgaggttgcgacgtaccaacatcgtaggcgtcgtgcacttaacgagcgtcggtatgctggttccattcccgggcgtgttcgcatccatcgtgaccatatcagcggtgatgcaagaatccgagccgactacttttgcgcgcaaccggtgtacacggatgcacaatttcggaggaggtttcgcatgcgtcgtcatgtgttcgagcggctcgttcttgcggtgcaacaagtggatccctacttcgttcaatgtccaaactgtgcaggttgatctaatccaccaccactgggcgcggcttggatcgggagctacttaa

SEQ ID NO: 11311 - DNA, 300 bp, Zea mays
  Peptide Sequence Number=SeqID_54686
atggcgcccgaggccggacttggctgctgtcagcctcactttgtcgagtggcacaacagtcggagcgatgcgatccttgcattaaatgctcctgcgatacggttggtcgtcgtggtgatctggccaaggttgcttctcggcgaagactgggcctcgggcgagccgaagctttgtgctgatgggggttaccagctgagattaggagtcttgggggtacccctaattatggtccccgacaatactattattagcaagatgtcggagatatttatgtgctacatttttactatagatgagtga

SEQ ID NO: 11312 - DNA, 498 bp, Zea mays
  Peptide Sequence Number=SeqID_54687
atggaggcccaggcccacatgtcatgtaaccggcgtgccggttactacgtgcaaggaaaccgcaccgccacttgcgccaatgtcgcgtcttctcgactgcagaaccagtgcagcgattcgaggcagccctggatcgggaaatgggatatttcgaaaaaggatccttctcggcgaaggaaacaggcctcgagccctcctactgatcaggggttcgaaggttgcgccctgcggggttcggcaaccgccctagagcactcgggctccgagccctttactgatcaggggttcgaaggctgcccctcggaagggttcgacagccgccccagagcaagcagagtcagggattaccccgggtacgtccgttacatggccgaggctcgagctatgctcccgaggtaccctaggacatttccgagaccagcgggaacgatttgtaatggaatcccaccggagggaggcaccgagcccttggaccctatcaaatgggtccgggtctag

SEQ ID NO: 11313 - DNA, 618 bp, Zea mays
  Peptide Sequence Number=SeqID_54688
atggcttcatcatctggttgtgcaaggaccgcgggtgctttgagaaggaacaaccagggtgccacaacacggactcttctctcggtcggtcgccacgaccctggtgcctctcctccgcggacaaccctgtgctccctcctcgccaacctcggtgctgtcgcgatcgtcctctccacgcccgcgcccgcgtccgcttggacttgcaccgccgtggcacccgacgctgctgccatcgccgcgttacccctctttgtcatccgcgctgctatgctgtccctcccaggtgtccacgcgggcacgctcgcgctacccaccctcctcgtcacacccatctccgatgggcttgttgccgtggatgggggccccttcatcgcccatgggctcgctactgaggccgtcgtgcatccgccaccctctaccgcgccggctgcacgccgtcttggccccgcgagtaccgtcgtgccctcaccacccttccttcgctccgacgtggtttacatgcctccctaccgtgtgcgcttctccctacgtgatgacctatttcttcggggcacattcgtggcttgtttagcttctccaggagatgcacagtccgctgaccactcttgtctactgtga

SEQ ID NO: 11314 - DNA, 969 bp, Zea mays
  Peptide Sequence Number=SeqID_54689
atggtcatcgccgttgagggcaacggcttcgtccacgacgacgaggaggacgacggagaccgccccatccgctaccttcccctcggccatatctactcctcttccacccccgcccccgcaccgcgcccgccggcccagaagaagccccgcttcgacgacggcagaccccccatgaaagtatattaccgccgccgtcgcaagaagctgcgggtcgatgaatcgctgtcgccgccctcgccaacgacggccccactcgcgccgcccgagagggacgagaaggctgggccctcgcgccggaaagactccctcaagcacgagctgctcagcctgggccccgcctcacctgcattggatggggaggagccggaacggcgtctaggacgaacgaggcgctgcggaggggctgaaaagacggtttgcttctcagaacctgagaggcggcggcagccggccaggcccaaggggtcggtcgggaggagatgggtcgagttggatattcagactgcggatcctaatgcctttgtcggattggtgtgcaaggttttctggccgctggatgatgattggtacaagggctccatcgcatggtacaatgaggcaaccaagaagcattcagtaaagtatgatgatggtgaagcagaggaccttagccttgcagatgaaaggataaagtttttcatctcctctgaagagatgaagtctttgaatctgaaacttggaatttccaatcaggataagaaggggcatgatgagttgcttgcacttgctgttagctttcatgactatcagggtctcgacccagggcttagcagcaaaggggctgaataccttgattattcttggttcctggacaatctggaaccacagaaatggggctccgcctcgcccgaggtcgacgtcgttcactccgccacgcccgaggtcgccgcaacccagtctgtctcgtccgagccagcctcaggcagatag

SEQ ID NO: 11315 - DNA, 978 bp, Zea mays
  Peptide Sequence Number=SeqID_54690
atggggagcgcccgcgtcgctttcgtcttgccgtcgttggaggagcgcaacttcgcggaagttgtcagcccggctgcatccccttgccgatggtcactcaagacggtgaccaccagtttgatggtggggagaagcaagccgggctgcgacctccgccccgccctcagcttcaaggatcttcatcatccttgctggggcggagggcgagctgagccggagctctacctcccgcacgggttcgtgggccaccctctccttcagcattcaggggagaaggcgctcaccggccctgcggaaggggcagacttcgacaacgcggggccgagcgaccgcaagcgtcgtcagctccagcatgcctggttcgctggctcagctggctctggcttggctcccggtgccccctctcgctgtcgggcgaagtgtggctatctagcagctgtacggagtcgcgctgcgcgcaccggaggtccgcccaagacgtcgcgcgctgctagggtggcgttcgtgttcttgggttgtcctgcccttgctccggtacgacgcctccacgtggaggtcggtgctaaggtggtggcggctgaagaagtcctcgtcaccgacgagatcgccgccgccatctgcgctccgggcctccggctctttggctttgatagcttgtcctcgcccctcgagtggggacgtgggcgagggccttgtcgcagcagcgtctaccctgaggtcatcgctgctgttgtttggccgcccggggcggaggtcgttgtcgctgctgccggagcgggcggcgacgagccacctagggttttgtcgccccgcaggccctccaatgtggggggttgttcgtacctgcgggagtggaaccggagttccatttgtaatggcaccttgagtgtcggtgtctgttcattgtgcctgtcggggcctgaacaacttggtattttgggtgtaataccgtgttttttcctcattttcgagcactag

SEQ ID NO: 11316 - DNA, 1410 bp, Zea mays
  Peptide Sequence Number=SeqID_54691
atgcatgaggggagtgcgaaggcctggctgccatccaagggggtcgccccctttttaaaggcgattctccccacttgcgtccttaggcgtcatggactaagtcttcgccaacacgctccaaggtcctccccctatgacacgggggctgggtcccacgcgtcatgcaagctgacccaggacagaagaggccaaaccgccgcgcacggtgcgcgtaactgcccagcggttacaagcactcctccactttcgcccagaccagcgggtaaaagggtggaccgccatgcaggcgcatgcgaccacaccaagggggtgcaccccttcgacttcgacgcgtccagcatggggcccaggcccacacgtcatgtaaccggcgcgccggttactacgtgcaagaaactgcaccgccacttgcgccagtaccgcacctcctcgactgcagaaccggtgccgcgactcgagacaaccctgcgcatggcccaacagtgccaaccgagcacatcggtcacgactcagtccgccacgggagaaggcgcgacggtcgatatggccaaaagtcggccgacagtaatggtggcggcaggtgggcggaagcagcagtcaagtcgtctgcaagatcacgtcccctcctggagcagcaggagaactctctcccacggcgtgaagacgacgcgcccgtgggaccgggaaaggggatactccgaaagggatccttctccgcgaaggaagcgggcctcgagccctcctactgatcagaggttcgaaggctggcccctcggaagggttcgacagccgcctcagagcactcgggctccgcgcccactactggtcagaggttcgaaggctggcccctcggaagggttcgacagccgcctcagagcactcgggctccgcgcccactactggtcagaggttcgaaggctggcccctcggaagggttcgacagccgcctcaggcctctcgggctccgcgcccactactgatcaggggttcgtaggctggcccccgaagggttcgacaaccgccttagagcacgcagagcgagggatgactctgggtacgtccgatacatggccgaggctcgggctatgctcccgaggtaccctaagacatttccgagaccggcaggagcgattctgtaacggaatcccatcagagggaggcatcgagccctcggaccctatcaaacgggaccgggtccggcaaatcacctgtaggtacttttggagcgcgcctctgggccactacccgacccttatcgaacggggcacgggcgtccactcggatcacccgttagcaactcactggagataccatgttcggcgccctccgagggcaacatggcgctttcccccctcctccttgcggaaaggcgacgaaggggcgtatgataaaagccgagtcagtccttga

SEQ ID NO: 11317 - DNA, 387 bp, Zea mays
  Peptide Sequence Number=SeqID_54692
atgagaggggtacttgatcagagacattgtggtacaggtggttatgagattgatggttctggttatggttatggtgctgctagtccactacagccaaacaggatacttgctgagtatgttgatgtgtactcacccttgctctacacaccaaaccccccccaggttgtcagcattgcaaccactgctcaggcgaagatgaagctgtggaaggagacttccaggagttccaagattacgacgagttctaggtgtgggttagcggcaacccccagtcggctgcctgtgaaggccgcgttatctacgtttcttttccgcactttgatttattgtccttacggagaggtactcaggaaaaagcctgagccccctaaggacagtgaattataa

SEQ ID NO: 11318 - DNA, 972 bp, Zea mays
  Peptide Sequence Number=SeqID_54693
atggctcatattaggtgcacttcaccgtccactgcgtcgcacggtgccaagtcagtccagtcacctgaagagactgcatcgtcgcctgcacgaggagcaggagcaccgacacaggagcaggagcaggaccaggagcagcaggactcttccccctcgcctcagcaggaggtggagtctgggaggccgccttcccctgcacctcagccagagatgccccctgcagcaccaccgagcatcccggctgctggaggagaccctgacggaggcggagacgacgacgtcggtggtagttcgagccacgacacagagcgctcggaggagtcggagccagagggatggattgctagacccatcacgcgcgacgccgctcgcgggtgtcacttccacgacgctctcgacaccttgctgcgtcgggccttcgaccgacacacttggtccatcgagtaccgttgtgtagtctaccagcatcgtcgcgggttatactcggaccagtgggaggctacttgcttggtgcgccatccggacgatgatctccagggtgcagaggccttctcagagcactattctattactgagagggatgctgccgaggcagccatgcaagatgtagcacgacggacactttctcagtattgctcgttgttcagtggggtaactgacggccttgacctgaagtactaccctcgtcgttcgaccggcagtgctggaggtgtgattgtctcgccagttggtgagggcaatcccaggctgaacaacatggtcaacctggccgccgtgctcaacacagagttggaccacgcccttaacgagttgagcaaggttcgagcggaggttgcggaattgcgtgctgagtgcgccgcaagccactatctgtatggtggttctcccgcccctgtcgggattcagcacccttaccgctcaccgccccgtggttgcttcgactatggtaccccgactgcaggacccggatag

SEQ ID NO: 11319 - DNA, 189 bp, Zea mays
  Peptide Sequence Number=SeqID_54694
atggctcaagaaattataaggaagagtgaaaaagccgcactatctcctcccccagagcctgttgagccattggcggaccccagagcaaaggaggaggatgaaattataaaaatggccgaagctattatggataaagttgttgatcaactattaaacgaagttgcagaagtagttttaagagaagattag

SEQ ID NO: 11320 - DNA, 1596 bp, Zea mays
  Peptide Sequence Number=SeqID_54695
atgtcgtcttcctgcataccgaccggcctgcggctggacctggacatggtgaaggcggcggcgtcgccggtgggcgcgcactcgtcgccgctgcgcccggcgcactactcgtcgccgtcgtcgacgctgtcgtcggaggcgtccaacgcctcgtcatcgtcggcgacgtcggtgtcgctcaagcgggctcgcgcgccgcggaagcggcccaaccaggcgtacaacgaggccgccgcgctgctcgcgtccatccacccctccgtgttccccgtgaacaagagccccaagacggcgccgccgcgcccgccgcagctctccgtgctggcggcggcgctcgacgcctcgcccgacctcctcccgccgctccccgtcctcgcggactccgcattcctgctccgggaccaggacacgccgtcgccgaagccgcggagcccgtccggcgccaagaactgcccgtcgccggcccccgtgagcagcgcgttccgggacttccgcgacccgccgtcgtcggcgagcctcgacgcggtcggcgccgacgagcttggcgagatcgacttcgacgacgacggcttcaacgccgactccatcctcgacgtcggtgacgccgcggccgggggcctcgacggcatcatgggcagcctcaccgtcgacgtcgagagcggcaccgccgccaggtccgatgactccatcctttccagctccggcatacacccctacctcaggaggctcatggtggtcggcctcgccggcaggttcgagctcggcctcgggtcccagcacggtgctcggcccagcctcaaccgcgcactgaagcggcgggacgacgacggcgcctggtggatgtggccggcagtgccggtaaaggacttgacgatcgcaccaccggcaccgccagcaccaccggcgccgaacgccgcagtgccgcaggccgccgccgccgccgcgccagaaaagaagaaaagcaagaagaagaaggtggtgaaggccatggcgaagggaaatgaggagcttcttcccaacgcgaagtgcaaggaggaagaagctgacgcctctgttgatgacgccgccgctaatggcgacggtgactccgacagtgcgccgacgaacgcaccaaaggccggtctggggctgaagctggacgccgacgaggttctcaaggcgtggtccgacaaagggtccatgtttgccgagggcagcgggccggagttgccgacgtcggccgccgaagtgcgggctaagcttgcagacatcgacctgtttccagagaacggagcaggcggcggtggggtcagggaagccagcgtgctgcggtacaaggagaagaggcgcacccggctcttctccaagaagatccggtaccaggtgcgcaagcctgatgatgcagttcatcgcagcaaagcttctgaagtgctgacatgctctatgttctgctctgccgtggttcttgcagggaagcaggcctgcctctgctttggaaaggggtcatgggagaagaacgccgccatcaagcccatcgcgctcaacttcgacagggagaggacgacgctggtcaaggaatccggccaaggaccgcacgagcactgcgacatctgctag

SEQ ID NO: 11321 - DNA, 189 bp, Zea mays
  Peptide Sequence Number=SeqID_54696
atggatcttgcctggaaccggtggcacgtgtgcgccccgcggccacgccggtgcggcggggagaggcacagcgacttcgaccaagctgaggctatcaagttgctccgaggactcaaatatctccattcagcagaaaatactccacagagacctaaaacctggaaaccttctggtgaatgcaaattgtga

SEQ ID NO: 11322 - DNA, 384 bp, Zea mays
  Peptide Sequence Number=SeqID_54697
atgagggcaggggacggcggttgctgccggtcggctagggcgcacggctgtggacggcgattggcagcggcggcatcattttttttgtggcgcgcggcggccggaattacgggggagatagggttttgggctgcggcggcgcggctgaagatgctcatcttcgaccccaccaaaaggactagtgttactgaggctctggagcacccttacatgtcccctctgtatgatccaagtgtgcaaatcccccagcccaagtgcccatcgatctcgacatgcgtagacgaaaatatcagctcagagatgatccgggaaatgatgtggcaggagatgcttcactaccacccacaagttgtagtgtctgctaggatacttccgcttgtgtaa

SEQ ID NO: 11323 - DNA, 2679 bp, Zea mays
  Peptide Sequence Number=SeqID_54698
atgtctccccccgagaaccccagccccgcggcgccggccgagccgtcgcagccgccgccaccggcggccgcggccaaggggaaggggaagaaggacgagaagaaggatgacgatctgtcggaggaggatctggcgctcaaggagcagctggagctctacgtcgtgcgggcgcaggacgcggatcccggcgtgcagaagctcgcgctcgagagcatgaggcaggagattcgctctgccacgagctcgatgacttcggttccaaagccactgaaattcctccgcccacactttggaactctcaagtcctatttcgaaacaatgcaagagtctgagctcaagaagtacatggctgacattctgtcagtgttagctttgacaatgtctgttgaaggggaaagagagagcctgaaataccgtttgttgggctctgaaggtgatattggttcatggggtcatgaatatgtgagaaatttggccggcgagattgcacaagaattccaaaagcgtcaggatgatgacttgcccattgatgtcctaatggagctagtgcagcaaattgtttcatttcacatgaagcataatgctgagcctgaagctgtggatcttcttatggaggtcgaagaccttgatttactagttgagcatgtagatgctacaaactacaaaagagcttgcttgtacctgactagttcatccaaatttctccctgcccctgatgatatgttggcacttgacatagcatataccatctacatgaagtttggagaccttgcaagcgctttgagaatttctctgcagcttgagaaatccacccagtatgtgaagcaagtctacacagcaactgatgaccttctgttgaagaaacaattctcatatctcattgcacgccatggtttggctatggagattgatgatgagatcgccgctgatgacaatgacaaggaggttttgcaagaaatagtaaataatactaagttgagtgagggatatcttactcttgctcgcgatattgaggtcatggagcctaaatccccagaggatatatacaaggtccatttgattgatggtcgtggtgccagctccagtcttgattctgcaagacagaatttagctgcaacatttgtaaatgcatttgtgaatgctgggtttggccaggacaagttgatgaccgctccatctgattcatccagcagcgggtcttccggaaattggttattcaagaacaaggaacatggaaaagctagtgcagcagctagtctgggaatgattctcttgtgggatactgattccgggctcgctcagcttgacaagtacttgcatagtaatgatactcatgttgttgctggagctttgctaggtattggaattgtcacttgtggggtgaagagtgattgtgatcctgcgtttgctattcttatggagtatattggcaaggatgactcaaacattcgtattggagcaatattgggtcttggaattgcatatgctggttcccagaaagaagagcttaaaatgcatctatctgctgtgttgggagactcccaatcacctcttgaggtcttggtcttctcggccattgccatgggattggtgtttgtcggttcttgcaatgaagagattgcacagtctattatatttgctttgatggagcgtagtgaggccgagttggcagaacccattatacggttgcttcctgttgcgcttggccttttatatcttggaaaacaggatagtgtggaggctaccgcagaggtctctaaaacatttgatgagaagatagggaagtactgtgatgtaacacttatgtcactggcatatgccgggacaggaaatgtgcttaaggttcagaaacttcttggcatttgctcacagcatcttgagaaaggtgaaacacaccaagggccagctgtcctagggattgctcttattgctatggctgaagaattaggagctgaaatggctgtacgttcacttgagcgtcttctgcagtatggcgagcagaatataagacgggcagttcctcttgctcttggtatactctgcatatctaatcccaaggtaaacgttatggacacactaagcagattgagtcatgatgcagacgccgatgtgtcgatggctgcaattatctcattgggtttgattggtgctggcacaaacaatgccagaatagctggcatgcttcgcaatctttcaagttattactacaaagaagctgctcatctgttttgtgttagaattgcccagggccttgtccacctcggaaagggcttgttgaccctttctccataccattccgatagatttctcctctccccgatggcacttgggggccttgtaaccgttctccacgcgtgccttgatatgaagtccaccatcctagggaaataccactacatcctctacattattgtcctggcaatgcagcccaggatgcttttgactgtcgacgaggatctgaagcccctgtcagtacctgtccgcgtcgggcaagcggtcgacgtggttggtcaggcaggaaggccgaagacaatcaccggcttccagacacactccacgccggtcttgctcgcagcaggggagagagctgaactagcaactgaaaaatacattccactgaccccggtactagagggctttgtgattctgaagaagaacccagagtaccacgaggagtga

SEQ ID NO: 11324 - DNA, 141 bp, Zea mays
  Peptide Sequence Number=SeqID_54699
atgggcaagaacaacaagcgcaagcatgagccaactcctccatcggaggagtttggtgactcgaagtactcagaggaggagttctcctctgagtctgaggggtctccggctcccattcccctgcgaatagccgccaagtaa

SEQ ID NO: 11325 - DNA, 558 bp, Zea mays
  Peptide Sequence Number=SeqID_54700
atggcccaagggcacatttccctttcagataccccgaaaaggatccttccctgtgaaggaaccaggctccgagcctccctactgatcagaggttcgaaggctggcccctcgaaagggttcgacagccgcctcagatcacgtgggccctacacccactactggtcagaggctggcccccgaagggttcacagccgcctcagacacagagcgagggatgactatgggtacgttcgatacataaccaaggctcgggctgcgctcccgagctcaccggaaacaccatgttcggcgcccatcgagggcaacatggcgctttcccccctcctccttgcggaaaggcgacgcaggggcgtatgtaaaaaagtcgagtctgtccctgatcgccctcttgccctgtgcagaggctcgggggctgctctcgcaaacccggctccggccgaaccgttgacagcgtcaacataccagcccgagaacttgggacccgaccgtacacccgggctacggccagctcgcatgagggaacgatcagaccagccgaagcgttacgcgaggcattaa

SEQ ID NO: 11326 - DNA, 2988 bp, Zea mays
  Peptide Sequence Number=SeqID_54701
atgagggttcaggacggggacgtggacggcggcggcgaggtgaccgcgccgccgcagcacctggtgttcgcctactacatcaccggtcacggcttcgggcacgccacccgcgccctcgaggtggtgaggcacctggtcgccgcggggcacgacgtgcacgtggtcaccgccgcgcccgagttcgtcttcaccaccgagatcgcctcccccagcctccacatccgcaaggtcctgctcgactgcggcgccgtccaggccgacgccctcacagtggaccgcctcgcctcgctcgagaagtatcaccagacggccgtggtgccccgggagtccatcctcaagaccgaggcggagtggctcaactccatcaaggccgaccttgtggtttcagatgttgtacccgtcgcgtgtagggcagctgcagatgctggcattcgatccgtgtgcgtcacaaatttcagctgggacttcatttatgcagagtacgttgtagctgctggacatcatcatcgctcaattgtgtggcagatagcagaggattactcccattgtgaattcttgctcagactccccggatactgccctatgcctgctttccgtgatgtcattgatgttcctctggtggtcagaagattgcacagatctagaactgaggtgagaaaggaactagggatcgcaaatgatgttaaggtggtcattttcaactttggaggacagcctgccggatgggaactgaagaaagagtggttgcctgacggttggctatgtttggtatgtggtgcatctgatactcaagagctccctctaaatttcattaagcttgcaaaggatgcctacacacctgatttgatggcggcatctgactgcatgcttgggaaaatcggatatggcactgtgagtgaggctttggcttacaatctgccatttgtatttgttcgaagagattatttcaatgaggaaccatttttgcggaatatgcttgagcattatcaatgtggcattgagatgatacggagggatttacttactggccattggaaaccttatcttcaacgtgctatcacacttcaaccctgctatgatggtcccataaatggtggcaaggtagctgcacatatcctccaagatactgctgttgggaagaagtatatttctggaaagttgagcggagcaagacggttgcgtgatgccattgtgcttggctatcagcttcaaagggctcctgggagagatgtaggaattccttactggtattctcactctgagaaagaaattagtgttggcccagcgcccacatctcatgatatgaatggaagtgatgagtcatcgttcgaggactttgagatactccatggtgacatgcaaggcttaactgatactatgtcctttttgaagagtttatcagggcttgttggaaatgacttaagaagccctgagaagcaaactcgagagagggctgctgcttctgtgctctttgactgggaggaggaaatatatgttgcaagagcacctgggcgattagacgttatgggtggtatcgcagattactctggaagtcttgtattgcagatgcccatccgagaggcatgccatgttgctgttcagagaagtgaccctaccaaacagaagcaatggaagcatacacaggctagacaactagcaaatggaggagcagtaccagtgttacaaattgtatcctttggttctgaattaagtaatcgtgcacctacgtttgacatggacctttctgattttatggatggcgacaaaccaatatcttatgataatgtgaaggaatacttttctcgggatccatcccaaaaatgggctgcctatgttgctggaactatttttgtattgatggctgaactaggggtgcgctttaaagacagcatgagcattttggtttcttcatctgtccctgaaggcaaaggtgtctcctcttctgcatctgtggaggttgcttctatgtctgctatcgccgctgcctatggtttaaacattgctccaagggatcttgctttgctctgtcaaaaggttgagaatcgtgtcgtcggagctccttgtggagtaatggaccaaatgacatctgcttgtggagaagctaacaaactcctagcaatggtttgccagcctgcagaagtgaaggagttggttaacattccaactcatataagattttggggtcttgactctgggatacgtcatagtgttggtgggactgattatgggtctgtaagagtaggcacttacatgggccgcaagatgatcaagtgtgctgcatccaacctactttcagaattgttgctctcgtgtacgtctacgcaaccaggcgactcaagtcccgacgaatatgaaggacatggcgtcgacctcctgaaatctgaagcgtcaatggagtatctatgcaacttaccaccacataggtatgaagctgttttcgcgaaagaaattccggagacgatcactggcgatgcgtttttagagaagtatggagaccacaacgatgcggtaacagaagttgacccaaagcggtcttactgtgtcaaggctcctactagacatcccatatacgagaacttccgagtcgaggccttcaaagcgttgctaacagctgccaaaacagacgagcagctctcagcccttggagagctgatgttccagtgccactacagctacaacgcttgcgggctcggctctgacggcacagacaggctagtgaatctagttcaagaaatccggcacaggaagagctcgcgcgccggagggcccagcctgttcggcgcgaagatcaccggcggagggtccggcggctcggtctgcgtgatggggaagaactgcctgaaaagcagcgaggagatcctcgagatccagaagaggtacaaagcggcgactgggtacctcccgactgttttcgacggctcgtctcccggcgccggcaagtttgggtacctgaagattcggcgccggtccacgtcgccgtctgattga

SEQ ID NO: 11327 - DNA, 801 bp, Zea mays
  Peptide Sequence Number=SeqID_54702
atggctcgggctcggcctcggcaacagaagacagactcggcttcggaggagcccccacgacgacgtcagcggggactcgaccgctccaacagctgtccctccgccaggctccgacgcacctccgacagccacgacatcacgccagcaaggtgccaagatctctccggctgccacattggcatggccttcttagagaaggttggccgcgcgggaccgaggacgggacaggcgctctcttggggccgctcgcttccctcacccgcgtggacgcttgtaacccccctactgcaagcgcacctgacctgggcgcgggacgaacacgaaggccgcgggacttccacctctctcacgctcgactccggccacctcgcctctccccccttcgcgctcgcccacgcgctcgacccatctgggctggggcacgcagcacactcactcgtcggcttagggaccccccctgtctcgaaacgccgacaccatcattgcccatctggtggagcgagccagatgggacgccggtcttgttccccgtggcccgagtcagctcggggtagggtgatgatggcgcctcctgtcgacgtggttggtctgcgccctaggttgggcgatgtggaagctcctccgaggccgaggtcgagtctgtcttccgtggtcgaggtcgagtccgagcccctggttcaggcgaggcggagaccgtcggctgaggccagggcggagtccgagccctggggtcaggcggagcggagttcgtcgtcttctggggctgagcccaagtccgagccctgggtcgggcggagctga

SEQ ID NO: 11328 - DNA, 753 bp, Zea mays
  Peptide Sequence Number=SeqID_54703
atgtcttcttcctcccctatgcgtcgtgtctttccaccttccaagcccccggatggggggtatccgccgccttcccgcttcctcgttggaggaacgcaactccatgggagttggtacctctcagccatcgttcggcttcaaggattttcatcagccggcccggccgcacccctacgccggcgatcacccaggatggtgaccacccgtttctgggtggggaagagcaagccgggccgcgacctgggtcccaccctcagcttcaaggatgttcatcatccccgctggggtggggaccacgctgagccggcgctctacctcccgcgcgggtccgcgggtcaccctttcccgcggcgtttgggggtggaggcgctcgctggccctgcgggcggcgcggacttagacagcgcggggctgattgacggcgggcgtcgtcacctccagcgtgtcggagtcgtcggccgggcttccggcggcccctcctgccggagggcgaccgccgcgccatgtgcacgggaggaccacccacgatgccgcgcgctgttagggcggcgttcgtgttctggggtggtcctgcttttgcactgggacggcgccctcgcgcagaggccggcggctcgagaagtccccgtcgccgacgggatcactgccaccacccgcgcccgggccaccgtgccggcgtgcttgtcctcgcccctcgagcgtcggcgggggcgagggcaggatcgcagcagcgccgacccactgtcgccgtag

SEQ ID NO: 11329 - DNA, 174 bp, Zea mays
  Peptide Sequence Number=SeqID_54704
atggagatggagcagagaccggaagacgaagggagccgggagggagacgagacatcggagcaacttgagctagagaacaaaggagcgcccgaaagatctctcccggctcccctccagaagctttcaccatccactccaattcggccaagtggcgtcttcgccatctcaggataa

SEQ ID NO: 11330 - DNA, 453 bp, Zea mays
  Peptide Sequence Number=SeqID_54705
atgggcaagaacaacaagcgtaagcgtgagccgactcctccatcagaggagtttggcgactcggagtactcggaggaggagttctcctccgagcccgaggggtctccggctcccgtctctcccccggcgtcgtccgatgactcggacgactcccaggggatagccgcggaggtctggacatacatccgggccgtcgagcgctccgggctcgaaggctcggatgagtcggagtactcctcggatgaggaggactcggacggcggcgaggagggtgaagacgacgacgacgacgacgacgacgatgacgacgacggcggcagcggtggcgggggcgacggcgacggcagaggcggcaccaagggcggcagcggcggcagcggagacagcaccaggggcagcagtaggggcagcacccagggcggcggcggcggcaggggcagggccagtggctag

SEQ ID NO: 11331 - DNA, 726 bp, Zea mays
  Peptide Sequence Number=SeqID_54706
atggctgccccgcgaaccactcatcccgtcgcattaactccgcggcaaagcaggcgacacctttggcaggcgaagcgggcgacgcttcacctccgccataatgaccgcgtcaaaaaaggggccgggaaaggggatactccgaaagggatccttctctgcgaaggaagcgggccccgagccctcctactgatcagaggttcgaaggctggcccctcggaagggttcgacagccgcctcagagcactcaggctccgcgccctcctactgatcaggggttcgaaggctggcccctcggaagggttcgacagccgcctcagagcactcgagctccgcgcccactactggtcagaggttcgaaggctggcccctcggaagggttcgacagccgcctcaggccactcgggctccgcgcccactactgatcaggggttcgaaggctggcccccgaagggttcgacagccgcctcagaacatgcagagcgagggatgactctgggtacgtccgatacatggccgaggctcgggctacgctcccgaggtaccctaggacatttccgagaccagcaggagcgattctgtaacagaatcccatcagagagaggcatcgagccctcggaccctatcaaatgggaccgggtccggcaaatcacctgcaggtcaaggatccgtccactcaagggacacgatctcgcctcgcccgagcccagcctcgggcaggaacagtag

SEQ ID NO: 11332 - DNA, 870 bp, Zea mays
  Peptide Sequence Number=SeqID_54707
atggctcgacttagacacactgcacgaaagtccgtcatccccttcttaccctcccgccttgctgagcgtccgcttcgccgtcccgtggccggacagtccagccacttggagagatttcaccactgcctgcatgaggagcaggaacgtcgacgacaggagcagcagggctcttccttctcgctccagcaggagatagagtccgtgaggagctgctcccccgtgcttcctctggaggcaccccctgcaccaccactaggcgccccagctcctggagtagctgctggaggagacccagacgacggaggtggcgacgacagctcgagccatgacaccgacttccctgctgaccaggagccggaaggatgggttgctcgacccatcactcgcgacgctgctcgcgggtgtcacttccacgacgcgcccgacaccctgctacgtcgggcacttaaccggcgtacttggtccatcgagtatcgctgtgtggtctaccagcatagtcgcggggtctaccccggactgctgggaggcgacctgcttgctgacggtcttgatctgaagtattacccccaccgtccatctggcagcacaggaggcgtgattgtctcacctgtcggtgaggacaatcctaggttgagcagcacagtcaacctagccgccgtgctaaacacggagctggaccatgcattagacgagctgagtagggctcgtgctgagatcgccctgctgcgggctgagcgcgtggaacgtcgtcacttggatgatggttcccccgcccccgttgggactcagcacccgtaccgctcgccccggcgtggacgccagtcttatggcaatcccgactgcaagaccaagataaatctagaaccatag

SEQ ID NO: 11333 - DNA, 1164 bp, Zea mays
  Peptide Sequence Number=SeqID_54708
atggagagcgcccgtgttgccttcgtcttgttgtgggaggagcgcaaccttgtggaggttggcacctttcagccatcgctcggcttcaagggattttcatcaggcagcccggccgcatcccctcaccaatggtcacccaagacggtgaccaccagttcgatggtggggagaagcaagccgggctgtggcctctaccccgccctcagcttcaaggatcttcatcatccttgctggggaggagggcgaggcgagccggggcctgccttcgtgtgggctggtgtcccacttcttcctccagcttctgggggtggaaaccatcctccagctctacggaggagccgtcctccagccatgctggggaaggcgaactgctgctgcccagccaaggacgggagtgaggacctgccggtgcgctttggggctggctgcattcgctggtgcggtgatggtgggcaggtggacgccgtcgtcggggatgaggtggtggcagctggagaaagcttctccgctgatgagaccgtcagcgtcacccgcggaccgacctccggctctttggctttaatgtctggttctcatccctcgagtggggacgcgaacaagagccttcccgcggtagcgtccgccccgggaccatcgctgctgctgcagaggtcgccgagtcggcttgagaaggaacttcgtcggcccaggagcaggtggcttcccaggccgaagaggcgtagcagcggcggctggaacctggccaggtcgtccactggcgggaccgatgccggagtcgggctgccgaggccacgagccgggctgatgtcctcgggggacagctggctgaggctatggagcaaccggttaagccgtctgcttgggccgggtttctggaggagaccctatcggcgatggcccaggcgcagtgctgacatcttccttcgaggtggagatccttcgcccgtgtcgccgtctgaggccggctcagattccgccgaaggtggagacgatgccgagggtgctgctgctccccctattgatgacttgtttgtcggtagcagaatcgcttatccgagcgagagttacttatcgcggaaggtgatgagtgaggagtccctcggctcggtctttcttgccgcttacgtgtacttcgtcgtttttaggatcccactatcgaagtag

SEQ ID NO: 11334 - DNA, 597 bp, Zea mays
  Peptide Sequence Number=SeqID_54709
atgacgcagtggactcaacacccaaagaaggctgcaagcaagtattggagccagtgcatctctagttgtgcaccgaactcctcattgaatacagggctcagagagagtaagaaggaccacatgaactggttcaactattgcgagcaattcctccatcggcagtgttcacttggaggatacatgttccaacttttaggacacttcttggttgggcccagtgccctggcccctagggcatctgctttggccactatggcactttgtgcgccaaccaccgacatccccaccctcaaggcacttcttgcacagatccacgaccccctggcccccgggccatctattttggcccctgatgcacttcttgtgccggtcctagttatcctagcccttcttgcaccaacccctgggtcctgggtctcgaggaatatatttttggctctggggacatctgttctggtccctggggcacttcttgttatggtacttgggacacttcatgcaccaaccctcaggacacttcttgcaccgacactttgggcagcttttctagcatctcagacaacttctctcctagcccctaggacaactcaacattga

SEQ ID NO: 11335 - DNA, 119 bp, Zea mays
  Peptide Sequence Number=SeqID_54710
atgggcgtgcctgacctctgcgcgcgctgcgcgcgcatttatgcgtcgcagcggctgaagagaattcccgaggctggcgagttcctgaggccgctcttccttggacaccggacagtccg

SEQ ID NO: 11336 - DNA, 756 bp, Zea mays
  Peptide Sequence Number=SeqID_54711
atggccaaaggtgcattgtatggcataattgaggatctatacacattcatattgaaagaggtgaaaaaggttcacactcagccaataaaaagatcaagttttggattcaacaaaggagcaaagggccaaccgaaggcacctctggtctggcgcaccggactgtccggtgtgccaccggacatgtccggtgcaccagaggactccaacgcaaactcgccaccttcgggaatttccagaggcactcgcgctataattcaccggactgtccggtgtacaccggacagtgtccggtgcgccaaggaggagcagcctcaggaactcgccagcttcgggaatctccaacgggtagtccgctataattcaccggacatgtccggtgtgcaccggactgtccggtgcaactccggagcaacggctattcggcgccaacggctacctgggacgcatttaatgcgcgctctgcgcgcgcagaaggcaggcgcacccatactggcgcaccggacaaggaacagtgcatgtccggtgtgcaccggacatccaggcgggcccacaagtcagaagctccaacggtcagaatccaacggcagtaatgacgtggcgggggcaccggacatgtccgctgccaacactgtttctgttaagaggacgtgggatcacatcttgtatgattcccaccatcttactcaacccagactagaagcagaattaaaccttcctgatattagaccaacaaaacccaacagcatcaagagctga

SEQ ID NO: 11337 - DNA, 297 bp, Zea mays
  Peptide Sequence Number=SeqID_54712
atgggcgtgcctgacgcctgcgcgctctggcgcgcattaattgcagttgcaggcgaccgttggcgcgaaactggcgagttcctgaggcggctcttccttggagcaccggacactgtccggtgtacaccggacagtccggtgaattatagcggagcgcctctggaaattcccgaaggtggcaagtttgagttggagtcctctggtgcaccggacagtccggtgccccagaccagaggtgccttcggttgtcccttttctcctttgttgaatcctatacttgatctttttattggctaa

SEQ ID NO: 11338 - DNA, 819 bp, Zea mays
  Peptide Sequence Number=SeqID_54713
atgacggatgcggagaaggaggtagcaacagaaagacggatggactcaccgcctcgatgcgattgtggagatcgtgttgtcatcgacgaagactatgacaagcagttctgttgtccgaacattgattatccatacgggtggcgtaagtgtcgtttcagagagtggttgtatggtcctttgtcccattggccagagccagaggagacgaggaaatgcagttgggagagttacgacgacaaaggagaggcggtagatgagaagagagcacaggatgcaagggaatgggaagcggctcaagcccagaaacagatgttggataatcttgctgatcgcctcaagggaaagattggaagcggcgtaaactatttggccgatgaggcgcatgcgagatatgttcaggataaaatgacaacggttgagctgatggaggaggaggacgacgacacatctagattgagtgagcttatcgctctcgcagaggcaggattacatgaagaagaggaggacgacacatcaaggttgagtgagctcatcgcactagctgaggcaggattacgtgctcaagaggaagaggatgagtttatgtctcaggccgtcgaagaggtagaggcagcttattacaagaagaagtctgatgaggctgaggctgaggatgagctattctcccaagctgcagatgaagcagaagccaattattacaagagaactggtgacaagtgtgatgcaggacaatgcagcaagtggaatgaggttgtcattgaggattgcgcgacggatgactccgaagatgagttactcatagattgtgattcagactga

SEQ ID NO: 11339 - DNA, 387 bp, Zea mays
  Peptide Sequence Number=SeqID_54714
atgcgatggacgacctcaatcccacgccgccagtggatttggagcgctggccctcaccgtcgcggagcggtggcacaaggcggtggacatgcgggagcgcatgctgtcgtggatatgcaaccgctcccccaatcctcgccggcatttagcgcccctccctcgctcatccacgcacacgcagccgctgcgtcgtcgaccccgaccgtcgtcgcaagtccggtcgcatcggtgctcatggaccttgaacctggcaccatggacgccttccgcacgggcccctacggccagatcttctgcacagacaactttgtctttggccagtccgacaccggcaacaacttggcggtgcactacaccgaatgtcgtagtccgaggtccacaacctag

SEQ ID NO: 11340 - DNA, 294 bp, Zea mays
  Peptide Sequence Number=SeqID_54715
atgtgcaataatgtgtctgggtatgttgctggggctcccacactaggagaatggccggttggggtggtttcatcaccttgctctgttgaagttatagaattttcagcaaggatatggagtacaccccctacacaacaagctcctatgtatctcacatctcgctgctcgaggaagttcttggctggaggttttgactttacggagacttcatgttcatctgttttgtcaactgcacctaaggatcaaccagcacttagcgactgccttgaatggtcccatgctgtcaaacattag

SEQ ID NO: 11341 - DNA, 306 bp, Zea mays
  Peptide Sequence Number=SeqID_54716
atgaggtgcatgagcaaaaggagccctgaactggtgataataagtgctctcataaagacaaagtctctaggtggaaaagagaagatgtgcaagaaatggagcaatcaggacttgggtacctctgtaagtcaagaaattggtatctcaagtcatgatgagactcgggtgcgtagctcggagacaactgatcaagccaaggacagaggcaagaagagcttcgaggtaccaagtgcacgggagaaggtcaagaaggctgaggaacccaaagccaagggtgaagaagaaggcttgcaaagtcaagggtga

SEQ ID NO: 11342 - DNA, 279 bp, Zea mays
  Peptide Sequence Number=SeqID_54717
atggcggggtggtcctgcacttgcgatgggatgcaggccaatggtggtcctgtgcgctggatggcaacgaggggattgggttgtgattccttcccatggcggcgaggcgtggattgcgtttggggcgcggaggatatggacggggcatccacggtgcatgggaagaacgattgggcaatggggtggtcctgcacgtcgtcggcaatgggattcctgcgtggtggattgctgcgaggcgtggatagcgacgaggggatgtgtttccttctgtggcggtga

SEQ ID NO: 11343 - DNA, 1627 bp, Zea mays
  Peptide Sequence Number=SeqID_54718
atggcgagggtgtgttttggcctcgacggccacagaaaacacacgctacaggatgatccgatcctgcaggctcggatcttgacgcttgaagggagcagcggcaccctcggcgtcgacaacaccttcggcgagaaatctggctcgggcaggcggctcggtcggtcaccccgaggcctcggccagctgtccctcgaagacatcagcccggcccgaggcctcggcggctcatttccggcgtcggtcccgccagcggacgacccggccaggctccggccgaccaggtcttcttttcgagccaactctgcctctgtctgtgctgataccgctacccctggcttcggctcatcgaagagcagccgaggggtttctttaactaagcaagagaagcctcgggcagcaaggtcgaccgagccgagggactcctacgcctccgggatacggatacctcactcgtcacctttgcacggggcgacgcgcttggtgaagcgccacaatgaacaaaacaccggcattcgagatgccattacaaacggaactccggttccgtccccgcgggtacggacaacctccacgccggggagcctgcggagcgacaagctccgggcgaatcaccagcaaacgcgggtcgccccaaagcgcaccggcagttcgccttccccggcatggctggaggatggtctccaccaccagaagctggaagaggaggtggccagccgacccgcgcgggaggcagagctctggctcagcccggccaccgccccagcaggggatgatgaagaccagctggggacgggaccaagatcgcagcctagcttgctcctccccatccaggggctggcggtcatcgtcttgtgtgaccgcaggaaaatccttgaagccgaacgatggctgaaagatgttgatcctagggcaatagatcttgccatgagaatcatcgaaaggatgttcctcaaaatgaaggaagatgaggcgaagaacaaaattgaagaagaaaatgatcgatggagaccaaacgacgaatccacctcttcacaaggtttgtctttcaaatccacttctcatatgtgctttattgctaatgggagtgacagtgaaagcgaaagtgaggatgaggaggagcaagaaagtgatagtgaagatgaggatgatcttcaacaattcttcgctcagctaagcaagaaacatcggatgagcttgctcaaactcatgaaaagagcggaagaacaaaaagaaatgcttcataagcaagaagacttcctcattagaaaaatcgaagacttagagaagttgaccaaagaccatgagaagctaaagtgctctcatgatgatttggtccaaaggaaacaagtaaatgtttcctatgcaaaagaaaacaatgagctcaaggaagaaaatgagaggctaaaaaggagcttgattcaattgaagggaaagtgtcatgctcaaccttctcaagataaccgtgataatatggtgaaaaagcttgagaaggggacaatagtagcatgcacaaaaccccttcaaaagaatatcaagctttccaagaaggacatgagcaaacatcaagagaagaaagccaaagctcatgacaagtgtctcaaccacgcctccacatgctccacacaag

SEQ ID NO: 11344 - DNA, 327 bp, Zea mays
  Peptide Sequence Number=SeqID_54719
atggccggttcaagggatagctctgatgtttctccaagcaacatcatagagccgacttgggaaaccttgccggctgacgagcagctccagttcgaggagcacaaggagcagatgatccaggaggcgaaagcaaaattcttggccaacttcaaagtggacaggaacaacaaggtcgtccgacatcgggcgacggatccggcttcgctccaacccacgccagatatccccaatgccaaatcttcggcttgtgcctccttacagctggttcaaaagaaacgtcaagaggaggctaagtttacatttaatgttgattcaatcggccattaa

SEQ ID NO: 11345 - DNA, 162 bp, Zea mays
  Peptide Sequence Number=SeqID_54720
atggcgtgctggaatcgacggtcaagctccggtgaccaagagatcaaactcttcgagttctacgagattgaagaccctgagcatctgtttggtgaaggtaaagaagaaggcgtcaaggcggatctccaggagttccaggacttcgacgagttcgtggtttag

SEQ ID NO: 11346 - DNA, 1248 bp, Zea mays
  Peptide Sequence Number=SeqID_54721
atgccgggcgtgttgggagtcggagaagtgcgcccacttggcgcggttgcatgccgcctgcatggctgcccgcccctttcgcccgttggtctgggcaaaagtggagagtcgcttgaacgcaactccgtgggaattggtacctttcagccattgttcggcttcaaggattttcatcaggcagcccggctgtaccccccctccccccccccccgccggcggtcacccaagacggtgaccaccagcccctgggtggggagaagcaagccgggctgcgatcttggtcccaccctcagattcaaggatgttcatcatccccgctggggtagaggccgggctgagccggagctctacctcccgcgcgggttcgtgggtcagcctctcctgcggtgttcgagggagagggcgctcactggccctgcgggcgggtcggacttcgacaacgcggggctggtcgacggcgggcgtcgtcagccccagcgtgtcgagctcgtcggcttagctcccggtgccccctcctgtcggaaggcggctgccgcgccgtgtgcacgggaggaccgcccaagatgtcgcgcgctgctagggcggcgttcgtgttctggggcggtcctgcctttgcactggtatggcgcctccgcgcggaggtcggaatccctcggctcggtcggccttgctgccagaggcttctctagcttagttaaagagacccctcggctgctcttcgatgagccgaagccatgggtagcgatattagcacagacagaggcagagttggctcgaaaagaagacctggtcgtccggagcctggccgggtcgtccgctggcaggaccgacgccggaaatgagccgtcgaggcctcgggccgggctgatgtcttcgagggacagctggccgaggcctcggggtgaccggctgagccgcctgctcgggccggattccaagagaagaccctggcggcggcggtccgggcttggtgatgacgtcgtcctccagagcggagaccctcggaccgtgtcgccgtccgaggccaggtcggacctcgccgaaggtgttgtcgacgccgagggtgctgctgctcccttcaagcgtcaagatccgagcctgcaggatcggatcatcctgtatcgagaaggctcgaagaatcgcttcggcagaagagctttcgagcgtgaagacttgttcggtccgcggaatcacttatccgaacgcgagttacttatcgcagaaggtgatgatccactttcgaagtag

SEQ ID NO: 11347 - DNA, 1026 bp, Zea mays
  Peptide Sequence Number=SeqID_54722
atgaccgcatcaaaaaagcagggaccgggaaagggggataccccgaaaaggatccttccccgtgaaggaaccaggctccgagcctccctactgatcagaggttcgaaggctggcccctcggaagggttcgatagccgcctcagatcgcgtgggccccacacccactactggtcaggggttcgaaggccggcccctcggaagggttcaacggccgcctcatgctactcgggctccgtgcccactactgatcagggcgggaacgatcttgtaacggaatcccatcagagggaggcatcgagccctcggaccccgtcgccaggggaccgggtccggcagatcacccgcaggctcgggggctgctctcgcaaacctggctccggccgaaccgttgacagcgtcaacataccagcccgagaacttgggtcccgaccgtacacccgggctacggctagctcgcatgagggaatgaccagaccagccgaagcattacgcgaggcaataagacctcggaggagtgaaaccactcctccgaggcctcaggggctacacccggcgggtgcgctcgcgcgcacccaccagaacaaatcgcaaccgagaaaggctggtccccttgcaaaaaagtgcgatgaaagcctccaagcgattgctaacactcccttcgaggctcaggggctactgtcggggaccataattaggggtaccctcaaggctcctaattctcagctgggctcggactcgggctcagccctagaagacgacgaactccgctccgcccgacccagggctcgaactcgggctcagccccagaagacgacggactccgctccgcccgacccaggactcggactcgggctcagccccagaagacgacgaactccgctccgcccgacccagggctcggactcgggctcggccccagaagacgacgaactctgctccgcccgacccagggctcggactcgacctcggccacggaagacagactcgacctcggcttcggaggagcttccacatcgcccaacctag

SEQ ID NO: 11348 - DNA, 759 bp, Zea mays
  Peptide Sequence Number=SeqID_54723
atggcgttcgcggcaagccaggctccagcgagccgggcgccggttgcctgggcaaccaatcatgctgatggtgtattgcttctttgccgagtgtcgcagacactcggcaaagactattttacactcggcaaaggctttgccgagtgtaaaactcggcaaagaacgctcggcgaactgtacatcggcaacagcctctttgccgagtactttttgtcgggcactcggcaaagattttgccgagtgccatttgacactcggcaaagaaaagtcaccgtcacggcgccaagtgacggtgacggatcctttgccgagtgtcttctttggcactcggcaaagacgggtctagtgggccccaccgccagtccctgtgccgagagcgctcgtaggcactcggcaaaggaggcttctttgccgagtgtctggtggactggcactcggcaaagagtcatccagtgggcccctttgccagtccctttgccgagtgccttggcaacagcactcggcaaagatggctttaccggttcccaggtttccttctttgccgagtgccatggtgccaaaggttcacacttagcccataaaaagaccaagtattgggttcaacaaaagagcaaagggacaaccgaaggcacctctggtctggcgcaccggtgtgccaccggacagtgtccgatgcaccaccggacagtgtccggtgcaccagaggactccaactcaaactcgtcaccttcgggaatttccagagccggcgcgctataa

SEQ ID NO: 11349 - DNA, 492 bp, Zea mays
  Peptide Sequence Number=SeqID_54724
atgtcggcgctacagaaagttgtagcagcggtagtccacgatgtcaacgctgagggctgggatcgaggattggagggcttgagaaggccgaggtccaaatggagctccaccagttccactgagattctgggcgcctccacggcgccgctttttagttcctccagggataacggtggtccagcatttgaaactgattttgcagaccaattgaaaaacttcagtaagatgggtcatggtgttagcagtgggggtgttttgcttaagtcttctggatggcacactcctgtcgtaccacaaatcagaaccaatgcgtcaataggcaccgtagttgataataatatctgccacccaacagaatttgatttcttcctgtgcatccatgctggggccaagggaacaagccgtcctacgcattaccatgtgctacgagatgacaacaagttcaccgcagatgctctgcagtctctaacatataacttgtgctacatgtaa

SEQ ID NO: 11350 - DNA, 1137 bp, Zea mays
  Peptide Sequence Number=SeqID_54725
atggacaaggaaaaaaaggtaaaggaaaaggaagattacatggaccaggcacctatgaggattgtcaagaactacaagaggcctgaggagaggattcctgccgagagagacccaactaagtttgttgtctcaccgataactggagagctcattcccatcagcgagatggaggaacacatgcgcatctcactcactgatcccaagtacaaggagcagaaagagaggatgttggctaagatcaaggagactacccttgcacctgatgatgaaatttcacagaacattgttggccttgctagcactcgccctggtatttttgggaccactgaggaggaggtgtctaacgccgtcaaggcagaaattgagaagaaaaagaatgagcagccaaagcaggttatttgggatggtcattctggtagcattgggcgcactgctactcatgcattatctcagattcagggtggtgaggaacagtttgatgcttccaatgttgctgggagacctattcctggtccagctccacttgtccgacctggcatgccgctgccccgacctcctcagccacttcctcttgttagaaacgacctcctcagccacttcgctggtgacattgtcaagaatcgctcagagagtgatgctccctgctgggaagctgatgctatggatgagagcgaggaaagagaggtggtcagctttgtctgccgcaatgagcagtattgtacacctgctgaaaacgcaatagtggcaaatggccaaactgcagcagccgctgaagcaggtgagcgcatgagcagcatagcatctcttgagaatagatgtatcaaggaaccagagaagttcagtgaagcagggactgcatcagccttgcttgatgatgcatggaatgataagcattacaatgatcagcacagcacaaacttgaatgagtccagattggctttcaggcaggaagtggaagttggatgtttggaaaacaatggacaagtcttacaacacttactgatggatgctatcgctgagactgaaccaatagataccaccaggagtaaaacaatggataagtcttacagctctttatctgaaagttcatctgcttctctatggtcttcagattctgaggcaagcaggagatcatga

SEQ ID NO: 11351 - DNA, 471 bp, Zea mays
  Peptide Sequence Number=SeqID_54726
atgcagaacaaggagcggctcgttcatctcctgaaggggattacggtcggaatagagaagtgccaagcgacaccactatctcaggaagtgttgattgtatggggagaccacaaccagttgttcctggtggaggcgtttgcagttcataggactctgaaatggagcgctagactggaggtcatacagaagacaggccacgttcctcagctggaggattcagcttgcttcaacaaggtcatgctggactttctcaaaagcctaatctgttggttaatggtagctcgcaataagatttcttatttggtgcactttggggtgctcgtgttcaaacttgggttgatgttcatatttggttttacacttaatatgattgtgtacataacctgcaggacaaaggtctcgtgggagagctacgagatggaaacacccacacttgcgctggactatgactctgaaagcacgcgcaactga

SEQ ID NO: 11352 - DNA, 351 bp, Zea mays
  Peptide Sequence Number=SeqID_54727
atggccggcggcgcgggagaagccgtggatatggcggacctgcgcacgtggcccggttggggtggtattaatagccaccaaacaaaatatggccgttggagaaggctgctggcaatgggcgcaccggacagtccggtgcgccgccggacagtgtctggtgcaccaccggacagtgtctggtgtgccgccatgtcagcctgtttgtcagtgttggagctggtcgaccgttggaggctttgtcctcatgcggcatcagacagtgcggtgccccttctgaccaactgctccgacttctgccgcgttcactgttctgcactgttcctgtcagagtcgaccgttgcgcgcaggtag

SEQ ID NO: 11353 - DNA, 69 bp, Zea mays
  Peptide Sequence Number=SeqID_54728
atgcgcctcctccagtggtatctgttcttgacctgtgtgggggggtgtgagacagcaagggttccataa

SEQ ID NO: 11354 - DNA, 270 bp, Zea mays
  Peptide Sequence Number=SeqID_54729
atgcccaggtcgaaggggtatgggccaatcgtggccgttcgatcaatggtgggcgggccagaatctgcccacgacaacctccaatccgacccgttcgccaaagatccagcggtggacaacccacatctaatcctcgccgtgtataacccatccaacgcgccaaagatcatcttcctcctatcgcttaggtctaggacgaccgcgcgtcacacagcatccgtatggcctccgatgaactgcacggtcgcgcaagcgaggaccgccgggtaa

SEQ ID NO: 11355 - DNA, 543 bp, Zea mays
  Peptide Sequence Number=SeqID_54730
atggcgcgctggacagtccggtgcggccaccggggcctagatgctttcactcccgccccggccccttccgccgtggccgctgccgcccccgcctcgactcccctccggcccggtccgccgcatgttgagtctgcggaggcatggaaagcccataactgcataccagacgagcactatattcagacgttgcttgcacaaagtggtctagaagaagaacttacgcggcgatcagtaacatatagtgcatgggatctttcagcttctaaagatcgtgaaagacgcgggtggcatcctgtaacatataaagtctctgatgctactccaagacttataaaatccataaagaccgaaaatagaagggagtggtgtacaagtaatggaaagccagccccctgcttcctttttgccaggaagtttccacgtggagctggtctgaagcttcttgattcagctaccttgccgacgcatgaacaagaagacgagttagactttgtcgaaaccctctccactagtggaggtatcgaccaccactcgtcactgtaa

SEQ ID NO: 11356 - DNA, 2808 bp, Zea mays
  Peptide Sequence Number=SeqID_54731
atggggaggtggtggccggccgccctgctgggctgcgcagtggcggtggtggccgttctggcggccgccgtggtggaatgcgcggtcacgtacgacaagaaggcggtgctcattgatgggcagaggcggattctcttctccggatccatacactaccccaggagcacccctgatgtaataagctgcattcttcaaaacctctccttctttttttccccccttcttccccggggcggcggggagttcatggctgtggtcagctgtgttcttgatgcaatgctatcaaaagcaaattgctttcctactttagccgtccctctttattccacgatgtgggaaggactgattcagaaggctaaagatggaggcttggatgtgattcagacctatgtcttttggaacggacatgagcctacgcctggaaattactatttcgaagagaggtacgatttggtcaggttcgtaaagacggtccagaaggccggcctgtttgtacatctccgcatcggcccctacatctgcggcgagtggaacttcggtggcttcccagtttggttgaagtatgtaccaggcatcagcttcaggacagacaacgaacctttcaagattgagaatgagtatgggccagaaggcaaggagtttggtgccgcaggtcaggcatatatcaactgggcagcaaagatggcagtgggactggacactggtgtgccgtgggtgatgtgcaaggaggaggatgcacctgatccagtgatcaatgcgtgtaatggtttctactgtgatgcattttctcctaacaaaccttacaagcccacaatgtggactgaagcttggagtggctggttcacagaatttggtgggaccatccgccaacgaccggttgaagatctcgcatttgctgttgctcgatttgtacaaaagggtggctcttttatcaattactacatgtatcatggaggaacaaattttggacgcactgctgggggtcccttcatcacaacaagctatgattatgatgctccaattgatgaatatggacttattagagaaccaaagcacagtcatcttaaagaactccacagagctgttaagttatgtgaacaggctttggtttctgttgaccccacaattactacccttggaactatgcaagaggcccatgtcttccgatctccatctggttgtgcagctttccttgcaaactacaattctaactcccatgcaaaagttgtgttcaacaatgagcaatacagcctcccaccttggtcaattagcatccttcctgattgcaagaatgtagtttttaacagtgccacagttggtgttcagacatctcagatgcaaatgtggggagatggtgccacatcgatgatgtgggagaggtacgatgaggaggttgattctctggcagctgctccattgctcaccacaactggtttgcttgagcagcttaacgtcaccagagacagcagtgattatctgtggtacattaccagtgttgacataagcccatctgaaaactttctacaaggtggtggcaagcctccgtctctgagtgttcagtctgctggtcacgccttgcatgtctttgtcaacggacaacttcaaggttcttcgtatggtaccagggaggatcgaagaattaaatataatggcaatgttaaccttcgagctggtactaacaaaatcgcactactgagtgttgcttgcggattgccgaatgttggagtgcattatgagacgtggaacaccggcgtcggtggtcctgtcgtgcttcatggattgaatgaaggttcgcgagaccttacttggcagacctggtcctatcaggttggcctgaaaggcgagcagatgaatctgaactccgtagaaggctcaggctcagttgaatggatgcaagggtcactgatagctcagaagcaacagccgttggcctggtataaggcttacttcgagactcccagcggggacgagccattggctttggatatgggcagcatgggcaagggacaggtctggataaacggacaaagcattggacgctactggacagcgtatgcagacggggactgcaaagggtgcagctacaccgggaccttccgggcacccaagtgccaagcaggctgcggccagcccacccagcgttggtaccatgtgccaaggtcctggctgcagcccagcagaaacctactggtagtcttggaggaactgggtggtggggactcgtcgaagatcgccctagccaagaggtcggtctcgagcgtctgtgccgacgtgtccgaggaccatccgaacatcaagaagtggcagatcgagagctacggcgagcgcgagcaccgcagggccaaggtgcacctgaggtgcgcgcacgggcagtccatctccgcgatcagattcgcgagcttcgggacgcctgtgggcacctgcggcaacttccagcagggaggctgccactcggctagctctcacgctgtgctagagaagagatgcattgggctccagagatgcgtcgtcgccatctcccccgacaacttcggaggagacccctgcccgagcgtgacgaagagggtggcggtcgaggcgtggaagaagaaggccaccgcggcggcggccgccgcctcctccaagcgggagagggagcgggagcggaacaaggaggcggacgaggtcaccgtggagctccgcgcggtggggttcgacaaggtggtgctgaagcagcggcggcggatgcggcggaggcgccgcctgggcgaggaggagcgcgcggccatcctgctcatggcgctctcctccagcgtcgtgtacgcctga

SEQ ID NO: 11357 - DNA, 303 bp, Zea mays
  Peptide Sequence Number=SeqID_54732
atggcgcatgtgggcccggagtggtcacatggcatggcatatgacgacactagacatacagacgtggccaagaggggaggttcctggattgggaacctccccagcgcgacgcatgacgacggaggaacagacgtcgaaacgtgcgacgacaccatgaagccggagaacgggacccagctcaacctgtctctcgggacgaagcctcagagatgggggagacccccgatgaaagaacacatcaagatcggcgcaactcccgccgccgtgaccaccgtcaagctcaggaacgcgagcgggagctag

SEQ ID NO: 11358 - DNA, 273 bp, Zea mays
  Peptide Sequence Number=SeqID_54733
atggcgaaattcggatcttccgccttgcgccgaggacgggatacctgggagcttaatcagtggtataactactattcccatgttcgtcgctttctcctctccgttttagcgcacattcgcggtagtttggtgctccctgagggagggtggcgctcggattcgtggccggcggcgccatcgtcgtgcgctgaagagcacgtgaccgaggatcctggtgagcagcaggttgaagtagctgagcaggagctcattgaaggcaagttgtgcccttga

SEQ ID NO: 11359 - DNA, 255 bp, Zea mays
  Peptide Sequence Number=SeqID_54734
atgacagttgggggcttaagcgggcgcaaaaaaacaaacgcacaatacaaaataaactgttcctgcagggtcagactcaagtggggagcagcagcaccctcggggtttgatgaaggtgaggtgcccgatctttcggcgagtagagataattccggatggggggaagatgacccttgggatccgactacgacgagcaagcccgaaggcgccaatgcaatcgctgaaccaactccctgtggttaccgaccttgctga

SEQ ID NO: 11360 - DNA, 156 bp, Zea mays
  Peptide Sequence Number=SeqID_54735
atggcgcacagtggtggcgacgggatggcttgggcagtcggtggcgacgggacggctcagtcacagggcgcggggacgcaaggcgccaattcggctgggctactagcaatcatggtgcatgcatatgatgaagataatgcttcatgggggtcttag

SEQ ID NO: 11361 - DNA, 615 bp, Zea mays
  Peptide Sequence Number=SeqID_54736
atggcctctggtgttgtctcagccgggttaggtgtgagcaggaaggattgtccctcatataaggaccgtccaaaccccagggttatgatggctggggagcaccgggaggataagatgggggaatgttttgtccggtttgggcatggcggtggcctgactccttctggtataaccattaagatggaaggctcctttgtcattaggacatcctactggtcggaggtggaaggattccttcaccttcttcggagctgtgcgcttcgcatggggatccgcaagaagccagagtatgtctggaaagaataccgcgagtacgggattgagaagtgctctatggcagtctacctgggggaaagccgaaactacccaaataaccctcctttccaaatcatcgccactggacaccgcttcccagacacctgccagaatgctgcccaaaaagccctccgccagctatgccaaaactacagcagagaagtctctaagacaccccttcgctactttccacctagcaacaaaaatactcctgcttggaggaaaagactccaggccttgtcaggaagagatcccaatgaagatgaccctaccatagtctacatggccggatatctctag

SEQ ID NO: 11362 - DNA, 216 bp, Zea mays
  Peptide Sequence Number=SeqID_54737
atggcggcgcgctgcacaacggcgttcccgcggtcgctccatcctctgcccacaccgatgtcgctctgttcatcaggacagcttcggtgctcggatttgtgctcagcttcaaccatcctctttggtaagccttacacttcacatgagctcccatctttggtcaagaacaggtaccgcaggatgaggcgtatggaggataatatgacgagttcatga

SEQ ID NO: 11363 - DNA, 321 bp, Zea mays
  Peptide Sequence Number=SeqID_54738
atgcaggaggcatgcaaccgcaccaagggggcgcaccctttcaacttcgacgcgtccagcatggaagcccaggcccacacatcatgtaaccggcacgacggttactatgtgcgaaaaactgcaccgccacttgcgtcagtactgcgccttctcgactacggaaccgatgccgcgactcgaggcaaccccgcgcatggcccaacagtgccaaccaggcgcgtcggtcacggggaccgggaaaggggatactccgaaagggatccttctccgcgaaggaagcgggccccgagccctcttactgatcagaggttcgaaggctag

SEQ ID NO: 11364 - DNA, 765 bp, Zea mays
  Peptide Sequence Number=SeqID_54739
atgtcttcgcgctcccttatgcatcgtgtctttccaccttccgagcccctggatggggaacacccgcaatccttctgccttgtcgttggacgaacgcaacttcatggaagttggtacctttcagccatcgttcggcttcaaggattttcatcacgcggcccggctgcatcccctcgccggtggtcacccaagacgttgaccaccagcccctggatggggagaagcaagccgggctgcgatcttggtcccgccctcagcttcaaggatgttcatcatccttgttggggcggagagcgaggcaagccggggctctacctcccgcacgggttcgtgggtcagcctctccttcagcattcaagggagagggtgctcactggccctgcgagaggggcagacttcgacaacgcggggctggtcgacagcgggcgtcgtcagcttcagcgcgttgggttcgccagcttggctcccagtgccccctcccgccgcaagggcagttgtcgcgccgcgcgcacggtaggaccgcccaagacgtcgcgcgctgctagggcggcgttcgtgttctggggcggtcctgcctttgcaccgtgccaaggtgggggcggctcgagaagtccccgtcaccgacgggatcaccgccaccatccgcgcttcgggcctccggctctttgtacttgtcctcgcccctcgagcgtcggcgtgggcgagggcaaggttgcagcggcgtccgccctgaggccaccgctgctgcagttcggccacccgtag

SEQ ID NO: 11365 - DNA, 300 bp, Zea mays
  Peptide Sequence Number=SeqID_54740
atggcttccccgctcccgtctggactcagcacccgtaccgctcacttcggcgtggacaccagtcttatggcaaccccgactatgtcagaaaacaggcgtagaggaggaaggcgtgctcagcaggagcaggcagctcagcaggatgaggcaccccagcaacagcagctgccacccccgcccccgatgtccatcgagcagatgttcatgatgcagactcaggcagttcaagccatcggtcagactctggccgccattcagcagcagcagcaacatccaccaccccagcctcagatgccttag

SEQ ID NO: 11366 - DNA, 660 bp, Zea mays
  Peptide Sequence Number=SeqID_54741
atgactttggagcctcatcccctgcagccaggctggcgctcattggactccgagtctttcgggtaccgggcagaagacacgatcgaggcgatcgctctgcatgggttgactaccttatgcggattccatcccttcgagctggctacccaccccattggcttgttccccgctgagaaggaggacgacccaatgtggaaggatcgggtggagcatgccaaggacatctgggccatctacccaggtcagactgcgcacttgacagtgatgcgcggtgaggcaatgtcccatctgatggcactactggaggcaacaaagatcacgttggataacagagaggagctcgtggttgacttatctcaagaattagtggagaaggacttgcaggtggagcagctatccactgatattcaagaattggaggagctggtaggtaccagggagaacaccatcgaggttctcgaggatcagctcattaacactcagcagcaacttgctgaggctaacgagcacctggacatgcatcaccaggaaatccaggaccaggaggccaacgaggacgtcgacattgagggaggagatgagcctgcctccagtgtggacactgctggctcgggaagaccaccctcccccgagtcaagtgttgcttcgttcgctcactag

SEQ ID NO: 11367 - DNA, 189 bp, Zea mays
  Peptide Sequence Number=SeqID_54742
atggtgctcaccggagttcaagagcccgccggcgcacgtggaccggactgtaatcttgctgacggagagtacatcctcgtgccggagcaaggagctgctcaggaggtagccccagatccagcacccgagcctgcaccagaggacctgcctgccactgctttggaaggcaagccccggttttatgcataa

SEQ ID NO: 11368 - DNA, 801 bp, Zea mays
  Peptide Sequence Number=SeqID_54743
atggacgaccagatttcgttttgtgcatttgtgcacggcgtggcccttgtgcactggatacgatcccttcagagagaccgtctagtttggatggccaggatgcgtgcattggaagggaagcagctgcttgaggacgaccccacagtcgtgtacctcactgcatacctcctcacccttgatacacagtatgatttcttggctcggcaccaccgtcagatgattgcccgagcagaagatgcagagaagcgcaaccgtcagctgcatgtggatctcaccacagctcaagcccgtgcaactgccttggagagtcgtgaagccattgctgttgaagccctgaagcaagccaaggaggagcacgtccagaagttgatggaggcctacttgcccgttccatccaaccctgttcaacccatcaaagctgaagacccccagattcttgaaggtcacccggtctctatcaaaggagagaagaaggcttgggaactctcggaaggagccatagacttggaaggaattccagtctcccctctggctatggataagcaagagcaccccgagtcctcccaagatcccccgccagagttgtttgagcccctcaccatgaagaatattccagcaccatcccttgaggtcaaggaagaagctgcaagcaccccgccagcgccgccgccctctgaggaactacaagagccagtccatcttgaagaagagttcgaccccgtcttgccatcgcaatcgccgccagaagaagtcatcaacatcaactccctgttgacccatccaagagatgtctcagattga

SEQ ID NO: 11369 - DNA, 555 bp, Zea mays
  Peptide Sequence Number=SeqID_54744
atggagagtcatgatctccagacagaaagggaatcacggcttgtgggtggcaatgagaatgatggttttggtattgattatggtaatggtaagtggtattctttccatttggaaaggttatgtaactgctgtgtacgtgaattgctgatcctggcacgtacatggttcacattcggtttgccttctaaaatcgggtgtgacaaagagccgacttgtaaactgggtcctattgtccgtaatgatacggcttgggaccccaaatctacagacaatcgatctgaggaaagcaacaacagcaccctgggtgatgttgaccacaggggtggcctctggccactttgtgaacttgtcgatggcgacgaaaaggaagcggtacccgccgatggccctggggaatggtcccaggatatccaccccccatacggcgaatggccaggagggtggaatcatctgcagagccctgagctggtgtgtgtatctgctttgcgtggaactgacacgccttgcaggactttaccatctcagctgcatcctggagggtggttggccagttaa

SEQ ID NO: 11370 - DNA, 241 bp, Zea mays
  Peptide Sequence Number=SeqID_54745
atggggggctcccgattgggtcgggtggctctgccttggacttctccgatggtcttcgatttcagtaatggatctttaacaagtacaactgccccgatcaactttctcccgggggcgctccgctataattcaccggactgtccggtgtacaccggacagtgtctggtgccccaagggagagcaactctggaactcgccagcttcgggaatttgctccgctataattcaccggacgtgtccg

SEQ ID NO: 11371 - DNA, 177 bp, Zea mays
  Peptide Sequence Number=SeqID_54746
atgaagctgtggaaggagacttccaggagttccaagattacgacgagttctaggtgtgggttagcggcaacccccagtcggctgcctgtgaaggccgcggttatctacgtttcttttccgcactttgatttattgtgtggcatagaaaacaagggtacatcaggttttaactattag

SEQ ID NO: 11372 - DNA, 159 bp, Zea mays
  Peptide Sequence Number=SeqID_54747
agatactttggtacaggtggttatgagattgatggttttggttatgactatggtgctggtggttatgagattgatggttttggttatgactatggtgctggcgaagatgaagctgtggaaggtgacttccaggagttccaagactacgacgagttctag

SEQ ID NO: 11373 - DNA, 339 bp, Zea mays
  Peptide Sequence Number=SeqID_54748
atggcgaagctacccaggggcttaccaaagaccaaggcgaaggttggagagccggccacgacgaacagcggcacgcggcggagcactatctctgggtttacaatcccgctcatcggcgacctggtcaaactccgactgccgtcgctgcacctctgcgcgtgccgctgccgcctctgctcccagatcggcacagagcaaccgaaggtccgccacctcggcgccctgctaggagaggcgcgcggtagccctggcaagcgaggtcctcagggatcacagcgaaccccagacatcgacctcgcggcggatgaacgacgacttggcggctctcagatccgttag

SEQ ID NO: 11374 - DNA, 117 bp, Zea mays
  Peptide Sequence Number=SeqID_54749
agatacctcggtacaggtggatatgagattgatggttttgattatgattatggtgctggcgaagacgaagctgtggaaggagacttccaggagttccaagattacgacgagttctag

SEQ ID NO: 11375 - DNA, 1296 bp, Zea mays
  Peptide Sequence Number=SeqID_54750
atgaacaaaacaccggcattcaagatgccattacaaacggaaccccggttccacctccgcgggtacgaacaaccccacacgattggggggcccatggagcaacagaagaccgacgaacggcttgtcgtcgcccgctccagcagcggcgacgacgacgacttctgctctggggggccgaacagcagcaacgatgaccttagagcggatgctgctgccgtgaggccctcgcccatgccctcactcgagaggcaaggacgggcagaaggccgtagagttggaggtcagtccgtgggcggcaccggctatctcgtcggcagaagaacctcttccagctgccatggcgggaggcggcgccgggagcggctccaaagccactcgggccagagagccaggcacgcggcagctgccagcaccacggacggcgaaagcccttccccccgatcactgagggaaggagcgggccgccgcccgcgcagggaccaaccccaactcggcacactcccctccccagcactgatgatgaaaatccttgaagctgagggaggggtagaggctgcagcccggctcgcttctccccgccatcgaactggaggtcaccgtcttggccgtcgtgggctgagtcttctccaacacgctccaaggtcctccccctatggcgcgggggctgggtcccacgcgtcatgcaagctggcccagggcagaagaagccaaaccgccacgcgcggtgcatgcaaccgcccagcggttacaagcgtccctccactttcgcccagaccagcgggtgaaagggtggacagccgtgcaggcggcatgcaaccacaccaagtgggcgcgccccttcgacttccaacgcacccagcatggaggcccaggcccacgcgtcatgcaaccggcgcgccggttgctacgtgcgagccactgcaccgccactcgcgccactaccacgcctcctcgactgcggaaccagtaccgcaactcgaggcagccctgcgtacgacccagcagtgccagccaggcgcgacggtcaatacggccaaaaatgggccggcagtaatggcggtggcaggagggcaggagcagcgttcacgtcgtcagccaagctcacgtcccatccagggacagcgagagaaacctctctcacggcgtgaagaaggcgcgcccgtgttccgttcctcgaacggctcgcgcacgcgcaacggccgccccgcgaaccgctcgccccgtcgcattaactccgcggcgggacaggcggcgcctctggcagaagaagagagcgacgcttcaccttcgccataa

SEQ ID NO: 11376 - DNA, 216 bp, Zea mays
  Peptide Sequence Number=SeqID_54751
atggccgagcagcgccatggccaaagccccattggctgcattagctgtgccaaccgagcccctgctcgggccctacactctgtagtgggccacgcttccctagcccctacgcacacgagtgaggccaagcgcctccctcccatggccagcccctttgcttgctgctggtatcccatggagaaaggattcaaggaattgacgatcaagctttggtga

SEQ ID NO: 11377 - DNA, 819 bp, Zea mays
  Peptide Sequence Number=SeqID_54752
atgtcttcgcgctcccttatgcatcgtgtctctccaccttccaagcccccggatggggggtacccgccgtctttccgcctcgtcgttggaggaacgcaactccgtgggagttggtacctttcagccatcgttcggcttcaaggattttcatcatgcaaccctgctgcacccctccgccggcggtcacccaagacggtgacctccagtttgatggtgggggaaagcgagccgggctacggcctctgcccctccctcagcctcaaggattttcatcaccagggctggggaggggactgccgcgtgcctggctctcggatgcgagtggcttcggagccgctctcggcgccggtttctgccacggcagctggaagaggttctcccgccagcgagatagccagggccgcccacggaccgacctccaactctacggccttctgcccgtccttgcctcacgagtttgggcatgggcgggggcctcctggcagcagcatccgccctgaggtcatcgctgccgctgttcggccccccggagcagaagtcgtcgtcgtcgccgctgctggagcgggcgacgacgcgccgttcgtcggtcttctgttgctccgcaggcccccccaatcaaactcgcctgttggttgtctgaaccgattcaccaagcgtgagtcaccccgtgcaaaggtgacgagtgagaatggagatcttcggaccgcgtcgccgtccgaggctaggtcggacctcgccgaaggtgttgtcgacgccgagggtgctgctgctcccttcaagcgtcaggatccgagcctgcaggatcggattgtcttgtag

SEQ ID NO: 11378 - DNA, 264 bp, Zea mays
  Peptide Sequence Number=SeqID_54753
atggcgctccttgctcgcttcctctcttctctccactccctctcactgctggttaccgcgatggacaccaggcgacgacggggaaactccgacccgagctggttaaataccccgaggggactcgcgccgaacaaccccccagcccaacatccacggcgagatccatggagtgtgttacggtcggccggtgaggaagatgaccagcgggccccacattgcggtggcaagcgaaaggtttcacatagggatcaagttctcaattaa

SEQ ID NO: 11379 - DNA, 144 bp, Zea mays
  Peptide Sequence Number=SeqID_54754
atgaccgccctatccatatctaacgatccagattactctgaccgaagcgttagccaacatttaatctgggccgccagcagccagatcaacgatcgggatctaaacaccgaagaggtttcacatagggatcaagttctcagttaa

SEQ ID NO: 11380 - DNA, 180 bp, Zea mays
  Peptide Sequence Number=SeqID_54755
atggggagaagggaaccgacaattgggccccaccagccggtgaccaagagtatgcacgtggcaagggttttatttacatatgatatcagcttaaaaccctctactactttgaaagggaaagaaaggagcaaaagagagaagaggaagaagattctcaggaccaactcagacatttcttaa

SEQ ID NO: 11381 - DNA, 231 bp, Zea mays
  Peptide Sequence Number=SeqID_54756
atgcaggcggcatgcaaccgcaccaagggggcgcaccctttcgacttcgacgcgtccagcatggaggcccaggcccacacgtcatgtaaccgacgcgccagttactatgaggaccgggaaaggggatactccgaaagggatccttctccgcgaaggaagcgggccccgagccctcctactgatcagaggttcgaaggctggcccctcggaagggttcgacagccgccttag

SEQ ID NO: 11382 - DNA, 291 bp, Zea mays
  Peptide Sequence Number=SeqID_54757
atgtgggagcaccggtcatcgcgtatcctggctagtgcaagctcgccggagccattgctccgctgcccatggtcggggacctcaatttgcgaaagaatagaagaaaacgaagaagagatagaagttgaagaagcaaggactacaccaccaccaccacctgaagaaccccaggctgggaactgcttttacttggacatctgtggagcaaagcctgactcacctataacacaagggaagccccggtgcatttgccacctccttgttattttaaaatctttctcacttgcttga

SEQ ID NO: 11383 - DNA, 231 bp, Zea mays
  Peptide Sequence Number=SeqID_54758
atggctcgtaaaagatcccaaaagaacaagaagacacctccgaaggaaaacaatgaggccttcgtcaaagtgccgagtcctgcgaagggtgtccctgcccgctttgtctccgtcggaccagcggctgcagcgaaggcctcgagcgaagggtggcgtctttgccttcgccccaacatttgccctccgagggaccagttcgacaaagtcacctggtgccgaagacgtcgctag

SEQ ID NO: 11384 - DNA, 498 bp, Zea mays
  Peptide Sequence Number=SeqID_54759
atggcgagattagcgtgtaccctccgtgcgctcttgggtgatatgatgaagatacagctggcctctagacatgaaggaagcagaagtggaagtaacgaccccatcagagatttggaggccagagtgaagcgacttaggtctgagctacgccacgggtgtagggagcgtgcgcgcgatagccgccgcattgttgaactatcagcagaagttaatcgcctgcagcaggaaattacgaaatgtgatacggccattgactgggtcgtaaactcgtgctcgctcgcctgggattgtgaagccaaagctctagctcgagtagcagaacttagcgcatccctggaaaatctgcaagcgtattgcaacaccctgcatgaagaggtgcacgtattgtatgaccggctgcacccaaacatgccactagaagttacagcaatgggcgccagaccatctggaccatttggacctttttggggcccctccttccatgaaccttgcagatga

SEQ ID NO: 11385 - DNA, 309 bp, Zea mays
  Peptide Sequence Number=SeqID_54760
atgatcaaggccgaaactgaaagaaataccaagctacatgaagattttgagaaccttcggaacaagtgtgctgactttgccactcgatcagatctagttgacattccagccgaagcccaaagcatagggaacaaatttatcacccaaatctgggcaaaaggcgggcgtgaattggccggggacgaagctcaaaaactacttaactcgatgtatgccaaaaacacacacagactctgcatccccttaggaacgactttggagtctcttcaccttttacttaggtggtatttcagctttgcatccccttag

SEQ ID NO: 11386 - DNA, 585 bp, Zea mays
  Peptide Sequence Number=SeqID_54761
atgccgccatgcacgaagaagactaagcgtaagcatactggcccaattggtgtgccacgtcatcaactcgccccaagacacgaggatagcagtagtgggagtaatgatctgatcggggatcttgaagcgcaagttaatcagcttcaaacagaactccgacacaggactgacatatgggtcacggatggcgacagaatcaatgaattgagaagcgacatccgccgcctgcaagatcagctcgcggatcgagatttagcgctcgactgggcgattcattctcgttcgcttgcctgggctaaggaggcaaaagctcgaacccgagtggaagagcttagctcagctattgataacctgcaggcttattgcaatactctacatgaagaagttcatgtactgtattcacaattgcaccccaatgtacctgcggatcctatcgggacagaagccggaccttctcatgtagtgggagaagcttttggtggcgaattggaccttttcaggccccctccctctatgaagttggtcgatgagtggtctcctacgcccgacagcgaggctaccaggagcaacaggaagcaggagtag

SEQ ID NO: 11387 - DNA, 756 bp, Zea mays
  Peptide Sequence Number=SeqID_54762
atggttttcccctccatcttatgggaggtgctctgctccactggttaccctacaccccctctgtatacggtgcagctatacgaggagcatcgggtgccacgttgcagggtttggctgaccctggagtctcaccctctgcagccgggttggcgttccctagactctgagactgtcgggttcagggcggacgacatcactgaggccgcagcgctaaaagcccttacaaccttctgcgagtatcatcccttggagatgatgatgcacccactgggactcttccccgccgagaagagggatgaccccatgtggtgcaatagagtgagccacgtgaaggacgtgtgggccatgcatcccgaccaggttgggaggatcactgttcagtgtatgagcgcactatatcgcctacaggccctgcagagcgacgccatggcacacctcactgatctcgctcatactactaagatcactatcgacagtcgagaggacatcgtggttgacttatcttcggaattggtggaaaaagacctacaggagcagcaggtggaaatccgggataacatcattgatatcctggagatccagctccatgatgtgcaggaggaacttgaggaagccaatgaccacctagagatgcaccaccaggacatggaggccaatgaggcaggaagcgacggagaggaggatcccgaggaattagaaccaactccagatccgaatgcgactccctccagaatgccccccttcacccgcatctag

SEQ ID NO: 11388 - DNA, 291 bp, Zea mays
  Peptide Sequence Number=SeqID_54763
atgtgggagcatcggtcatcgcgtatcctggccaatgcaagctcgccggagccattgctccgccgcccatggtcggggacctcaattcgcgaaagaatacaagaaaacaaagaagagatagaagttgaagaagcaaggactacaccaccaccaccacttgaagaaccccaggctgggaactacttttactttgacatctgtggagcagagcctgactcacctataacaaaaggcaagccccggtgcatttgccacctccttgttattttaaaatctttgtcacttgcttga

SEQ ID NO: 11389 - DNA, 336 bp, Zea mays
  Peptide Sequence Number=SeqID_54764
atggcaaaatcctacggacgagtaagagtacacgtaagcggcaaggccgaccgagccgagggactcctacgcctccgggatacggatacctcactcatcaccttccgtgaaaagctcagacgtcgacggaaggggagcagcagcaccctcggcgtcgaccccaccttcggcgaagtccgaccgagcctcgcacggcaacgcggtcggaggatcttcactccgaaggacgacatcaacactgcgcccgggtcatcgccgccagggtctcctccaggaatccggctcgagcagacggctcggccggccgccccgaagcctcagccagctgtcctctga

SEQ ID NO: 11390 - DNA, 753 bp, Zea mays
  Peptide Sequence Number=SeqID_54765
atggtggggagaagcaagccgggctgcgatcttggtcccgccctcagcttcaaggatcttcatcatcctggctggggcggaggccgggctgagccggagctctacctcccgcgtgggttcgttggtcaccttctccctcagcattcaagggagagggcgctcaccggcctagcgggagggtcggacttcgacaacgcggggctggtcggcggcgagcgtcgtcagcttcagcgcgttgggctcactggctctggctcggctcccggtgccccctcctgccgcgagagtggttgtcgcgccgcgcgtaccggaggaccgcccgagacgtcgagcgctgctagggcggcgttcgtgttctggggctgtcctgcctttgccccggtacggcgcctctgcgcggaggttggtgctccgctcatccgggaggatccgagtggggatctgccggtgggcagatggcttccgtcgtcggcgctgaggcggtggcggctgaagaagtcctcgtcgccgatgggatcaccgccaccatccgtgctccgggcgtccggctctttggctttgatagcttgtcctcgcccctcgagcggagacgtgggcgagggcattgttgcagcggcgtccgccctgaggccatcgccactgcaatttggccacctagagcggaggtcattgtcgctgctgccggagcaggcggcgcacggagccgtgtttttcctcatttcgagcactaggactcgcctgtcggctaactga

SEQ ID NO: 11391 - DNA, 351 bp, Zea mays
  Peptide Sequence Number=SeqID_54766
ggcaggcggcacctttggcaggcgaagcaggcgacgcttcacctccgccataatgaccgcgctggcccctcggaagggttcaacagccgcctcagagcactcgggctccacgccgactactggtcagaggttcaaaggctggcccccgaagggttcgacagccgccttagacttagagcgagggatgaccctgggtacgttcgatacataaccaaggctcgggctacgctcccgaggctcgggggctgctctcgcaaacccggctccggccaaaccgttgacagcgtcaacataccagcccgagaacttggggactcgattgtgcacccgagctacggccagttcgcatga

SEQ ID NO: 11392 - DNA, 231 bp, Zea mays
  Peptide Sequence Number=SeqID_54767
atgaatagggattggatcgggatgaaggatccgagcgggatccatggcggcgtccacgctcttaggtcttataggagatcatcaagcaagatcgattggcttgttactcttggaggttgccacctcctagatggcttggtggtggttccccatgagctcttcaatggagattgtgaagaggccacagtggtgattgtgagaagcattgtgcttgcctcgtcggaacaatga

SEQ ID NO: 11393 - DNA, 486 bp, Zea mays
  Peptide Sequence Number=SeqID_54768
atgacatatctttgtagaattgtcatcaattaccaaaaagggggagattgtgagaccatgtttggttttggtgccaaaggttcacacttagccaataaaaagaccaagtattgggttcaacaaagagagcaaagggataaccgaagtgtgccaccggacagtgtccggtgcaccaccggacagtgtccggtgcaccaccggacagtgtccggtgcaccaccggacaatgtccggtgcaccaggggacttcacgctgaactcttcaccttcgggaaaatccagaggcgctccgctataattcaccggactgtccggtgtacaccggacagtgtccggtgccccaaggaagagcaactctggaactcgccagcttcgggaattcgctccgctataattcaccggactgtccggtgtacaccggactgtccggtgaaccagcagagcaacggctacttcgcgccaacggtcacctgcaggcgcatttaa

SEQ ID NO: 11394 - DNA, 426 bp, Zea mays
  Peptide Sequence Number=SeqID_54769
atgaacgcgctctcccgcgaagggtgccggcacttcgaggtcttcgaccaagccgatgaagattttgagcgagatatctttaaggttgaggaccccgtagtgaaggaatccgtcggagccatctacgaccggatgtggggtccgcacggtcgcgaggtggtcagggagcgggccgagacggcgagggctcaggctgtgcggcgcgtggcgagagggtggacgacttcgggggcgttgaacagcgcactgcctgacccggagccgaccccggcggaggccgtgtctggggtcgccctggagccgaccccggagactgcggaagacgcaccggatgcccccgcatccgctgcggccggcgaagacctgcccccagaggtcgccgaaggttcaagattttgggcctgcgcacgcaaccgctactactaa

SEQ ID NO: 11395 - DNA, 282 bp, Zea mays
  Peptide Sequence Number=SeqID_54770
atggcgatctggccaaggttgcttctctgcgaagactgggcctcgggtgagccgaagctttgtgctgatgggggttaccagctgagattaggagtcttgggggtacccctaattatggtccccgacagtagcccccgagcctcgaagggagtgttgatactcgcttggaggcttttgtcgcactttttgcaaggggaccggcctttctcggttgcgtttcgttctggtgggtgcgcgcgagcgcacccgccgggtgtagcccccgaggcctcggaggagtga

SEQ ID NO: 11396 - DNA, 840 bp, Zea mays
  Peptide Sequence Number=SeqID_54771
atggtgaccaccagttcgatggtggggagaagcgagccgggctgcagcctctgccccgccctcagcttcaaggatcttcattatccttgctggggtggagggcaggctgagccggagctctacctcccgcacgggttcgtgggtcaccctctccttcagcattcaggggagagggtgctcactggcctagcggaaggggcggactctgacaacgcggggctggtcggccgcaagcatcgtcagcttcagcgcattgggctcgctggctcagctggctctggctcggctcccggtgccccctcccgccgtacgagcggtcgccgcgccgcgcgcaccggagggtcgcccaagacgccgtgcactgctagggcggcgttcgtgttcttgggctgtcctgcctttgctctggtacgacgcctcttgcgcggaggtcggtgctcgcctgtccgagaggatccgagtggggatctgccggtgggcagatggctgccgtcgtcgacgttgaggtggtggcggctgaagaagtcctcattgccgacgagatcgccgccaccatccgcgcttcgggcctccggctctttggctttgatagcttgtcctcgcccctcgagtggggacatgggcgaggagctcgtcgcagcagcgtccgccctgagatcatcgctgctgctgtttggccactcggagcgggggtcgttgtcgctgctgccggagcgggcgtcggcgagccaccaggggttttgtcgccccgcaggccctccaatgtggggggttgtatttttgggtgtaataccgtgttttttcctcatttttgagcactggaactcgcctgtcggctag

SEQ ID NO: 11397 - DNA, 1500 bp, Zea mays
  Peptide Sequence Number=SeqID_54772
atgccgtcctcttcttcttccgccgacaccacgccgccggcggccgcctcgtctgaggagacgttgagtagcttgatggtggaggagttgcgcgccggcgactctgttgattttggtgtgtcacggatgacgtcagcccgcgttgaagatatgcaacggttgggctactttggcggcggagttgctcgtgctccagggacggaggaagtccccgagccggaggtggcagaagaggatgcagacgaaggggcccttcggtgcgccgccggtcagagcagtgggcgtgatttagttgaagagttcgtggcgtacggggtctggcccttggcgcacggctgggcgttgggcgaagtgtgccctcgccagatgccttttcacggaggaagggtggtgcgaagtcctgccttcgcactgaatttgcgaaaccgtgacccggccgcctttgtgcgtgatgcggaggacttggcggtgcggctcgtgggacgttacgtgccgaggacggaaggccagcgcagctttgatatccgcgggtcaaatgaccgtttgaacagggtcttcgaattaaatcaattgccgtacgacggctatcccggtcaagacgaagcggaccgccgtgggaagaaaccggcggtggagactggagacgaccctgcgccggcggccgccccttcctcgaaaaagagaaaattaggtactgcgatgggaggacttggggtgtctgacagttttgctagagaattgatgaggacgtgtgcggccccgggggaaaggatgtcttcgcccgagctccgggagtcttcagctcggatgctgagggttaccgggggctgctggcctagaaatgttcctatcccctgcgcggctgaggaggactgttttacatctcgtatggttcatcggtggagagtttttccttacgggcgaaatatcggtgctgttgtgtgggcagtgatggacaaggatcgccaaggtgcggcgcaaaaacgccaggcgactgtccggctacatgaagctaggccgaagaggcagcagggagctccgaaggctgcggcctccggcggaggcaagccgccgctggcggcgaaggcgggcgccgctgcacctagcgaggcgccggaggcgacggcgggcgccggaggctccaagtcaacgaaggtggtgccgccggccagcggagtggcggaggcttcgaaggcggcccaatcgttgccgttgtcgggcaaacgtgttgccgacttcggcaccgatattactgtggacgactatcttggtgggccgggcgaaggccagcttgctatagctgcgcctggcgcggcgatcgcgacggccgtcatggtgccgaaggcgaggggcgaggcgcttggcgccgaaggcgaggtgtcggccctcgcgttggtcagggacgaggcgggcgtggcgacccgccggctgaagggagtgacggaggcgctgagtcaggcgacggaacgaatcaagctgttctcgtgtgatagctgcggg

SEQ ID NO: 11398 - DNA, 1968 bp, Zea mays
  Peptide Sequence Number=SeqID_54773
atggagctcggaccttggcggagggggagcagcagcaccctcggcgtcaaccacaccttcggcgaagtccgaccgagcctcggacggcaacgcggtcggaggatctctgctccgaaggatgacatcagcacctcgtccgggccatcaccgccagggtctcctccaggaatccggcccgagcagacggctcggccggcccgaagcctcagccagccgtgccccgaggatatcagcccggctcatggccttggcaactcaactccggcgccggtcccaccggtggacggtccggtcaggctccggccgatgaagccctcttttcgagccaactctgcctctgtccacactgacaccgctgcctccggcttcggctcatcgaagagcggccgagggtacgaacaaccccccacgattggagggcctgtggagcaacagaaggccgatggatggctcgccgtcgcccgctccagcagcagcgacaacgacttctgctccgagcggccgaatagcagcagcgatgacctcagggcggatgctgctgccataaggccctcacccacgtccccactcgaggggcaaggacgagtagaaggccgtagagttggaggtcagtccgcgggcggcaccgactatctcgtcggcgaagaaacctcttccgactgtcgcggcggaaggtggcaccggaagcagcgccgaagccactcggaccgaagagccggacacgcagcagctgccagcgccacgaacggcaaacgcctttccccccaatcgctaagggaaggagcgggccgctgcccgcgtggagaccgaccccaactcggcgcactcccctccccagcactgatgatgaacatccttgaagctgagggaggggcagaggccgcagcccggcttgcttctccccacccaggagctggtggtcaccgtcttgggggctgggtcccacgcgtcgcgcaagccggcccaagacagaaggagccaaaaccgccgcgcgtggtgcgcgtaactgcccggtggttacgagcattcctccactttcgcctagaccagcgggtgaaagggcggaccgccatgcaggcagcatgcaaccgcaccaagggggtgcaccctttcgacttcgacgcgtccagcatggaagcccaggcccacacgtcatgtaaccggcgcgccggttactacgtgcaagaaaccgcaccgccacttgcgccactaccgtgcctcctcgactgtggaaccagtaccgcgactcgaggcaaccctgcgcatgacccaacggtgccaacaagcacatcggccacgggtcagtcagccgcgggagaaggcgtgacggccgatacggccagaaatgggccggcagtaatggtggtggcaggcgggcggaagcagcgggcaggcggcacctttggcaggcgaagcaggcgacacttcgcctccgctataatgaccgcatcaaaaaagaagggttcaacagccgcctcagagcactcgggctccgcgcccactactagtcagaggctggcccccaaagggttcgacagtcgcctcagacgcagagcgaaggatgaccctgggtacgttcgatacataaccaaggctcgggctatgctcccaagctcactggagacaccatgttcggcgccctccaagggcaacatggcgctctccccccccccctcctccttgcggaaaggcgacgcaggggcggctcggacccggccttggccccggaagacgacgaactccgcctcgcccgaccccagggctcggacttggctccggaagacgacgaactccgcctcgtccgaccccagggctcggactcagccctggcctcagccgacggtctccgcctcgcccgacccggggctcggactcgacctcgacctcggaggagcctccgccccgcccgacccagggctcggaccaaccacgtcacaggggggccatcattaccctatccctagctag

SEQ ID NO: 11399 - DNA, 333 bp, Zea mays
  Peptide Sequence Number=SeqID_54774
atggcgacggagacgcggcggcagcccgagtcgacggtggcggacctcggtggctgcgcagagaacggcggtgagcgtaggcagagggattcggagagggagaggggaaattggggcgcgtcccgggttgcggacgtcggggcggagctcaccgtggcagaaggcacagcggggctccaacggcggcggagaaacgagctcgggcggcgatggtttaatggcggcggcgctctggcatgtgcgcagcgtgggggaggtggaagaggggtctgcaggccacaaattcaaattagcatttccaagtattatgcaccaaacaaaaatgaaatctag

SEQ ID NO: 11400 - DNA, 645 bp, Zea mays
  Peptide Sequence Number=SeqID_54775
atgtcgactatatcgaaggtgacttgttcgcttcgcgcgctgggcattgtgccgaatgacaatggtagctctattttgccaacatggaaggtgcctttgcctccaaaactgtataaagggttgtctgcgggcttaaggagactgtggttggtgcccatgcgatcgaaggcgcgcaggaaaatggtgtcggcctggctaccattgtcgaccaatactttgtgcaagtcccagcctgctaccctgcaatcgattaccatggcatctgcgtgtggcacgctgcgcaaatcaacgtccctggcatcgaaagtgagcggggttttcataggatgcgaagagaattggaccaaggcaatgaggatgcaacacctcaaagaagacataaaaagatacataggagtccaatactcaagaacaaagaagcccgaagaaatcagcgaagaaatccaagatgagggctgtcagccagcgcctggtggcgcaccggacagtctgcgcagagaggccgcagacaggcgctctctggctgtagcaccggactgtccggggcaccaacgaggattagtcgggaccttgcgtggttctggatacctcggtaaaaatatcggcgtcatccacgagagtttgcttctctactttgctctttaa

SEQ ID NO: 11401 - DNA, 825 bp, Zea mays
  Peptide Sequence Number=SeqID_54776
atgaagctgtggaaggagacttccaggaattccaagattatgacgagttctagatggctcgtcttagacacactgcacgaggtggagtccgtgaggcgccgttcctctgttgcccagctggaggcaccccctgcaccaccgcgggacgccccggctgttggaggagctactggaggaggtcctggaggagaccccgacgacgacgactcagaccacagcacggagtcctctgagccgcaggaggcggaaggttgggtcgcccgacccatcacccgtgacgccgctcgcggttgtcacttccacgacgcactcgacaccttgctgcgccaggctttcgacaggcacacctggtcgatcgagtatcgttgtgtagtctaccagcacagtcgcgggaggtacccggaccgctgggaggctacctgcctagttcgccgtccggaggatgacctccggggtgcggaggccgtttcggagcactactccatctccaagagggacactgcagaggcgctatgcaggatgcagcacgacgtgcactctcccaagagtgtggttgtctcacctgttggtgaggataaccctaggttgagcagcacagtcaacctagtcgcagtgcttaacaccgagctggatcactctctggacgagctaagcagggctcgaatggagattgctgagttgcatgctgagcttgcagagcgccgccaccaggagggtggttcccccgctcctgttgggactcagcacccttaccgctcgccgccacgtggtcaccacacttatggttcccctgcctgtaagaccgggatagatctggatccttag

SEQ ID NO: 11402 - DNA, 132 bp, Zea mays
  Peptide Sequence Number=SeqID_54777
atgacaactgacaagccactcgagctcctacacatggacctattcggcccgatagcttacataagcatcagcaggagaaaaatttcacacccaagaaactctaaaaggattcttgagacgggctcaaaatga

SEQ ID NO: 11403 - DNA, 381 bp, Zea mays
  Peptide Sequence Number=SeqID_54778
atggaggttgctccatctcgacctgggaaggggaaggtgcagggagtcgggcgtccgaccatggacgagcagaacgccgggctagagggcagaggagcgtcggcgtccaaagaagctgagggcgagggtcggactccatggaggggcgcttgctgctgtatgccatggggagttccttgctgctgcttgggcgccatgggaaaacaggaaggaggagcgagctcatggggaagatggagggaggagctgctgctgctccatgcgcccaaggacagagaggagtggaagtggcgtgtgggggaaaggaaggagaggggtgggctgccatttattgagctggagctctggacatgtcaggtggcagtgagcagtggcaggtga

SEQ ID NO: 11404 - DNA, 348 bp, Zea mays
  Peptide Sequence Number=SeqID_54779
atgaagaatttcattgttatacttaatttctttttcttgccgggcttaattcttagcaatgccttgagggcacaaaagagcgctgaagacgaaggttgcacaatagctctcagcaaccttcgctcagaggtaattgagctaagaaatgaagtacttgctttgtggcttcgaactaatagtttacctactacagctgaactatccccgctaccaaagccgtacaatcctctagctgatctagagatgaaggaagcactggatactataagcatggcaaactccattatcgacgaagtcattaataaactactgaacaaagtcgcagaaaaagtccttagagaagaatag

SEQ ID NO: 11405 - DNA, 453 bp, Zea mays
  Peptide Sequence Number=SeqID_54780
atggcaagaggcagcggcacaaggccacggcgactcctcgagcagaggaacctgaccgagcgcagcaacgcaaatcttcaatctcaaatccctgctgcgagaaaaggtggagccaaacagaaacagcacgtacagagaagaggcgatcaagaccatcgcacgttctctgagatgctgcctgccagaggacactgccgtgcccagcactcggagagctctgctgctgcttctcaggcgaccttcacgcagaggactggatgctggaacatgccggcttcgtcgaccattcacgggccaccactgccacttctgatgctgttgtacacgtacagtgctgcacacccggtcaccttttacacacaggaaggcacagcacagtatcgacgagtagtttctgaagttcgctttgcggtgcccaggacaaggaagcggccgaaaacgatgcgtggctga

SEQ ID NO: 11406 - DNA, 174 bp, Zea mays
  Peptide Sequence Number=SeqID_54781
atggagagtcatgatctccgggcagaaagggaatcacagcttgtggatggttatgagatcgatggttttggttatgactatggtactggttgtgagcattgcaaccacttctcaggcgaagatgaagctgtggaaggagacttccaggagttccaagattatgatgagttctag

SEQ ID NO: 11407 - DNA, 240 bp, Zea mays
  Peptide Sequence Number=SeqID_54782
atggccgccgccatggccggctcggccaacccccgcgcgctcctggccgcgcgccctggccgcccgcccggccgcgcccccgcccctgcgtgctcggccgcccagccggccggtggttatgagatcgatgattctggttatgattatggtgctggttgtcagcattgcaaccactgctcaggcgaagatgaagctgtggaaggagacttccaggagttccaagactacgacgagttctag

SEQ ID NO: 11408 - DNA, 258 bp, Zea mays
  Peptide Sequence Number=SeqID_54783
atgtggctatgtcgaagctttatgggtgataacttcggtactgcttttgagaggatctaccgaagccttcggagagccgaaggtccgaaaaacaccttccctgagctcgttgccgagaaacgattaaaatatttggagcgcaaggtggcccaccacgcagcgggtacgaacgatctggtaattcacttgccaggcgccgagtggtccaccgttcagcgggtgcgggcaactgctcagcgggtgcaggcgacttggtga

SEQ ID NO: 11409 - DNA, 1134 bp, Zea mays
  Peptide Sequence Number=SeqID_54784
atgtccgccgcggccgatgaccgcgcgcgccgcgccgccgcgttccgccccgccccgctccctccgcctgcgcagaagcagcagctctccggcgtggccgccgccgtgctcgacgccgggggacgcctgggccgcgccgtgggcgacgtcttccgccgcctccgcatcgacgacaccttctactccggcggcggcggcggcggcggcggcgcgccgaatcggagctggcgcgacgccgggaacaatggcgggaggccggcggccgccggagccccggctgcggccagcagggaggaggccacaggcggcggcgcctcctccgggcggttcgcgcgggcgcaggggagcatgaacctgtcggcgacgtacgacagcaggacgcacgacgtggagagctcggtggtggccagaggcgacctgtggcgcgcggaggcgtcgcacagcagcagcagcagcgccggcgccggcggcaatggagccaataacaacctgttcctcgtgcagctcggtcctgtcctcttcgtccgcgacacgacgctactcttcccggtgcacctctccaagcggcacctcatctggtacggattcgagcgcaagtcgttcatggacatgcaattcccaaacgggcaactgaggtacgtcgccggcgacggcttcacggcgcgtgctttcctgcccctccgtggcggggtcttgcaagcccacggaaagttcccgggggagaagaggctcagcttctctttcaaggacagcatatgtcctacgatcggcgggcgccatcctggggtgtgcgtggagctgatccactcggcggacgacaacgtcggcgtagtctgcggctactcccacaccgcttcttcccctgcttccgcatacgcctccatatcggccctcaggcgaaggggccctcggctcagtccacatgagaaggggtcctcgccgaggacaagcgaaggggtcttcgacccaacgggcgacgatagcttgtcggcaaaacccaaggccttcgccatctcatcgactgaaggaccatccggccggccgcaaccgaagggagcgaaagtgcgaaggctgttggagcagaggctacgtgttgaccccgaacacctccggtgcaccagaagataccgctaa

SEQ ID NO: 11410 - DNA, 84 bp, Zea mays
  Peptide Sequence Number=SeqID_54785
aaagagcccgtgactgaggatcctggtgaccagcagatagaagtagctgagcagaagctcaatgaaggcaagttgttcctttga

SEQ ID NO: 11411 - DNA, 843 bp, Zea mays
  Peptide Sequence Number=SeqID_54786
atggccaatcctaaagatcacaacaacgttgccctagacattaacacaaggctgactaactcgccggccgctgaggatgagaaattagaagaacacatacaaaggctggacgaggaagtccaacgacaacaggttcatataagcaagttgccgaaaaagtggtacctctcgcacttcaaggtactcggaaagctccggacagaagaaaggctaataagaccagaggcatcagggggcatgctacaccagggtaaaaagccgaaggttacttttgagcaacttctggctaaatatcacaagcaaatcaaggcaaatgatgttgatcaaactggcaatgctaagtcatctagagcatatttgaagccatcaaaatcaccttcgaagtgtaaatctagaatcggtattggcgaggagaagagtttcatgcatcagcaacatatcctccttttgggccaccaataccattacaatatggttcagctcctccgtacttttatccttatccatcttggggctgagcctgaagaagtgttagatactttggctagtagtacccaaacaatagagaaattagctagcgatagtctagatactaaatcggaacttaagaagcctaatgtgcctaaacaaccgagaagcccactcggattatcaatctggcacaagaggctagaaaaactcagtgcacaagagctaaaggcgagaggcatgacatgggcccctaatgggagttctcaagatccaggtatggatgatgcttttggaagaagtggattaagcgcaaacaaaaggaggaaagcaagtacaagacgtttgggtgaaaggcgactctacgtcatctag

SEQ ID NO: 11412 - DNA, 291 bp, Zea mays
  Peptide Sequence Number=SeqID_54787
atggcggtggcgcgacggcggtgggcgcggcggtggtcgccacgggcgcgggaggccggcggcgcgacgacggtggcggggcgcggcggtgctgggcgcggtggcgcgacggcggtgggcgcggcggtgctcgccgcgggtcactcgaaacttgggaaaccgtgcatgcaaaaatgttacccgtcctatttagcacaagttacgaccgatttcaggagcggaccggaaacttcgagcaacatgctaaacatggccgtgaacttgccatacacatgtttaaaaattgtataa

SEQ ID NO: 11413 - DNA, 795 bp, Zea mays
  Peptide Sequence Number=SeqID_54788
atggcgtcgcggatgggctgcgcaaaacagcgagcacacggcgggcgtcgacggcgtgttgtccactgggcttcacgaaacagcgagccggcagcgcgcggcttgctacgcattttgacgaacagccggcgggcaccacgacggacagcgaggaagggggctcgctgttggttttccatggaagaaaatggggcgcgctggatagagagagctaggcgcagggacagcaaggggcgtccatggagggggcagatccggccatggcatgctcctgctcgcagctctgcgcagaatcgcgaccacggggaagaagagcagaggagccgagctgctattttctgggcgccatggggagctaaggagaggtgcaggggggtcgagcccatggaggagcagagggactcgcgcccatggaggccctgctcatgcgtgcgtgctgctgcaggggcgccgagcacagggggcaaagggaggcgctggagggaagggacgccatgggcaaggagagggagggagctcgcccacgccatggatagcagggggaaacgctggggagctcgaccagcgaggttgctggccgaccatggagacaccctgctgccgagcgccatgaatccgcggggaatggaggtgctgctgccctgcgcgaggaaggagcaggggcgccatgtacagcagagagagggaggaagggggccgagctcactgcgctggggaagaaggcttgggcgccatccatgggagcggctgctccctgctctggcgtgcgtgaaggagcgtgggctgctgccgtga

SEQ ID NO: 11414 - DNA, 102 bp, Zea mays
  Peptide Sequence Number=SeqID_54789
atgaccgcgacggatgacacatctccgtgggcggggatctctacgcaaccctcgatggtggaaggggtggcgcctgggctggagaaggtgctgctggtgtag

SEQ ID NO: 11415 - DNA, 138 bp, Zea mays
  Peptide Sequence Number=SeqID_54790
atggggctcggtggtgatgaggatgatggttttggttatgactatggtaatggttgtccatgttgcaaccactactcaggagaagatgaagtcgtggaggaggacttccaggagttccaagagtacgatgagttctag

SEQ ID NO: 11416 - DNA, 1344 bp, Zea mays
  Peptide Sequence Number=SeqID_54791
atggctgaaaggtaccaactcccacggagttgcattcctccaatgacgaggcggaaagacggcgggtatcccccatccgggggcttggaaggtggaaagacacgatgcataagggagcgcgaagatatggtcgccttccaagggggtcaccctccttttaaaggcgactctccctacttgcgtccccagccgtcgcgggctgagtcttctccaacacgctccaaggtcctcccctgcggcgcgggggctgggtcccacacgtcatgcaagccggctcagagcagaagaagccaaaccgctgtgcgcggtgcgcacaaccgcccaggggttacaagcgactctccacttttgcccagaccaacgggcgaaaggggcgggcagccatgcaggcggcatgcaaccgcgccaagtgggcgcacttctccgactcccaacgcgcccggcatggaggctcaggcccacgggtcatgcaaccgacgcgccgagtgcttcgtgcatgcaactgcaccgccacttgcgccaccaccgcgcctcctcgactgcggaaccgataccgcgactcgaggcgatccagagcacgacccagcggcgccagcctggcgcgacgacaatgcgcccgtgttccgttcctcgaacggctcgcgcacgcgcaacggccgccccgccaaccactcgccccgtcgcattaactccacggcgggacaggcggcgcctctggcaggagaagcgaacgacgcttcgccttcgccatacgggaacgatcttgtaacggaatcccatcagagggaggcatcgagccctcggaccccgtcgccaggggaccgggtccggcagatcacccgcagctcaccggaaacaccatgttcagcgcccatcgagggcaacgtggcgctttccccctcctccttgcggaaaggcgacgcaggggcggctcggactcgggctaagccccggaagacggcgaactctgctccgcccgacccagggctcggactcgggctaagccccggaagacgacgaactccgttccgcccgacccaggtctcggactcgggctcagccccagaagacgacgaactccgcttcgcccaaccccagggctcggactacgccctggcctcagccgacggtctccgcctcgcccgacctaggggctcggactcgacctcggccacaggagacagattcgacctcggcttcggaggagcttccacatcgcccaacctagggcgcagaccagccacgtcgacaggaggcgccatcatcaccctaccccgagctgactcgagccacgggagacaagaccggcgtcccatctggctcgctccgccagataggcaatga

SEQ ID NO: 11417 - DNA, 267 bp, Zea mays
  Peptide Sequence Number=SeqID_54792
atgacttcgctagacaaccaagttgtggcacctttggctacgaagctggtgctcccaatcacaggcggctcaagttctgaaccagccaataagaagcagaagaaggaagcacagaaaaggagagtcattgagcactcactcaatgtagacctggccatcaggccaagaaagcagaagcttcagaaagtgtccgatgataaagccgaagcgactacttcagagctcatgagtttattggattgctactcaggttatcatcaaatctag

SEQ ID NO: 11418 - DNA, 510 bp, Zea mays
  Peptide Sequence Number=SeqID_54793
atggcgagagtagcgtgtatcctccatggcaagaggctggacggtggtgtatctatgctctcggttggcgtgaacctggtccgagctacgccaccggaacagggcacgagagcaggcagtcagcgtatagctgaactgtcagctgaagtcagccgcttgaggtttgagatctcggagcaggattcggccatcgattgggccattaactcacgttcgatcgcttggcaccatgaagcaaaagctcgagctcgtgttgatgagcttagcgcggccatctataacctgcaagcatattgtaatacattacatgaagaagttcatgacctgtatgctcgactgcacccggacgtgccttctaccgctactgccatggaagatggaccctcaagaacagcaaacgcaggacctgagggggagttggatctttttaagccccctccttctatgaacctggctgacgagcggtctcctgcagcagacagtgaagcaacaaaggatgacgaagactag

SEQ ID NO: 11419 - DNA, 282 bp, Zea mays
  Peptide Sequence Number=SeqID_54794
atggcaaagttgaagatggactataggtctataaacttgatgcagagaattgaatcggttaccacagcaaatttggagaaaattcaagttgaacatcgtctgtcaggtgctctaattgatggcccccatgaacgagaagaagaagtagaagtaactgaagagcaagtacaaccacctttggacactcaggtcgggaatagtttctacttcgacatttgtggatccgagcctgaatcacctgcaaacgaaggcaagccccggtgcatttgccacctcccttga

SEQ ID NO: 11420 - DNA, 147 bp, Zea mays
  Peptide Sequence Number=SeqID_54795
atggagtggagagatggcgagagtagcgtgtaccctccatggcaagaggctggacagtggtgtatctatgctctcggttggcgtgaacccggtctggacttaagaaacccgccttaccttgactccctcaagcccacatatccttga

SEQ ID NO: 11421 - DNA, 621 bp, Zea mays
  Peptide Sequence Number=SeqID_54796
atggggattggttttctacgagatgaaaatttgaataaggattatggtgtgggagctggttacacgacgcctccccagtacgcggtgcagctgttcgagaagcaccgagtgccccgctggctaaggacactatggaggcaatttgctcttcgcggactgaccaccttccgcggattccaccccttggagctgtccactcaccccattggtttgttccccacggagaaggaggacgacccaatgtggaaggaccgagtggagcatgccaaggatatctgggctatctacccaggccagactgctcacttaacggtgcggtgcatgaatgccctgtatcgtctgcaagtgatgcgtggagaggcaatgtcccatctgatggcattgttggaggcgaccaagatcactttggataacagagaggaacttgtggttgacttgtccactgagatggtggaaaaagacctacaagtggaacaattgtcaaatgagatccaagagcttgaggagctagtgggaacgagggagaacaccatcgaggttctcgaggatcagcttatcaacactcagcagcaactcgcagaggctaaccagcatctggatatgcaccaccaggagatctag

SEQ ID NO: 11422 - DNA, 1005 bp, Zea mays
  Peptide Sequence Number=SeqID_54797
atgcaggcggcatgcaaccgcgccaagtgggcgcgcttctccgactcccaacacgcccagcatggaggcccaggcccacgcgtcatgcaaccggcgcgccaaatgcttcgtgcatgcaactgcaccgccacatgcgccactaccgcgtctcctcgactgtggaaccaacaccgcgactcgaggcgacccagcgcgcgacccagcaacgccagcctagcacgacgggaccgggaaagggggataccccgaaaaggatccttccccgagaaggaaccaggctccgagccccccctactgataagaggttcgaaggctggcccctcagaagggttcgacagccgcctcagatcgcgtgggccctacacccactactggtcagaggttcgaaggccggccactcggaagggttccacggccgcctcaggctactcgggctctgcgcccactactgatcaggggttcgaaggctggcccccgaaggcaactctgaccgaatcgccgcaccgaccgaccaagtcgcaggagcatttaatgcaaaggtggcctgacacctttatcctgacgcgcgccccccagagccgaagtgaccgccgtcacttcgccgctccactgaccagcctgacagaaagacagcgccgcctgcgccgctccgactgcggtgccactcgacagagtgaggctgacaggcggccaggcccggtcaaaggcaccataggaagctccgcttcgcccgacccagggctcggactcgggctaagtcccggaagacggcgaactccgcccgacccagggctcggactcgggctaagtcccggaagacggcgaactccacccgacccagggctcggactcgggctaagtcccggaagacagcgaactccgcccgacccagggctcggactcgggctaagtcccagaagacgacgatctccgcctcgcccgacccagggctcggacttgggctcagccccagaagacgacgaactccgcttcgcccgaccctag

SEQ ID NO: 11423 - DNA, 1305 bp, Zea mays
  Peptide Sequence Number=SeqID_54798
atgggggatatccgccgtctttccgcctcgtcgttggaggaacgcaactccctgggagttggaacctttcaaccatcgttcggcttcaaggattttcatcatgcagcccgggctgcacccctccgccggcggtcacccaagatggtgacctccagtttgatggtgggggaaagcgagccgggctgcggcctctgcccctccctcagcctcatggattttcatcaccagggctggggaggggactgtagcgtgcctggctctcggacccgagtggcttcggagccgttctcggcgccggctttcgccacggcagctggaagaggttcttccgccgacgagatagccagggccgcccacgggccgacctccaactctacggccttctgcccgtccttgcctcacgagtttgggcatgggcgggggtctcttggcagcaacatctgccctgaggtcagcgttgccgctgttcgccccccggagcagaagtcgtcgtcgtcgccgctgttggagcgggcgacggagcgccgttcgtcggtcttctgtcgctccgcaggctccctccctatcgagtggggttgttcgtacctgcggaggtggaaccggagttccgtttgtaatggcactttgaatgccagtgtttttgttcattgtggctgtcgaggcctgaacatgtatgtatttttggcacggagccgtgttttttcctcattttcgagcactaagactcgcctgttggttgtctataccgcttcaccaagcaattgttttgcgcgagcgagtagttgcttctcacggaaggtgatgagtgaggtatctgtatcccggaggcgtaggagtccctcggctcggtcggccttgccgcttacgcgcactcttgcccgtccatggggttctgttcccgacgcagtcgagaaggctcaaacaatcgcttcggcagaagagcttccgaacgtgaagacttgttcggtccgtggaatcacttatccgaacgtgagttacttaccgcagaaggtgatgagtgaggtatccgtatcccggaggcgtaggagtccctcggctcggtcagccttggctgcttacatgtactccgtcgttttcaggatccactttcgaagtagtcaaaaagcacgaaagacattctggaagaaaagatcttttttcgaggaaaaaattcgacgcagagggggttcccctccttttagcccccgagggagggtcgggctttgccgaggcaaggctgacccttccttgatgactaaactttgcgtgggagcgaggtttatgaacaacttgaaaacatcttaa

SEQ ID NO: 11424 - DNA, 747 bp, Zea mays
  Peptide Sequence Number=SeqID_54799
atgttggtcgaggctatcgctgccttggtcaccgtgaccgctgacaacaccccggcttcctacatgaaatggcgggacatcaactttcagcaacaaggcgagagggcttatccacagggaccccgcgaaactttgtatctggatttctcagaaaccccatcccccccactttcgtcaaagctgaggatcccctcgaagctgatgaatgggtacgggtcattgagcagaagtttggactcatccgatgcacgaagaccccagaagccattatttgcggctcagcagttaagaggtcctgcccagtacctggtggggaaattatgtggccatttaacctgccgaacatcagtacgcaattaccaggtcaatactgacctgaaaaataggaattgttttatgagaggcctcaatgaccggctacaaagaaagatggccacctgcctcgatctctcctacagcaggactgtcagcacagcgctgacggttgaagcgaagaacacagacccagggaagtcaaagggcttcagaggtgacgggtttaccaggggcctgaaaagcgacgaaggtggtaatccgacctttcatcgaaatcgttcttcgcctcgttgccctcctacttctttaaacagcttgtatttccgccctgccactctccattcaacaactggccgagtgccactgtactgtttccacctccccgagttttcaattcggctgcttcaaatgtggaattcgacgaatctctag

SEQ ID NO: 11425 - DNA, 525 bp, Zea mays
  Peptide Sequence Number=SeqID_54800
atggcgagagtagcgtgtaccctccgtggcaagaggttggacggtggtgtatctgtgctctcgttttcccccttatggacatatgctgccgcgcgtaagtccactggaccgattggtgtgcctcgccaccagctggctccaaggcatgaggagagcagcagcggcagcaatgaccccattggagatctagaagcccaggtggagcagcttcgaatggagctatgccatagaaacatgatgccatctcaaactcgtgcacatgacagcgtgggaatgtcccatggtcaagaagatacacccaatccaccgccggtagcgcccatgttggtcgaggctatcgctgccttggtcaccgtgaccgctgacaacacccgcttcctacatgaaatggcgggacatcaacttcagcaacaaggcgagagggcttatccacagggaccccgcgaaaacttttgtatctggattttctcagaaaacccatccccccactttttcgtcaaagctgaggatccccctcgaagctga

SEQ ID NO: 11426 - DNA, 852 bp, Zea mays
  Peptide Sequence Number=SeqID_54801
atgcctctcatcctcgctcctccactccctccactgctactgctaccactccaccacccacttcgcctgcccccatcactcctgcgccatccaccacctcagccatacccacctcctccactactccagcttccactgctccttccactcccctttccgctccacctatcccacctgctcgcttccgggagcgtgatgagactgaggtgcgaccacttgctgcggatcccaggtcgtttgaccttcagcgtgctacagcggcacggagctcagatgtctgcacagattgctctacgagtgcaccggcttctggacctcgtgcatttttgcttgctgctggtgctgactctgaggtatacctctcctatctacctagacttctcactctttggactaccagcgctgattcggcccccacagttccagggtactcttgaggcctctcgcctcatctttgggtcgtaccatccagctccagaggatcctgtgccagcatctgctccagtgattgatactcagcctgaggtctccgccttccatcagtttgagactcagggcggagcagcccatgatgatgatgatgatgatgatgtctttggggttcctcctccgcctccgcctcctatgcctccacgctcacatgatcatgaggatgggagttctagtgctacccctgctgcccctctagccattgaccctgctcttgctgcgattctccagactcttactcagcagcagactcacttggcagccgagcaggcccgtcagacagcggtccagcagcagttgtctgagagaatgctctcgatgttccaaacgattcaggacagacaggattctctacagcagtag

SEQ ID NO: 11427 - DNA, 1110 bp, Zea mays
  Peptide Sequence Number=SeqID_54802
atgaaccgagctccggcgaacctgtaccggtcgaataactgtcacacccgggttttagggcaccaagacccgggcgcgaacataatcaccaggctccgatggtcagattttaatgggccaaaggggtatgccctgacccaatctgagccacaccatttgggatcaacgaccacacttctaaactggtgcgatctaatctcctccgcccatatccaatctaacggcccatccaccgtcttcttccttacgccccttaacctctcacctcgcatgccaacaccagggacgggatggtcgatgctccctaggcggtcggtgcctagatccatactggcgccctccccagcgatcctaaaatccggaaccccacatcgcagccaaactgaaggcgataaacgtcatgggaacaaaagcaaagcaatagggaaaatcctcaccgagcgctacagcatggtcgcacccgcctatgatgtgggtatgttctgccacatgttcaacccccgtcgagtagtcatcgttgctcctgttgaccttcaagctcaacatccccttggttccatcctgcgcaccctagcgaaccgcatagactcccattgggagcgtgatagatggcaggggtctgggtctagttaccgtgccatgcttcaacttaaactcgcctgccgagaactccggtctaggtgggagaggatgaagacagagtctaccaccgggatccaaaggaggtttcgtcctacagtcaacattcctctgataccacttctgtcacacccgggttttagggaaccaagacccgggcacgaacataatcaccagatgttggaacttgctctctgctgcaagtgggccaacgagggtgaacaatggcggcaacagggttacgcgcacgggggcaatagctctgttgatctagcctctcacgggcactgtgcgggggccttcgtcaaagtgccgagtcctgcgaagggtgtccctgcccgctttgcctccgtcggaccagcggctgcagcgaaggcctcgagcgaagggtggcgtctttgccttcgccccaacatttgccctccgagggaccagttcgacaaagtcacctggtgccgaagacgtcgctag

SEQ ID NO: 11428 - DNA, 402 bp, Zea mays
  Peptide Sequence Number=SeqID_54803
atggcgaactccgctccgcccgacccagggctcggactcgggctaagtcccggaagacggcgaactccgctccacccgaccccagggctcggactcaggctcggactcgggctcagccctagaagacgacgaactccgcttcgcccgaccccagggctcggactccgccctggcctctgccgaacgacctccgcctcgcccgacccagggggctcggactcggcctcggccaaggaagacagactcgacctcggcttcggaggagcctccacgtcgcccgacctcgggcgcgggcccgccacgtcaacaggaagcgccatcatcaccctaccccgagccgactcgggccgcagagaacaagaccggtgtcccatctggctagctccgccagataggcaatga

SEQ ID NO: 11429 - DNA, 444 bp, Zea mays
  Peptide Sequence Number=SeqID_54804
atggggaagaggaagtcgaggagctccaagctggcggcgcagccaaaaaaggcgccgaaactggagaaggtcttcacgtgcccgttctgcaatcacccggagagcgtcaagtgcctcatcgacctcaagctgggttacgcggaggcgtcgtgcctcatctgcgaggagagttactgcaccgtcccccacaacctgaccgcgcccactgacatctaccacgagtggatcgacgagtgcgagcgcgccaacgacgacgcccgccgctcccgccgtcatcactttctggtggtttcactttcgggcataggtgcatccgacgcccgagatacaatattgaattacacatgtacctttgacttgatagaaggcaaaaagtacaagcgtgacgcaaaagcaagtacaagtcagcgtgaacagtacggggtactgttcatctatttatag

SEQ ID NO: 11430 - DNA, 129 bp, Zea mays
  Peptide Sequence Number=SeqID_54805
atgggaacaaatgggcatctcaacctcgacacgggaggtaaatccgtagatcaaaagatattatgctttctgtatgcatgtgtgcaaggttccaagccgatcctaaggaagttcaccttagggccgtga

SEQ ID NO: 11431 - DNA, 546 bp, Zea mays
  Peptide Sequence Number=SeqID_54806
atgctggtagactacacaacgatactcgatggaccaagtgtgtcggtcaaatgcccgacgcagcaaggtgtcgagagcgtcgtggaagtgacacctgcgagcggcgtcgcgagtgatgggtctagcgatccatccctcaagctcctgctcctccaagagctccgtgttgtggctcgaactgccaccaacatcatcgtcgtcgtcttcgtcagggtctactccagcagccaggattccctgtggtggtgcagggggcatctctggctgagaggttgcacacttaacccacgagtcgtgatccctttccagcctgggttgtatagacctgatcttcactaccgaggtgaatggccagggatacactatgtaacctttacaaagactcccctggtgcataactgctcgttaggtttcgccagtcgtacaaacgcagtacacctccccaaggacataataggtcagaggacacttgccttcaccaggttgttgctcagggagatcttcggcaacacactcaggaaccacgggctgtcattgtctaaataa

SEQ ID NO: 11432 - DNA, 402 bp, Zea mays
  Peptide Sequence Number=SeqID_54807
atggagcctgtcggagggacagctatcggagcggttgggtccttgctgacgtcctcttgcttccgttgggcgatgtggaggctcctccgaagccgaggtcgagtctgtcttccgtggccgaggccgagtccgagccctgggtcgggcggagcggagttcgtcgtcttctggggctgtgcccaagtccgagccctgggtcgggcggagcggagttcgccgtcttctagggctgagcccgagtccgagccctgggtcgggcggagcggagttcgccgtcttccgggacttagcccgagtccgagccctgggtcgggcggagcggagttcgccgtcttccgggacttagcccgagtccgagccctggatcgggcggagcggagttcgccgtcttccgggacttag

SEQ ID NO: 11433 - DNA, 114 bp, Zea mays
  Peptide Sequence Number=SeqID_54808
atggcgagagtagcgtgtacccaccgtggcaagaggctggtcggtggtgtatctatgctctcggttggcgtgaacccgccttaccttgacctcctcaagccagcatatccttga

SEQ ID NO: 11434 - DNA, 570 bp, Zea mays
  Peptide Sequence Number=SeqID_54809
atggcgcctcctgttgacgtggtcggtccgtgccctgggttgggcgatgtggaggctcctccgaggtcgaggtcgagtctatcttccgaggccgaggtcgagtccgagcccctaggtcgggcgggcggagttcatcggctgaggccagggctgagcccaaagttcgtcatcttcaggggttgtgcccgagtccgagccctgggtcgggcagagcggagttcgtcgtcttccggggctgagcccgagtccgagccctgggtcgggcggagcggagttcgtcgtcttccggggctgagcccgagcccgagccctgggtcgggcggagcggagtttcccatggcgcctagggccggacttggatgctgtcagcctcactctgtcgagtggcacagcagtcggagcggcgcaggcggcgttgtcctcttgtcagaccggtcagtggagcggcgaagtgactgcggtcacttcggctctgtcgaccggagggcgcgcgtcaggataaaggtttcaggccacctttgcattaaatgctcctgcgatttggtcggttggcgtggcgatttggcctag

SEQ ID NO: 11435 - DNA, 830 bp, Zea mays
  Peptide Sequence Number=SeqID_54810
atggtgtgtttgggcctcggcggccgcagaaaacacacgctacaagataatccgatcctgcaggctgggatcttgacagttgaagggagcagcagcaccctcggcgtcaactacaccttcggcgaggtccgacctagcctcggacagcgacgcggtccgaggatctccactctgaaggacgaaatcatcaccacgcccaggccttcgccgccagggtcttctccaggaatccggctcgagcagacggctcgtccggtcaccccgaggcctcggccaactgtcccccgaagacatcagcccggcccgaggcctcagcaactcaattccagcgtcggtcccaccagtggacgacccggccaggctctgccgaccaagctttcttttcgagccaactctacccctgtccgtgctgacaccgctacccctggcttcggctcatcgaagagcgaccgaggggttcctttaactaagcaagagaagcctcggacagcaaggccgaccgagccgagggactcctacgcctccgggatacggatacctcactcgtcacctttgcacagggcgactcacgcttggtacaaacaaccccacacgattggggggcctgcagagcaacagaagaccgacgaacggcttgccgtcgcccgctccagcagcggcgacgacgacgacttcttctccggggggccgaacagcagcagcgatgaccacggagcggatgctgctgccatgaggccctcgctcatgccctcactcgagaggcaaggacgggcagaaggccgtagagttggaggtcagtccgtgggcggtgaaagtcgcctagagggggg

SEQ ID NO: 11436 - DNA, 426 bp, Zea mays
  Peptide Sequence Number=SeqID_54811
atggacttcgcctcgcccgatcccagcgcttgggttcaacctcgacgctggacgacggactccgcctcgctcgaccccagggctaggactcagcctcagctccggaaggcgacgaaccctgccttgcccgaccccagggctcagactcagcctcggcctcggaagacagtctccacctcgcccgacccggggctcggactcgacctcgacctcggaagacagactcgacctcgacctcggaggagccttcacctcgcccgacctcgggctcggaccgaccacgtcacaggaggggccatcattaccctacccctagctagcttaggctacggggaacaagaccggcgtcccatctggttcatcccggaaggtccagggctctcgtacgagaaggttggccgcgcgggagaacgggccgacgcgtaa

SEQ ID NO: 11437 - DNA, 381 bp, Zea mays
  Peptide Sequence Number=SeqID_54812
atggcgatctggccaaggttgcttctctgcgaagactgggcctcggacgagccgaagctttgtgctgatgggggttaccagctgagattaggagtcttgggggtacccctaattatggtccccgacacgtctgaacaacaggttatcacaaaccgcccgcacaccttctcgacggcagctcgcccgcactcctcaccagcggtagggcgcacgcactactccgcgcgacggtcgggcgcctgccctcgtcctcgccagcatcacgcccgaagtcgtcctcactgggagcccgctcgcccgcagctcatcgccggcctgcatgcccgcctgcacctcatcgtcggcctgcccgcctacaactcaccgctggcccgtccttag

SEQ ID NO: 11438 - DNA, 744 bp, Zea mays
  Peptide Sequence Number=SeqID_54813
atgtctttgtactcccttcatgcatcgtgcccgtccaccttccgagcccccagatggggagcgctcgcggttcttccgtcttatcgtcgttggaggaacgcaacttcgcggaagttggtacctttcagacatcgctcggcttcaaggattttcatcaggcagcccggctgcatcccctcgccggtggtcacccaagacggtgaccaccagttcgatggtggggagaagcgagtcgggctgttgcctctgcccctccctcagcttcaaggatgttcatcatccttgctggggcggagagcgaggcgagccggagctctacctcccgctcgggtcggcggaccaccttttcttccagcttctgggggtggaaaccatcctccagctctgcagaggaggcgccctccagccatgccgaggaaggcgaactgctgctgcccagccagggtgcaacattccgtcctctgtcctcgctttcgtggcgaggacgggagtgaggacctgccggtgcgctttggggcggccggcgctcgctggtgcggtattggcggacaggtggacgccgccgtcggtgctgacgtggtggcagctggagaaagcttctccgccgacgagcccgtcagcgctacccgcggaccgacctccagctctttggctttaatatctggttctcatcccttgagtggggatgcgaacgagagccttccggcggcagcgtccgtcctgggaccatcgctgctgctgtag

SEQ ID NO: 11439 - DNA, 873 bp, Zea mays
  Peptide Sequence Number=SeqID_54814
atggagcaccgtcccgggttggagtggttgctggagactacccatctggagcttgacgggaagctgttcgtcaacacgcagcaggcccctacctggcgcgccaactgtcggcgtttcgaccccggggggtccctggaccgacgagtcggcgtcaccaggcccccaagctcgagctgggggttcggcagcagcggcgccaacgtcaagcggtgctgcagcggcgtagggggtccccactactccgacgactaccacagcctcaaagacggcgatgtcgtcgactccatcctgccgcccactccggaggggacggagatgatttttgggcgacagctccggtccggcgccgagccagaagcagcgccagttcctctcccccgggtgctgtctcgcgcccatcaagccctccaggagactgaggcgttggaggagcgcactaaggcggcgtctcgccagttcgccttcgagcggtccgagcttgagcgggaccacaaggactacaagaaggacctccagagggtgtatgcttgggagctggagcagaccacggctgcagagagcctacaaaggctgcagcgagggctggatgataggaccagcagccttgccctggtcaaagagaacctcaaggagaaggacgcttccctggataagcgggcgacagatcttgcctggcagtggaaagacctcgctttcagggaggagatgtttgaaaggcgggataagctactggccgaacatgagctcgaggcaaaggagaaggagcgagcgctggatgagcgggtccgtcagttccgtgcggcgcaggtggcacaggcagcatcgggcccccaagcggtggaggcgatgaagaagacgctcgaggatctctag

SEQ ID NO: 11440 - DNA, 90 bp, Zea mays
  Peptide Sequence Number=SeqID_54815
atggcgcatgtcagcctcaccctggcgggtggcacagcagtcggagcagggcaggcggcgctgttctcctgtcagtacttctacgtgtaa

SEQ ID NO: 11441 - DNA, 96 bp, Zea mays
  Peptide Sequence Number=SeqID_54816
atggcggtgcctaactatccagctgatctgaatgaatggcatcagcaggagtacggtgttcatttcattactcctgaagatgaaaatgaagtctag

SEQ ID NO: 11442 - DNA, 366 bp, Zea mays
  Peptide Sequence Number=SeqID_54817
atggcgctttccccccttcctccttgcggaaaggcgacaaaggggcgtacaatgaaagttgagatggaaaacaacgttgttcgccccgctccggctactgtgccaaccaccagggtaaaactaagtcacgatctcccacgagttcggcctcgggcgcaacagggagctccgcctcgcccgaccccaagcctcggcctcgggagaaggtctgcgcctcgctcgacctcaggccacggcctcagcctcggcctcgggagaaggtctccgcctcgcccaaccccaggcctcggcctcgggagaagtctccgcctcgcccgacctcagcctcggaccgactacgctacaggggaaacatcattaccctaa

SEQ ID NO: 11443 - DNA, 78 bp, Zea mays
  Peptide Sequence Number=SeqID_54818
atggcgagagtagcgtgtaccgtctgtgatcgccgttacttctcggacatgaagacttggtcattgacttacacatag

SEQ ID NO: 11444 - DNA, 435 bp, Zea mays
  Peptide Sequence Number=SeqID_54819
atgacagtggggccaacctgccccaggcacagctcctctgcccccgagaaacccgagagcagcgactttggaaagctgaattttagcacgcgcatcggattgtctagtgcacaccgtacagttactgttcacagcccgaagtcagagaaggcgcagaaggcgcaccgggcagtgaatagtgatgtctggtgcaccaccggactgtccggtggcccagttgtcagaagctccaacgtggcccgtgaagctttccaagcctcggacccggcagaacttcaccggaagcctgagatcaccctcgccggacttcggtcgcccgcctacacgcgtggaccgagctctccggacctcccctacaccctcggccacctcaccggagcaatctcgccgccggtaagccccttcgccccttcttacgccgcgggtactgtttaa

SEQ ID NO: 11445 - DNA, 90 bp, Zea mays
  Peptide Sequence Number=SeqID_54820
atggatgggcagaaggagagtaggtcatgcgtcctggatttatatggccccgagtcccaagtatccgcaatcatcggcatttctatttaa

SEQ ID NO: 11446 - DNA, 453 bp, Zea mays
  Peptide Sequence Number=SeqID_54821
atgggcaagaacaagaagggcggaagttcatcgcaccacttcggcgacaagcggaagcgcgggccaagtcccccttcggaggacttcggtgacttcgagtactcggaggaggagttttcctccgagtccgagaggtcgctggtctacacctttcccccgatgtcgttcgatgactcggacgattcccaggggatcgctgccgaggtgtggacgtacatccgggtcgtcgagcgcttcgggctcgagggctcggatgagtcggagatctcctcggactcctctgactcgtctgaggaggagagcggcggtgacggcgacgatgaaggcgatgacggcgatggaggcgacggcagcggtgatggcgatggtgacggtaagggcaatggcgacggcaacagcggcaagggtgacagcggcagcagcaaggccagtggcaaagtgccacttgcttaa

SEQ ID NO: 11447 - DNA, 606 bp, Zea mays
  Peptide Sequence Number=SeqID_54822
atgcccctgccccggcgcggccagtggcccccggcgtggcctcgcgtgtccccggcgcgcgataacaatcagttggcggagtccaaaggagttgtaggtgaataccctgagcagcagctggtggtgatgagaatgatggttttgattttaactatggtaatgatggctcgttttaaacacaccgcacggaagtcgatcattcctttcttgccttctcgtctcgcggagcgtccgcttcgccgtccggtgactggtcagtctagccatttggagaggctgcgcactgcctgcacgaagagcaggagcgtcggcgatagagtggagcagcagggctcttcttccttgcctcagcaggaggtagagtctgtgaggagctactctcctgtgctccagctggaggcgccccctacaccaccgctgggcgtcccggtcgctggagtagctgctggaggagaccccaatgacggaggtgatgacagtagctcgagccacagcaccgaactgttagaggagcaagagccggagggatgggttgctcgacccatcacttgtgacgccgctcgcgggtgtcacttccacgatgcgctcaacaccttgctacgctag

SEQ ID NO: 11448 - DNA, 96 bp, Zea mays
  Peptide Sequence Number=SeqID_54823
atggccatgatgggttcaacatcggaaaagatgtacctctaccaggcatctgaggcatctaaggctgacgtgggggctattgctgcagctgcatag

SEQ ID NO: 11449 - DNA, 681 bp, Zea mays
  Peptide Sequence Number=SeqID_54824
atggaaaaagatgcggcggcgcgggctctacacggcgatgcaggctctacatggcggcggtacgagctctacgcggcagtgtcatgtctacgcctgctgcgtcttcccaggatgtgggcgtgtaacaaccggctatatactctgtacttggccagttggcaaactacgaagagaataatccacagaaacagaaccgtaacaaactcacctcgggttgttgcgttccgctattcctccgacgtgctcacgtcccgacggtggcgtgccgacggccacaggtcgtctgagttggtatcagaggagtggtcctcggaggtttccacgacggcgccgtccaccaaaccatctgtgcagacgcgtctgctgctggagacgatggaggtcgtggagcagaagagcgaggagtgctgggaccagatgatgaagattctagagcgcttgggcgacaaggtggaggcgatggagaccgggcagcaacgtcttcaacgtcaagtagaggcgatggaggcgggtcagcaacgtcttcatcaccaagttgaggctgctgcaacatctgcgaggaaggcagaagaggaacgtgtggcggaactgcccgaattattccaacttaagtgcctaagccccgccttagaggctagaccacacttaaatgagaataactcgtcaattcctcggatctag

SEQ ID NO: 11450 - DNA, 339 bp, Zea mays
  Peptide Sequence Number=SeqID_54825
atgctcgccgtcgtcgtgagtcgggtgaatgccagggtgcttcgtgggatcaggctggtggtgctggttggcgtcctgtgcgggggcggcgaccaagagaccgatgatttctcgtcgaagggcggggtggcaccgtgggctgccatgtgctgtgggtcgactcatccccggccgtggacgaagtatgtagggcgcgttgaatctgggcttggtgcatcgggggatggtgttgatgttgtcgccagcaatggtgcgccgtcgcgtgaagccgtgcgatgtgggcaggctcggccatggcctccgccgtgtggcatggtagcgccctcggggttggcgtag

SEQ ID NO: 11451 - DNA, 585 bp, Zea mays
  Peptide Sequence Number=SeqID_54826
atgtcgtcgtgcacaaggagaactgcgcgcaagcatactggcccaattggtgtgccatgtcatcaactggccccaagacacgaggatagcagtagtgggagtaatgatccgatcggggatcttgaagcgcaagtgaatcggcttcaaacagaactccgacgcaggactgacatatgggtcgcagatggcgacagaatcaatgaattaagaagtgacgtccgccgcctgcgagatcagctcgcggaccgagatttagcgctcgactgggtagttcaatctcgttcgcttgcctgggccaaggaggcaaaagctcaagctcgagtagaagagctcagctcggccattgatgacctgcaggcttattgcaatactctacatgaagaagttcatgtactgtattcgcaattgcaccctagtgaacctgcggatcctgtcgggacggaagccggaccttctcatgtagcaggagaagcttttggtggcgagttggaccttttcagaccccctccctctatgaggttggtcgatgagtggtctcccacgcccgacgacgaggctgccaggagcaacaggaagcaggagtag

SEQ ID NO: 11452 - DNA, 114 bp, Zea mays
  Peptide Sequence Number=SeqID_54827
atggagttgtacggctataattcaccggactgtccgtggtgcaccggactgtccggaggtgatcctggcaacatggaggacttcgaggagttccaggattatgacgagttttag

SEQ ID NO: 11453 - DNA, 413 bp, Zea mays
  Peptide Sequence Number=SeqID_54828
atggggctggggaaagctggactggccggtctacggcggcagtggctcgggtggccgcggacacgccgcgcacgggcaaacgacggtgaactggactccggtgaggcttgagcgtgcgcggaagagtgtaaccgacgcttgggagggctttataggcgcgggcgcgggacaaggcgccggctggccgttggcgcgacgtggggcacgcggggcgtgcgcgggcgtgctctggcaagctcagggcgcgtcgaacacgtggagctttcaatctgcccgtgttccacagctcacccaagtcgcaaacgtcgccaaatcgggtgtgtcacactgcccacctcgcgacaaaaaccatgccaaggcatgtcaaacgtccaagtctcgggctcagctttttccagtgggtgccttgggtg

SEQ ID NO: 11454 - DNA, 303 bp, Zea mays
  Peptide Sequence Number=SeqID_54829
gcgactatcaccatccaaccctatgagacgagtgtacacaccccagtgaagctccccgagcgaggaatcgaagcccgcttcgccggagaagccagtccacggtcgccggagttcacaaccccgccggagtgcgtggaccggatcgccgtggtttggccggtacactcgccaccgacgagaacacccgcctgcgcacgtggaccgggcgattccggccatccccgccgtcaagccgcaccacgctgtgaccgccagagcctccccgagccaaccctgcccttcgccagacctatctcgccgccg

SEQ ID NO: 11455 - DNA, 312 bp, Zea mays
  Peptide Sequence Number=SeqID_54830
atggcgggtgccgccgccactgcccactgcacactcagccgtccgcccagccctatctcttgcacgcaccgcatcttcttcataccctccccatcttcctctagcgccagccaccagggagccttgaccagcctgaacgactggcacacagcacagggaacaacacgccgtgcacgcacgccccgcatgaggggaaagaaccgattcagaccctttttgtcttctttaatttatgacaccacaacaatcggtcctgaccagattgaagctttgtatcagtatgccaaatttcagtttgagtgtggtacttga

SEQ ID NO: 11456 - DNA, 1398 bp, Zea mays
  Peptide Sequence Number=SeqID_54831
atggggggcggtggcggtggcggcaactcgcgggagcttgaccagacgccgacatgggcggtggcgtcggtgtgcggcgtgatcgtgctcatctccatcctgctggagaaggggctccaccacgtgggcgagttcttctcccaccgcaagaagaaggccatggtggaggccctggagaaggtgaaggcggagctcatggtgctgggcttcatctcgctcctcctcgtgttcggccagaactacatcatcaaggtctgcatcagcaaccacgccgccaacaccatgctcccctgcaagctcgaggccgccgccgtcgagggcaaggacggccacggcaaggaggccgccgccgtggtcgctggcaagaagaaggtcgccgtcgccgtccctggaaagaagaagaagaaggccgccgccgccgccgaccatcttggcggtgtggtggactggccgccgccctactacgcgcacaacgccaggatgctggcggaggcgagcatggcgaccaagtgccccgaggggaaagtgccgctcatctccatcaacgccctgcaccagctgcacatcttcatcttcttcctcgccgtcttccacgtctcctacagcgcaatcaccatggcgctcggcagggccaagagcaacttcttccggcagttcttcaggtccgtgaggcaggcagactactgcgcgctgcgccacagctttgtcaacgtccatctggcccctggcagcaagtttgatttccagaagtacatcaagcggtctctggaggatgacttcaaggtgatcgtggggatcagtcctcctctgtgggcttctgctctcatcttcctcttcctcaacgtcaatggatggcacaccatgctctggatctccatcatgccggtggtgatcatcctgtcggtggggacgaagctgcagggcatcatctgccgcatggcgatcgacatcacggagcgccacgccgtcatccagggcatcccgatggtgcaagtcagcgactcctacttctggttcgcacgccccaccttcgtgctcttcctcatccacttcaccctcttccagaatggcttccagatcatctacttcctctggattctgtatgagtacggcatggactcgtgcttcaacgactccgaagagttcgtctttgcacgactctgccttggcgtggttgtccaggtgctgtgcagctacgtgacgctcccgctgtacgcgctcgtctcccaaatgggctccaccatgaagcagtccatcttcgacgagcagacctccaaggcgctcaagaactggcgcgccggcgccaagaagaaggctcccaccggcggctccaagcacggcggtggtggctcccccaccgccggcggcagccccaccaaggccgacggcgacgcgtag

SEQ ID NO: 11457 - DNA, 300 bp, Zea mays
  Peptide Sequence Number=SeqID_54832
atggcgcaaagagtcgtattcttcgcagcagacctagatctcgcctcccgggagggaccccgtcggagaggagagatcctaggaacgttagctaaaaaatcccgcaagaaccataacatgggcgaggacaattttagcgttcaacataccgtgataccgtttagcgtgccggatatgggtagctactgtaacaccccaggtgttaccatggctagagcccaccttgatactatggactatgatcacatgtggaagaacttaaggagcaaaagtataaggactttggaaactaggttttaa

SEQ ID NO: 11458 - DNA, 159 bp, Zea mays
  Peptide Sequence Number=SeqID_54833
atggtacttgatcagagatactttggtacaggtggctatgagatcgatgattctggttatgactatggtgctggttgtcagcattgcaaccactgctcaggcgaagatgaagctgtggaaggagacttccaggagttccaagactacgacgagttctag

SEQ ID NO: 11459 - DNA, 3105 bp, Zea mays
  Peptide Sequence Number=SeqID_54834
atggccgagattcgcaagtacgccatgtccaaccagcccccagatattcctcagatactactggaagctcagagtaggtggctgcggcccactgaaatctgccaaatattgtcaaactacaagaagttttccattgcgccagagccaccaaacagacctcaaagtggttcgctgtttctgtttgaccggaaaatattgagatacttccggaaggatggacacaactggagaaagaaaaaggacggaaagacagttaaagaagcacatgagaagctcaaagttggcagtgttgatgtacttcattgctattatgcccatggtgaagagaatgagaacttccaaagacgaacatattggctgcttgaagagggtttcatgaatattgttcttgttcactaccttgaaatcaagggtgccaaacaaagtttcaatcatgctaaagaagctgaagagactgcaggattatctaatgccgatagtcctgcatgctcaaactctttcgctagtcagagccaggtagcctcccgatctatggatgctgaaagcccaattagtggacagatttcggaatatgaagatgctgaaacagataattctcgagcaagctccagataccaccctttcactgagatgcagcagcctgtggatgctgcaggttatcttggtgaaatgcaacctacgggagctaattttaccagtcattttgccactcgcaatgacatagctagtgtgttcaatgatactggctctgagttaggaggtggtcccaaaacttcaattgattcagtactgttgggtgaaccatttccagaatatccaggcggcttcatggagtcgacactctattcttctgttgcaacattgggtaacagtctggaagatggtttgcagacatttatgtctgaggctctctacaccaacaatctcactcaaaaggaagttgatgcacttggtgcagcaggcataacatcctcgaagtatcttaagaatgatgccgtagggcattggagtttacctatttccatgagctggtatgatgtaaccctttattttcagacagagaatgatggttatacagatcaaagtgtcaggtatccacttttaaagcagtcatcatcagacctctttaagatggagccagatggtttgaaaaaattcgacagcttttcaaggtggatgagcaatgagcttccagaggttgttgatttggatatcaagtccagctctgatgctttctggagtactactgaaaccgtgaatgttgctgatggatctagtatacctattaatgagccattggatgtatttgtagtcagcccctcactttcccaagaccagctcttcagtattattgatgtatctccaagctgggcatacaatggcacaaaaaccaaggtcttaattactggtacattcttggcaaaaaaagaagatgtggaaaattgcagctggtcttgtatgtttggagactctgaagtctctgctgaagttttagtggatggctccctgcgttgctatacaccagtacaccattctggacgagtcccattttatgtgacatgttcaaatagagtagcttgtagtgaagtgcgagaatttgagttccgtgattctgagacccattatatggatatctcagataagcatactacaggcataaatgaaatgcatttacgtatccgccttgataagttactttccctggaaccagaagactatgaaaagtatgtcttgagtaatggaaataagtctgagctgatcaacactatcagttcattaatgcttgacaataatttgtctaatctggcattaccatctgatgagaaggaattgtgcactgtacaggatcagaatcttgagaaacaggtgaaagaaaagctatattactggcttatccataagatacatgatgatggaaaaggtccaaatgtcctaggcaaggaaggacaaggtgccattcatttagtagccgcacttggttatgattgggctatcaaaccaatagttgcggcaggagtaaatataaacttcagggatattcgtggatggactgcgcttcactgggctgcatgttgtggaagggagcggacagttggtgccctgatagcaagcggagctgcatctggtgctttaacagatccaacgcagcagtatccatctggaagaactcctgctgatttagcatcagaaaatggtcacaaaggcattgctggttttcttgcagagtctgctttgacaagtcacctctcagctcttacattaaaagagtcgccaagtggcaatgtggaagaaatatgtggattaacagcagctgaaggttttgcagcatcaagttcttcccagcttgcttgtgttaattctcaggaagagtccttaaaagattcacttggtgcagttcgtaaatcaactcaagcagcagccagaatatttcaagcttttagggtggaatcattccacagaaagaaggttattgaatatggagatgatgattgtggattgtctgatgaacgcacactttcacttgtttcccttagaaacccgaaatctggacacggtgattcacattctgctgctgttcgtattcaaaacaagttcagaggatggaaaggaagaaaagagtttatgcttatccggcagaaaattgtgaagatacaggcccatgtacgtggacatcaggtaaggaaaaactatcggaaggtagtctggtctgttggcatcgtggagaaagtcatactgaggtggaggagaaagggaaggggtctgcgaggtttccaacctgagaaacaacttgaaggtccatcatggcagatccaacctgcaaaggctgaggctgaggatgaatatgacttcttgaaggatggcaggaaacaggctacaggcaggttggatagagcactggctcgtgtgcgttccatgaatcagtatcctgaagcaagagaccagtaccgcaggctgcaagcctgtgttaacagcctacgagagtcccaggcgatgcaggacaggatgctggctgattcagctggcaccgatgggggtgatttcatgactgaattggaggagctatgccgggatgatggcgatgccccgatgtcgactatttcttga

SEQ ID NO: 11460 - DNA, 522 bp, Zea mays
  Peptide Sequence Number=SeqID_54835
atggaggcgctcccggctgatgaccaaaggccctttgaagacctcgtaatgcgcgatgagaaggagccgcaaccactaggcacgcgacaggtactggacgcgaccggaccgtccgagcatcatctcagacagtccggttataccgcggaccgtccggcgtatttcgccggaccgtccgaccagatgcaggcccacacacaaaacactcaggtcgcaccgtacatggccggaccatcagggtacaaccctgaacacttcggccccatcacggatcgtccggtgcatcacgctggaccgtccggatatgttgcggaccgtccgccatcttacgtcggaccgtccggatatggcatgaaccggccgacgtattacgctggaccatccgactctacacgagtccatgcgcagactacccaagtcacgccatatatggccgatccatccgggtacagccctggaccattcggcccgatcgcgaaccgtccagttctttacgacagacggtctgtgaaagggaattag

SEQ ID NO: 11461 - DNA, 747 bp, Zea mays
  Peptide Sequence Number=SeqID_54836
atggtgacctccagcttgatggtgggggaaagcgagccgggctgcggcctctccccctccctcagcctcaaggattttcatcaccaaggcagaggaggggacgtgcccggctttcggacgcgagtggcttcggagccgctcgcggcgctggcgtctgccacggcagctggaagaggttcttccaccggcgcgatagccaaggcaggccacggaccgacctccaactctacgaccttctgcccgtccttgccttacgagttttggcatgggcgggggcctcctggcaacagcatccgccctgaggacagtgctgccgctgttcggccccccggagcagaagtcgtcgtcgtcgccgctgctggagcaggtgacggcgcgccgttcgtcggtcttccgttgctccgcaggccttcccccatggagtggggttgttcatacctgcggagggggaaccggagttccgtttgtaatggcactttgaatgccagtgtttttgttcattgtggctgtcgaggcctgaacatccgaggcctcggatcgggctggcgcccttggaagatggttggccgaggccccaggggtaaccggccgagccgcctgctcgggccggattcccggagaagtccctggaccgcgtcaccgtccgaggctgggtcggacctcgctgaaggtgtcgtcgatgccgagggtgctacagcccccttccagcgtgaagacccgagcctgcaggatcagattgtcttgtag

SEQ ID NO: 11462 - DNA, 906 bp, Zea mays
  Peptide Sequence Number=SeqID_54837
atggcccaccggacagtccggtgcacaccggacagtccggtgccccctgccacgtcatcactgccgttggattcgaccgttgaagcttctgacttgtgggcccgcctgggtgtccggtgcacaccggacatctactgttccttgtccggtgtgccggagtgggcgcgcctgccatctgcgcgcgcagagcgcgcattaaatgcgcggcagagagccgttggcgcggagaagaccgttgctccggagtcgcaccggacagtccggtgcacaccggacagtccggtgaattttagcggactaaccgttggagtttcccgaagcagaaacgacgctcgtcttcatctcagacgcgaggtcaacgcccgacgtgtcccccgttggggcgccggtgtcgtcgactcgctcgacagccaacgaggtgccgcctcctgcttggccatggctgccccgccttctcctcctgcggcgaagaaggtgacgggacaggcctggatgctgctcttccgtcacgcggggaagacatcgtcgattccgccgccggcgggcgggctgacggccgccattgtcgttgtcgcgcggcggaggaaggagtaccatgtcgtagctgtcatcaagggacatgaactcaagactcccgaaacggagcatcgtcccgggctggagaggttgctggagactacccatctggagcctgacgggaagttattcgtcaacacgcagcaggcccctacctggcgcgccaactgtcgacgtttcgaccccggggggtccctggaccgacgagtaaattgtcgctgcgtgtcccagcccagatgggttagcgcgagacggaacacaagggggaacaaagaaaggggaaccgcggctcgtgttgtcctgcgcccaaggcggatgcgcttgcagtag

SEQ ID NO: 11463 - DNA, 2673 bp, Zea mays
  Peptide Sequence Number=SeqID_54838
atgccgtcttcctcctcgtctgctgcgaccacgccgacgatccaggcgtcttctgaagatctctcgtgcactgtggcggcggcggaattacgaccgggtgatacagtggaattcggtgtttcgcggatgtcgttggtccgagtgcaagatatgcaacggttggggtattttggcggcggggttggtcgggtcccgggggcggaggaggtccctgagcccgagggcgagttggttgtttttgaggcatttttcatcgccgtccttcgcctgcctgcacatcgttttgtgtcggaggttctgcagaagttcgaagtccaggctgaagtcgaagatcacccagggctccctgccgccattatgtgttctcattattatgtggcgtacccgccgtttgaagtggcggaggatgatgaaaatgagagggcccttcggattgctgcccgcatgagtagtgggcgcgatctggttgagcaattcataggatatggggtgtggcccttggcgcatggatgggtgctgggcgaagtgtgccctcgcaagataccctccctgggtggacggaagggtcttcgagttgaattgtttgccgtatggtggttatcccggggaggacgtcgccgaccgccgcgggaaaaaccggcggctgtgactgaggacgaccccgcgccggaggctgccccatccactaaaaagaggaagctaggtactgtggtgggagaactgggggtctccgatagctttgctatggagttgatggggacatgcgcggcccccaggggaaggatgtcttcgcccgagctccgggagtcttcggcgcggatgtgggaggttaccgggggtcgatggcccaagcacgttcctatcccccatgcggctggcgaagacttttttacgtctcgcatggctcgtgacttgagagtgtttccttacagacagaatattgctgctattgtgtcggcagtgatgaacaaggatcgccaggatgctgcgcaaaagcgccaggcggtcatcaggctccccgaagctaggccgaagagggtgcgggggactgtgaagggtaccgtccccgtcggtagccagccgacgctggctgcgaagtcggccgcccctgggtccagcaaggtgccggagagcgcgaaggcggtcggcgccggcggaaccaagtctgccccagacagagctgcgaaggtccgggaactgccttcgctggggaaacgcgttgccgactttggcacaaatattagcgtggacgactatctcgttggatcgggcgaggggcaacttgttgttgtcccgcctgcggtggcaaccacgacgtctaccgcggtgcttggggtgaagggtagcgctggcggcgagatttcagcggccactgccgtcaaggacgaagcgggcgctatgtcccaccggctgagggaggcgtcgcagcagctgtcgcagcagctgagtcaagcggccgacttcgccgaccgcgtggtgtcgggtgcccttactgatgatgtgtctgccgaagtcgagagacttcgggcgcagcacgctgacgccgtccgggagaagtcggctgcggatagcaagagccgcaagctggcggagaaggtggccgccctggagggcgagaggacggacctccagcgccagctggtggaggagaggagggaggccaaccaggccatcgccaaggcgcaggcggcgcaggcggaggccaaattggcgtgggtggaggggagtctcgccagccagcgtgccgaggaatgggaggtgcggttcaacgctctgcaggcccgcatggagagggtcgaggcctctacgtgctcggaagttgagcggacacgcaaacagctcgtggactcataccgtgagctgggtgcgcggactgctgacttcgaggtgcccgaccgagaggcgggccttcgcttcctcgagtggctgcaagaggaattgttggcgctcccgaccatcatggagggattcatgtcctttgcctccctcgtcacctgcaaaggggctatgaacgcactgtcccgcgaggggtgcagtcactatgagggcttcgaccgatccgatgaagactttgggcgcgagatttttaaggttgaagaccctatggtgaaggacttcacgggggcccttttcgaccggatgtggggcccctatggtcgggaggtggttagggagcggtctgaccgggcgagggatcagatggcacgtgccgaggacgtggaggacttcagacctctgaacagcgcacagcccgaagctgaggtcaacccggtggtggctgaggctgaggttcaggattttgggcctgcgcacgcaaccgctactgctaattttgtggcggcttcgaccgtggtcgctggaaatgaatcgaatgagtctacgtctaagttttctgagtttgatgactctgggagttcggttatgtggatggaagagtcttcggatgaggacttggattactttgcggccttggatgtggctgcggcggaggcttctccgtgtgttacggatgctgaagttttgcctggtccgagtgatgggcgtagacggcgaagggcggtggcgaagcgtagaaattctgaaattcagaccttgagccaaagatcagggatgttcaccttgatccctaactcgaatcctaatggccccattgacaaaattgtgtctaactaa

SEQ ID NO: 11464 - DNA, 225 bp, Zea mays
  Peptide Sequence Number=SeqID_54839
atgggacgacctcgtcacaggccttcatccggcgacgcgtgggacgaaggcgaggctggcgaaggcatcgagggaagggtggcgtctttgccttcgccccatcatttgccctccgagggaccagttcgactaagtcatctggtgccgaaggcgtcgctagatggtggagacgctgccctcgctcgaagtggttccgcgggggtttttgacatgaccgttgattga

SEQ ID NO: 11465 - DNA, 879 bp, Zea mays
  Peptide Sequence Number=SeqID_54840
aggattgggacgcttcaggtggtatcagagctgttaggttggccgcaggacatggaggttcgctgccaaaccagcttttgccagaatgaagatggtttccccaagttgctgagagcatgcacagttcgcctcggaatcaggagccagccggagtatgatggtcgtgaattcgtcgagcatggcacagagaaagagaccgtcccgcttggatggccaggatgcgtgcattggaaggggcagcagctgcttgaggacgaccccacagtcatgtacctcaccgcatacctgctcaccctggatgcgcagtatgatttcttggctcggcaccactgtcagatgattgcccgagcagaagatgcagagaagtgcaaccatcaactccatgtggatctcaccacagctcaaccccgtgcaactgccttggaaagtcgtgaagtcattgttgtggaagccctgaagcaagccaaggatgagcacgtccagaagttgatggaggccgacttgatcacccataaccaacgtagagccctacggatccaagagcccgctccatccaaccctgttcaacccatcaaagctgagatccccagattcttgaaggctatggataagcaagagcaccctgaatcctcccaagatcccccgccagagttgtttgagcccctcaccatgaagaagattccagcaccatcccttgaggacaagggaagaagctgcaagcaccctgccagcaccgccgccctcagaggagctacaagagagatgtctcagattgaagttgtgtgcaagccttgccagaagagagatgccagatctgagttagttatgcctagtcctctgcatgcattgggtagtgaagtttttcttcactttggctag

SEQ ID NO: 11466 - DNA, 477 bp, Zea mays
  Peptide Sequence Number=SeqID_54841
atgtggagacttggagacgtgcgctatccgggcgagtcgtcgggctcgcgcgggggtgaaaaatccgagcgcgctgtactcccgtcgctggcgacttcgatccatctcggcgagggggcctcgcggcgcggctcgtcggcggagccgggcaagctgggctcgaagcggccatgctcgagcgggtccggcggcggaccgctctcggtggttggaggcaaggaggtggcccgcgaggagacaaagatccaagggtccggtgcaaccgtcggtgttcgtcgccgtcgaaccgccatcgcgaagaagctgagaagatccacggcgccgacgaaggaaggtgcgcagaaacgcaagcgcatctcgtcgccgccatcttcatcgtcttccactagctccggtgctccacatccgaagagaaaaaggcttcattcaccagttggtatagttttgattattgctattgacagtgagaaaaattga

SEQ ID NO: 11467 - DNA, 1671 bp, Zea mays
  Peptide Sequence Number=SeqID_54842
atggctatggaggtccgccgcagggttccgccgccgcacgggagcgccccacggcgccagcaggcgaccggcggcgaggggcagcgggtgcgtgtgcaggcgggggacgcgctgccgctgccgatccggcacacgaacctcatcttctcggcgctgttcgccgcgtcgctggtgtacctgatgcggcggtggcgggagaagatccgctcctccacgccgctccacgtggtctccctcgccgagatcttcgccatctgcggcctcgtggcgtcgctcatctacctcctcagcttcttcgggatcgccttcgtgcagtccgtcgtctccaacagcgacgacgaggaggacttcatcatcgactcccgccacggacaggcgcgggcgccgccgccgcccgcgccggcggccccgtgtgcgctgctggggagccccgccgccgcgccggagaaaatgccggaggaggacgaggagatcgtggccgcggtcgtggcagggaagatcccgtcctacgtgctggagactaggctgggagattgccgccgggccgccgggatcaggcgggaggcgctgcgcaggatcaccgggagggagatggacgggctcccgctcgatgggttcgactacgcgtccatcctcggccagtgctgcgagctgccggtggggttcgtgcagcttcccgtgggcgtcgccggcccgctccttctcgacggccgccggctctacgtaccaatggccaccaccgagggctgcctcgtcgccagcaccaaccgcggatgcaaggcaattgccgagtccggtggggcctccagcgtcgtgctcaaggacgggatgacgcgagccccggccgtccggttcccatctgcacgccgcgccgccgagctcaaggcctttttggaggacccagcgaactttgacaccctggctatggtgtttaacaggtcgagcagatttggaaggctgcagggagtgaagtgtgcgattgcagggaggaacctttacatgaggttcagctgcagcacaggggatgccatggggatgaacatggtctccaaaggtaacttctgttctgacaagaagtcagctgctgtgaactggatcgatggccgtgggaagtcggtggtttgcgaggcggtaatcaaggaagaagttgtgaaaaaggttctcaagacaaacgtacaggctctcgtagaattgaacgtgatcaagaaccttgccggttcagctgttgctggagctcttgggggtttcaatgcccatgcaagtaacattgtggcagccatcttcattgctactggtcaggaccctgcacagaacgtggagagttcccagtgcatcaccatgttggaagctataaatgatggcaaagatctccacatctctgttactatgccatctattgaggttggcacagttggtggaggcacgcagctggcctcacaatctgcctgcttggacctgcttggcgtcaaaggtgccaacagggaatctccggggtccaacgcgaggctcttggccacggtggttgcgggtgcggtcctagctggggagctgtcccttatctctgcgcaggccgctggccatctggtcaagagccacatgaaatacaacagatccagcaaggatatgtccaagacccttgcagaggaaacagacaaacccaagaaatgctga

SEQ ID NO: 11468 - DNA, 343 bp, Zea mays
  Peptide Sequence Number=SeqID_54843
gttttatacaccgctgccaagtccgaccgggcagggaaacccgcgatttggggatgaacttgtcgaggttgtttgcaacggaccgaagctgggggaggattctgcggacggatcgaagattgttctgccaagctcgcgctccgttggagatggacgaactgcagagggggttcacaaggaggtggcacacccgcgagccccggctgaggacgcaggaggaccgatccatcgcctgatcacaacagaatccgtagctgacgcgcggatcaacaaccatgcgagggcgtcggacactgaagcggagttcagccgcggatgcgagagtgaggaccggtctgactga

SEQ ID NO: 11469 - DNA, 768 bp, Zea mays
  Peptide Sequence Number=SeqID_54844
atgaaactcacaaagaaaacccgttggggcgtaaccctcttagcgacgcgcccatatcggaacccgggtatggtgttaaatgagcaagggccgggtcgtcacccctcaagtgacgcgctgtctcttgatctggagccggtgataagtgagcaaggatcgggtcgtcgcatccttagtggcgcgctacatcggcgcccgggtgtagtgaaaaatgagcaagggtctttgcatcttcctcggcgggtgcgaagggtaaggaagctagtcgagccaactagggtccgtgtaggcagttggaacgtaggttccttaacaggtaagttacgagaaatagttgacgttgcggtgaggagacgggtaaatattttatgcgttcaagagaccaagtggaagggacagaaggcgaaggaagtggaaggtacaggtttcaagttgtggtacacggggactgcaacaaacaagaatggagtaggcgtcttgatcgacaagagcctcaaagatggggtagtagatgttaagagggtaggagatagaatcatcctagtcaagctggtcattggagacttggttctcaatgttatcagcgcgtatgctcctcaagtaggccttaatgagaactcaaagagagagttctgggaaggcctggaggacatgtttagtagtgtcccagtaggagcgcagttggtcctaggaggagatacctacagccaccagggtacatctcagccagtttcgagggtgtacatggaggcagctccagaaaagtag

SEQ ID NO: 11470 - DNA, 480 bp, Zea mays
  Peptide Sequence Number=SeqID_54845
atggcgaaactgtctggtggtttcaataccttgaatcgagacggcaggggccccaatcacacaccgcagcggctccagacgcgcccaggagatctcttccgaccgcggatgggagttgagagacggcaatggttcaggttttatacaccgctgccaagtccgaccgggcagggattcccgcgatttggggatgaacttgtcgaggttgtttgcaacggaccgaagctgggggaggattctgcggacggatcgaagattgttccgccaagctcgcgctccgttggagatggacgaactgcagagggggttcacaaggaggtggcacacccgcgagccccggctgaggacgcaggaggaccgatccatcgcctgatcacaacagaatccgtagctgacgcgcggatcaacaaccatgcgagggcgtcggacactgaagcggagttcagccgcggatgcgagagtgaggaccggtctgactga

SEQ ID NO: 11471 - DNA, 195 bp, Zea mays
  Peptide Sequence Number=SeqID_54846
atgcataggagtccaatactcaagaacaaaagaagcccgaagaaatcagcgaagaaatccaagaagcgggctgtcagccagcgcctggtggtgcaccggacattggtgtccgacggcaacggtcggatccaacggtcgactgctacaggcgccaacggtcggctgacgtggcgtgcaccggacactgcacagtag

SEQ ID NO: 11472 - DNA, 1095 bp, Zea mays
  Peptide Sequence Number=SeqID_54847
atggagcttgggaggcgccatcattgcctatctggcggagctggtcagatgagacaccggtcttgttctctgcggcccgagtcggctcggggtagagtggtgatggcgctccctgctgacgtggcgggcctgcgcccgaggccgggcgacgtgggggctcctccgaagctggggtcgaatctgccttccgttgccgaagccgagtccgagcccctgggtcgggcgaggcggaagtcgttcggcagaggccagggcggagtccgagccctggggtcgggcgaggcggagttcgtcgtcttccggggccgagcccgagtccgagccctggggtcgggcggagcggagttcgccgtcttccgggtcttagcccgagtccgagccctggggtcgggcggagcggagttcgccgtcttccgggtcttagcccgagtccgagccctggggtcgggcggagcggagttcgccgtcttccgggtcttagcccgagtccgagccctggggtcgggcggagcggagttcgctatggcgcccctggcaaggcctgactgcctgtcagactcactctgtcgagtggcaccgcagtcggagtggcgcaggcggcgctgtccttctgtcagaccgctttatgctgatgggggttaccagctgagaattaggcgtcttgaggcccgggtgcacggtcggggcccaagttctcgggctggtatgttgacgctgtcaacggttcggccggagccgggtttgcgagagcagcccccgagcctccgcacagggcgagaggacgatcagggacagactcgactttttgcatacgcccctacgtcgcctttccgcaaggaggaggggaggagtgcgccatgttaccctcgatgggcaccgaacatggtgtctccggtgagctgcaagcgggtaatccgagtggacgtccgtgccccgttcgttgggggtcggctaggggcccagaggcacgcccaaaagtacctgcgggtgatctgccggacccggtcccctggcgacggggtccgagggctcgatgcctccctccgatgggattccgttacaagatcgctcccgctggtctcggaaatgtcctag

SEQ ID NO: 11473 - DNA, 234 bp, Zea mays
  Peptide Sequence Number=SeqID_54848
atggctgaaaggtaccaactcccacggagttgtgttcctccaacgaggaggcggaaagacggtgggtaccctgatgaagctgaggtgcccgatctttcggcgagtagagataattccgatttggcggaagatgacccttgcgatccgactacgacgagcaagcccgaggcgccaatgcaatcgctgaaccaactccctgtggttaccgaccttgctgatgcgagatcggcctga

SEQ ID NO: 11474 - DNA, 822 bp, Zea mays
  Peptide Sequence Number=SeqID_54849
atggcgcgcgaggaggagggcccggcggcggcgaagctcccgccgtcgtgcgcggacgaggaggatccggccccgaagcacccgccgaggctgaggcgcgcccggcgccgcgacggcgcgtccgcgcggctgctccctgcgcccatctcgctcgccggctcccgctttcgagcttttccccccacttcttcgccgagtgggagaggagacgacgaatctcagtcggctagatccgacggtgccaacaaaattcatcggcagtccggcacggcgcagaagctctcctcgctcgcgccgccacacagcccacaaccttctatggattcgtcctcggccaccgccgctaccgttgcgccggtggtgacctcggccccgccgctcgaagactgcctccgcctcctccgcggcgagcgcgacgagcagaagctggcgggcctgctagtcgccgccaacgtctgccgcgcgggcgacgccgacgccgtcgccaacgtctaccgcgccgtcgggccccgcttcctccgacgcctcctcaacactgggttggggaaagtggagggcgggaaggaggaggagcgagaggcatacatgcggctcgccgtcaccgtgctcgcagggctcgcgcgcgtcccggaggttgcggccgacgagggtgtcgtttccaccgtgcccctagtcgccgaggttgtcgccaaatcgactgatccagcaatcactgaagaatgctttgaacttctgtcacttattgcaatagcgtctgaagatggggcatatgagttttgtgagcccggtcttagctggcatatattaaatttgtgcatctag

SEQ ID NO: 11475 - DNA, 234 bp, Zea mays
  Peptide Sequence Number=SeqID_54850
atgcccgatttacggaaggaaaaaaaaacgctcgataaactcaccgatcaacctggagttctgataccaattgatgaagctgaggtgcccgatctttcggcgagtagagataattccgatttggcggaagatgacccttgcgatccgactacgacgagcaagcccgaggcgccaatgcaatcgctgaaccaactccctgtggttaccgaccttgctgatgcgagatcggcctga

SEQ ID NO: 11476 - DNA, 1722 bp, Zea mays
  Peptide Sequence Number=SeqID_54851
atgccggagagcgccggtagctccggcaccgctgggggtcctggactcggccgtggattagtctctgacgaggtacaatcacgacagtcagggcgacaagtgagtgccctgaattttcaggcttctctagctgctaaggatctccaggtttccagtgagtcaaatccaaggctgcattcgtcttcaagtaccataagccatcatctcagattcaatcacctcaattaccatgaaaacaaggaagatggcctggggtctgaaaacgctgaaacaagtggtcttcaaagctcatctaggaaacctgtcatggtaaggggaagtctcattaatgaagctgttaatggtgacatatcaggagaaggaataagttctataggatcagagctggaaaatgttcctagcacagtctccactaatgaaattggtggctcaacttctgaatctggtttgggcccctcatcgatgacatctgaaaggatcatgtctgactcagaagtagagatatctccgcaagggacctcatccacaactgtcatgacaagtgaaagatcagatgcatctcaatctagcttaacatctgtgttttctaactcttcaactgcatcatctgtgatcgtggaaccaatgccagatccaatccctacaacggcagatgtccccatattcagtgggccacatggtgaagctggagggagtatattacatgacgacatgatgagcattttctcaaatgacggtgtaggacgctctatagattcaagcagcagtgaaacaaggaggagtcacagaaggatcctgtgggatgcattttccaggcgtggctcaagaggttatccagaatctgatgctgatgaaatgggattttttagtacatggctagaccttggtgatgatatttttgaagagttgggggaatcaagatattttcatcgcaggcgacatggttcaatcagagtaagccagtattcaagatcccggattagggagcatcgccgtgctgtttttgatagtggtaatgaacaaaacactgctgcatgtcctttggggattcatcaaattggccgatgcacctgtaattctttctttattgctgaagaatctagcgcccgagcaagtatatcaagaattgtcatgttaactgaggcgctatttgaggtgttggatgaaattcaccgtcaacctgcatcactttcactttccatggtctctgttcaggctcctgaatctgtagttgattcgttgccatgtaagagctacaaaaagcttgagacaccccaatgcagtgatgatatggaacagtgccatatctgcctaaccgaatatgaggacggagaccagataagaacccttccgtgcaagcacgagttccacctgcaatgcgttgacaagtggctgaaagaaatacacaggtatctatccatcctggttcggttagatctgccatgcatcctgaatactgtcaagcaaggcacaggaagcgttagggatcccccctcctcacaacgttcctgtcgtcacaatgctgcagggtgtgccctctgtgccgtggagacgtctgcgaagtcgcctcgtgaagaccttggcgctgccatccttccgatgtggcgccggtggatagggcaccaccgccaggcgccagctgttccgtggttgaagctggttcggtcaggcaatggtgatccaacttggacagttgacaccgcaagagcacgtcaactttga

SEQ ID NO: 11477 - DNA, 414 bp, Zea mays
  Peptide Sequence Number=SeqID_54852
atgaacttgagcatgacaagaatcccaggaatcaaacacaccaacttttcttccatgcaagtcattggcatatgggcatttgctcagattaaagaagcaagaaaagcattgagaatagttcatcatgaagacagaagccaaatggttcatacaggaaatggttcatacaacaagccaaagtgcaagtcagcaggatcaggtgatcaactgcacaaaagaatgctggttaggaagctaccagtcagcgctacttcctacttactcaaaaggactctaccagtcagcaggaagctaccagtcagcacaaaagaactaaccagcctcaactcagaacactctaagggtctgtttggttgggctgtggctgtgaaaaaagttgttgtgggctgtgagctgtggaaaaagctgttgtag

SEQ ID NO: 11478 - DNA, 603 bp, Zea mays
  Peptide Sequence Number=SeqID_54853
atgtccgtcaaaaatggaatcctaaaggaacaaagggacatcctgataggaaagggtgacgagccgctggaacacctacgcctccatgatacgactcagaagttcttacaaccccgagggcaaaatggcttaggcgtcagaagggggcaaggcagcaccctcggcttcatcagggggcgttgtagcagagtaggacctggcgccgagcggagagatcggcggaaccacctcttcttcgaagtggcaagcgagcgccgcaccctgcccttcaacgacgtcggcgagccttcggacctttgcctcggcaagatcatcctccctgggcatgttatagccctcgctcacccgctcgaggtctacctagtagtgggacgcgatgacgatcagatctcgtttcactcaggtgtgaacggcactaagggccagcatgcagctccacggggatccacccgaggggatgtcttcagcgccgatggtttgactaaagtccaccgctgccacggacagagcgttgagcgcgacgatcttctcgtcgacagcttgggagagagttggggacttgggataagccccggcgcacctggtagccccttgaagctataa

SEQ ID NO: 11479 - DNA, 168 bp, Zea mays
  Peptide Sequence Number=SeqID_54854
atgagggttgtcagccagcgcctggtggcgcaccggacattggtgtccggcgccaacggtcggctgacgtggcgtgcaccggacatctactgttcagtgtccggtggtgcaccggactgtccggtgcacccaacgacagaaagctgttgctttctgtccaacggctag

SEQ ID NO: 11480 - DNA, 1365 bp, Zea mays
  Peptide Sequence Number=SeqID_54855
atgatcctccgcatccgcagccgcgacggcacggaccgcatctcggtcccagactcggcgtccgccaccgtcgccgacctgcagcgcctcattgagtcacatctcaccgtgcccgtcccgctccagcgtatctccctcgacccggcactcctgctccctaacccatccgccgctgtcccactcctcgccgacccggcggcgccgcttgcctcgctccgcctcgccaacggcgccttcatctacctcgcatacccgcccgacgcgcgctccgcccgcccgacgccgcccaaggtgctttccgccgctggctctttcggcaagaagatgaccatggatgatctcatcgcgcggcagatccgcgtcacacgccaggagaacgcgctctgcgccgccgcctccttcgaccgcgatgccgccaacgcgttccagctttacgtcgccgagtatctcgcgttcgccgtcaagcgggcgggcttcctatacggccgcatcgacgcagagaccaaggaggtcttggtcgacttcatctatgagccgccccagcagggcttcgaggacgtggtccatctcatgagggatcccgacgaggaggcccgcgtcgataccattgccgaggggcttgggatgcgccgggtcggcctcgtgttcacgcaggccgtcgggaggagggccagcaagactggtgagtacactatgtccaaccgggaggttgtgcaggcggcccagctgcaggctgagggcgggaccccggagtgggttactgccatagtcaaattggaggtgggggatgacggcactggggatgtgcacttcgaggccttccagatgagtgaaatttgtgtcaagctcttcaaggatggggtactggaaactgaggttcaggatgctgatgatccccgtctgtcaaagatgcggaaggaggtggtggctggggggaaggatactatgaaggtggataatgacttcttcctcgtgcctgtcaagatctctgatcaccaggtcacaacaatgtatagtccgttgcttttcttggtacttttattgaaaaatggcagtgttttgaggggggtggtagagccgtacaggatcttgtcagttaattatcacaagggtccactctcagtaggctttcctatagagaaccgtggaagtcctgtaggcatgagtgcgttaagaagtcacctggagcggatgaagcatttgacatttgtgaggcggatttcggacttccatttgctccttaagcttgctactttcctagatgcaaagtcagacatgcctactatagctgcatgtgtaaaaactcagagcaggatgcccgaggggtaccagtttctgatcgagtcctttgctagtcagggataa

SEQ ID NO: 11481 - DNA, 273 bp, Zea mays
  Peptide Sequence Number=SeqID_54856
atgaggatcaagctcaaaacaatgatcaagaagatgagccacctcaagaggatgacaataatcaagggggagatgacaatgatcaagacaaggaagatgatcaagaagtacagggtcaaagaccgccacatccaagagtccaccaaggtagaggatgcactaagagactcggattgggtgttggcaatgcaagaggagctcaacaatttcacgaggaatgagggcgacatggcgaactcgaccgtgggcatcacgtcggcgtgggggcactag

SEQ ID NO: 11482 - DNA, 1416 bp, Zea mays
  Peptide Sequence Number=SeqID_54857
atgctgcagctccagccccctgggttcctgcccatcccgcgccggcgcgtcaccgcccgcgggcgtcgcgcccgccctgtcatcgccttcaactcccagtggaagatccccgacgtcgacacagatgcggtgcgggagcgagtgcggtcttggatgtctctggcgcggggcgcgatcgccgacgcggggcgcgcggcgcgggagggagggaggcacaaagaggagcccgagggtgggaagaagaagcagcggaaggaggtgaccgtggaggagcaggcgttcgttgcggtgccagaggtcaccgtggagccgcgggtgccccagggttggctctcgctggacgccgtcgtctccatcgagcagttcgccaggttgaatgggttgacggggagacaggtgcagaggatatttgaatcacttgctccagagcatctgcacaatgacgctcgaagcctggttgagtatagctgcttccgctacttggcaaaagataattctgacttccatccaaacttgaaggccattggactgtcaggtaccaagaaaccaatgaggcttgaccttacaaatcagaattcaagggctgaaaagacgaaagttggaccatttggatccaaactatttgactctgctgtctcagtttcttctggttcaatgtcagatgaatggacattggagtttgttgatttcagtggggagatgagacgagatgtgtggctcgccttcatcagtgaaattatttcagtttatagattcattcgtgaatatggtccaggtggtgatgatccagcaatacataatgtgtatggtgcgtacaaagggaagaaaagagctgttagtagtgcagcgaacagtattgcaaggctccagtctctgcagttcatacggagattatatgaagatccagctaagctagtgcagttctcttacctgtccaacgcaccatttggtgatgttgttcttcagaccctagcagtgaacttttggggtgggcctctgactacaaaagccagatctgcaaatcatagatcaactcagtggcatagatcttcagaggacccatctagcggtcgcacacatgtttacgacatagatggcagcgtgtacttgcgcaagtggatgacgtcccccagctggacatctagccactcagccaatttttggagaaattcttctgtcaagtatggtataatattgagtaaatctttagttgtagctgataaaaaccttgtagaaaaggcaatggttgactgtaaagagaagagcaaagtagttgaaaggacacaagcgacaatagttgctgctacaatcgaaggtattccaagtaacattgacctcttcaaggtaagctacttttctatgagttatttcttccttagtcaccctgagaagtcgaatattgatccactctattaa

SEQ ID NO: 11483 - DNA, 741 bp, Zea mays
  Peptide Sequence Number=SeqID_54858
atggaggccaagaagacggatctccggcgccagctggcggaggagaggagggaggcgaacaaggccatcgctgatgcgcaggctgcgcaggccaaagccaaagtggcgcgggcggagggcagtctcgcccgccaacgcatcgaggagctggaggcgaggttcaacgccctgcgcagccgcgtggacaaggccgagtcctcgacgcgcgcggaggaggagctgctggtgctcttgaccattgtgataggtttcatgtccttcgcttccctcgtcacttgcgagggggccatgaatgctttgtcctgcgaggggtgcaggcattacgaggtcttcgaccaaggagacaaaaactttgaacgtgagatctttaaggtcgaagaccttgtggtgaagcagtcggcgggagcactctttgataggatgtggggtccgcacgggcgagaggcggtccaggatcggtccgaccgagcgatagagcagatggcgcatgccgaagacgtcaaggaccttgttggtctggacggcacgctgcccaaggccgcggaggtcaatccagtgccgtcctcggatgccggtgaaggcacctcggcgacccccgctcctaatgtggccggcgaaggccccgcgccagctcctgcgccgacgagcgaaggcgccctgaaggtggtggccgagccggctgctgagccggcaaccgaggaccctacaaccgtggtcgggcccttgcaggtggctgaataa

SEQ ID NO: 11484 - DNA, 90 bp, Zea mays
  Peptide Sequence Number=SeqID_54859
atggagaatcatggtccgcagcgaagatcaatgtcgattccgagcaagcacaaggacacgaccttcaaggtgcggcttcacggcgaataa

SEQ ID NO: 11485 - DNA, 273 bp, Zea mays
  Peptide Sequence Number=SeqID_54860
atggcgaacacagagggagggttcctcaccggtagtgacgaagtatcgaggtctaaccacggagaatcttggtccgcggcggagatcaatgtcggacagcaatctcaagggtcctggcggctaatctcccgtgctatggtcacgcacccccttctcctagagtccgagcaagcacctaggcacgaccttcaaggcgcagcgactgttgtccagaactgccacgagcgggggtaccttgtgaggaagcataacggggacgagtactacttctag

SEQ ID NO: 11486 - DNA, 1047 bp, Zea mays
  Peptide Sequence Number=SeqID_54861
atggccttggcagttgtgagggccacaatgaaggtgcgaagcatagacctgcgaagcaaagacctagggcggaggttgaagcgccaaagccaagacgcccagtggcacaccgatagcgcgggagccaacggcagcgaggcccaggctagccaagcacaggccgacaagggccaggttgtggccagcaacgtccaggctactggtgctaggccatgtcgggcgaccccacctacggcaggggcggtgtggagaagggtgccggctacagggccccgacgggccgacaagcgctccggcaaggacctaagcaagcacgccaacagggggctgagcggacagagtgggggcggttgtggttccgatgagcgcgccagtgggggcctaggcaagcgcgtccgcaaccacaatagagaggagacgaggcgatgccggcgagttggccagctagggcggccgaggaggcgacgacaatcgcccagcgacgagagagggccatttggacttcttcgttccgccagtatctttaggtttgcctccactctttggttgctccacacacccctaagaccaccttctgaattcaaggctcctgaaccaaggaagaaatttgaagagcaattcgctcaagcaagatgtaaaaataagactccgaaatttgaagagcagtttgctcaaggaagttgtaaaaataagactccttttcgcttcttcagcattccaatgcgtacctctggatctgaaaacagaaaacataagaaacatatcacatttgtagaagtgaatatgacgtgcctaaatgcatccctggtgattgaaactggaccaggtaaggagaaaaaggataatatttccagaaacgaagttaaaacagcagcagcagcaaagcaactattagcaactcggaagcagaggcacactagagatgaaacccatcaagcggcagatgaacccaagagcagcaaggccattagtcaactcccaagcagaggcaggtcagagatgaatccaaacaagaggcaggctatagagagagtacaagtacagtaa

SEQ ID NO: 11487 - DNA, 861 bp, Zea mays
  Peptide Sequence Number=SeqID_54862
atgaagccaggccgaagaggcagcggggggctgcgaaggctactgcccccggcggaggcgtgccgccgctggcggcgaagtcggccgtccctgcatccagcagggcaccagaggctgcggctgccgccggtggttccaagactgcgaaggctgcaccggcgtcccggcagggtgccggaggccgtgaaggcggcccgagggttgccgccgccgggcaagcgtgtcgccgacttcgccaccgacattagcatggaagactatcttgttggatcggacgatggccaacttgtcgttgttccgcctgccgcggcgaccacggcagctgccggacgaggtgggcgctgtgtcccgccggctgaaggagatgaaggaggcactaataagtgccacaagctggcggacaaggtggccacgctggagggggagaagactgacctccgacgccaactggcggaggagaggagggaggccaatgaggccctcgccaaggcgcaggctgcgcaggcggagaccaatttggcgcgggtggagggcggtcttgccagggagcgcgccgagcagttggaggagcagctccgcgccctgcagagccgtgtggagagggccgaagccgcaacgtgcacggaggctgagcggactcgcaaacagcttatggattcataccatgagctgggcgcgcggaccgctgagttcgaagtgccggaccgagagcccggacttcgctgcctggagtgggtgcaggaggagttgcaggcgctccccaccatcgtggaggggtttatgtcttatgcttccctggtcacctgcgagggggcgatgaacgcgctctctctcgaagggtgccggtctcttaatctttga

SEQ ID NO: 11488 - DNA, 321 bp, Zea mays
  Peptide Sequence Number=SeqID_54863
atgaccactggtgcacgtgacccaattgctgcggcggctcacgccctggaggttgcaaaacaatcagattccaaggtcacttacccccgatggcagtgcgacgcttactgcccacggatagaggcgctccacaatgacgaggcactcgcgttggcgtcgctcatcgacgacgaaaagaagcttggcgactgccagttcgacctctggaagcagtactacggggacctcatggtcgtcgccaacgccggcgactctcgggttgttctgggcaccgcatccgacaacggcgctgtcacaccgtccagctcatcatccacctaa

SEQ ID NO: 11489 - DNA, 1608 bp, Zea mays
  Peptide Sequence Number=SeqID_54864
atgcctgccccgcctcctcctccgtcggcggggaaggtgacgggacagacccggatgttgctcttccgccacgtggggaagacgtcgtcgattccgccgccggcgggcgggctgacggccgccattgtcgttgtcgcgcgacggaggaaggagtatcatgtcgtagctgccgtcgagggacatgaactcaaggcttctgaaacggagcaccgtcccgggttggagaggttgctggagactacccatctggagcttgacgggaagctgttcgtcaacacgcagcaggcccctacctggcgcgccaactgtcggcgtttcgaccccggggggtccctagaccgacgacccgaggtcgggcgaggtggtgactcctccgaggtcgaggctgagtccgagccctggggtcgggcgaggcggagaccgtcgtccgaggtcgaggttgagtccgagccctggggtcgggcgaggcggagaccgtcttccggcgtcgaggttgagtccgagccctggggtcaggcgaggcggagaccgtcttccggcgtcgaggttaagtccgagccctggggtcgggcgaggcggagaccgtcttccggcgtcgaggttgagtccgagccctcgggtcgggcgaggcggagtctgtcgtccgaggtcgagacgggggccgagccctggggtcgggcgaggcggagcttcctatggcgcccggggctggacttagctgctgtcggcctcactctggcgagtggcacagcagtcggagcagggcaggcggcgctattttcctgtcagctttgtgctgatgggggttaccagctgagattaggagtcttgggggtacccctaattatggtccccgacagatatgcttttacatgtgatgaaaggaagggtaaaagaaggctcccacttcaagttcctcaagtgaagaagaggaagaagaagaaagtgatgatgatgaagataatcaatcgtgcacatcatcctccgaggacgaagaaacaatctgacgcgtcggaaaggaaaaagcaaagaaagagagggtgctttgcatgcggggagaagggccacttcagggacaactgtccaactatggccgaacccaaaaaggagaggagcaaaggcaaggcgctaacaagtgtcagaacttgggatgattcttcaagcgaagatgaacctccaaggatgcgcagccaccggtcctcatcatgctcatcacggtcatcacacaaatgccttatggcaagaggtaacaaaagcattccatcctctagtgatgaaagtagtagtgataatgaagttgggggaaagccctccgtagatgagcttgcggaatccattaaattttttcaggatgtttgcactaagcaaaaagctcaacttaaaactttgaaaaataagtttattagctcccaaaatgattataaaggtctgctagaaaaatttaaaacttttgcaaacttaaatagtgagttgtcaactaaaattgagctattagaatctagtgctccatccactgctaccgatgatggccttattaaaaagaatgaaaaacttaaggctaagttagctagctctcaagaagctattgaaaatttgctagaaaaatag

SEQ ID NO: 11490 - DNA, 843 bp, Zea mays
  Peptide Sequence Number=SeqID_54865
atggggatgatccgcaagattaatctaatgggtgtgcccctgcaggtcgatgatcttctctttaacattgacaggaaaaagcaaagaaagagaggatgcttcgcatgtggggagaagggccacttcagggacagctgtccaaatatggtcgaacccacaaaggggaggagcaaaggcaaggcacttacaagtgtcaaaacatgggatgactcttcaagtgaagatgaacctcgaagaacgcgcaactaccgatcctcatcacgctcatcacgatcatcacgcaagtgccttatggcaaaagggaaaatggaaattcttagcatacacaatgatgagctgactactaagctagaaaacattggtagcaccctagaagtatctttggttgaaatacctgaaattattaaggaagatgcttctgcttcttgctttgatttaatttatgattctaacccttgcaatcaagttctcgttaagaatgtttttatagaaacatgttcggacgagattgcaatggagaatgagcaattaaagcaagaggtggctcgccttgggaaggccatgctatgtcacaaagaaggccaaaagtctttccaatgcaaggcgaagaccgggaataagcaaaagccaacaagcaaaatatccaacacctacatcaacaaggtgtacaaaaaggctgctacaccatatttgatcaagaagaaaaagaatggaaaggtgatagcaatcaaggccaacaagcaagccaacagaggaaagggggccaaatgcatctgggtgccaaaagaaattatttcaactatgaaaagcaccaagaaggtatggatcctgagagggaagtaa

SEQ ID NO: 11491 - DNA, 213 bp, Zea mays
  Peptide Sequence Number=SeqID_54866
atggagctcgtggtcgacagtaccctgaaggtaccaaaaaatccgcttgaccgcactcaggtgcggcttgcagggatcatgcatgtagaggcagagctactggacaacataagcgttgtcgggccgggtgaaggtgagatacggaaaagcgctaacaagactgcggtagtcaatggggtcattgacataggggaaccatcaccagagacctaa

SEQ ID NO: 11492 - DNA, 378 bp, Zea mays
  Peptide Sequence Number=SeqID_54867
atggagtcttggtgcttaggaatgatcaaggaatgcttgggtaccaactccatgcgcctaggggtcccttttatatccccaaggcagctaggagccgctggaggcattcttggaaggccaaagttgccttctgtcgggtggcacaccggacagtccgccgaccattgcagattggtggcagttggtgcaccgaacactgtccggtgccccctgccgaccgttggagcgggccacgcgacgctcgcggatttggcgctcggccgttgcactggcggccgttggctcaccggacagtctggtgcaccaccggacagtctggtgaattatagccgtacgccgccacagtttcccgagagtggccagttcgccggagtctag

SEQ ID NO: 11493 - DNA, 312 bp, Zea mays
  Peptide Sequence Number=SeqID_54868
atggcggaaggtggtgatgatggaagcatcggagatacggggtatagtccctcgtaccctggtgaagcgggagatgaaggtccggagagtttccccgggctcctgcctcactgcatggagatggtcaataccaggaagggaggcagtgtcgatctacctgctcgtattcgtcgaaggagggtagttgtcaatccacaactggagatgaatcctcctctgaatcctccaccggctggaatagatgatgtggtagtcgctcagatgaaactactgcagcagatgactaacaccacgatggagatgcaagcgtag

SEQ ID NO: 11494 - DNA, 342 bp, Zea mays
  Peptide Sequence Number=SeqID_54869
atggcagccactcctaacagtttcgcgctccatgaacttgttggcgcgattaagctccagcgcgatgttgtcgaggcgtttgtcgacctcgggacgccaaccctcaatctgagcctgatccgtctcgagagagatgaatcgcgcctcggccttctgctcagcatcggcgagacgctgctcgagttcgccgcagcgtcctatgagcgcgtccgtcagacgctgctccatttggctaagccgcccgtccatttggccgagctgatccaacacccgctgctgacgtcgtggagcgtgggcgacggccaggaatgggaggaagattctccaagttattccatctag

SEQ ID NO: 11495 - DNA, 1834 bp, Zea mays
  Peptide Sequence Number=SeqID_54870
atgacgtctaccgtgacgacgcccagccggccgctcgccgccgggagccgtccgcggcggtccggacccgccgtgctctcgctcagcaagggcggcggcggtcagcggcggcagcggcggctggcgccgtccacgagctgcgccgtgctcgcgtcgcccgacaagcagagcacggccaacaagctcccgctgtcgtcgaggaagcaggaggaggaggtggagaaggccacggactacaacgaggtcgcggcagcgctggagaccatctacaagctcagccccgccgtggaggtcgaggagaagaagcgccagggcggcaatgaagacgacggcggtggcgaggccaagaagaaaaggaagcgcagagtggcgggtaggagcacggtggtcgtgaggagccggcgtcggcgtggcgggaggaggatggacctcgggaagcgggtggagatgaagggcgcggccgccgctagcagagagcagcagcaggggggagaggagcaaggagagcgcgagttcgaggagatgctgctgcgggagcactcggtgtcgacggacatgggcagcctggactggaagcgcatgaagatcccgccggtgctcacctcatcgcagagcgcgcggctcttcaagaccatgcagcccatgaaggcgatcttcgaagcgcaggagagcttgcgagaggagctgcagagggaccccaccgacgcggaggtcgccgaggccaccggcatgaccgtccaccagctccgccgccgcctcgatgtcggccgggccgccaggaacaagctcattaagcacaacctccggctggtgccgtacgccctcaacaagtactaccctgacatgggcggcgacgagaggttcgacgagctgtgccaggcgggcgccaacgggctgatcaccgccatcgatcggttcgagccgaagcgcggcttccgcatctccacgtacgcgctcttctggatccggcactccatcgtgcgcgccatgacgctgtccagcttcacccgcttcccgttcgccatggagtcggagcggcaggagatcggcagggcgcgggaggagctggcgttcgagctcggccggccgcccacggacgaggaggtgcgggcgagggtgggcctctccccgcagaggtaccgcgacgtgctgcggatggccaggcccacatactcgctgcacgcccggaaccgcgtcacgcaggaggagctcatcggcgaggtcaccgacgccgaagccgtcggggtcgacgccggcggcaagcacgacgcgctgctccgcctcgccatcgatgacctccggttcggcctggacggcagggggaggcgcacgctaagcgaggtcgccggcaacctcagcatctcgcgggagatggtgcgcaagtacgagctcaaggcgctcatgaagctcaagcaccccacaagggtggaatacctgcgcaggctccgacttggcaggtcgtgggtcgactacgtcgtggtcgtgctaatgccggcagggccgttgaggtactgtgtcgagaagggggacatggatgacgacgatgacaacagccggtaccctagaaccatcaacgatgagctcgttgagttagggcagcttcccgatgacatcgacgtcataggagatgttgttgctgccttgttcattgtcggtagcagtcatactgccgttgaccctgagggggcacctgtcgggccggttagtgatgctgctggctctaatgatcttgattcattgacttcttcaagctctggtaagcgtcgatctgttgtttgggatgacttcactgaggtcacagaaaactgtaatgataagaaggtgcgcattgcag

SEQ ID NO: 11496 - DNA, 1278 bp, Zea mays
  Peptide Sequence Number=SeqID_54871
atgagcaacgtgctgcgggctcgccgccgcctggacctcctgcaggtggtgctcttcttcgtcgctgtgctcctcgtcgtcgtcgccgacgccggcgtgacgagccagtaccggcggaagctggaggcgacggtggagatgccactggacgccgacgtcttccgcgtcccgccggggtacaatgccccgcagcaggtgcacatcacgctgggtgaccaggagggcacggcgatgatcgtgtcgtgggtgacggccaatgagctgggcagcagcaccgtcatgtacagcgaggcgtcgccggacccggagaagatggagctccgggcggagggcacccacacgcgctacgactacttcaactacacctccggcttcatccaccactgcaccctcacaaacctcaaggtcagcgacctgggccagacgtttgactccaacacgacgctgtcgcactacgaggcgaacggcggcgacgccgtgctgtacgtcggcgacctctcctacgccgacaaccacccgctgcacgacaacacccggtgggacacgtgggcgcgcttcgtggagcgcagcgcggcgcaccagccgtgggtgtggacggcgggcaaccacgagctggacctggccccggagctgggcgagcacgtgccgttcaagcccttcgcgcaccgctacccgacgccgttctggtactcggtgcgggtcgcctccgcgcacgtcgtcgtgctcgcctcctactccgcctacggcaagtacacggcccagtgggagtggctgcgggccgagctggcgcgcgtggaccgcgccgccacgccgtggctgatcgtgctcgtgcactcgccctggtacagcagcaacggctaccactacatggagggcgagacgatgcgggtgcagttcgagcgctggatcgtcgccgccaaggccgacctcgtcgtcgccggccacgtccacgcgtacgagcgcagccaccgcgtgtccaacgtcgcctacgatatcatcaacgcccggtgcacgcccgtccggacaagggacgcgcccgtctacgtcacggtaggcgatggcggcaacatcgagggcatcgcggacaacttcacgcagccgcagccgagctactcggccttcagggaggccagcttcggccacgccaccttggagatcaggaaccggacacacgcatactacgcctggcaccgcaaccaggacggcgccaaggtcgtcgccgacggcgtctggctcactaacaggtactggatgcccaccgacgacgacatcaactga

SEQ ID NO: 11497 - DNA, 1296 bp, Zea mays
  Peptide Sequence Number=SeqID_54872
atgaactcaggaacacgcgaggatttagagtggttcgggccgtcggagcgtaataccctactccactttgtgttggattgctgtgaaagcttgagagctgagagtctaagtctaagttcgggtggacaggcggcgcgtcctctccgcgataaatgcagagaccgcgcggcccaaaggccttacgttaggctccgcccgctggcttacgtcacgggcaacaagccacgtggcagcatcgggtctccgcctgagcggggagcgcaggcgcacaggataaagcctggacacgtgttagtaccggacccttgctttggccagggtaccccctgtcccgggacctcgttatgggtggcccggaccttactcgggtggatctggaccccatccaagggaccctggcacgcttacttgggagtcccggaccgtattcggggccccgaggaggcgcggtattggtgcaagcagcggttcgacttctctgcccccgtgccagagactgggttgtcggtttcggcgggggcgaagaggcgcactaccgcaggcggtggcgcactcttcacgcgtcggtttgccttctccgcacacagaaatcggcgcgccaggtgcatgacatgtgggcctgggcccccatgccagaggttggaccgctggttgcggcgaagacgagggggtgcactaccgcggggcggtagcacgctccttgtgcggcggttcgccttcttcgcactcgaagaccagcgcaccagctgtatgacttgtggaaccggggccccgtttcataggatggataccccggtgtgcatcgggggagacttctcacgacgtttcgaggcgggagcgggggagtcttcctttaaagaggggttcatccctcgagtagcagccatgccttgcttctctcccactcgtggtgtcctctcgcctccgagctctctgcgcccctttgccttcaaggtctctgctttgcattgccgtagtttgccatggccttgtgtgcggccttgtgggaccgacactcttccaccggtgcttggcttcaggaatgttcatcagcctcgcggtggtggagagcgagctgagccgcggctccgcctcccacatgggttggtgacccgcctcttcctccagcattcggaggaaaaggatgatcaccagccttgtgaaggaggcgaacttcggggtctagtctgggaagccaagttgtgcgtccggaccccctggacggtggttctagatactaggatacccgtcacagagtggtggagcgtgcaggcccacggtacgggaccaggctga

SEQ ID NO: 11498 - DNA, 1383 bp, Zea mays
  Peptide Sequence Number=SeqID_54873
atggtttacgatggcgccgtgaaggaccaggaccaggagaccgtggcggcgagcactgcatcggcggcatcggtggtggcggtgtcggaggcgtctcccgcgccggtggtggtggtggtcagtgcgaggccctcggcgaggccgccgcacgacaagcgcctcggcgtgcgccaccccttgaagcaccgctggtttcgtgctggtgggaagatgatgatggagcccggaggggtgctgcctgctcacgcgcatgaggaggaggaggagggagccagcgaggtggaagaggaggagttagtggaggcggaggcctcgtccgcggagacggtgacgtggggcgctgaagtggaggtgtcgtccgcgccggcggcaggggtgcaggagatgaacgcggaggtggagggtggcgaaatggaggtgtcgcctgagcctgcggtcgctgtggggggcaccgagttggagccccagcaggacgacgaggacgaggtctcgtccgtcgtgttggcgcgaggggagaggaagcaggaggcggctcctgcttctgcggtgctagctgtggaggcgcccatggaaatgggtcaggatgaggagagggcggagaaggagaagaggggcaaggagagggaaaggcagaaggagcgggagagggtggatgaggtcggctacatgagcggaggatggaagagtgttgatggaacactgaattgtggatattcaagttttagaggaagaagggcaagcatggaagatttctatgatataaaagcatctaaaattgatgataaacaaataaatctcttcggaatttttgatggtcatggtggttcacgtgctgctgagtatttgaaggagcacttgtttgagaacctcatgaaacatccggagttcatgacaaatacaaaattagcattaagtgaaacatatagaaagaccgattcagagtttttggatgctgaaaggaatactcatagagatgatgggtcaacggcatcgacagcagtgatggttgctgatcatctttacgtggcaaatgttggagactcgagggctgttatatcaaaggctggcaaagctattgcgctctctgaagatcacaagccaaacagaagtgatgagaggaatcgaattgagagtgctggtgggatagttatgtgggcaggaacttggagggtaggtggtgtacttgcgatgtctcgggcatttggcaaccgtctcttaaaacaatttgttattgcagaccctgaaattcaggaacaagaaataaatgaggagttggagtttctaattatagctagtgatgggctgtgggatgtggtttcgaatgagtcctgcatatatcacgtcttttgcgctttcttcatgagcatttttgtagtggagtaa

SEQ ID NO: 11499 - DNA, 612 bp, Zea mays
  Peptide Sequence Number=SeqID_54874
atgaccgcgaaccgtccgacgtatcaggttctggacagtccgagtcagcagagcagattgtctgaattgacagggcgcggaccgtctgtagaccccacgcggaccgtctgtgataggcagataaatcgggcagaggcagtcagattgtcactttcaacacttgtctctttctctctcacactccacacgccaaaggtgattcttgtcgtttgtgagcggacggtgaaccaaaattgcgcacggactgtccgggagattgtttggagttcatcaaccatgtcttcatctcgtggtctgggtgatcttaagaagaagcttgcaggtcgttttcagtcaaagcgccgtcgtgcagatgatgcagattataatccagctacagactctgaggcccaatcatcagctgggggcagcatttctatggacatagaggatgctccacacgctcatccagattatccaattgatgtcacaggatggacctatcccaagagaagattctctatggctaagtactgctccaggaggacagttaatcagtatgatctgccctctgacacaaacattcagtttttcatactcagcttcagtttgatgtcttctggggaaccctaa

SEQ ID NO: 11500 - DNA, 505 bp, Zea mays
  Peptide Sequence Number=SeqID_54875
cccgggtgcacggtcggggcccaagttctcgggctggtatgttgacgctgtcaacggttcggccggtgcaccagagccaccgcagaccggggttacccagacgggtagctcgggtaccgtcccccgggacggtaaaaagaaaaaggaccgcaaccaccagaagccgcggtccaccgctctagtcgtcgcagccgcgatggggggccggggcgaccgcaacaaacacccacgcccgcagaggggtaacagcggctcatgtcctgtgcaccccaacggtcgccacagtgtcgtggagtgtcgcgagatcatcgacctcgcgaaacgcgtcagcgagcagtgcgagcagtcttccaaggacgactccccacctcatcgccgacttggcaaggaaagggttgacgacgacgaggtggtcacggctgaacgggacctcgggtatcagtcacccgagggggacctgaaggatgtcttcgccggagactcctactccggtggcgacaactag

SEQ ID NO: 11501 - DNA, 1602 bp, Zea mays
  Peptide Sequence Number=SeqID_54876
atggcggcacgagatcaggtggtctgtcgtccaagaagtcccagtgtcgacaacggtcggggccggggcatcgccaacgaaggtcacagtgacatcgaggttgacggctgtcagcaagggcgcgacactggcgacgggcccaaggaagcagcgcaagtcttcgtcgttgaacgttgtgcacaggcacacccgcatgaacgtcgccgccacgttcagcaacgaagacttgcggccttctcctcgtacaagagcgagtcgctcgacttcttccaggctgactcggcgccgcgtcggagctacagctacccgatcgtgtcgttcgcgtcggcatccgggtgcggtgccggcgtgagcctgctggcggcgatgctgcgcgcggtggccgtagaaggaggcaagcattgtaggctctcaagggctggcgtggcgacagacggatcatatcagagccaaggagcatgggaaggggtgcctcaccttccgttgaatcgcgatgaagcaacctatcggtggctcgatgccggtggaggcaaaatggagtggtcccgtcgccgccacttccatcctctctggcgagcaactttcaacccaaccaacatgcgatttgggctcgggcaccgactttcttgtaggctgggagtggcgatcggagggctgctcgtcccgtcctcctctcgtggtcttccagaagccatggccgccgccgccgtccactgttccagggcatacgttcctttgagctctggcgcttactcaaggaaaaaaccaacttgccacaagtattgtgcatcggtggagcttacttggaaaccatgccgactagttggatatcgggattttcgactgaaagagctagcttgccaacaattggcccatggagtggatgaacaatatcctgtgaaaagtagcactgtggagcaagctcaggaccgccagccctgtctgccacaaggtgatgcttacttcgctggcctgtcgaagaaagaaatcgagagaaggcggaagattggcgctgccaacaaggggaaggttccctggacaaaaggcaggaaatggagtgaagagcacaagaaggtcatcaggcaacggactgctgaagctctgagagatcccaaggtgatgtcatatcaggaagaaaatgttagggcaccacaaacaagcaaagacaagataagtgcggcgctgaggacggtctgggagaggcggatcgtttctgtccgatccagacagaaggttctgcagatctggtccaacagtatagctgaagcagcaaagaacggtggtcacggccaagatatgcttggctgggacagctacgagaggatcaagtcagagatggtatctacgttcctgtggatcaaggagaggggacgtatggtgaagaagcttgaaagggccgtggcaaaaatagctgccaagaggcttcaagtggtacggagaagggaagaacaggccacaaggatgaagaagctgaaacctgactgtcagacgttgctgcaaaacgcggaccgtcaaccagcaagagtggtagtatctgcaaggccaaagcttaaggagaggctagctaaggagcaccataggaaggatgggcatgtaccctag

SEQ ID NO: 11502 - DNA, 174 bp, Zea mays
  Peptide Sequence Number=SeqID_54877
atgaaggatgccaagcccatcaagacacccatgggaaccaatgggcatctcgacctcgacacgggagggtgtaagattaatagaaagagcacatcgggaacttgccagttcttggaaacatttaacaaacttaggcatgagctaaatattcttgattctcggaatttcttttga

SEQ ID NO: 11503 - DNA, 309 bp, Zea mays
  Peptide Sequence Number=SeqID_54878
atgtggggcccgcacgaccgagacgtggtccgggagcggtcggaccgggaaatagatcagatggcgcatgacgaaggcgtcgaggaccttggtggtctagacggcatgctgcccgaggccacgaaggtggattcggtgccgccatctgatgtcggcgagggcccctcggcgacccccatgccgactgcagccggcgaagaccccgcaccagcccctgcgccgacgtgtgaggacacctcaaaggcggtggtcgagctagctaccgaagaccccgcgacggcgactgagccttcgcaggtggcggaatag

SEQ ID NO: 11504 - DNA, 366 bp, Zea mays
  Peptide Sequence Number=SeqID_54879
gatctggacgccttcggtttcggtgacacatttaagcatgggttgactgacccccttcttgtaaagctggccctcaatgagtgcgaagtcccggattccgtgcttgacgcgcttggccttgttgacgtcgcttggatggccctctggactgcggacggctggcgtgccgatgacgtggtagaacacgtcggagggcaaggcctcgcctctggcggctgctttggccaatgcgtcggcctcctcgttcttggctcggtccacgtgctgcaagctgcgcctgcccccgcatggcaccatgcgccgtcgcagtggatgatccacaccttctctgcaggctcatccggctacgttattggccctgtctag

SEQ ID NO: 11505 - DNA, 126 bp, Zea mays
  Peptide Sequence Number=SeqID_54880
atggcgcaatgcttagcttcaaccatcctctttggtaagccttacacttcacatgagcttccacctttggtcaagaactggtaccgcaggatgaggcgcatggagggtgttgtgatgaggtcgtga

SEQ ID NO: 11506 - DNA, 624 bp, Zea mays
  Peptide Sequence Number=SeqID_54881
atgccgccacgcaccaggctaacggcacgcaagtctatgggaccaattggggtgcctcggcatcaattggctccccgacatgaaagcagcagcagtggaagtaatgaccccatcggagatcttgaagcccgtgatcaactcgctgatcgagacttaacacttgactgggccgtacagtctcgtttgctaatgtgtgctaaggaagcaagggctcaggcccgaattaaagaacttagctcaacggttgataacctgcagatgccgaccaggactcgaggacaggacgcagccggaacttctgggggcagggatgttaccccaaacccacctccggttcctcccacgttagccgaggcgattgccgccttggtgaatgccaccgcagacaatacccgcttccttagggaaatggcgggtcagcagcaattccagcagcaggcgggaagaggttatccacaaggtccccgagagactacctatctggacttctctgaaacccgtccacccctattcgtcaaagcggaagatcccctagaagctgatgagtggattcgggttattgaacaaaagtttggtcttctccgttgctcagagacgcagaagccgttatttgcagcacaataa

SEQ ID NO: 11507 - DNA, 756 bp, Zea mays
  Peptide Sequence Number=SeqID_54882
atgacttcccacggatcctcggacgaagggaatgcactgtcccacaccgacgggcttgcacaagagggctttccccgtattttgtgggagccaagctggcgttcgctggactctgagtcctttggataccgggctgaggatacgatcgaggcgattgcccttcacgggctgaccactttctgcggattccaccccctggagctgtccactcaccccattggcttgttccccgctgagaaggaggacgacccaatgtggaaggaccgagtagagcatgccaaggacatctgggctatctacccaggtcagactgttcacttgacagtgcggtgcatgaatgccctgtaccgtctacaagtgatctgtggtgaggcaatgtcccatctgatggcattgttggaggcaactaagatcaccctggataacagagaggagcttgtggttgacttgtccacggagatggtggaaaaggacttacaggtggaacaactgtcaaatgagatccaagagcttgaggaattagtggggaccagggagaacaccatcgaggttctcgaggatcagcttatcaacactcagcagcagcttgcggaggctaacgagcacctggatatgcatcaccaggagatccaggacatggaggccaacgaggatgtcgacatcgagggaggagaggagcctgcctccagcttggacactactggctcagggagacccccttcccccgagtcgagtgttgcctcgttcgctcattag

SEQ ID NO: 11508 - DNA, 537 bp, Zea mays
  Peptide Sequence Number=SeqID_54883
atggcgttcatggagcttgaatggaggcgcgactgggcatggcgtgtcggtgttggggctcggctcggtctgctgctcggctcgcggggtcttcggctgggcgccgggcagtggcggctccaggcatgtcggttgcgcgcggcgcgatggcgcgagaggtgcagggccggtcgagtctcgagcatccaggcggcacggcttggatgcagggcgctgggcgcgctcgacgtcggggcgtgcaggggcaggcgcgcgggctgggcagcgcggctgacactcgggggcacgctcagagcacgcccgtgcgcgaacccccgcgcgcccgcggccgcccgtgaccacgcccgcgccacggctataaagcccgtcccagagcccggctgtcttccccgttgcatcctttgccccgtgccaaactccccggagctcacccatagctccggcgacctccccgcgacccgccagagccgctcgagggcaaccaccgtggccaacccctttcccgccctcctccgctcgatccaagccctcggatag

SEQ ID NO: 11509 - DNA, 282 bp, Zea mays
  Peptide Sequence Number=SeqID_54884
atgaacgtatgtgagttcactcttgctgtctcacacccccccaccaggtcaagaacagagtcgtctgattcgtcgcctccgggagcagggtcttggactgctggtgctggcgatgatgaaggtgacgatctagctacgaaggctagtgattctgccaacgggtatcaacatcaaagtagggcggaattaaatatgggcactcttccacagcaaggtgactggcgcatcgttgacttaaaactcatcatcgtcatcagcgaagtcttcagcatcaccctctga

SEQ ID NO: 11510 - DNA, 162 bp, Zea mays
  Peptide Sequence Number=SeqID_54885
atggggatgcgtggtctacgagatgaaattggaataaggattaaccagattgccctcctcacgcgacctgagacgaggtctcccattccggttatggtgggtataagtgcggtcactgcacgacggccagtcggggtcagtgaggcattgtacgccaaggcg

SEQ ID NO: 11511 - DNA, 339 bp, Zea mays
  Peptide Sequence Number=SeqID_54886
atgaaggccaagtcacaccatcaaccaatcgacctaagaagtacctgcaaaaattatgccacaagcaaggctgagtatactaatactcagctagacttacccggttacaatggatcaagcagtctcattagctgcgagaagcagacgattcgaatcgagtttttatccttgcaaggtatccgcacgttaatccttattccaatttcatctcgtagaccacgcatccccatggatccgtgtccacagaccatcatcattctgttatcaaagtggatacaatcaattcctgacctcgcgcgagtgctagaaaaatcactcgacttctaccgagatccctaa

SEQ ID NO: 11512 - DNA, 399 bp, Zea mays
  Peptide Sequence Number=SeqID_54887
atgcggaagacgacccaagtcgaccccaagcgcaggctaatctgcaagctgaagctgatgaatcaacctaaagatgatgatgtggcaaaagtgggtgggaggtttttgaaaataaaatttgatggtggatccatcagggccttgatggattcaacatctggaaaagatgtacctctgccagaaaggagtctcggtgtagtgtctccgtctgagtcgattaaggaccttgtcgatgtaggcttgatgatcgaggaccctttaactggtcacatgcctcgtcatgggatccactttagtaagcatttctgcaaaacagagtctttgattattgagaagccttaccttggctcccttacaaccagcatacccttgagagtcttttctttagtcgggttctaa

SEQ ID NO: 11513 - DNA, 396 bp, Zea mays
  Peptide Sequence Number=SeqID_54888
atggagcaaaggaagctccggaacagcctggcgcgcagaggaagaaaaccacgacgcacgcagcaaggcgacggcgcgcaggaacgcggcaagcaggggtcggaggcgagctccacggcgagcagagcaggggctgggtgcggcatgggagagcgagctgagggacgcggccacgaattgggaagaactgaagggagctacatggaggtcgcgcggtcaggcgattttgagggaaggacgagcggggaaagcagacgaactcctgggctgaggccattgatgggcagagggagctcgggcgccggcgaaccagtaggggaagacgccatggggatgagagaggtccgcgcgcagagggggttggagctgaagggagatcggcgctgggctaggtag

SEQ ID NO: 11514 - DNA, 60 bp, Zea mays
  Peptide Sequence Number=SeqID_54889
tcgcgacgtcttcacgtcctcgcacgatcgtccaagtgctccagatgcagcacatccgag

SEQ ID NO: 11515 - DNA, 426 bp, Zea mays
  Peptide Sequence Number=SeqID_54890
atgcaggatgctgcacgacgtgcgctttcgcagtactattcgttgttcagcggggtagctgatggcctcgacctgaagtactaccctcgtcgttcgactggcagtgccagaggtgtgattgtctcacccgttggtgagggcaatcccaggctgagtagtatggtcaatgtcacacctgggtttcggggccaccaagacccaggcacgaacataatcaccatgtgtgctaggaccaagtcttacacatatgatgactcatgtttcccaaaaccaagtagagcaatagcaaaactacccaataatccatctgtctgcaagggtgtatcgtgggttcatttgcgtaaagagcagggtgtcctttgcaaaaccggctatctgaaggggtaccaggacttcttgatcgcacgatcagatatcaagggctag

SEQ ID NO: 11516 - DNA, 345 bp, Zea mays
  Peptide Sequence Number=SeqID_54891
atgggcatgccacacagcggtggtcgaatatctgaaacccagcggctttggatttatacccagatggcgcccaaattccgagtcggagcacgccgcgagatccgcgatggtttggtgaactgctcgcgccgaatcaacgtgagcggcggagtttgttgggcggcttaccgagggcgcgtttgtagcggaccagcaaggtccctgaggttcgcggcacgatttgtggcctggcggccacctggatcgagcggaggacgacttgaggtgatgcttatcctccctggacgtggttggtcttctttggccctcaatcctggagttgccatccgagttaaggacatatag

SEQ ID NO: 11517 - DNA, 900 bp, Zea mays
  Peptide Sequence Number=SeqID_54892
atggcgcgcggcggcatcgcccgcctactcgccacgctcctcctcttcctcctgctcgccacgcccctcgcagacggagcttccgaggcagaggcgggcctcgcgcagggcgcgtccgaggcggcggcgccggacgcgggcgcggacgcgcagcagcagcacctcctgccgcggcccctcgtcatcgagctcccgtcgtcgcgggccgaggacgaggacgagcccggcgccgacgccgtgccgccggacgtgcgctgcgccagctggcggctggcggcggaggccaacaacctcgcgccgtggagggcggtgccgccggagtgcgcgccgcacgtgcgggactacgtcaccggcgtcgcctaccgctccgacctcgacctcgtggcgcgggagtccgccgcctacgcgcgcgccgccgcgccgctcggcgccgacgggcgcgacgcctgggtcttcgacgtcgacgagaccctgctctccaacctcccgtactacgccgagcacggctacggggctgagttgttcgaccaccacaagtttgacgagtgggtggagaggggcgaggcggccgccatcccctcgagcttgaagctgtacaatgaggttcgcgagctggggttcaagaccttcctgctcacgggcagaagcgaggggcaccgaggcgtcacggtggacaacctcaacaaacaggggttccatgactgggaaaagctcgtactcagggcagcaggtgaccgcaagaaaacagcgacagtctacaaatcagaaaagaggaaggagatggaacaagagggttacaggatcctaggcaactctggcgaccaatggagcgacctgctggggtcttccatgggtgcccgctctttcaagctccctaacccaatgtattatatcccgtga

SEQ ID NO: 11518 - DNA, 561 bp, Zea mays
  Peptide Sequence Number=SeqID_54893
atggggcgcgcggggctttatagctcggtggccggcgttgcctcctccgtggcggcgaggtcgccggagacgaggcagacgcggtcaccggggagtctgggatcgccggggagggctagagcgggtcaagagggcctgttgaactcagtggcagactactggctgcaagtacaggaccaaaaatgggagaacgacgacgggaagatatcgcacctcggaacggagctcagggtgacttggcgtggcgcaaggagactccggttggccgggcgtcgaaggatcacggcggcggcaaactccgacccatgcagggaagaggctgagcgtggaccgggcggtaaagttgaggaaaggggaaaccactgcgggttcccggtgcgccaagctcaggcggagctcaccgtggccaaagcgctgggagaagtccagcggcgatggcggaacggtctggcgggcggggcgcacaccatgggcacgacggttgcagaggaggaggatgggtctgacgggcagggcccacgtgtcagcgagagtgaatggcagaacgggcgaacgggctga

SEQ ID NO: 11519 - DNA, 369 bp, Zea mays
  Peptide Sequence Number=SeqID_54894
atgcaggggcactccgtccccacacacatcaaccgtccccatcgattccctgtcagcagagaggggctcaccgccttggcgtacaatgcctcactgaccccgactggccgtcgtgcagtgaccgcacttatacccaccataaccggaatgggagacctcgtctcaggtcgcgtgaggagggcaatctgctgccaggttcaatcaggtatccgcacgttaatccttattccaatttcatctcgtagaccacgcatccccatggatccgtgtccacagaccatcatcattctgttatcaaagtggatacaatcaattcctgacctcgcgcgagtgctagaaaaatcactcgacttctaccgagatccctaa

SEQ ID NO: 11520 - DNA, 516 bp, Zea mays
  Peptide Sequence Number=SeqID_54895
atgtcgccagatatttctgcgttggttccttcgtcggcgggcttcctgctgaggaggttcctccccaagcgcagtcggttcgtcgttggaaatgggagacgattccactctcccccaataaagaggacgtcgggaaggcagagaaaggagtttaggaagggcaccatcgtcatgaagggaccgcccaagcaacgtagtgggatagaaattatagaagagcataggaaacttgtcctagacgatagtgggaaaaggatgccgccaaagtcgaagaagtcagtgaaggggttgttcaagggcctgggcctgtgtcagggcagttcttcgagcaggaacagacatcgagagctattgagtgctgttgaggatgagcagcacaacgaggagcagcacaatgaggaggtgcaacacgatgaggaggaggagcacaatgcggagcttcgctaccggttgcctgacgaagaggattacatggggcacgctaaacgtgtgttccaaaacaatgcaaagaagctg

SEQ ID NO: 11521 - DNA, 165 bp, Zea mays
  Peptide Sequence Number=SeqID_54896
atggagatggagatcatcgtgatggacagattattggagatggggatcaccatggctgaaaaaaaggaagacgttctagacaccccactaccagaggatcctggtgaaaatgcaactgctgcagctaaaaccgcttacaagaaagcaatggatactaatcttgaa

SEQ ID NO: 11522 - DNA, 597 bp, Zea mays
  Peptide Sequence Number=SeqID_54897
atggctgaaaggtaccaactcccacggagttgcgttcctccaacgacgaggcgaaaagacggcgggtatcccccatccgggggcttggaaggtggaaagacacgatgcataagggagcgcgaagacatggtcgccttccaagggggtcaccctccttttaaaggcgactctccctacttgcgtccccagccgtcgtgggctgagtcttctccaacacgctccaaggtcctcccctacggcgcgggggctgggtcccacacgtcatgcaagccggctcagagcagaagaagccaaaccgccgtgcgcgggaccgggaaaggggataccccgaaaaggatccttccccgtgaaggaaccaggctccgagcctccctacttatcaaaggttcgaaggctggcccctcggaagggttcaacagccgcctcagagcgcgtgggctccacacccactactggtcagaggttcgaaggccggcccctcggaagggttcaacggccgcctcaggctattctggctccgcgcccactactaatcaggggttcgaaggctggcccccgaagggttcacagccgcctcagacacagagcgagggatga

SEQ ID NO: 11523 - DNA, 393 bp, Zea mays
  Peptide Sequence Number=SeqID_54898
atggcgcagaacctcgacggcctcaggctcgatagcgtcgaaggagttgacgaagatggcttcggcggcttcacggcagcgcacgacgaggtgctgcatcaccatgtacttcggtcgaaccggtcctggagcggcgagacgatgtcgggccctaggatgggcacgcagccggatggctctcatctcttgggcagatcaaaggaaataacacacatggtgggtggtcttgagaaagcgtatttagcagccaagtccttacttcaagtaatgggggaaaaacaatctactgtggtggtgctggaaatggctcagcaagtttttttaaccttcattcttcacaaaaattctcagtgtgacgatgattctgactcactcttgatattgggtatttaa

SEQ ID NO: 11524 - DNA, 3531 bp, Zea mays
  Peptide Sequence Number=SeqID_54899
atgcacatcaaggaggtaactctcgaggggttcaagtcgtacgcgggacggactgtggtgccggggttcgacccgctgttcaacgccatcaccgggctcaacggttccggcaagtccaacatcctcgactccatctgcttcgtgctcggcatcacagatctccgtcaggtacgcgctgcctcgctccaggagctcgtctacaagcaaggccaggccggggtcaccaaggctaccgtgtccatcgtcttcgacaattccgaccgctcccgctccccgctcggctacgaggactccccggagatcactgtcacgcgccagattgttgttggtggaaggaacaaataccttatcaatggccatcttgcacaaccttcccgggtgcagacccttttccactcagtgcagcttaatgtaaacaatcctcattttctaattatgcaagggcgcataacaaaagtgctgaacatgaagcctccagaaattttgtcaatgttagaagaggcagcaggtacaagaatgtacgaaatgaagaaagaatctgctcttaagacacttgaaaagaagcagaataaagttgatgagattaataaactccttgatgttgaaatcctccctgcactagagaaacttagaaaagagcggtgtcaatacatgaaatgggccaatggcaatgctgaactggataggctcaaaagattttgtattgcctatgactttgttcaggctgagagagtgcgagatggcgcactgaatgatgtcaaacaaattaaaacaaagattgttgagctggatgaaactacagaaaacataaaagcagctatacaagaaatggacaataacatttctaccttggctgctgaaaaagaagctaaagtaggtggtgaaatgaaggttctgtcagacaaagtggataaactatcacatgtacttatcaaggaaacttctgtgatgaataatcaagaggaaaccctgaagtctgaggaaaagggtgctgagaagattctcacaaacattgaggacataaaaaggtctatactcgagagagatgctgctgtaaaaaatgtagagaatgaggcttctgacatgaaaagaagagcagaggatctcacaaaggagttggacgagaaggagaaagaataccagggtgtgctagcaggaaaaagcagtgcaaatgagaagaaatgccttgaagatcaactgagagatgcaaaagctgcagttggagatgcagaatctggactaaagcagctagctacaaaaataaagcattctgaaaaggagttgaaggagaagaaaactctattagtatccaagcgtgatgaggctattgctgctgagaatgagctgaaaacaaggacaaaagacttagaaggtatcaaggcatccatgggatctattaattatgacgagggtcagatggaagctttgcaaaaggaccgttctgcagagttagaaattattcaaaaattaaaggatcgtgttcgtaacctttctggtgagcttgctaatgttcacttcagttatcgagaccctgaaagaaattttgacagatcaaaagtcaaaggggttgttgcacgtcttattaggattaaggacagctcaacagcaacagcactggaggttgctgcaggtgggaggttattcaatgtggttgttgacactgaagaaactggaaagcaacttttaaaaaatggggatctacgaagtagagtaaccatcatacctttgaacaaaatccaaacttacatgatacctgacagagttcagcagacagctcgtagactggttggtcctgacaatgtaacattagctctagaattggttggatatggtgaggaagtaaagaatgccgtggcttttgtctttggctcaacatttgtgtgtcgtaatatggatgcggcaaaagaggttgcgtttaataggcaaattagcagtactagtgtgactcttgagggtgacacttatcagccaagtggtcttttgactggaggtagtaaagggggtagagggaacttgctaaggaaactcgacgaactagctaaagctgaggctgatctatctgatcatgagaaaaagctctttgtcattgaacagcagattggagcccttttaccattgcagaaaaggcacactgagttgaaatctcagtttgaactgaagtcatatgatctctcgctgtttcagaacagagttgagcaaaatgaacatcacaagttaggtgagctcgtaaagaaaattgaacaagagcttcaagaatctaaacaagagttgacagaaaagcaagtgcagcatgaaaaatgtgtgtccacagtttctgagttagagaaaactatcaaaacttatggcacggaacgagagggcaaactcaaagcgctggaaaaaagaatcaaatcaattaaatcagagatgcagtcgatgtcgaagcaactaaaggcttatgaaagtgacagggagaggctgatcatggagaaagatgcggttgttggtgagcttgctacactggaagagcagctaacgacttcaaaagctcagattacttctctgtctgaaaccttggaaaaacagaaggacaaggttacatccataaagcaagattatgatcaagctgaaagtgagctcaacgttgggcgttctaaactgaaggaatgtgactcacagataaaccgtatggccaaggaacagcagaaacttcaacagaagttaagtgattcaaatgttgagaggaagaaaatggaaaatgaggttaagaggatggagatagagcagaaggattgctcttcaatagttgataagctagtcgagaaatataattggattgcaactgagaaacaattgtttgggaaaagtggtacagattatgattttgaatcttgtgaaccacataaagcccgagaggaacttgaaaatcttcaagctcaacaatccagtcttgagaagagggtcaataagaaagtaatggcaatgtttgagaaggcggaggatgagtacaatgatttgatgtcaaagaaaaacatcatcgagaatgacaaggcaaaaatcaagaaagtgatagaggagttggatgagaagaagaaggaaacattgaaggtcacttggctcaaagtaaacaaggatttcgggtctatattcagtactcttttacctggtacaatggcaaaacttgatcctccagaaggtggtacttttttggatggtcttgaagttcgtgtggcatttgggacagtttggaagcagtctctgtctgaacttagtggaggacaacgatcccttcttgctcttagtcttatcctggctctgcttctttttaaacctgcaccactttacatattggacgaggaggttgatgctgctcttgatctgagccacactcaaaacattggtagaatgatcaaggctcattttccgcactctcagttcatagttgtctctttaaaagagggtatgttcaacaacgccaatgtgatatttcgaacaaaatttgttgatggtgtgtccaccgtgacacgaacagtgccttcgaaacagagatga

SEQ ID NO: 11525 - DNA, 729 bp, Zea mays
  Peptide Sequence Number=SeqID_54900
atgcaggttgagaatgcaagtgttcttttattacttgctgaaatatataaaaaatctgataatgcggtccttgggcttccttatgcgttggccagccaatcattctgcaaatcattcaacttggatctgcttgaagcctcagctacacttactctcgctgagttgtggctggctcttggatcaagccatgcaaagaaggcactgagtcttgtctaccagagccttcccatgattcttggtcatggtgagcttgagctgcgtgctcgagctcacgttgttttggcaaagtgccatttatccgatctgaaattctcagctgtggccaattctcttttctctacgtgctacaagtacaacatgcaggttgagaatgcaagtgttcttttattacttgctgaaatacataaaaaagtatactaccattctggcggacttcggctgaacccgaacctgtacgagagcgggaaagtgtgcctgagccttctgaacacctggtggggcaaggggtgcgagaagtggggcaagtcgagctccaccatgctgcaggttctggtctccatccagggcctcgtgctgaatgacaggccatacttcaatgagccaggatacaagaactcggctgaaacgacaggtggtgagaggtgttccttggcttacaatcagacggccttcgtcagatcatgcaagacgatgttgtattcactccggaagcctccaatggtgaactga

SEQ ID NO: 11526 - DNA, 891 bp, Zea mays
  Peptide Sequence Number=SeqID_54901
atggttcgcactttccaaactacccgcgtcaacaccagctacgcccctcagccccggcagatcccggtctacccagtggtagtcgaggaagctccagcgaatctccctcccgtccgagtagagaatgtaatcaacctggaggacagctcggaggagcagctgccgacccccaccccgttggccgagtccttggccttcgcagctgggtcatcgacgtcagcatcgtcggcaccagccttccaagcacctgcacctggaggcaacgaccccgacgactccggagacggcgatgacgaggacgacgacgacgaagacgatggagaagacggacacatcaacgaggaagctgactacgcccagcaggaccacttcatggggattggtccagttgtcgaacattatacatcaatgttcgagacaggacacttccccaacctgctgcaggcagtgctgcacgagctaggagcctacgcccgccccctgtacgagacgaggcgagtgagcgagcctccccgggcttgctattacatcactcgcatccatgtcagggtaatggatgcaggtgacaggggattcaggactctttctgctcacgagtccctgataccgctgtccacctacgctgcctcggtcagcgatgctgcccgtcggaccctgtggtcgctcagccacacctaccggcaacagctgcagaacacgagattcaggcaccttcctcagcgcctgcgtggagagagccagaccaacattgtcccaggattgcagccctggaagcccaactgccttggactagatccgccagaagctcaggtccccgtcgtggagtggctcctccccgcaagaggatgcgctatggagagcccggatcagtcactagggacgaatctctag

SEQ ID NO: 11527 - DNA, 873 bp, Zea mays
  Peptide Sequence Number=SeqID_54902
atggaccgaaggtccatgacacctggtatcagctccaggttatcctcaccaccaccagccgcccatccctcaccaccaccagccgccgcaacgccctcccacccgccctctccaactccagatgcattcactcggctcgaagagagttttggccgtctcgcagagaagtgggatcagttcgttgtgatgttccaccgctacaaggagaagacagagaaggaactccaagcagcggtgcggcttcaggcggcagcgcgagggttcctggcacgccgccaggtacagtcccttcgtggggagaagcaccttgctgtggcctccagggccatcccatggccgtcatcacatgagcaggctgtggtgcgcttgcaagccgcagtgcgcggcttccttgttaggcgggcggtgcggaagctgcacttgctgatcagctcatcgctgcaccaactcgcagcctgctcgcccaaccaccaggtctcgtctatactttttgaaccccctgcagaagtcgagatctggatccaacgtcctctcacaccctccctttgtgcacagctcagggtagaagtggtggagggtgtttttgcaaaaaatacagggcagcgagatggctgttggatccagaatgaattgtcgcaatttaatatatgtaccatgtacaccaaaggtgacacaggtgcatttgtagcaccattgcagtttgcattaattgcccagctacactacactggaacaaaagatgagaaagagattcattacaaatgtaaaagtagcagatgctatgcacggctgcaccctagggctgtcaactgccgcaagaagaagtgtggtcacagcaaccagctgagggccaagaagaagatcaagaactga

SEQ ID NO: 11528 - DNA, 1248 bp, Zea mays
  Peptide Sequence Number=SeqID_54903
atggacgcgaacgggtgcggggagaatgacgacgcgcgggcgccgctcctggccgggcctgggcggcggcgcaactccgtcgcgtccatgcgcggggagttcgtgtcgcggttgcccaagaaggtgctcgacgccgtcgaccccgagcgcccgtcgcacgtcgacttctcccgctccaagggcctcctcgaaggggagagagagtactatgagaaacaatttgccacattgaggtcctttgaggaagttgactcactagaagaatccaatgaaatcaacgaggatgaggagcttgcggagcaaatccagagtgaatttgctatgaagatatcaaattatgcaaacattgttctcttagcgttgaaggtatacgctacaataaaaagtggatcaattgctatagctgcctcaacactggattcactgcttgatctcatggctggtggtatcctttggttcacacatctgtcaatgaagagcatcaatgtctacaagtaccccattggcaaactgagggtacagcctgtaggcattatcatcttcgctgctgtcatggccactttaggcttccaagtatttattcaggctgttgaaaagctggtagtgaatgaggctccagataaactgaaccaagtgcaattattgtggctatattcaatcatgatctttgcaacaatagtgaaattaggtctgtggctctactgccgaacgtctggtaacaagattgtccgtgcttatgctaaggatcactatttcgatgttgtcacaaatgttgtgggtttggctgctgctgtccttggtgatagattctactggtggattgacccaattggtgcaattgttcttgcagtgtacacgatttcaaactggtctggaacagtgtgggaaaatgcagtatcgctggtaggtgaatcagctcctccagaaatgcttcagaagttgacatatctggctatcagacaccatcctcagattaagcgtgttgacaccgttcgagcatacacctttggggtgctttactttgttgaggttgttttaaatgaagaagaatttcttactttgtcaaaggttgacattgagcttccagaggacttgccacttaaggaggcacacgccattggagaatctctccaaatcaagattgaggagctacctgaagttgagcgagcattcgttcacctagatttcgaatgtgaccataagccggagcattcaattctcaacaagcttcccagcagccagccttga

SEQ ID NO: 11529 - DNA, 138 bp, Zea mays
  Peptide Sequence Number=SeqID_54904
atgcagaaacaatttacagatgataggtactacatatgtggaaggcttgcaaagtcaccagaatattttgaagatttattatgtggtctagcttatttccaggaatacagattaagaactagtggtaggcccctgtga

SEQ ID NO: 11530 - DNA, 189 bp, Zea mays
  Peptide Sequence Number=SeqID_54905
atggacgagtctgaaaaaggagatcggcctcctgggactagtaattgtatcacatttgagtcccagaggatcgcgacgcttcaatccggtcgcggtcgtggcagaagagcgaatgccagctgggagtcagagtcagtcttggatccaagatatatcgtagaagctggagctggtactaaatcagactga

SEQ ID NO: 11531 - DNA, 351 bp, Zea mays
  Peptide Sequence Number=SeqID_54906
atgcgtgcattggaagggcagcagttgcttgaggacgaccccacagtcgtgtacctcactgcatacctgctcaccctggatgcacagtatgatttcttggctcggcaccaccctcaagcccgtgtagctgccttggaaagtcgtgaagtcattgctgttgaagccctgaagcaagccaaagttgagcacatccaggagttgatggaggcctacttggtaacccataaccaacgtagagccctgcggatccaagagcccgcttcatccaaccctgttcaacccatcagagctgaagacccccagattcttgaaggtcacccggtctctattagaggagagatgaagacttag

SEQ ID NO: 11532 - DNA, 1077 bp, Zea mays
  Peptide Sequence Number=SeqID_54907
atgcaggcggcatgcaaccgcgccaagtggacacgcttctccgactcccaacgcgccagcatggaggccccggcccacgcgtcacgcaaccggcgcgccggatgctgcatgcaggcaactgcaccgccacttgcgccaccgtcgcgcctcttcggttgcggaaccaatgccgcgactcgaggcgacccagcgcacgactcagcggcgccagcctggcgcgacggtcaatgcggccgaaagtgggccggcagtaatgacggtggcaggcgggcgggagcagcggagaagcgggcgacgcttcgccttcgccgtaataaccgcgccaaaaaagggaccgggaaaggggataccccgaaaaggatccttccctgtgaaggaaccgggctccgagccccccctactgatcagaggttcgaaggctggccctccgaggggttcaacagtcgcctcagatcgcgtgggccctacacccactactggttagaggttcgaaggccggccccccgaagggctccacggccgcctcaggctactcgggctccgcgcccattactgatcaggggttcgaaggctggcccccgaagggttcacagtcgcctcagacgccgagcgagggatgaccaggggtacgttcgatacataaccaaggctcgggctgcgctcccgagggctcggactcgggctaagacccggaagacggcgaactccgctccgcccgacccagggctcggactcgggctaagacccggaagacggcgaactccgctccgcccgacccagggctcggactcgggctcagccccagaagacgacaaactccgcttcgcccgaccccagggctcggactccgccctggcctctgccgaacgacctccgcctcgcccgacccaggggctcgggctcggcctcggcaacggaagacagactcgaccccagctttggaggagcccccacgtcgcccggcctcgggcgcgggtccgccacgtcaacagggagcgccatcatcaccctaccccgagccgactcgggccgcagagaacaagaccggtgtcccatctggctagctccgccagatag

SEQ ID NO: 11533 - DNA, 600 bp, Zea mays
  Peptide Sequence Number=SeqID_54908
atggaagtcctggacgcgacgcggccaaatcacagagtgtccggcgcagctggaaaaagcgatctgtggggaggccggacctgtggcaggagtgctgagcgccacagaagtagaggggaggaaggggaaaaattgcaggggaaggcgccacggagagttcactgctcgagctcggaccagaggaggtccgcgccatggctggagcagaggggtctgctcagcctacagccaccatggctgggcgttagtcaagcctcgccacgctccggcgcgagctgggcacttccagagcccacggggagtttttctgcaggaaaaaaaatgccaggggagctcagattcggtgcagcatggtggggaagaagattgatcgagctcgacggtggctacatgaacctagctgcggacaagtgcacgggaactatggcctgcggcctggcgtccagggctggtgcttggagggaaggagctcgccgcggcaagagcagggaagggggcgcacacgtctgggtgcccagggagaagagcgccatggaggccgatgtggaggtcgaggcagggacctcaggatcgggcatgggagagagggcaccaagctga

SEQ ID NO: 11534 - DNA, 171 bp, Zea mays
  Peptide Sequence Number=SeqID_54909
atggccggaggtggaagacgagcaggctgtgtgcgtgagaaactggcggccaggaaaaatgcttctgcgctaaggaacagaggagcgacgcttaaaggtggccggctgcagccattggcgcagagagcacggggccgagcgccaggaccaggtgttggcgtgcgtttgtag

SEQ ID NO: 11535 - DNA, 303 bp, Zea mays
  Peptide Sequence Number=SeqID_54910
atggaactgtgctatggaagtagggagcatgcacgtgatagccgccgcatcgcagagttgtcagcagaggttgatcatttgcagcgggagaatgtggagtgggatagggctattcactgggatttgcatccgaacgtgccaccagaggttgcggcaatgggagctggtgcatcaggagcagctggcggaggaccttatggggtgttggatctctttggagcccctccttccatgaacatcgtggatgatcgttctcttgaagctagcagtggagcgggagcagccaaggacgtggatgactag

SEQ ID NO: 11536 - DNA, 180 bp, Zea mays
  Peptide Sequence Number=SeqID_54911
atggagcagaaatttggattgattcggtgcatagagaccctgttgggggccttcgtcttccgaaggaacctttggacatgggataaagttatacatgtgatgaagggcgcagttcaggagaaggatgaaccaatgccgaagctacccatggaaaagcttcagctcggcagtggaaaatga

SEQ ID NO: 11537 - DNA, 563 bp, Zea mays
  Peptide Sequence Number=SeqID_54912
atgaagaccgaggtgggcgtgaaagatggggaaaaggcttgggcgtccatgtttttgaagctgctggccatggagttggacaccatggcgagttggagaccgacagaaagctcagcgcgcggcaaggaactcgacgtgcacagagaaacagagactgagctaagctcgacgtcggacaaaacactgcgcatgagccggccatgggaaaaaccttggcgaggtcacgaccagcgagctgaggggcgcgacggcttaaggattgaaggcgaggaagctcggccggcgaggttggccggtggcgctggggactgcgcgggaggatgcgcgcgcaggggctcggctgccgggaatagggaacagcggctgatgctccatgatttaaacggggaagaggcaaggaatcggctggagctcactgcgacgagggaatcgacgtttaggccgagcaccatggtggacgacatccatggcgagcagagcacggcttccagggaactcagccgccagcagagagagccggagagggacgacctgggcgctcaccaagggagctctgcaggccg

SEQ ID NO: 11538 - DNA, 789 bp, Zea mays
  Peptide Sequence Number=SeqID_54913
atgaacaaaagaccggcattcaaggtgccattacaaacggaactccggttccgtccccgcgggacggacgcggccaccggaaggctctcgttcgcgtccccgctcaagggacacgaactagacatcaaagccaaagagccggaggccggccccctcaacggtggggaagcttcccccggctgccaccacgtcagcaccgacggcggcgtctgcctctccaccaatgccgcaccggcgaacgcgggccgctcaaaagcgcaccggcaggacgcctcctccgcagagctggaggatggtttccaccaccagaagctagaagaggaggtggccagccgactcgtgcgggaggggctggtggtcaccgccttggatgaccaccggcgaggggatgcagccgggctgcctgatgaaaatcctcgaagccgaacgatggctgagagccgtcgtgggctgagtcttctccaacacgctccaaggtcctccccctacggcgcgggggctgggtcccacgcgtcatgcaagatggctcagagcagaagaagccaaaccgccgcgcgcggcgggcaggagcagcggtcacgtcgtcagccaagcttacgtcccatccaggggcagcgagagaaccctctctcacggcgtgaagacggcgcgcccgtgctccgttcctcaaacggctcgtgcacgcgcaacggccgcctcgtgaaccactcgccccatcgcattaactccgcggcgggacaggcggcgcctcaggcaggagaagcaagcgatgcttcgccttcgccataa

SEQ ID NO: 11539 - DNA, 870 bp, Zea mays
  Peptide Sequence Number=SeqID_54914
atgacttctcacagatcctcggacgaagggaatgcacagtcccacacagacggacttgcacgagagggtttcccccgtatcttgtgggaggtccttcacggagctggttacacgacgcctcccaagtacgcggtgcagctgttcgagaagcaccgagtgccccgctgtagggtgaggatgaccctagagcctcagcccatgcagccaggatggcgttcgttggattcagagtcttttggatacagggctgaggatactatggaggcaattgcccttcatggactgaccaccttctgcggattccaccccttggagctgtccactcaccccattggcttgttccccgcggagaaggaggatgatccaatgtggaaggaccgagtggagcatgccaaggatatatgggctatttaccctggtcagactgctcacttgacggtgcggtgcatgaatgccctgtatcgtctgcaagtaatgcgaggagaggcaatgtctcatctaatggcattattggaggctaccaagatcaccttggataacagggaggaacttgtggtagacttgtccaccgagatggtggaaaaagacttacaagtggaacaattatcaaatgagatccaagagcttgaggagctagtgggaaccagggagaacaccatcgaggttctcgaggatcagcttatcaacactcagcagcaactcgcggaggctaaccagcatctggatatgcaccaccaggagatccaggacatggaggccaacgaggatgttgacatcgagggaggagaggagcctgcttccagcttggacactgctggctcagggagaccaccttcccccaagtcgagcgtcgcctcgtttgcccactag

SEQ ID NO: 11540 - DNA, 834 bp, Zea mays
  Peptide Sequence Number=SeqID_54915
atggagagtcatgatctccgggcagaatgggaatcacggcttgtgggtggcgatgagatcaatggttttggttatgactatggtgctggtaagtggtattctttccgtttggaaagggttgtcagcattgcaaccactgctcaggcgaagatgaagctgtggaaggagacttccaggagttccaagactacgacgagttctaggcgtgggttagcggcaacccccagtcggctgcctgtgaaggccgcggttatctacgtttctttttcgcactttgatttattacacactgcacgaaagtctgtcatccccttcttaccctcccgccttactgagcgtccgcttcgccgtcccgtggccggacagtccagccacttggagagactgcaccaccgcctgcatgaggagcaggaacgtcgacgacaagagcagcagggctcttctttctcgctccagcaggagatagagtccgtgaggagctgctcccccgtgcttcccctggaggctccccctgcaccaccactgggcgccccagcttctggagtagctgctggaggagacccagatgacggaggtggcgatgacagctcgagccacgacatcgacttctctgctaaccatgagccggaaggatgggttgctcgacccatcactcgcgacgctgctcgcgggtgtcacttccacgatgcgctcgacaccctgctacgtcgggcacttaaccggcatacttggtctatcgagtatcgctgtgtggtctaccagcacagtcgcggggtctacccggaccgctgggaggcaacctgcttggtgcgccgcccggagaacagtctctag

SEQ ID NO: 11541 - DNA, 129 bp, Zea mays
  Peptide Sequence Number=SeqID_54916
atgggttcaacatcggaaaagatgtacctctgccaggattacggggaggctacgctagcgcaaaacaaaaattttcatccccataataccaagaactactgcggttataggtcatggaattaccactag

SEQ ID NO: 11542 - DNA, 228 bp, Zea mays
  Peptide Sequence Number=SeqID_54917
atggccaggggtgttcacggggaagagatagaagatcgagggcatctctgcaatttgtcagtgacacagaggaacaaaaacgaagaagaaatcgaagtgaccgaagagaagacaccaccaccttcggaatctcaggccggaaattgtttctacttcgatatctgcgggtccgagcctgactcacctactaacgaaggcaagccccggtgcatttgccaccttccttga

SEQ ID NO: 11543 - DNA, 168 bp, Zea mays
  Peptide Sequence Number=SeqID_54918
atggcgtcgcccaccatctcagatcttctgcttgccatccccgactctccagtttccgcctggagccccggggtagcaagtatcgaggagggtctaatggtgaagtctgcggccaagtctgtcttcatccttcgtgagcgcaatgtttgggccatgctgcagcgctag

SEQ ID NO: 11544 - DNA, 840 bp, Zea mays
  Peptide Sequence Number=SeqID_54919
atgggtcgcagccttagtggattgcgccaggcaatgagcaggatccggctccaccttgtgggctacatggtgaccatcttcaccgtcgtctgtgaggggtatttggggatcgagcccattaggacttatggctccacctattctaggcagagctgttctacctttctaccgatagtcgtcgccaccttccaccggaggaaggtgctgccgttgattgagcgggctgcggggctactgaaccacccaacctctagtcccaaaggacgtagccggctggacagcgtgccggttggtcgccgagaagaagaagaaagatgcggacatgaaacgagcccacgacgcattggagaagcaccacaaggcgcaggcgagagtggacttgccgttggaaccctctcccatcacatagacgacgatggtgacgacgaggggatggaggtccggctaggcttcagccccgaggtcgagctttggtccgagtctgcttcgacaagcccatacggtggcgcggacgcgcctgtgcaaggggcgaaagcgtccctgtccgaggcgctagcgtcagccgagacgggccctgtccatgcggttgcagaggaggcagtggccatggaggagaaggtcaacgccccactccaggtgcccgtgatggggtcgaggctggccgtcgtgccccgcataaagcgtaaggcccatgagccgacctttaccgccactaagacggtgaaatccgacgtagggacgtcagccggggccgtgatccgctcccacgcgtggctcgacgcttcacaggaggccatccagcggcgggccgaggcggtccgccttgccctcgatgggtag

SEQ ID NO: 11545 - DNA, 201 bp, Zea mays
  Peptide Sequence Number=SeqID_54920
atggaggcgcagggggtcgacggggcgactgtggcggactccggctgcgcaagaaaacgctccagtgagcgcggaccggacgcagcagggagggagagggcacaccgaagggtgtcccgagcagctgacaggttttcaattcaaatcaagtttcaaattcaaaccaattcaaatatatgcaacaattcaaagaatatttag

SEQ ID NO: 11546 - DNA, 429 bp, Zea mays
  Peptide Sequence Number=SeqID_54921
atgcaagatgcagcacgacaggcactttctcagtattgctcgttgttcagcggggtagctgacggccttgacctgaagtactaccctcgtcgttcgaccggcagcaccggaggtgtgattgtctcgccagttggtgagggcaatcctaggttgagcagcatggtcaacctagccaccgtgctcaacacagagttggaccacacacttgacaagttgggcaagatgtctgagaacaggcgcagaggtgcaaggcgtgctcagccagagcaaccggcaccccaggaagaggcagctccgcaacagcatttgccaccaccaccctcgatgaccattgagcaaatgttcttgatgcagacccaagcagttcaggcaattggtcagactttagcagcgatgcagcaggtgcagcagcagccaccaccaccatag

SEQ ID NO: 11547 - DNA, 1287 bp, Zea mays
  Peptide Sequence Number=SeqID_54922
atggcgacggcgaagctgaactccccggctaccagcttggtcgctggcggccgcacgcgccgatctgcgcccgcccgctgcacgacggtgatccgcgccgccgcaggctcctactcggacgagctcatctccaccgcggttgaagaaacattttcttggtgcctgttcgttgcgatacataggatctaccatgtgcaaactttacaagaagtgctaaagcgtgaatttggtaccttctctgtatactgtggatatgttagagcttatgcgatattaactgtaatgcttctttatttgtgtttgttgataaaatctgttgcttcccctgggcgtggtattctggcaattgatgagtcaaatgcaacatgtggaaagaggttatcatctattggtttggacaacacagaagtgaaccgccaggcttacaggcagcttttgctgacaactgctggtcttggtgaatatatttctggcgctattcttttcgaggagaccctttatcaatcaactacagacggcaagaagtttgttgactgcttgaaggatcagaatatcatgcctggcatcaaggttgacaagggtttggttccattgcctggatccaacaatgaatcatggtgccaaggtcttgatggtttggcttcaaggaggactgttgttagcatcccttgtggtccatctgcattagcagtcaaggaagcagcatggggacttgctcgatatgctgctattgctcaggataatggtttagtgccaattgtggagccagagattcttcttgatggagaccatgggatcgagggagctcttgaggtggcagagaaagtgtggtctgaggtgtttttctacttagccgagaacaatgttctgtttgagggtatcctgctgaagcctagcatggtcacccctggagctgagcacaaggagaaggcttctccagaagccattgcaaagtacacgctaacaatgctcagaaggagagtacctcccgctgttcctggaatcatgttcctttctggtggacagtccgaggtggaggcaactctgaacctgaatgcaatgaaccagtctctgaacccatggcatgtgtcgttctcctatgcccgggctctgcagaactcggtgctgaagacatggcaagggcgccctgagaacgtggaggcagcgcagaaggccctgctggtgcgcgcaaaggccaactcgctggcccagctcggtcgctacactggtgagggcgagagcgatgatgccaagaaaggcatgttccagaagggctacacctactaa

SEQ ID NO: 11548 - DNA, 1287 bp, Zea mays
  Peptide Sequence Number=SeqID_54923
atggccggagagatctgggcatcctgctggcgtgatgtcgtggctatcggtggtgcggcggagcctgatggagggacagctgttggagcggtcgagtccctgctgacgttgtcctgctgccttgccgtggccgagcccgagccagggggtcgggcgaggcggaagtcgtccggccgaggccagggcggagtccgagccctggggtcgggcgaggcggagttcgccgtcttccgggtcttagcccgagtccgagccctggggtcgggcggagcggagttcgccgtcttccgggtcttagcccgagtccgagccctggggtcgggcggagcggagttcgccgtcttccgggtcttagcccgagtccgagccctggggtcgggcggagcggagttcgccgtcttccgggtcttagcccgagtccgagccctggggtcgggcggagcggagttcgccgtcttccgggtcctagcccgagtccgagccctggggtcgggcggagcggagttcgccgtcttccgggtcctagcccgagtccgagccctggggtcgggcggagcggagttcgccgtcttccgggtcctagcccgagtccgagccctgggatcgggcggagcggagttcgccgtcttccgggtcctagcccgagtccgagccctggggtcgggcggagcggagttcgccgtcttccgggtcctagcccgagtccgagccctggggtcgggcggagcggagttcgccgtggcgcctttggcaaggcctaattgcctgtcagactcactctgtcgagtggcactgcagtcggagtggcgcagggcggcgctgtccttctgtcagactggccagtggagcggtggagtgacggcggtcacctcggctctgccgggggcgcgtgtcaggatagaggtgtcaggccacctttgcgttaaatgcccctgcaatttggtcagtcggtgtggtgatttagtcaaggttgcttctgagcgaagccaaggccttgggcaagccggtgatgtgtccgccataaaaagggggcctcgggcgagacggaagtctctcgagctttatgctgatgggggttaccagctgagaattaggcgtcttgaggagtctttgattattgaaaagccttaccttgactcccataaccagcatacccttgagagtcttttctttagtcgggtgaggaagcgacaaatttttgttgcttctgctctaaggtggtgcctaaagaagaacataaggaatgaagtgcgggaggaaaggatcctccatatagaatttttatga

SEQ ID NO: 11549 - DNA, 273 bp, Zea mays
  Peptide Sequence Number=SeqID_54924
atggccacctgcattgatctttcttacggaagggctatcagcacggcgctagcagttgaagccaaatatgcaggctcaggaaaatcaaagtgttatggaggtgacaggcccaatcaggggcctgagaaaagacaaaggtatcttcggactcgtatcagagagggaaaagctcaaaagatacgaaggttgacacagcggcgaagctgtgaagcaggaaagcttcggcatgttcgcagaaaagggaaccgacttgaagatgaaaaggccatttag

SEQ ID NO: 11550 - DNA, 447 bp, Zea mays
  Peptide Sequence Number=SeqID_54925
atgggcaaaagtaagaaaggtagcggttcttctccttgctctggtgacaagcgcaaacgtgagccaactcctccttcagaggaattcggcgactcggagtactcggaggaggagttctcctccgagtccgagggatctccggctcccgtctctcccccggcgtcgtctgatgattcagatgactcccaggggattgccgcgaaggtctggacctacatccgggccgtccagcgctccgggctcgagggctcggatgagtcggagtactcctcggacgaggaggactcctcggactcgtccgaggaggacagcgacggcgatggtggtgatggcggcgatgacggaggcgacggtgatggcggcggcgacagtggcagcggcggcgacggcggcagcaagggcggcaatggcagcggcagcaagggcagcaacaaggccagtggctag

SEQ ID NO: 11551 - DNA, 294 bp, Zea mays
  Peptide Sequence Number=SeqID_54926
atgggttttgcattagaagaagtgatctttggcatcctcagattcatagctaatttgctagaaaaactcaggctcatcctagatcttttggcagttctggcaccccataatcaagtatgcaaagatataatctacactttagcgaatttaggtatcttcggactcggatcagagccacagtatgaaaaagcacaaaaaaacacgaaggttggcgcagagccgaagctgtgcgcaggagagcttcggagtaacggcggaaagggaaaccgacttaaagatgaaaaaccagattag

SEQ ID NO: 11552 - DNA, 618 bp, Zea mays
  Peptide Sequence Number=SeqID_54927
atggggtgcacctgtgttgccttcttcttgctgctgttggaggagtacgacctcgtgggggttggcgctctccagtcgtcgctcggcttcaaggattttcatcatgcagcccggctgcagtcccccgccggcggcgactctggcgctgcttccggcgccgcctcctaccgctgggcggagcgtggctgcccgttcgccgcacgagtgctggtcgcgccgtgcgcgggccggccacgtctaggtcctccctgtgccgtcggctgcaccggggggtcgcacaacacgtcgcacgccgcgagggaggtgctcgtgttctgggacagcctcggcgaggacgggagtgaggacctgccggtgcgcattggggcgtccgccgttcgccggtgcggtgttggtgggcaggtggccgctgtcgtcggtgctgaggtggtggtcaccataggtgaggcttcctctgccaaagcggttgcctccgccgacgagaccgtcagtgccacctgcgctccggacctccggctctttggctttaatggctggttctcgtccctcgtgaggggacatgaacgagggccttttcgcagtagtgtttgccctgaggccatcgctgctgctgcctag

SEQ ID NO: 11553 - DNA, 414 bp, Zea mays
  Peptide Sequence Number=SeqID_54928
atgaccctgggtacgtccgttacatggccgaggctcgggctacgctcccgaggtaccctaggacatttccgagaccagcgggaacgatttgtaatggaatcccaccggagggaggcgccgagccctctgaccctatcaaatgggtccgggtccagcaaatcacccggagcctcgggcgcaacagggagctccgcctcgctcgacctcaggcctcggcctcagcctcagcctcggccttgggagaaggtctccgcctcgcccgaccccaggcctcggcctcagcctcggcctagggaggagtcacatcctcgcccgacctcggcctcggcctcaggagaaggctcaaggcacttctccgatggccacgttagcacatgtacagggctcaaggcacttctccgccagccacgttag

SEQ ID NO: 11554 - DNA, 378 bp, Zea mays
  Peptide Sequence Number=SeqID_54929
atggcgcgccgcggcaccggctgcagaagatggcaccgtcttaagggccttcgtgggggccaggccggaagacagcgccgtttgccccgctccggctactatgccaaccacccaggcgaagctgacaacaagtcacaatcaaccaccgagttcggcctcaggcgcaacaggaagctccacctcgcccgacctcaggctccagcctcgggaggaggtctccgcctcgcccgacctccggactcggcctcgacctcggtctcgggaggaatcgcgtcctcgcccgaccccggcctcgacctgaagagaagtctccgcctcgcccgaccttgggctcagaccgaccgcgccacaggggatacatcattaccctatccctag

SEQ ID NO: 11555 - DNA, 819 bp, Zea mays
  Peptide Sequence Number=SeqID_54930
atgggaaggcggccgagcagccacgagctcggtcctcatgcttgtcgcggaggagggagatgcgcggttgagctttccctaaagatgctcaaggctggaaaacacgttattcaagcaacaacagaagcagaaactgcactgtcaatctaccactcatttcaaaacctgttcccgcataaacccatttgggcagtcggagagaactacagatttgagcctgcctttattgagtcaagcaagctgatcaatgatattggggatatgatgcacatccaagttatcatcgaagggtcaatgaacagttcaaatccatatttcaatagcacctggagacggaattttgtgggtggtttcattctggacatgggtgttcacttcattgcaggactacgaatgatgttcgatggctttatgcagccaactggaaaatggatgcgctggtgtctttgtgtttgccgtcaattcaagatcaccaaagtgtttctcagcgtgttagtaattacacagatattatggcgggtcgatggaacaaaaggaacaattcaggtagaacgtggagttgatagtggaaaacatggctaccaggtgttattctctggtgaaaatgggcagtgccagaagacattttacccgttctgtggagtgaatgaagaactgaagacgtttgtccatgacatgttggaagctggcaaagatggagatcacaaggctgcaccccgtggttcttatgtcgaaggcgcccgtgatgttgccgtgctagaagccatgttggaatctagtgcgaagcaaggagccccagttcaagtgaagagattctaa

SEQ ID NO: 11556 - DNA, 465 bp, Zea mays
  Peptide Sequence Number=SeqID_54931
atggaattactcagcaagtcttacccgactaaagaaaagactctcaagggtatgctggttaagggagtcaagagcaatactaagcatagtaaaaccttttttgaaaaacagggtttcaaggaaggtaatcaagttcaaggaagtgcaaagataataaagatttattatctaagtcttgaatacaactttccttcacggaactccgagaacttagggtttccggagtcagtaaaggagttcaaagggcacgagaatggtgccctattctatcctgcccatgagaaccgtgaaggccatgagcatttgatcgcgttcccgatgattggtggtctctcagttcgaattggtgactcgggctcaacggtggtggccgggaattttaacggcgacgcgcggcggtcggatgaggaaaaggttactggcgcagtggcttcgtgtcctcagtcgtggcgatggctccggtga

SEQ ID NO: 11557 - DNA, 471 bp, Zea mays
  Peptide Sequence Number=SeqID_54932
atgttggatatattcaaggaaatggtatctttgcgtgtatttgagaggatttttagtgaactcctatactgtgagcactggactacacattatgtttttttgcaggattacaagttcattctgtttttcagatgttctaagctctccatgattaggaaatatctattgtttctgtgcaccaaatccaagttgcagtttgagatgatgatgtgcttatgtgaagttaatgctgacaacaatactattggatgcaatatgggcatgtcggcgctacagaaagctgtagcagcggtagtccatgatgtcaacgctgagggctgggatcgaggattggagggcttgagaaggccgaggtccaaatggagctccaccagttccactgagattctgggcgcctccacggcgccggtaaacatagataagtggataaaacaacaagctatttggataaaaagcaggggacagagttag

SEQ ID NO: 11558 - DNA, 456 bp, Zea mays
  Peptide Sequence Number=SeqID_54933
atgggaaagaaacgcaagcgcgagccgactcctccatcggaggacttcggcgactcggagtactcggaggaggagttctcctccgagtccgagaggtccccggcccccgtctctcccccggcgtcgtccgatgactcggacgactcccgggggttagccgcggaggtctggtcgtacatccgggccgtcgagcgctccgggctcgagggctcggatgagtccgagtactcctcggaggaggaggactcggacgacggcggcgagggcggggacgaagacgacgacgacgacggtgacgacgacgacgacgacgacgacgacgacgacgacgacgacgacggcggcagtggcgggggctgcaccaggggcggcggcgacaggggcggcaccaggggcggcggcggcggaggcggcaccaagagcggcggcggcggcaggggcagggccagtggctag

SEQ ID NO: 11559 - DNA, 288 bp, Zea mays
  Peptide Sequence Number=SeqID_54934
atggcgggttttgctgagtttgggcctcaaaactcagcggcggcggttccggagggaaccggtggcggcacgtggcatgatcgcggagggtgcgtcaaggcgaagcaactccgtgagaaagacgtggccgtcggatcaattatccaggagttggtccagttcgccctcagtggagtggatagactctatgtaaataggggttttagtgctctcacatcttcatccctagactgctctagtttagccagggatccgcagcgattttgtacttcgactgtgttcttgtga

SEQ ID NO: 11560 - DNA, 363 bp, Zea mays
  Peptide Sequence Number=SeqID_54935
atggaagccggaaggagctgcaaggatatgtgttgggccgtcgcgtgcctaggcccagtgggcgggcgctacgcgtcggacatctggtccgtgagcaactcaggtcttcgaggcagaaacttgccaagaatagctgatgtaggtgctggttcatcttctcagcctcaacgaacatatgtcaggacaaggaagtgtttaagaaatgcagcagctcaagatattggagaagaggacagtgatgatcaagaagatggtgctgctgctgcacaagtagaacaacaacaaacacaagaagcaactggagatatggatgaagatggtgctgctgctgatgcattttgtttggatgctgatctgctctag

SEQ ID NO: 11561 - DNA, 594 bp, Zea mays
  Peptide Sequence Number=SeqID_54936
atggaggaaaacagacagtgcatccatgttcggagtttgaggttttcaggcgggaaagagaaacaaaatgcccgcttaccgaagatctgggagaaggcattgaggcccttgaagatccctttcaccttgcacgccattggcgatcgacgccgggccgcgcacgacgtcgtcccgctgagaacacaaggagacggaaagcaggcgagcacggttccactcatgtttggatctgttgcaatggaaaaggtttcttgccacatcgttcattggatatttaagagaaccggtagccatatctttctaactgacgatgatgaagggcagcctccactgctgcaggggatggttgaagatcatgacgatctctactttatttcttggaagataaagcctcaccaaatcatcatctccagtaacgatgttagcgaaagtcaatttaatctggtgttgaacattgagttgcaacaaatcatagattcagaccgagtcaccgcagctagaaaccactgtctcaagagagagagagaagtgttgaaccagagcaaggggttggaagagcttaaggtagaagataaaaggcgatacatgtattag

SEQ ID NO: 11562 - DNA, 354 bp, Zea mays
  Peptide Sequence Number=SeqID_54937
atggcgcaccagacagtccggtgcacaccggacatgtccggtgcccctaccacgtcatcagtgccgttggaatctgaccgttggagttctgacttgtgggccacccttgatgtccggtggcgcaccggacagctcctgttcattgttcggtgcgccagtatgggcaaacctgacgtctgcgcgcgctgcggcacatttattgcttctgcagcgcgagtgcctctagaaattcccgaaggtgacgagtttgagctggagtcccctggtgcaccggacactgtccggtggcacaccggacagtccggtgcgcccagaccagagggccttcggttggctcttcgccctttttgttga

SEQ ID NO: 11563 - DNA, 2376 bp, Zea mays
  Peptide Sequence Number=SeqID_54938
atggcggtggcaggcgggcgggcgcagcgttcacgtcgtcagccaggctcacgtcccatcctgggacagcaagagagcctcctctcacggcatgaagacgatgcacctgtgacccgttcctcgaacggatcgcgcacgcgcaacggccgccccgccaaccactcgccccgtcgcattaactccgcggcaggacaggcggcgcctctgacgggaggagcgagcgacgcttcaccttcgccggaccgggaaagggggataccccgaaagggatccttctccgcgaaggaaccgggctccgagccccccactactgatcaggggttcgaaggctggccctccgaagggttcaacagtcgcctcagatcgcgtgggcccgacacccactactggtcaggggttcgaaggccagccccccaaagggttccatggccgcctcaggctactcgggctccgcgcccattactgatcaggggttcgaaggctggcccccgaagggttcacagtcgcctcagacaccgagcgagggatgaccaggggtacgttcgatacataaccgaggctcgggctgcgctcccgagctcaccggagacaccatgttcggtgcccatcgagggtaacatggcgcactcccccctcctccttgcggaaaggcgacgtaggggcaaggacagcgccgcctgcgccactccgactgcggtgccactcgacagagtaagtctgacaggcagacaggccttgccaaaggcgccacgacgaactccgctccgcccgaccccagggctcggactcgggctaagacccggaagacggcgaactccgctccgcccgaccccagggctcggactcgggctaaaacctggaagacgacggactccgctccgcccgaccccagggctcagactcgggctaagacccggaagacgacgaaactccgcctcgcccgaccccagggctcggactcgggctaagacccggaagacgacgaaactccgcctcgcccgaccccagggctcggactccgccctggcctcggccgaacgacttccgcctcgcccgaccccatggctcgggctcggcctcggcaacagaagacagactcggcttcggaggagcccccacgtcaccctgcctagggcacagacccgccacgtcaacaggaagcgccatcatcatcctaccccgaatcgactcgggtcacggagaacaagaccggcgtcccatccggccagctccgccggatgggcaatgatgacgccccacaaactatatgacgacggtggcccccagctctcttacggaagcaggacgacgtcagcggggactcgaccgctccaacagctgtccctccgccaggctccgacgcacctccgacagccacgacatcacgccagcaagcactctgctacaccccccattgtacacctggatcctctccttacgactataaaagggaggaccagggccttcttagagaaggttggccgcgcgggaccgaggacgggacaggcgctctcttggggccgctcgcttccctcacccgcgtggacgcttgtaacccccctactgcaagcgcacctgacctgggcgcgggacgaacacgaaggccgcgggacttccacctctctcacgctcgactccggccacctcgcctctccccccttcgcgctcgcccacgcgctcgacccatctgggctggggcacgcagcacactcactcgtcggcttagggacccccctgtctcgaaacgccgacaggttcttgcctgaccgccatcgcagcaaaatcaaccaaggacctccctacactgaccactcccctactgcccttgcccctttcggggggttctacgcaaaagacaccaagactgagaactcccacagtgtggactgcgggtttatttggaataagacgaggggctctttagaaaaatctccaggccgaagggacgcccagcctggggccggctgtgcgccatacaggcagacgtgcccatggcacagaccacctcgagaatccgccagtgagaggaaaacaaagcttaccaaggttagcgccgacccggccgaccaagactggtccgatgttgcaggagcagatcgacgacggagacaccagcgggtcataccggacgcccagcctggggccggccgtgcgccatacaggcagacgtgcccatggcacagaccacctcgagaatccgccagtgagaggaaaacaaagcttaccaaggttagcgccgacccggccgaccaagactggtccgatgttgcaggagcagatcgacgacggagacaccagcgggtcataccgggtgaagaagaagctgaaggagcggatctccaggagttcccagactttgatgagttcgaggattag

SEQ ID NO: 11564 - DNA, 300 bp, Zea mays
  Peptide Sequence Number=SeqID_54939
atgacgtcgatgacatgggagatgctgctgctgccttgttcggtgtcgataccactcctaatcccgggccgcactggtaaacgtggatctgctgtttgggatgacttcactgaagtcacagaaaaccgtaatgctaggttgagtgctaattctaatgctggcactggacatttgcttaggcaccagaaatcatgtaaaaagaagtctgatcatgctgctgtggttcaaactagacttgctttgaaccctgatggggtcccaactgggaatatgatcctcaagtggctagaactgagctaa

SEQ ID NO: 11565 - DNA, 1215 bp, Zea mays
  Peptide Sequence Number=SeqID_54940
atgctgggcctgccgtccgccaccatccgctccggccaggcgccctccgcggtctgcatcctgctctcgtgggcctacgtcgtgtcctccatcgtcctcgtcgcagagctcagcttcgccgccatggcgcgtgacggcgtcgacgaggtcagcttcacgggacttgcgtcgagcaccctgggggcgggccctggcgcggtcgtcgctgtcgtgtacgccgcgctcagcttctccctgctcgtcgcttgcgtcgccggcatcggctcgctcgtctcccagctgttccccggggtgagtccggtcctggccaacgccctgttcccctgcttcgccggcgtcctcatcgccttcttccctttcaaggccgtcgacggcgccaaccgagccctctgtggcctgatgcttgtttccattaccgctctcgttgtgactggcgtgtccgtcggtcggaccagcttgctgggatctctcagctacgcgtgctggagcccaggcgcgatcctgccggccataccggtgaccgtgctcacgctcgggttccatgtcatcacacccttcatctgcaagatcgtgggagactcggtgtacgacgctcggaaggcgatactgattgggggcgctgtgccattggccatggtgctgtcatggaatgccgtcattctcgggctggctagtgctggcggcaatgctgggtttgatgaccctatcaaactcctcctctcagtgaatccagccgcgctgcctgctgttcgaggcttcgcttttgctgcactggcgacgagcctgatagggtacgcagtgagctttccgaagcagttggcggacacagtggagctgattcttcagaggttttctcagaagcaaggaagcatgcaccaagctaatggtagcggtggatatggcagaaatggggcgattcttacatggatggtgctgatcattcccatctttattgcgtcgttcttctcagcagtcttctccaaggcactggattttgctggggtttatgcaaactgcttcctgtttgggatcctgcctcctgttatggcctggatccatcggtcacagaagaaaaggagcaaaatatcttcttgtgtaaaaggtgatatagacctaatccgatctcctgattcatgtgaagatgttctacctggcgggaatgctgctctgctgatacttttcgctgttgctgttgtcctagcaatctggcactag

SEQ ID NO: 11566 - DNA, 258 bp, Zea mays
  Peptide Sequence Number=SeqID_54941
atggcggctagattccaggcgcgcggcggagggtggggaggaaggaatccgaagagcctccacaagcataagatcaactgtcaccttccatgcaagcatctccatgaactcaaaatgaggatcaggctcaagatgatggaaatgaagatggataggatgagccacctcaagaggaggacaatgatcaagggggagatgataattataaaaacaaggaagatgatcaagaaactcagggtcaaagaccgccacacctaa

SEQ ID NO: 11567 - DNA, 279 bp, Zea mays
  Peptide Sequence Number=SeqID_54942
atggccataatctcaaagatttggagccaatccgcgcttgaacatgacctctctctgcgctgcctcgtgctcgacgccgtgcccagacgccagagtgcgcactggcgctcgcccgcgcacaccccgagcgcatattgctacctcgctgacgcagagtacgtgctcatccctgagcaaggagctatccacgagaaagatcaggaaccagctcccgagcctgccatcgaggatctccccgcagccccagcaattgaaggcaagcctcggttttatgcataa

SEQ ID NO: 11568 - DNA, 162 bp, Zea mays
  Peptide Sequence Number=SeqID_54943
atggcgaacgggtatcatcagatctcggccgttggattagatgtgagcgcaccaggtatgcttcaggatatggttgatggtgtgacttggcctaccaccctaccaccgggttggacggtcgagtgggatgctgctctggcaggagaggagcaggaggagtag

SEQ ID NO: 11569 - DNA, 162 bp, Zea mays
  Peptide Sequence Number=SeqID_54944
atggcgatggtcaataccaggaagggtggtggaattgatttacctcctaatcgacacactcggaggatatataaacaaccagcagagatggatcctccaccaccacctccaccagtaggagttaacccactggttgtagctcagatgaggatgatgcaataa

SEQ ID NO: 11570 - DNA, 351 bp, Zea mays
  Peptide Sequence Number=SeqID_54945
atggcccgtgcctgcgcctataaagcctactcaggcgtcgaccacactcttccgcgcacgctcaaacctcaccggagcccaactcaccgtcgtttgcccgtgcgcggcgtgttcgcggccacccgaacccctgccgccgtagaccggccagcccagcctttcccaaccccgttcgaccctcggagacgagttaagaaaaatagaaaagactgtaaccttgttgacggagagtacgtcctcgtgccggagcaaggagatgctcaggaggtggccccagatccagcaccagagcctgcaccagaggacctgcctgccactgctttggaaggcaagccctggttttatgcataa

SEQ ID NO: 11571 - DNA, 282 bp, Zea mays
  Peptide Sequence Number=SeqID_54946
atggttcagtggattacccggtccacgcactccggcggggttgtgaactctggtgaccgtggactggcctctccggcgaagcagacttcgattcctcgctcagggagcttcactgaggtgtgctcactcgtctccgagggtcagacggggttgggaaaggttgggttggccagtctacggcggcaggggctcgggtggccgcggacacgccgcgcacgggcaaacgacggttgtggatcatgggtaatgaaggattataggttggattacatgtggggttag

SEQ ID NO: 11572 - DNA, 441 bp, Zea mays
  Peptide Sequence Number=SeqID_54947
atgaagggtccctgcaccctaacatgttgcacccttctctgcgcttccttcttctgcttcttgttggctggttctgcacttgaaccacctgtgattgggagcaccagcttcgtagccgaaggtgctacaacttggttgctgaacgaatccatcagctcaattgtggaaaaggtgtttcttcttaaaggaccttcgacgacgaagcagacgcccaaaagtgcgctttcgcactactgctcgatactcggtggggtggtcgatggtcttgacctgaggtattactcccattgtcgatctggcaccactggaggtgtggttgtctcacctgtaggtatggacaatcctaggttgagcagcacagtcaacctagccgtcgttctaaacactgagctggaccacgctttagacgagttgagtagtgcccatgctgaggtctcctag

SEQ ID NO: 11573 - DNA, 429 bp, Zea mays
  Peptide Sequence Number=SeqID_54948
atgaagctcttcgagcgaggaatcgaactttgcctcgccggagaagccagttcacggtcgccggacttcacccaaccgctggtgaacgtaaaccgagctccacggccgggagcactcaccgccgacgagttcacccgcctgcgcacgtggaaccgaccgattccggccaccaccgccgtcgagccgtacctcgttgtgatcgcaagaacctcccggagccaaccccgccctccgccggacctccctcaccgccgcatacatgtttcttactcattgcattcgatagattgcaacctcgctgatggagaatacatcctcgtgctggagcaaggagttgctgaggaggtagccccggatccagcactagagcctgccccagaggatctacctgccccagctttggaaggcaagccccggttttatgcataa

SEQ ID NO: 11574 - DNA, 717 bp, Zea mays
  Peptide Sequence Number=SeqID_54949
atggatcttgatccggacgtcgaggcggcagagcatgagcttgaggatcacaacgagcgtctggatgaattgtccttctttggaactggcactagcactggcagcaatgcaaatgtgtccatagatgttgatgcgacgcccgtgactgcctcctcaagccccactgccactggtggtagcactgcccatgccaaccgaccgaggaagaggctagcgacatctacgatttgggctgacttcgaggaagtaactggggtcgacgagaaagggtgcttgaggagcaacgacgatgacttacaacagatatggttgaggtcttatcctatattaaggattgggagctgccagaatgaagatggtgctaaaggttcacacttagccaataaaaagaccaagtatggggttcaacaaagagagcaagggataaccgaaggcacctctggtctggcgcaccggactgtccgtgttcgatgctccaaggaaagggtgtctcaggaactcgccagcttcgggaatttgcttcgctataattcaccggacatgtctggcgggcccagaagtcagaagctccaacggtcggaacccaacggcctggtgacgtggctggcgcaccggacactgtccgccacgtcaccaggccgttgggttccgaccgttggagcttctgacttctgggcccgcctggatgtccggaggcgcaccggacatgcactgtag

SEQ ID NO: 11575 - DNA, 255 bp, Zea mays
  Peptide Sequence Number=SeqID_54950
atggcggaggtcgaggctccagctgctgcggttgcggcggcgacccctgaggtggcgacggtgaccgagggcggagccgctacggaggcgaagggtccgcacaagctgcaccgccagtggaccttctggtacgacatccagtccaagcccaaacccggcgctgcgtggggcacctccctcaaaaaggcgtacaccttcgacaccgtcgaggagttttgggggagttgtttatacggtagatattgttctaggtaa

SEQ ID NO: 11576 - DNA, 926 bp, Zea mays
  Peptide Sequence Number=SeqID_54951
atgtacctgcaacacaccttcatccttggcaagcgcgtcccccgggacattgccgcctctgccggacgtccacatgcctgtggtgcacggttctgcccccactcttctgcgatcctccccaacgcgcagatctcgtctccgcgacggacgcctccgccccaccctcctccccacgccatccgcgccgccatcaagggatctcctaccaacaacggacgcctccctctcctccgcgatcctccaagcgcacagatcccgtctccgcgacgccatcccactaccgtccagcccgagcctgagcctcccgccccagcccaccacaaatcgcgcacgccccagccctcatccgtgacggagcctccattcacgccgtcacactcgtgctacaccaccgcggctgctgatggcgcccctcatccgaccgcatcagcaacctgtgcttcgcccccacgaccagtaggtctgcccgccggttccgtgaagtccacccccaccttccctgcactctggttccacgaagtccactgcgcgccgtctttggaagacgcgtcacgggtgccgccgccgacgcgcggtgaccgctggtgcgccacggcaccggtgcggccagacccggacccaccgcagcgcgtctggctcttcatcgcctccacccgctccggcgtctccaccacctccttcatcgagggccggctgtggagctcgccggtcaggcagccgagcgtcagttgcgtgaacacctgcctggagttgtactggcccttgaaccacgggtccatgagccgcgccagcctccgacggtctgccaggtacggcttcgcccagtcagccaggctcagctgcccgctcggccggttcgagtccagtgcccgctgccccaacagcatctccagcatcaccacgccgacatggtggtttctttcacg

SEQ ID NO: 11577 - DNA, 360 bp, Zea mays
  Peptide Sequence Number=SeqID_54952
atgtcacctacaacctggaggattgaggcatatagcaaccctgccgtctacaaccgcctaagtgagtacactatcatgccacaggaggtccatgagctagatggaggagaggatgatgatggagcgggagacggagcgactggctcacttggcagatcagcagaggatggtagagatgttccagtacatgcagagccttggagctgcacagggttttgctccaccacctccattgttccctctagctggccctactcagttccatactcctggacaacctgcggcatccaacaaccctcatggatcgtccagcccatcgccgaaccagtccagccgcccacctcgctgatgttcttctaa

SEQ ID NO: 11578 - DNA, 300 bp, Zea mays
  Peptide Sequence Number=SeqID_54953
atggtgacaggtcagtctagccatctggagagactacatcgctgcctgcacgaggagcaggagcgtcgatgccaggagcaggagcagcaggactcttcccctcgccttagcaggagaggggtagctgacgacctcgaccttaaatactaccctcgccgttcgaccggcagtgctggaggtgtgattgtctcgcccattggtgatggcaatcctaggctgaacaacatggtcaacctggtcgtcgtgctcaacaccgagctggaccatgcccttgacgagttgggcaaggtttggacgtag

SEQ ID NO: 11579 - DNA, 864 bp, Zea mays
  Peptide Sequence Number=SeqID_54954
atggcggcgcaaggggcaggaagggtgatttcctcttctctggctaagtctctcgggttgcgaaaacctaagagggaggcaggaagcggagcaaagaaccatcaccagaccctctcccaggctccgagcctccctactgatcagaggttcgaaggctggccccccgaagggttcgacagccgcctcagatcacgtgggccctacacccactactggtcagagcgggagcgatcttgtaacggaatcccatcagagggaggcatcgagccctcggaccccgtcgccaggggaccgggtctggcagatcccccgcagaggctcgggggctgctctcgcaaacccggctccggccgaaccgttgacagcgtcaacataccagcccgagaacttgggacccgaccgtacacctgggctacggccagctcgcatgagggaacaaccagaccagccgaagcattgcgcgaggcattaagacctcgaaggagtgaaaccactcctctgaggccttgggggctacacccggcgggtgcgctcgcgcgcacccaccggaacaaaatgcaaccgagaaaggctggtccccttgcaaaaaagtgcgacgaaagcctccaagcgagtgctagcactcccttcgaggctcgggggctactgtcggggaccataattaggggtaccctcaagactcctaattctcagctggtaacccccatcagcataaagctgctaaggcctgatggggctcggactcgggctaagtcccggaagatggcgaactccgctccgcccgacccagggctcggactcgggctaagccccggaagacggcgaactccgctccgcccgacccagggctcggactcgggctaa

SEQ ID NO: 11580 - DNA, 264 bp, Zea mays
  Peptide Sequence Number=SeqID_54955
atggcgcctcccgttgacgtggctggcccgcgccctaggttgggcgatgtggaggctcctccgagggtcgaggtcgagtccgtcttccgtggtcgaggtcgagtccgagcccctaggtcgggcgaggcggaggcccgttggctgaggccagggcggagttcgagttctggggtcgggcgaagcggagttcgtcgtcttctggggctgagtccaagtccgagccctgggtcgggcggagcggaattcgtcgtcttctgggtctga

SEQ ID NO: 11581 - DNA, 954 bp, Zea mays
  Peptide Sequence Number=SeqID_54956
atgggggcccctgaaaatctggccccctgtgtgactcctacggacaggcctgatggttccttttcagagtcattatatggtctcaggaggagacctgttaaggttgcagtgaagagaaagagtcctggtacagaatccaatgacaaagtctatggttctgctctaaggaagcgccagaaaatcctttcagttgtttttttggttgttttgccatattttaagtcaaagttgcagtctatatataacaaagaaagggaagccaggttgcaggcaaccctttggggtcaggatgatgttagatttgatgaagttgactttgtattagatcaggagcagacttctcaagcacagactgaacctacaactggagaaatgtcaaatttgacacgttttaaaaagaattttgcctcacttataggtgtttgctatccatggattcatgcaactaatgaaggctggccgtctgtgtccgccaaccgcgtctcccccaagaaccggccgtgggccaagaaggcagcgattttcccgaaccccatgttccacacctccacctctgtcaccaccgacccgtgcacgacaccgtcgtcttccaagaagcagaagtggttctacaagacgcgatccctggtcgtggcctggcagactccgtgcaagttcctggtcaagtcgccaccgagcgcgctgggatccaagctcaggatccatgggaaggccctaccggcgagacccgccgcccatgaaagtgcaggcatcacctgcaaaaacccgtcgctgctcgttctcgccatcaaggttgacgacaatccagacctcccctgcctccgggactgcctctactggctgcaggccgtgcggtctcatgatccgctcatcctccgcgacacgcagctcaagatcctagactgcgccacctccaccgcactccaggcagggaaatcaaatgtagtccactaa

SEQ ID NO: 11582 - DNA, 393 bp, Zea mays
  Peptide Sequence Number=SeqID_54957
atggggtcatccttcttctcagcagggaagagtcccaagggggtgcatcaccatctccaggggatggtagccacaaaaagttgtcagagtcttaatggctgccgcttcagtggtgtcgtctgtcctgaatccaaccgtctcggagttaagacaacgccaacccggctgaaggggatgagcctccaaagtcagccagactcggcaacgaggtacccgatgctcctcatacaactgctccgtgtacaaacggggcgtagggtaccggcggagtacaaggggttaagcagtctcattagctgcgagaagcagacgattcgaatcgagtttttatccttgcaaggcctcaccgccttggcatacaatgctccactggccccggttgccgccgtgtag

SEQ ID NO: 11583 - DNA, 456 bp, Zea mays
  Peptide Sequence Number=SeqID_54958
atcgaggacactgtactggatggtctacgtgcccggcgacagctgccatatgctcactatctttgctacatcttcgctcagctgattcggccaccacagttccaaggtactcttgaggcctctcgcctcctctttagctcctaccgtccagcccctgaggaccctgtgccggcacctgctccagtgattgacactcaggctgaggatactgcttttcatcagttcgagactcacggcgcagctgttccagataatgatgatgatgatgactttgggattccgcctccccgctcacatgatcatgaggccgggatttccagtgctgctgccgctgctcctcctgcggttgaccctgctctggctgctatccttcagactcttacgcagcagcaggctcttatggcatccgagcaggctcgactggcagctgagcaggctcgtccggcagcggtctag

SEQ ID NO: 11584 - DNA, 312 bp, Zea mays
  Peptide Sequence Number=SeqID_54959
atggcaaagatgttccagtacatggagagccttggcaccgcacatggtttcgctccaccaccttcgttgttccctgcagttgaccctgctcagttccatactcatgtgagtatcaaaattctagtttttcatgatatatattcatctgggacaatctggggcggcatccaacaaccctcatgggtcgcccagcccatcgctgcactagtccagctgtccacctcatgcgtccgcacaattgtgggaaggtgcgcatgtggtagggtcgatttgggatggacgaagacttgcataacaggagagcggcaatga

SEQ ID NO: 11585 - DNA, 798 bp, Zea mays
  Peptide Sequence Number=SeqID_54960
atggggtggaaggtggcgtcagggtgtaaggcggccggcgacaagctcaggctcccaacctcctccgccgccgcgcggtcgcggatgaagctctggttggtgcgcgccaccaccacggtgctgctctggacctgtgtcgtgcagctcacggccgtcggggacacctggggcccgcgggtgctcaagggctggccctcctgcctcacgccgcgcgaggaggaggcggccgccgcgcgcccgcgccctctcgtcgtcgacagggccgcgctgccgcccaaaagaatatataggaataatggttacttgatggtttcgtgcaatggtgggcttaaccaaatgcgagctgcaatatgtgacatggttgtaattgcaagatatttgaatgtcactttagttgtgccagagttggataagacttcattttggaatgatccaagtgagttccaagatatatttgatgtggagcactttataacctcgttacgaggtgaagttcgcatcctgagagaattacccccaaggatgaagagaagagttgaacttggaatgtttcactccatgcctccaattagttggtctgatatctcctactatcaaaatcagattcttcctttgattcgtaaatacaaggttgtccatctgaatagaactgatgctaggctagcaaacaatggtttaccgatggagactcagaaactgcgatgccgagtaaattatgcctctcttaaatttaccccacaaattgaagagctgggcaagagagtaattagaattcttcgccaaaatggacctttcttg

SEQ ID NO: 11586 - DNA, 1107 bp, Zea mays
  Peptide Sequence Number=SeqID_54961
atgcaggcggcatgcaactgcatcaaggggatgcaccttttcgacttcgacgcgtccagcatggaggcccaggcccacacgtcaggcaggcggaagcagcagtcaaatcgtctgcaggctcacgtcccctcctgggacagcgagagagccctctcccacggcgtgaagacgacgcgcccgtgttccgttcctcgaacggctcgcgcatgcacaacggctgccccacgaaccactcgtcctgtcgcattaactccgcggcagggcaggcgacacctttggcaggcgaagcgggcgacgcttcacctctgccaagatgaccgcgtcaaaaaagggatagggaaaggggatactccgaaagggatccttcttcgcgaaggaagcgggccccgagccctcctactgatcagagattcgaaggctggcccctcggaagggttcgacagccgcctcagagcactcgggctccgcgcccactactggtcagaggttcgaaggctggcccctcgaaagggttcgacagccacctcaggccactcgggctccgcgcccactactgatcaggggttcgaaggctggccccaaagggagcgattctgtaacggaatcccatcagagggaggcatcgagccctcggacccaatcaaacgggaccgggaaaacagcgccgcctgcgctgctccgactgccgtgccacccgtcagggtgaggctgacagccgccaagtccggtctcaggcgccataggaagctccgcctcgcccgaccccagggctcggactctacctcgacctcggacgacggactccgcctcgcacgaccccagagcatggactcaacctcgaccttggacgacggattccgtctcgcccgaccccagggctcggactcaacctcgacctcggacgacggtctccgcctcgcccgaccccagggctcggactcagcctcaacctcggaggagcatgttgggcagctcggtgcaggacttcatgaccgcatcgcaccgagctgcccaacatgctcctccaaggtcgaggctgagtccgagctctggggtcgggcgaggcggagaccgtcgttcgaggtcgaggctgagtccgatccctag

SEQ ID NO: 11587 - DNA, 864 bp, Zea mays
  Peptide Sequence Number=SeqID_54962
atggctaccccgcgaaccactcgtcccgtcgcattaactccgcggcagggcaggcaacacctttggcagacgaagcgggcgacgcttcacctccgccatgatgaccacgtcaaaaaagggaccgggaaaggggatactctgaaagggatccttctccgcgaaggaagcgggccccgagccctcctactaatcagaggttcgaaggctggcccctcggaagggttcgacagccgcctcagagcactcgggctccgcgcccactactggtcagaggttcgaaggctggcccctcgaaagggttcgacatccgcctcaggccactcgggatccgcgcccactactgatcaggggttcgaaggctggcccccgaagggttcgacagccgcctcagaacacgcagagcgagggatgactctgggttcagacatcaataggggggcagcagcaccctcggcgtcgattccaccttcggtggaatccaacccggcctcagacgacgacatggtcggaggatctccccctcgaaggaagacgtcagcaccgcgcctggtccatcgccgccagggtctcctccagaaacctggcccaagcagacggcttgatcagccgccccgtagcctgagccagctgtcccccgaggacaccaacccagctcatggcctcggcaacccgactccggcgttggtcccgctagtggacgacccgaccaggttccagccgccgctactacacctcctcggcccggaaagtcacctgctcctaggccgacgaagttttcttttcgagccgattccgcctctgtccatgctgacaccgctgcctccggctccggctcatcgcagagctgccgaggttttcctttaa

SEQ ID NO: 11588 - DNA, 1431 bp, Zea mays
  Peptide Sequence Number=SeqID_54963
atgcatcgcgtccttccaccttccgagcccccggatggggagcgcccgcgtcgctttcgtcttgctgtcgttggaggagcgcaacttcgtggaagttggtacctttcagccatcgctcggcttcaaggattttcatcaggcagcccagctgcatcccctcgccgatggtcacccaagacggtgaccaccagtttgatggtggggagaagcaagccgggctgcaacctctgccccgccctcagcttcaaggatcttcatcatcctcgctggggcggaggtcgagctgggcaggagctctacctcccgtacgggccggcgggccacctcctccttcagcattcaggggagagggcgctcgtcggtttagcggaaggggtggacttcgacaacgcggggccgatcggccgcaagcggcgtcagctccagcatgcctggttcgctggctcagctggctcaggcgcagcctctggtgccacctcccaccgctgggcggagtgcggctatctgcccgccgtacgagcggctgtagcgccgcgcgcaccagtgaaaccgcccaagacgtcgcgcgctgctagggcggcgttcgtgttcttgggctgtcctgcctttgctccgatggctgccgttgtcggtgctgaggtggtggcggctgaagaagtcctcgtcgccgacgagatcgccgccgccatctgcgctccgggcctccggctctttggctttgatagcttgtcctcgccccttgagtggggacgtgggcaagggccttgtcgcagtagcgtctgccctgaggtcatcgctactgttgtttggccgcctggagcggaggtcgttgtcgccgctgccggagcgggcggcggcgagccacctgggattttgtcgtcccgcaggccctccaatgtggggggttgttcgtacctgcgggggtggaaccggagttccgtttgtaatggcaccttgagtgccaccggtgtctgttcattgtggctgtcggggcctaaacaccgaggaaaacctcggcagctctgcgatgagccggagccggaggcagcggtgtcagcatggacagaggcggaatcggctcgaaaagaaaacttcgtcggcctaggagcagctggctcaggctacggggcggctgatcaagccgtctgcttgggccaggtttctggaggagaccctggcggcgatggaccaggcgcggtgctgacgtcttccttcgagggggagatcctccgaccatgtcgtcgtctgaggccgggttggattccaccgaaggtggaatcgacgccgagggacttgttcgtcggtagcagaatcgtttattcgagcgagagttacttttcacggaaggtgatgagtgaggagtccctcggctcggtcgaccttgccgcttacgtgtacttcgtacgagggctctggaccttccttttatag

SEQ ID NO: 11589 - DNA, 150 bp, Zea mays
  Peptide Sequence Number=SeqID_54964
atggttggtttacaggtggtgacgaggatgatggttttgactatggtaatggttgcctttggtgaaatctatgctcaggtaaagaagaaggagaacgatgtcgaggctgatctccgggagttccaggacttcgacgagttcaaggattag

SEQ ID NO: 11590 - DNA, 387 bp, Zea mays
  Peptide Sequence Number=SeqID_54965
atgccctcctcgcccatcatcgcggagtgcccttcctcggatcgcaagaacaagaagcccgccaccgtcgattcgctgtggtaccaacgaagtggcctcggtttggggccagggtgctacacggcgtcgtgctgggggttaccatgggcgcgctctacgggattggtggccggagtaggaccaatttctcaccgtggtcgtggatggtcgcggctccgccttgtgtcgtggccaggaggaattgctctgagaatcctggtgagaaccatcccatttgctaaaccatgttcccaatttcgtgtagctttggtcaattcggaatttagagtacctgggtgcctgtgccactgcttttacatgaaagtgacattaaaatttatatcctaa

SEQ ID NO: 11591 - DNA, 411 bp, Zea mays
  Peptide Sequence Number=SeqID_54966
atggcctcagggcaaacgctactgctgaaagaccctcattcgcgtcccctcacggtggacgagaaccagccattaaagccaaagagccggaggtccggagcgccggtggcactgacggtctcgtcggcggaggcaaccgctgcggtgggaagcctcaccagcggcggccaccacttcagcaccggtgacagcagccacctgcgcacggcacaaccgtcgcctggatggaggacggacagctacaccctgaccaggcagcagcagttcgccttcccccgcatagctggaggatgtctcctccgcagggctggaggatgcccttctcccctgaatgctggaggaagaagcgggtcaccggcccacgcggaggcgggccccagctcggtgcaccctcctccccagcacggatga

SEQ ID NO: 11592 - DNA, 981 bp, Zea mays
  Peptide Sequence Number=SeqID_54967
atggggagcgcccgcgttgccttcgtcttgctgtcgttggaggagcgcaactttgcggaagttggcacctttcagccatcgctcggcttcaaggattttcatcaggcagcccggctgcatcccctcaccaatggtcacccaagacggatcttcatcatccttgctggggcggagggcgaggcgagccagggcctgccttcgcgtgggctggcgtcccgcttcttcctccggcttctaggggtggaaaccatcctccagccctgcggaggaggtgtcctccagccatgccggggaaggcaaactgctgctgtccagccagggtgcaacattccgtcctctgtccgggcgatggcgtccagccacaccagggggtctcacaacacgtcgtacgccgcgagggtggtggacgccgccatcggtgctgaggcagccggagaaggcttctctgccgacgagaccatcagcgccacccgcggaccgacccccgactctttggctttaatatctggttctcgtcccccgcgaggggacgcgaacgagatccttccagcggtagcgtctgccccgggaccatcgctgctactgcagaggtcgccggagtccctcggctcagtcggccttgccactcaaggcttctcttgcccagttaaagaaaccctcggccgctctgcgatgagccggagccggaggcagcggtgtcagcatagacagaggcggagttggcttgagaatgaacttcgtcggcccaggagcaggtggcctcccaggccgaagaggcgtagcagcggcgactggaacctggccaggtcgtccactggcaggatcaaccctggagtcgggctgatgtcctcggggcgcggtgctgccatcttccttcgaggtggagatccttcgcccgtgtcgccgtccgaggccgggttggattccgccgaaggtggagtcgatgccgagggtgctgctgctccccctattgatgtctga

SEQ ID NO: 11593 - DNA, 456 bp, Zea mays
  Peptide Sequence Number=SeqID_54968
atgcaggcagcatgcaaccgcgccgcggggatgcaccctttcgacttcgacgcgtccagcatggagtcccaggcccacacgtcatggaaccagcgcgccggttactacgtgcgaaaaattgcaccgccacttgcgccagtgccacgccttctcgactgcggaaccggtgctgcgattcgaggcaaccctgcgcatggaccaacagtgccagccaagcatgccggtcaccgggaccaggaaaggggatactccgaaagggatccttctctgcgaaggaagcgggccctgagccctcctactgatcagaggttcgaaggctggcccctcggaagggttcgacagccgcctcagagcactcgggctctgcgcccactactggtcaggggttcgaaggctggcccctcgaaagggttcgacagccacctcaggccactcgggctccgcgcccactactga

SEQ ID NO: 11594 - DNA, 258 bp, Zea mays
  Peptide Sequence Number=SeqID_54969
atggggcacttcgccaagtcttgtcctcgccctaagaagaagaacgatgtgtatccgactcgagtgcatctcaccactgtggacgagattaccaacggagaacttgtgatggtcgtcgtactatttgattctggatcttctcgttctttcatgagtactgcttttgctcatcgctttaaccaatcattggtagaagtggggcataagtaccggataagctcagctggggttgaggttttcacaaatcgtatagtctga

SEQ ID NO: 11595 - DNA, 339 bp, Zea mays
  Peptide Sequence Number=SeqID_54970
atgcagaagcttggaacactaatctgcatgaggaggttcaccagcttcatgcctagctcagtccaatcaacccgcttgaaccagaagaagcagatgtcgctgcagccaacgatggagatggtgacaactcgccgcattaacccgggggccactagagcttctggtagtggtaaccaggagggtgaccatgaagcaccacttcctccacctcttccattcacacctaagcagttcttcgcccaatttcttggagctcataggaatatagagaacttgcagcggaacatggaggcagaacttcacaatgttgctaacaacacccgccatgggcagccttag

SEQ ID NO: 11596 - DNA, 291 bp, Zea mays
  Peptide Sequence Number=SeqID_54971
atggccatgatggattcaacatcggaaaagatgtacctctgccagttatgtaatcgcttccgcatttctttatctccgatgttctgtaatgtctgcaagacgggtgaaacgttcctggaaaggaatgatctatgggtcgtggatgcagctatccgctacttgcaagaccaactcgtgaaacgagatctagcgctcaattggacggttaactcccgtccatttgcctgggctaaggaagccaaagctcgagcccgtgtggaggagcttagctcagccatggataacttgtag

SEQ ID NO: 11597 - DNA, 141 bp, Zea mays
  Peptide Sequence Number=SeqID_54972
atggaaattggaatagggattaaggtgtggtaccgttctctggaggacatggttgctggagtgacttggtcgtccatcttgccaccgggttggactgtcgagtgggaccctacctcggctgaggaggagcatgaggagtga

SEQ ID NO: 11598 - DNA, 204 bp, Zea mays
  Peptide Sequence Number=SeqID_54973
atgccggagcaaggagctgctcaggaggtagccccagatccagcaccagagcctgcatcagagatctgcctgccactgctttggaaggcaagccccggttctctggaggacatggttgctggagtgacttggccgtccatcttgccaccgggttggactgtcgagtgggaccctacctcggctgaggaggagcatgaggagtga

SEQ ID NO: 11599 - DNA, 975 bp, Zea mays
  Peptide Sequence Number=SeqID_54974
atggttcgcattcggtttgccttccaaaaccagatggcccgtatcgggtgcactgcacgtaagtttgtgatcccctttttgccttcccgcctggtggagcgtcccctgcgtcgcacggtgccaggtcagtccagtcacctggagagactgcatcgttgcctgcacgaggagcaggagcagcaggactcttccccctcgcctcagcaggagggcatcccggctgctggaggagaccctgacggagacggagacgacgacgacgccggtggcagttcgagccacaacacggagctttcggaggagccggagctggagccggaggaatggatcgctagacccatcactcgtgacaccgctcgtgggtgtcacttccacgacgctcacgatagcctgctgcgtcaggccttcgaccgacacacttggtccatcgagtatcgttgtgtagtctaccagcatcgtcgcaggttatacccggaccagtgggaggctacttgcttggtgcgccatctggacgacgatcttcggggtgcagaagccttctcagagcactattctattactgagagggatactaccgaggcagccatgcaagatgcagcacgacgggcactttctcagtattgctcgttgttcagcggggtagctgatggcctcgacctgaaatactaccctcaccgttccatcggtagtgctagaggtgtgattgcctcgctagttggtgagggcaatcccaggttgaacaacatggtcaacttggctgtcgtgctctacatagagttggaccacgccctcgacgagttgggcaaggtttgggcggaggttgcggaattgtgtgctgagtgcgcagcacgccactatctggatggtggttctcccgcccctgtcgggattcaacacccttaccgttcaccgccccatggtcgcttcgactatgataccccagactaccggacctgcatagatttagattcatag

SEQ ID NO: 11600 - DNA, 324 bp, Zea mays
  Peptide Sequence Number=SeqID_54975
atggggaagcctgtcccatcactcctcatgctcctcctcagccgaggtagggtcccactcggcagtccaacccggtgtgaccgcacttgtacccaccataaccggaatgggagacctcatctcaggtcgcgtgaggagggcaatctgcgggcaggttcactcaggttatgcataaaaccggggcttgccttccaaagcagtggcaggcaggtcctctggtgcaggctctggtgctggatctggggctacctcctgagcagctccttgctccggcacgaggacgtattctccgtcagcaagattacagtctatcgaatgcaatga

SEQ ID NO: 11601 - DNA, 405 bp, Zea mays
  Peptide Sequence Number=SeqID_54976
atgaagaaggtggtctactacgagactgactcttcatcaccttccacatctggcgccgagtctaccactttgaagtgccaagagcgcaataagtataaccgtaattacaggaatgcctttacaaatgaggcccgtagcacaaagcgaccgcgcagggcccgttacaatgggccggatcgtacgtgggcctccgaactggacgaggccgcactgtgggaggacctcgtcgcaggccttcgtctggcgtcgtaccgggcgaagggtgtccctgcccgttttgtcttcgtcggaccagcggcaccgacgaggacttcgagcggagggtggcggctatgccttcgccccaacatttgccctccgagggaccagttcgacaaagtcacctggtgccgaagacgtcgctag

SEQ ID NO: 11602 - DNA, 570 bp, Zea mays
  Peptide Sequence Number=SeqID_54977
atgcgcctcatcctgtggtacctgttcttgacctgtggggggtgtgagacagcaagagtgagctcacatacgttcatcgctcaacaagttgtggggaataatgtgcatgaactcgccaaaggtgggagatcacgtgaagtatcgacggcctcgccctcttcttcttcccccgaccagagcagcagtggcacacaacgtccaccccaacggcgccatagtcggcgcgaagtgacccaggaatccattgccctaactcccctcccaaatgatgatacacagagcgcaggcgaccgcgaacttcagggaaggcacgttaccttcagcagtgaagcagggaattccgtcgccgagttcttgcggaccggagatagccgctacccccgacgagccattgtcggcgccatggtcctccaccgagcccaccgttgcggggaaagggataaagatggcgagtgggccccacccgtaagcgaccgagacaaaagaaaaggggaaagcactgggtgggtcgtgcggaacaagaggtggagctgggccggaggtgggaatttcggcccaggtgaggtttag

SEQ ID NO: 11603 - DNA, 903 bp, Zea mays
  Peptide Sequence Number=SeqID_54978
atggctcgagggaagatcccaaaagaacaagaagacacctccgaaagaaaacaaggaggttggtcttcccatttcgattcccacatatgttgtgtggctaatgaaaatgatagcggaagcacaaatgaggatgaggaggatgaaagaagcttcatgcaactctacgctcatctaagcctagaagataaggcggtcatgctcaaacttctaaaaagagcgagagagcaaagcgaagctcgtcaaatgctagaagatgttctctccatgaaaatgctacactttgatgagttgactaaagaacatgaggagctaaagtgctctcatgttgatttggtccaaagcaaatctttctttgagctagaatttgcaggaacaaaagatgatacatatcaaaagctcaaagaagaaaatgagaggctaaaaatgagcttgacacaactaaaagggaagtacattgctcaaccttatcaagataaccgtgatcacatggtgaagaagcttgagacgggaacaaccgtggcatgcactaaatcccttgaagaaaatgtcaaggacttgaggattgtcaagaggaaggaacaaaagaagaaaatcaatgcctctgacaaaagcctcaaccatgcctccatgcaaggaaataaagaattatcctgtgccaagacctacaacatggaggaaagccaaaggatgcttacttatgaaaatctacaagagagtaagtgcaagccgcaagcctcaagggttactcttcagccaaaggaagaaagtattttcaataagtttggaaggaaaaagagtcaactacaaagggaggacactcaaatgaaaaaggaagacatcaagagcaacaacacctacttggataatgagatcttcaaaacaatcaatggtgtggttgcataa

SEQ ID NO: 11604 - DNA, 282 bp, Zea mays
  Peptide Sequence Number=SeqID_54979
atgtacggtcgacgatggcggtggcgcgacggcggtgggcgcggccggcggtgggcgcgacggcggtgctcgccgcgggtgcgggaggccggcggcgcgacgacggtggcggggcacggcggtggcggagcacagcggcgcgacgaccgtaacggcggtggcggtggcggggctcggcggtgggcgcggccggcggtggccgcgacggcggggctcgtggggaggcgcggcggcgccggcggcaagccgggaggctggggcgggcggcggtcgcggccggcg

SEQ ID NO: 11605 - DNA, 231 bp, Zea mays
  Peptide Sequence Number=SeqID_54980
atgacggaatggcagaccccagacgagatgatgcctagaagactgatgaccaggaggaggactcggaggccggagcctcgctgtcacacccggtttttagaaggcaaaccgaatgcgaaccatctaagggcgtcccattccaccctcatggttgcactattttcccggacggtcatccaacgaacaggtccttacggagaggcactcgagataccgctcgagtccccttaa

SEQ ID NO: 11606 - DNA, 167 bp, Zea mays
  Peptide Sequence Number=SeqID_54981
gtggcgatgagaatgatggttttggtattgactatggtaatggagaagatgaagccatggaaggagacttccaggagttccaagattacgacgagtttctaggcgtgggcatcatctcgtctggggtctgccattccgtcatccgtccaggggaatggaacctctaa

SEQ ID NO: 11607 - DNA, 315 bp, Zea mays
  Peptide Sequence Number=SeqID_54982
atggagcccctggcgaaggtggagttagagttgtcaagtctatcaagtattgctttaactcttcgaaagccctttgctgagctggaccccattggaaaacctcggctgacttcaatatttcaaagaatgaccagcttgcctaaaattggcaaatgtctcctgcaagtcagcaatataattctctttcttcgtgctttttactatgatgtcatcaacataagtcagcacattcctgcctatttgagagtgaaggaccttggctgtcattctgctgaagcttcctacaaaattcttgagcccctcaggcatccgaag

SEQ ID NO: 11608 - DNA, 444 bp, Zea mays
  Peptide Sequence Number=SeqID_54983
atggagaaagaatggctcggttcagccaaaccagcaccagcctatggtgcaccggactatccggtggtgcaccggacagtgtctgactgtccgttgagtcttcagcgccagcgcccaagcacttcggcgacgaactcgtcgctctcgggaaaaggagaaagcaccgcggctaaaaattaccggactgtccggatcacctattcacccccatctaggtgctctcactacaccgccctggcacaggaggtccatggcccagaatacaatccgaggaccgagcagatcgaccctgatgtcctcatgagggtcgaaggagacccagctagaagaagagaggagggaacgttaagagatggaggcgaggatgatggcggagctagcactgggcataaaacccgagcccgaaacccaaagcccgaaatacccgagaccgtacccgtttag

SEQ ID NO: 11609 - DNA, 201 bp, Zea mays
  Peptide Sequence Number=SeqID_54984
atggcggcaatcaacgatggcgggtggtctctgcgcggagcacgacggcgcggctgggagaggcgtagcagtggcaacgaagaaaagggatcatggggcgcgaaagaggcgagggtcatgcagcatggtcacggtcggcgtgccaccgcagtagagagagaaagggcggcggaagcacatgaggttgaagatatacgatga

SEQ ID NO: 11610 - DNA, 1077 bp, Zea mays
  Peptide Sequence Number=SeqID_54985
atgacggtggcaggcgggcaggagcagcagtcacgtcgtcagccaagctcatgtcccatccgggggcagcaagagaaccctctctcacggcgtgaagacaacgcgcccgtgttccatcctcgaacggctcgcgcatgcgcaacggccgccccgccaaccactcgccccgtcgcattaacttcgcggtgggacaggcggcgcctctggcaggagaagcgggcgacgcttcgccttcgtcataatgaccgcgtcagtaaagccgcctcagatcgcgtgggccctacacccactactggtcagaggttcgaaggccggcccctcggaaaggtttccacggccgcctcaggctattcgggctccgcggttactgatcaggggttcgaaggctggcccccaaagggacatttccgagaccagcgggaacgatcttgtaacggaatcccatcagagggaggcatcgagccctcggaccccgtcgccaggggaccaggtccggcagatcacccgcagaggctcgggggctgctctcgcaaacccggctccggccgaaccgttgacagcgtcaacataccagcccgagaacttgggacccgaccgtacacccgggctatggccagctcgcatgagggaacaaccagacaagccgaagcattacgcaaggcattaagacctcgaaggagtgaaaccacctcctccgaggcctcggggggctacacccggtgggcagtcgggccctacagaaggcaccataggaagctccgcccgacccagggctcggacacgggctcagccccggaagacggcgaactccgctccgcccgacccagggctcggacacaggctcagccccggaagacggcgaactccgctccgcccctcggacacgggctcagccccagaagacgacgaactccgctccgcccgacccagggctcggacacgggctcagcccccggaagggggggaactttttttttccgccccgaccccaggggtttggaacccgggtttcacccccccggaaaaaagggggaaattccgttcccgcccccgactcaggggcttcggaaaacgggg

SEQ ID NO: 11611 - DNA, 351 bp, Zea mays
  Peptide Sequence Number=SeqID_54986
atgtcttcgcgctcccttatgcatcgtgtctttccaccttccaagcccccggatgggggatacccgccgtctttccgcctcatcgttggaggaacgcaactccggggatgtttgtgcgagcgagagttgcttctcgcggaagtcgagaaggctcgaaggatcgcttcggcagaagagcttccgaacgtgaagacttgttcggtccgcggaatcacttatccgaacgtgagttacttatcgcagaaggtgatgagtgagccgaagcaccaggtcgcccacctggaggtctcgggaccggacccctcgggcatggtagcgtcgcagggactgctggtaccacgccgagtgtag

SEQ ID NO: 11612 - DNA, 507 bp, Zea mays
  Peptide Sequence Number=SeqID_54987
atggcctcccccggactcctgacgtcgagggctatcggcggctgctcactcgggcagctaatcatcttctacgtctcgctcatccaccgagtgatctacgacacgccatcaacagtcggcgggacgcacgaaactccatcaacgcttcgtgcgaacgacgacacgagaacgagatctggtgttgagaagaatatgatcgggaccacggtatccctgcgcggagtcaggccaccggagttgagtcggcaacggcttcgaccggcggcacaacctggggacagtcgaggcaccacgacaacaactcccctccccaggatagacatcatcatcgccgacaggaggacacatgtggagtatcggcgctcactccacgtctcagggccatttaatggccccctaacttcaaagtctccaacgtctacaagtacgagcctaagcaggatccaggaggctggttggccgtctacaccaccgccacctgagccgctggggcgaccgaagatgtga

SEQ ID NO: 11613 - DNA, 513 bp, Zea mays
  Peptide Sequence Number=SeqID_54988
atgggacaccggtcttgttctctgcggcccgagtcagctcggggtagggtgatgatggtgcttcctgtcgacgtggctggcctgcgccctaggttgggcgacgtggaggctcctccgaagccgaggtcgagtctgtcttccatggccgaggccgagtccaagcctctgggtcgggcgaggcggaggtcgttcggcagaggccagggcggagcccgagccctggggtcgggcgaggcggagttcgtcgtcttcttggggctgagcccgagtccgagcccctggggtcaggcggagcggaggcctgactgcctgtcagcctcactctgtcaagtagcactgcagtcggagtggcgctggcggcgctgtccttttgtcagaccgtcactcctgtttatgatattaatgttccaaatgtttgaccatttccagcatttgcataatgaggactctagggaaaagcctcgtagtgagaccctagccattcacctcggaagtgaatatgggtttagctaa

SEQ ID NO: 11614 - DNA, 722 bp, Zea mays
  Peptide Sequence Number=SeqID_54989
tttcccttggcctgctcggcagcccagcgcgcctctccaccctctggcccacctggcgccccacttcccggtccgctcccttggcccactcggccaggcaggcactacggccgcggtcgctcgctcccagcgtgcgcgtgggcaggagcgcaggagcagcgcccagccatgccaggccatggacccacctgtcagctgagtgcagggccccacttgtcaagactatttttcctcaaccgcccactcttgtttctcctggtcgttcgctcccagcgccgcattttcttcgtgcctgggcgttcccaggtgccatgcgagtagattcggcaaactactccatcctcctctccctacctggccatcgtgcagcagccgtgttgagcctctgccgccctctctctggccactcgcgtgagcccctgctggtcggctgcccggacacgacggctatggccgagcccagcgcgaagtcatcctccaggactgagcccctgtgcagccactaccgccggcaggcctcggtgtccggtcgtgcttcgacaagtcacgcgcctccgacaaacctcgcgtccgtcgtgttcttgcctctacgtcaatcgacacgcataggtgagaatcctcttccctctctttctctgtattgcaacgagtgtgtccagatcagatcccagagatcctcagcgatggcgatctttggacccctctttgtggcttcgatctga

SEQ ID NO: 11615 - DNA, 507 bp, Zea mays
  Peptide Sequence Number=SeqID_54990
atgtcgttgattctgccgccggcgggtgggctgtcggccgccattgtcgccgtcgcgcggtggaggaaggagtaccatgtcgtagccgccgtcgagggacatgaactcaagactcccgaaacggagaatcgtcccgggttggaaaggttgctagagactacccatctggagctcgatggaaagctgttcgtcaacacgcagcaggcccctacctggcgcgccaactgtcggcgtttcgaccccggggggtccctggaccgacgagtaaattctcgccgcgtgtcccagcccagatgggtcggcgcgaggcggagcacgaaggggggaaaaggagacaggcaaaaggggaaacccgcggccttcgtgttgccctgcgcccaggtcgggtgcgcttgcagtagggggttacaagcgtccgcgtgggagagagcgagagacttacgcgccggcccgttctcccgcgcggccaaccttctcgtacgagagccctggaccttccttttatag

SEQ ID NO: 11616 - DNA, 99 bp, Zea mays
  Peptide Sequence Number=SeqID_54991
atggcgctttcccccctcctccttgtggaaagagtgaggctgacagcagccaagtccggcctcgggcgccataagaaattccgcctcgccagaccctag

SEQ ID NO: 11617 - DNA, 423 bp, Zea mays
  Peptide Sequence Number=SeqID_54992
atggcgggtagaggaaagctcaccggagctaaaggaggggtgtctggccagcgagggcttgcaggtttcactgactggatcaagagatatggaggggtgaagttgggtttgtctcactgccgaacacagagagaaaatcctggtttgatgtgtccagggcacacgtcccgatgccatcttctggtgcaaattgcaaaggggtactttgatttgtgtcaacgtccaagtcttcgaccgcaacttttggaggggacaaagcgaagggcctcaatagccgaaaggggctccccgcatccccgcgcacgcgtcccgaaggcacaaactctcctagatcgcgaggtccaagtcttcacaggatcaggaaggcacgactccgcagggtcgaggccgcgatgtgcaaatgatggccaggccaaaatgtag

SEQ ID NO: 11618 - DNA, 192 bp, Zea mays
  Peptide Sequence Number=SeqID_54993
atggaaaagactctcaaggatatgctggcttttgggaatcaagaatgggttcacgccaaccgagagcacagatacaccatcgtccagcctcttgccacggaggatgttgaagtaaaagttgttctctgctggaggattttcagtctgggggacaacctcttcttctaccacggtttcttcctcgtgttctaa

SEQ ID NO: 11619 - DNA, 423 bp, Zea mays
  Peptide Sequence Number=SeqID_54994
atggcgggtagaggaaagctcaccggagctaaaggaggggtgtctggccagcgagggcttgcaggtttcgctgactggatcaagagatatggaggggtgaagttgggtttgtctcactgccgaacacagagagaagatcccgggtttgatgtgtccagggcaccgtcccgatgccatcttctggtgcaaattgcaaaggggtactttgatttgtgtcaacgtccaagtcttcgaccgcagcttttggaggggacaaagcgaagggcctcaatagccgaaaggggttccccgcatccccgcgcacgcgtcccgaaggcacaaactctcctagatcgcgaggtccaagtcttcacaggatctggaaggcacgactccgcagggtcgaggccacgacgtgcaaatgatggccaggccaaaatgtag

SEQ ID NO: 11620 - DNA, 732 bp, Zea mays
  Peptide Sequence Number=SeqID_54995
atgaggacggctatccgcctgttcggtcaccacagccctgtctctctctctctctttctctatcaaccactcaggtggacgcgagctggactgaaggttaggaggtgcgcgacgcgattcattttatgcacagagattggtcagcaacggaatccgagctctccgcgacaccgggacaagggggagaccgcgcaaaggctgcctgaccaggcccgcatgccaggtgcgcgcgcggaggagaagagtttgggccgcgtggagaggttgcgtgagggatattctcactgttggcctaggttccatgacctacctgttgcgagtctatcttcggctaatgttgtaactctaccttgcggtaatgtagctcttcggaccgagcatatttctcgaagtgatatagttcctgcagagttgaagcaagttcctgttcaaggaccttctcctttcttcctcttccatgattattctagtctgcatgtttgttcgctgccttttggctatatggttgtccttgatgcgaaggccacgaagtttgagttcatcctcagacgagatacccaagtcctcaccatcttgaaagttgtctttgtcctcttaaattgtgtggggtcccatgggtgggaactcaggtggtgcgtctctgaggggaaggtcttcaatgtgctgttcgtgaggattgccttgcctttcttgtctacaagggctgccatggcggctttgtctagagagtag

SEQ ID NO: 11621 - DNA, 594 bp, Zea mays
  Peptide Sequence Number=SeqID_54996
atgacaaaggaggccagttttagaggccacagcacagctcacagtcttcaggacagcagcaaagctcctttaggccaccagccccaaggggccgaggcagtaggggcttcggaggaagatatggggatcaactcaggaaaatctattgcttattctgtggtgaagacaagggccacacgacaagaacatgtcagtttaccattgagaaacaaaaggagattgctgaagcagaagcccggcagaatcaaccgaagcaggttttacatactgcttcgtgccactctccttacataccagaatatgtgggcaatcaacctgcagcttctgttgcttccgcaagccattcacaagcctcctggccctagctcccaccgccaccaccattgcaacctacttatacccgaagccagcagccagaagggcgccagcattcccaacaacaacgtgacttcagggaggagtccgaagctcatacagtcaacaacactgtaccagaatcaaagcacatatactgagcaatatcctacttctaaaatacttttattttctatgccattttgctttttgtataaggaacaagcaatgaaaacttag

SEQ ID NO: 11622 - DNA, 561 bp, Zea mays
  Peptide Sequence Number=SeqID_54997
atgagtcaagaaaggttgaatgatttggtgactttatgcatcaagaagaagctattggatggtatcgatatcagtagtgtcggtaccctgaatcaggggtaccccttactacagtatgaagacacggtgctcgtgccactatctctagccgcgcggctttatccagtgcgcttccacttcctgctcacgcggaggcccgatgctgccacgtggactatcgcccgtgacacgatgtgccccctctgcattaaatgtgtcctgtccactccgctggcaggcggtgtccaggccatcctgcaggcggcatgcctgtccggtccattgtcaaacagtacgcccgtgctgcgaggtgcactcatgatggtgcaaatcattgagaaccgcgccgagacttcggtagatttcctggtgaaggaggaagctgcctcttccacgccacagaccaacgacctccgggcagaactcaaccgcaggcgtgctggagaggatgcccggatctctctggagagggcgcgggagagggcgcgggagcgccggcaaaacatcgagggtcgcaactga

SEQ ID NO: 11623 - DNA, 1422 bp, Zea mays
  Peptide Sequence Number=SeqID_54998
atgcccgctaacccgtggggaattcccctattacggtacgggtatgggacaaaaattgtccccatgggtatggatatgggacaaaatctccacccattgggtaaacgggtccggacccccacgggaatgtgccggaccctggatacacggcccgaacctccgggcagagtccagaacctccgcgagtacagactggacccccgagacgggtcctggacctccctgtgtggggcccaggtcactcacaacaaggtcccgggattctatgagaaggagtacccggaccttaatcaaggccaggcgggggtccagagccgacacgtgtccggaccatattgcgtacgcctctgctccccgctcaggcggagacccgatgctgccacgtggtcggctgcccgtgacgtaagccaacgggcggagacggacgtaaggcctctgggccacgcgcatttattgcgggtgaggcgcgtcgcctgtcaaactggcagcgcggccgtctccgtcccgccttctgcgcctcctgtggcgtttggagcatcttccaattttaaggatttgcgttgctcagtgtggcttcctgaatgtgaagcgagtcgtgcagtcgacaacgttgctgtttctgttgtcattgtcttggtgacgccgatatcctgcgctcttgtggataatttcaagagcatggcctcctggaagtgctcgcactcgccgtcaagcccgtaccttgcgaagtcgggtttagtcgattcttctcttaacaggaatgtaaagtcttctcagccacaaagtataaaatactttgtcagcttaatgggccagcagttccgttgcggattgtcaaccagggagggtagcctaagtgtaaagcttgacattccttcacacgaaaaatcaaggataggctggaactggaaaaacatgcatcaaaagataggaggtgtagctggtggactctgctttggtttctcggttactggagtagcaagtgccgaggttcctatcattagagtcaaagacaatgccgagacttcgtcatcatctaccagttcaactcatggaaaggaagtgtacacagattattctgtcacaggtattcctggagatggaaggtgtttattccgctccgtggtgcatggtgcatgcattagatcagggagaccaatacctaatgaagatcttcagagaaaactagctgatgaattgagagcaacggtcgcagatgaatttgtcaagaggcggaaagagaccgaatggatgccaataacggtttacatgcgcgacgaggatgctggcggtctgatagcaatcgcagagtatggccagcagtatggtaaagaagacccaatccaagtcctgtatcatggttttggccattacgacgctctacagatcccagcaaaggttggatcgaagaggaaactgtag

SEQ ID NO: 11624 - DNA, 786 bp, Zea mays
  Peptide Sequence Number=SeqID_54999
atgtggaatatacaggctgacccaggtgaaaccaaaaattcaaggagtataaaccagactaaatcctctaaatgctctgtcattattgaagaacttgataccaatgaaaaaggagttgataattctgaagaattgttttctggtactcaaggtagctcgattgtgaatgtttctcaagaggaaggcgaagatctttcggatcaaagaaagaaaactgatggcattattcatcatgaagataatcagaaatttatgccttcacccatcccgataagaagggtcagtgaacgtcttaaaaaagatatgggtattagaattgaagagaagaacagaagaatggctgtgaaaaggaatctggaagcttctaaggaaattattgatattagcaagaaaatgggagttaatataaatgagcaaaatatggaatctattgagttactcaaagaaatggaattagctagacaatgtttgggtcagaaaaaaattgagattttacagtttattggcctacaagaaactatgattggggactgtgatgacttcatcacaagaaaattggacccctctggtgattacctatggctttggtcccctgctaaagggaaatctggaggcattcttgtgggttctagaattgatgatcttgatgtgggatcttttaagaagggaaatcacattctccaggtgaattactgggataaagctctgttatgtaaatggaatcttatggtgatttatgggtcctgctctggagaaaatatagaatatttttttgaaagagcttga

SEQ ID NO: 11625 - DNA, 483 bp, Zea mays
  Peptide Sequence Number=SeqID_55000
atggcctactcgacaacagtagggtcacgctggaagcgcgtggccgccatctccacggcgtacaacgtcttgtacgatgtattcagcggccaagccagcggaagaagcgagaaggagcgccgcctccacggacatccagcggaggtaggcgatgatggccgcctgaaggatgaagcagggcgtaacttgttgaggttggaggccaagatcctccagcagcagcatgaaggaagacgaaatcggcagcgccaggccgctagggaggttgaagacaaagagcacaaactctctggtggcaagttcgccggggaggatggcgccggcgcaaatccttccaccgaacgccggcgcatcccatccaagctggcggcacaccatgtcgagcacccacatagtctgggcatgctcgggatgaacttacaaggccatggcaaactacggcgacgcaaagcagagaccttgaaggcaaagggacgtagatag

SEQ ID NO: 11626 - DNA, 249 bp, Zea mays
  Peptide Sequence Number=SeqID_55001
atggaaggccatgatgatggaagcatcagaaatgcgagatatagtacctcgcaccttggtgaagcgggagataaacatccaaagagtctccccgggttcctgcctcactgcgtggaggtgggcctccacgccgtgctgttggtgcggccggaacttggatggccagaacaccgcgcggagatgattcgcgagagcggcgcagcccacgccggccaaggggacacccgcctggaaccgggcgcccactag

SEQ ID NO: 11627 - DNA, 456 bp, Zea mays
  Peptide Sequence Number=SeqID_55002
atgaaggaggcgaggaaccactaccacatgaggggctcctcgcgcggcggcggcaccgctgccaagcgcgacctgatgttacagtggggcaaccggaagcgcccgcgctgtgtcaaggtgcagcgccgcgatgaggccaccgagaaggccgccatcagccagcgccgcgacgaggccgcagttgcccatcaccacccaaccggccacacccaccagcaccaccgtgttctcaggtttgtgcctttctctaatttgtttcttttttatcgtttgtgcctttgtggtgtcgatgtgcccattgcatttgagaacaagtccccaacattggcgcccacctccggcggttcatgctcagagccagtcaacaagaagcagaagaaggaggcacagagaagggcagtgcagctgatatcatatttgctaaggcctcagacaacgaatcaagctgaatctcag

SEQ ID NO: 11628 - DNA, 1089 bp, Zea mays
  Peptide Sequence Number=SeqID_55003
atgccttgctggagctcctccggtccacccgagactttctctccgccgttctcccctctctgcccgtggattcatggcctcttcctcgccattgagttcaccgtggcgttctctccctctctgcccatctccggcgaccccagagccaccctagctcatgcctgccccaactccggtgacttcaccgccgcggagaggagcagcgccgcccgcagccgtttgcccctccccgacaacgagcagtccgaggttcctgagtgtgttgttggagacctccctgagcaacaacctgcccgtatcaggtgcactgcacgtaagtctgtgatcccctttttgccttctcgcctggtggagcgtccactgcgtcgcacagtgtcaggtcagtccagtcacctggagagactgcattgtcgcctacacgaggagcaggagcgccgacgccaggagcaggagcagcaggactcttcccccttgcctcagcggaaggtggagtctgagaggttgtcttcccttgtacctcagccaaagatgccccctacaccaccacagggcatcccgattgatggaggagaccctgacggagacggagacgacgccggtggcagttcgagccatggcacggagctctcggaggagccggagccagacggatggatcgctacacccatcactcgtgacgctgctcgcgggtgtcacttccacgacgctctcgataccctgttgcgtcgggccttcgaccgacacacatgcgggatagctgatggcctggacctgaagtactaccctcgccgttcaatcgacagtgatggaggtgtgattgcctcaccagttggtgagggcaatcccaggctgaacaacatggtcaacttggctgtcgtgctcaacacagagttggactacaccctcgatgagttgggcaaggttcgggcggaggttgcggaattgcgtgctaagtgcgcagtacgccactatctggatggtggttctcccgcccctgtcgggattcatcacccttaccgttcagcgccccgtggtcgcttcgactatggtaccctagactgcaggacccgcatagatttagatccatag

SEQ ID NO: 11629 - DNA, 147 bp, Zea mays
  Peptide Sequence Number=SeqID_55004
atgtggtctcccattctggatatggtgggtacaagtgcggtcactgcacggcggcaaccggggtcattggggcattgtggggctgtttggtacctccttgatttggttgatggtgtgacttggccttcatccctgccaccgggatag

SEQ ID NO: 11630 - DNA, 216 bp, Zea mays
  Peptide Sequence Number=SeqID_55005
atggacttaccaattaggttaactaagcttgaccctaatttgctaagtgtaccccaaaaatcttcaagtaattgcaatctcgatgacggagagtacgtgctcatccctgagcaaggagctgtccacgaggaagaccaggagcaagctcccgagactgccatcgaggatctccccgcagccccagctattgaaggcaagccccggttttatgcataa

SEQ ID NO: 11631 - DNA, 417 bp, Zea mays
  Peptide Sequence Number=SeqID_55006
atggaagatgtgtgcgcgaggaatttgagaatggcttaccggattgctcggtctacacgcggccacgggcaaccgaagtccggcgaggacgatctcgggtctccggtgaggttctttcgggtccgagagcttggaaagcttcacgggccactggcaaagctaaccgagggacaggcgcagcttggacgcggctggagcgagctggccgcgatggccgaggattgggcagtgatggcgggcggaggaaagctcgtcggagctaaggaggggtgtctagccagcgagggtttcgctgactggatcaagagatatggaggggtgaagttgggtttgtctcactgccaagcacaaagagaagatcccgggtttgacgtgtccagagcacgcgtcctgatgccatcttctggtatgaggtag

SEQ ID NO: 11632 - DNA, 630 bp, Zea mays
  Peptide Sequence Number=SeqID_55007
atgtgttatgggtacaaggaaggctttaaggaacaaaaagttgattggggaccaagaaacaatcctcgtgatcaggccgatctcgcatcagcaaggtcggtaaccatagagagttggttcagcgattgcattggcgcctcgggcttcctcgtcgtagtaggatcgcgagggtcatcttccgccaaatcggaatcaccgaaagatcggacacttcagctatatcaagtggtatcagatttccaggttgatcgtccacaaaaccacatcaaaattcagcctacccagaactccacatatttctacgacgagcaggtttctgtttctccaggcaatcgctcatccaatctttcaccggttccacctgttggttgcagttcacccctgtggtttggagcacacgacacggtggatgcccagttgcaggaagtaaggggacaagttgatggacttgttgctgacgttaggacgatgcatgaacggcttgattcaaaggtcacttcgacgaccgcgcgtttcaaccagcttgaccttgctcaaacggcgactcgcaccacactcgacaccatcctggcacaccttgatgtgttgaccacaaagatggagcaagactacggcggtgacactgagtag

SEQ ID NO: 11633 - DNA, 333 bp, Zea mays
  Peptide Sequence Number=SeqID_55008
atgtggaacagagaggggagcaaggcaagctgtatgggatgtttcctcaccgaggatcggagcatcgttgatgttgcccacgcgacgcagcggcattgcggcggtgaacagtcaacagcgccacgcggcaccgcgacgattgaggcgaactcggaggaggtttgcttaccggtgaaaaatggctggcgcctgttgactatggtgtgggtacacccggcggcggacgaagcggacctcggtgcgataattaatcacgtgatgcggaagatgactcaagtcgaccccaagcgcgggctacttcgcatggtgatgctgatgaacgaacctgcctga

SEQ ID NO: 11634 - DNA, 447 bp, Zea mays
  Peptide Sequence Number=SeqID_55009
atgcagattattgaaagaaggtgcgaggctcaaaagggtgctggtataaggagaaaaaaaacactcgataaactcaccgatcaacctagaaatctgataccacttgatagagctggagtgcccgatctttcggtgacaaacatgatgcaacaatcaggatgcatgctcgtcctatacgtcctcacaaatttttgccagcctaacgtggacaatagtgttctatatcggtggcatacttacgactctctcggtatattgctagtcggtcagctacacatacgttttggagctgtggcagaacctcccaagttattgggcccacatgcacctgcccttgtctcaaagacctcagacggctatgcatgtgcaccaaataacttaacaagatctgtccgagtgccccaaggacctcagataaaccacttacaaccagaactgcaggattaa

SEQ ID NO: 11635 - DNA, 630 bp, Zea mays
  Peptide Sequence Number=SeqID_55010
atgggaactcacatacaagagacagccctaggtgctaggaggaggcctgcgccggatttttgccaagatttgcacgcttgcgatctcggcgagctgttgaacaagggcagaagaacacttccacgtgttcgacgcgctctgaacgcgccagagcacgcccagcgcccgacccctcgcgccctgcgccgcgccaagccgtgcccgtgtctcctgcttgcgcccgcgcctataaagcccaccgaagcttcaactgtactcccccgcgtgctctcgacctcactggagccagagatcaccggtgtttgccctgcaaacggcgtgcccgcggccacccgaacacccgccaccgtagacctgccagcagagcctctcccagccgcgtccgaccctcggaattgcaacctcgcggacggagagtacatcctcgtgccagagcaaggagttgctcaggaggtagccccggatccaacaccagagcctgcccagaggatctgcctgcccaagctttggaaggcaagccccggttctctggaggacatggttgctggagtgacttggccgtccatcttgccaccgggttggacagtcgagtgggaccctgcctcggctgaggaggagcatgaggagtga

SEQ ID NO: 11636 - DNA, 141 bp, Zea mays
  Peptide Sequence Number=SeqID_55011
atggccatgatgggttcaacatcgaaaaagatgtacctctgccaggtgaagaagcagcgaacttttgttgtttttgttccaaggtggtaccaaaagaagaaaatcaagattgaagctacgggagaaaaggtcctccgttaa

SEQ ID NO: 11637 - DNA, 66 bp, Zea mays
  Peptide Sequence Number=SeqID_55012
atggaggaaagggtggcggggcttaccgtcagcgatctagctccgggcgtgcctaaggtaatttag

SEQ ID NO: 11638 - DNA, 210 bp, Zea mays
  Peptide Sequence Number=SeqID_55013
atggcagaagcaagcttccacgtgttcgacgcgagctggcatccgggggcgcgctcagagcacgcccactgtaatcttgctgacggagagtacatcctcgtgccggagcaaggagctgctcaggaggtagccccagatctagcacccgagcctgcaccagaggacctgcctgccactgctttggaaggcaagccccggttttatgcataa

SEQ ID NO: 11639 - DNA, 162 bp, Zea mays
  Peptide Sequence Number=SeqID_55014
atggggattggttgtctacgagataaaattggaataaggattaaggtgtggtaccgttctctggaggagatggttgctgggataacttggccgtccaccctgccaccgggttggactgttgagtgggaccctgcctcagccgaggaggagcatgaggagtga

SEQ ID NO: 11640 - DNA, 771 bp, Zea mays
  Peptide Sequence Number=SeqID_55015
atgacttcccatggatcctccgatgacgaaaatgcactgacccacactgacggacttgcacgagagggctttccccgcattctgtgggaggtacttcagggggctggatacacgacaccccctcagtacgcggtgcagcagttcgagaagcaccgggtgccccgctgtagggtgaggatgactttggagcctcatcccctgcagccaggctggcgctccttggactccgagtctttcgggtaccgggcagaggacacgatcgaggcgatcgctctgcatgggttgactaccttctgcggattccatcccttggagctggctacccaccccattggcttgttccctgctgagaaggaggacgacccaatgtggaaggatcgggtggagcatgccaaggacatctgggccatctacccaggtcagactgcgcatttgacagtacggtgcatgaatgctctgtaccgtctgcaggaaatggtggaaaaggacttgcaggtggagcagctatccactgatattcaggagttggaggagctggtaggcaccagggagaacaccatcgaggttctcgaggatcagctcattaacactcagcagcagcttgctgaggctaacgagcacctggacctgcatcaccaagagatccaggaccaggaggccaacgaggacgtcgacattgagggaggagatgagcctgcctccagtgtggacaccgctggctcgggaagaccaccttcccccgagtcaagtgttgcttcgttcgctcactag

SEQ ID NO: 11641 - DNA, 441 bp, Zea mays
  Peptide Sequence Number=SeqID_55016
atggcacgtacaaagaccacccttcggaaagcgattggacctcagggtgtgccccgtcaccagttggctccttgtcatgaggggagcaacagtgagagcaatgatcccataggagacttggagctacacccaaatgtgtcgcctgaagttgcggagatgggagctggcgcagcaggagcaggtgaaggaggaccctatggggaactggatatctttagagcccctccttctatgaacatcatggatgaccgtcctcctgaagctagcaacggatctggagcgaccaagaatatgccaacaaggactcgtgctcaggatgggacagggacttctcggggtagtggggaggagactacaatcccaccacctatacctccaactttggctgaggccattgctgccttgcttcatgctactgctgacaatacccggtttctctag

SEQ ID NO: 11642 - DNA, 399 bp, Zea mays
  Peptide Sequence Number=SeqID_55017
atgccctgtggtggtgcaggggcatctctggctgaggtgcaggggaaggcggcctctcagactccagcttctgctgaggcgaggggaagagtcctgctgctcctgctcttgctcctagcgtcggcgctcctgctcctcgtgcaggtgacgatgcagtctctccaggtgactggactgacctggcaccgtgcgacgcagtggacgctccgccaggcgagaaggcaaaaagggatcacagacttacatgcagtgcacctgatacgggccatctacaaaagaaacttagaagctaagcctacacaggcagctgactgggggtttgccactaagaaagaactagaactcgtcgtattcttggaactcctcgaagtcatccatgttgccagcatcacctcctga

SEQ ID NO: 11643 - DNA, 219 bp, Zea mays
  Peptide Sequence Number=SeqID_55018
atggaaattgatcctgataattcaaccttgtatgcaaagaggagcctttgctttctgtacacaggctatgaaggaaaggctttggaggatgctactacctacagagatatgcaaccagctcttgctctggtcaagggaaggacaatccgtgaagaaaggttattagtgtacagggaagaaagaaggttgttactgcacaggaaaaacagaggttcctag

SEQ ID NO: 11644 - DNA, 281 bp, Zea mays
  Peptide Sequence Number=SeqID_55019
atggatgtggataatatttgtgacattgacaacaatgtgtcgaatgaaaatgagatacatggtattggggggatgttaatggcaactgcaatgaccacatggaggaggaggatcatgttcttgcacctactgatattgcacaagatgcaagtgcgagcgcaagtgaaaatgcaagcatatatagctgcaagtgtccaaataagcactgaggatgattgtgatgaagaattagatgtcaagaaaaagaaacttacttcatgggtttgggagtattttacaag

SEQ ID NO: 11645 - DNA, 318 bp, Zea mays
  Peptide Sequence Number=SeqID_55020
atgccttttaacagtagcttactgtactcgttgaaggattttgaatttcatgaactagaggaggtcctgcaatattatcctcatggttaccatggggttgacaaggaaggaaggcctgtctacattgagttgcttgggaaagttgaacccaacaagcttatacaaatcacaacagttgagcgctatattaagtatcatgtacatgagtttgagagagctttccgggagcaattccccgcatgctcaatttctgccaaaagacatagatactacaacgacgatattggatgtccacggtgtgggctgcaaaaactttag

SEQ ID NO: 11646 - DNA, 423 bp, Zea mays
  Peptide Sequence Number=SeqID_55021
atggtgatgcccctctgccccacccctgccgctacgagaacattcaggttgtcggtcgcacggttccccatgcaacgtgtcccttctcctctgtcaccgcctgactccctcgcgtggacaacgccgtgcaacacaggagagcaggttgttgcttcgtcccaggtcaaggtgagcctccctctccctgatccgacacgaagtgctgagcatctcgtgggcgtgctcgtcgtcgtggaggtcgagccagcactcgagcggctgtctggaggcgacgcgcgccgcggtaacagatctgacccaggtcaagtgcaacttcctccatttcgtgttgttcaggatgatggacttaattgggaagattatttgacggactcaaaattcaatcaagaagtttatgtgagcagtttagtatctgaaatttga

SEQ ID NO: 11647 - DNA, 834 bp, Zea mays
  Peptide Sequence Number=SeqID_55022
atggctggggagcaccgggaggataaggaaggggaatgttttgtccggtttgggcatggtggtggcctgactccttccggtataatcattaaggtgcttcggcgttgcagcagcccaatgttgatgcaatgtagaggaatagggaaagtgcatgacacgctgcagcagttcccggagcgggcgtacgtgcggctgcggagcgaggtgcacggtgggtacttccacgccgacgaggacggggtgggtgtgtccctacgctggcgccgccacagattaatcgaggaggcttacgcggcctgttgctactgcatcaggaacccatggtgctgcagcggacgatctgctcaagtgaaggtgcgactgttggaggaagacaacaatgcagggaagtttgggttctacagctactgccttaagtgtcataaggttgccaaagaagagcaccttaggcatcaagatgttattatcccttttgcgtggcacaagggaaagttggtagcatgggtgattggcaaagagacttggtctagcagctttcatgatattcagggtcttatgagtttccgttcttctatcgatcgctcattcctcctgcaccagccaaaagattgtagatgcacatcatgcaaggatttgatgtctactaaacagctttatggttgcttaatctcctactactcaattaactgttgggattggacgaccgatagaaaaacggaaactcataagaccctgcaagtgtgcatcacagttgcaccttcacttgagctacgcagcgggtacaaagttttccgacacatactttttggcaagtcacgtaaccaaggctactaa

SEQ ID NO: 11648 - DNA, 909 bp, Zea mays
  Peptide Sequence Number=SeqID_55023
atgtcgggggtgggaggcagaaccgtgcactataccggtgtggacgcctacgctctgctcttaagaagtagtagagatatgaggatagaaggggatgaggctgcgtcagatggcgctaaattctcgaaaaagttgggttcatcagcagaagctgcttgctccgccgccgccctcttcctcctctactgcaccagcttgtactgctgtagttccagcaccaccacattctcctcctgctcctgttacctcagcaccagcttctcccctgcaccttctgcagcagctccagatactaaagatgaaccattgcaagataaaacagttgaagaaagtacagatgttgtgactggaaacatatctggttttcctgccagccaatttgatcatagtgcatgggcatacaagggtgccatggtcaggaatatgccagatgacccgtcccagtcacaacatctcgttcaagaagatttagttgatgtatttgacattttggatgacctgaagaatgaccctgtacagcgtgatttgttgaaagaagtcgagaaacacgatgtaaagaatgtttctacatttggttctactgaaaggagcatccccctgtcccaaggtttcacgatgccccggtacgttgtacctgatgacactgacattcagtacacacctcctcagccacgagcgacacgttctcaagctcaacctctgaaatcttcgctccgtaccaatgagactaggcagattaggaaaggccagaagaagctcaagaagtcgcctaagaaagtctcccaagatgttgagcttgatgacaatggtttccccatcatcgactttgctgctctagaccgttttgatcctcctccacatcttgccgtggatgttgagagttatggtggaccagctgcctcaggttga

SEQ ID NO: 11649 - DNA, 873 bp, Zea mays
  Peptide Sequence Number=SeqID_55024
atgtcgcgcacgaagaatgcgtcggcatcagggggtggcgacgatgaggaccctcgtcgccccttcaggcaggtgaagggcaagactgtgtatctggagcagcaggaaggccgcaagaagcggcgttcagacagagaggctcgcgcagcagcagcagctgccgcagccgctgcacaggcagcacttggagatcagccggatattccatcagatcagattgctttccgtgctcgtcgtctcgcctcccggtacgtacccgtggagtcttggctgccagctcagagagacccagcagcaggagttcttttcagcacgcggattcaggagtcattcttcagggctcagttgtctgctcagattgcgctgcgagtgcaccgcctattggatcttccagccttcttgctagcagccggtgctgagtctgaggctcatctcacctatttgccagggcttctgtcctttctgactatcagcggcagatacgttgaggagtgggtccgcgtcttctatgcctctgtttggattgacccggatcatcattggatgaggttccgctttgagcgcgaggatgtcacaatcactgccgatcagatccgacagctatttggcttccctgtgtcgacgactcgcctgcacagtctctgctatggcacttcagatcctccacgtcgccctcacggcggtgtggctccagggacagctcacgtcgcggctctgttccgaccgcctttttcagatgggtcgcgacgttctccagcagacttcactactgcagcgaagtacttgtatgagctcgtcagacggacactcctgcctcggatgggatacagggaggctactactcatattcagctatggctccttggtgccctg

SEQ ID NO: 11650 - DNA, 465 bp, Zea mays
  Peptide Sequence Number=SeqID_55025
atggcgtccgcccacaagcaggcgagaggtggcgccgccggcggtgccaccagcagcgtcgtcgtggacgcaagcgagctcaagcagaggggcagcaagggtcacaagaagcccggcacggacgcggaggatgatgacaaggagtcggggaggggcgccgcaggggctgcgagttgcaagcaacatgctcatccataccgaggcgttagcgatgacttcatcaatctcgagaatttacagctcagtctctcggaggcgctcataggtagcatcaccgggtacccgaagtacccatactaccccgaagtacctggcgtgtggactccacggactgtggagtccacagtccagtccaactgtgcgacggtccatcaaggcgcatctgaccttcattcctcggtgaaaggatcacgatgcccaagagggggggtgaattgggcttttctaaaaatcaacactaattaa

SEQ ID NO: 11651 - DNA, 180 bp, Zea mays
  Peptide Sequence Number=SeqID_55026
atgtcagagagtaatgtggatagcatccagatatctgttagtaacgatgagaagaggaatagggcagatgctaagatctcgcaggacgagccgaggcacaccatgatgcggtcactgaagaagaaagccttgcatgcatcgacaagactgagagcacctagagggggggtgaataggtga

SEQ ID NO: 11652 - DNA, 1008 bp, Zea mays
  Peptide Sequence Number=SeqID_55027
atgacctcagggcggatgccgctgccaggaggccccccgcccgtgcccaaactcgtgaggcaaggacgggcagaaggccgtagagttggaggtcagtccgtgggcggcactggctatctcatcggcgaaagaacctcttccagctgccgtggcggaaaccggcgccgggagcggccccgaagccactcgggtccaagagccgggcacgctgcagctgccggcgccacagacgacaaccgcccttccccccgatcactgagggaaggagcgggccaccacccacgcgggggccgaccccaactcggcacactcccctccccagccctggtgatgaaaatccttgaggctgagggaggggcagaggccgcagcctggctcgctttcccccaccatcaaactggagaccagcgggcgaaagggcgggcagccatgcaggcggcatgcaaccgcgccaagtgggcgcatttctccgactcccaacacgcccggcatggggcccaggcccacgcgtcatgcaaccggtgcgccgaatgcttcgtgcatgcaactgcaccgccacttgcgccactaccgcgcctccttgactgcggaaccaataccgcgactcgaggcgacccagcacgtgacccagcagcgccagcctggcgcgacggcggcgtctttggcaggagaagcgggcaacgcttcgccttcgccataatgaccgcgtcaaaaaagggaccgggaaagggggataccccaaaaaggatccttccctgtgaaggaaccaggctccgagcctccctactgatcagaggttcgaaggctggcccctcggaagggttcgacagccgcctcagatcacgtgggccctacacccactactggtcagaggttcgaaggccggcccctcggaagggttcaacgaccgcctcaggctactcgggctccgcgcccactactgatcaggggttcgaaggctggcccccgaagggttcacagccgcctcagacgccgagcgagggatga

SEQ ID NO: 11653 - DNA, 270 bp, Zea mays
  Peptide Sequence Number=SeqID_55028
atgaccgaggacaagcaaaggcaaaagctcaagcaaaagacatcaagcaaaatctccaacacctacatcgacaaaaaggctgctacaccatatttgatcaagaagaaaaagaatggaaaggtgatagcaatcaaggccaacaagcaagccaacaaaggaaagggggccaaacgcatctgggtgccaaaggaaataatttcaactatgaaaagcaccaagaaggtttggatcccaaaagggaaatatgcgtatctattttcttgtatctag

SEQ ID NO: 11654 - DNA, 291 bp, Zea mays
  Peptide Sequence Number=SeqID_55029
atggcgcaccggacagtccggtgcgccaacggtcgtttccaacggctagttctgacagttagccgttggactcatggcacaccggacagtccggggcctagatgctttcacccaggaaagcctctgtcgaggggatcacgctgcgccgtgctaatggattcgccccagcgcaccttccatcaacgagatctcttgaagcacccggtggatgggttctctgctgggatggtcgatgacagcaatgtcttcgagtggcaggtcaccatcatcggaccgcctgacaccctatag

SEQ ID NO: 11655 - DNA, 1254 bp, Zea mays
  Peptide Sequence Number=SeqID_55030
atgcatgaggggagcgcgaagacatggttgcctttcaagggggccaccatccttttaaagacaactctccccacttgcgtcctcagccgtcacggactgacttctccaacacgctccaaggtcctccccatacgacacgggggctgggtcccacgcatcgtgcaagctggcccaggacagaaggagccaaaaccgccgcgcgcgatgtgcgcaactgcccagcggttacgagcattcctccactttcgcccagaccagcgggtgaaagggcggaccgccatgcaggcgacatgcaaccacaccaagggggcgcaccctttcgacttagacgcgtccagcgtggaggcccaggcccacacgtcatgtaaccggcgcgccggttactacgtgcgagaaactgcaccgccacttgcgccagtaccgcgcctcctcgactgcggaaccagcgccgcgactcgaggcgaccctgcgcacggcccaacagtgccaaccaaggacatcgatcacgggcgggcggaagcagcggtcaagtcgttagcaagctcacgtcccctcctgggacagcgagagaaccctctcccacggcgtgaagacgacgcgctcgtgttccattcctcgaatgggaccgggaaaggggatatttcgaaagggatccttctccgtgaaggaagcgggccccgagcccccctactgatcagaggttcgaaggctggcccctcggaagggttcaacagccgcctcagagcgctcgggctccgcgcccactactggtcagaggttcgaaggccggcccctcagaagggttcaacggccgcctcaggccactcgggctccgcacccactactgatcagggagtgaggctgacagcagccaagtctggcctcgggcgccataggaagctccgcctcgcccgaccccagggctcggactcggcctcggcaccggaagacgacgaactccacctcgcccgaccccagggcttggactcggcctcggccccagaagatgacgaactccgcctcgcccgacctcagggctcggactcggcctcggcctcagccccggaagacgacgaacttcgcctcgcccgaccccagggctcggactcggcctcggcaccggaagacgacgaactccgcctcgcccgacccggggctcggactcgacctcgacctcggaggagcctccgcctcgcccgacccagggctcggaccgaccacgtcacaggggggccatcattatcctacccctag

SEQ ID NO: 11656 - DNA, 573 bp, Zea mays
  Peptide Sequence Number=SeqID_55031
atggcgcgcccgtgccctgcccggcccctcccttgcgcgtgcgcgtctcgcgcggcggaggtcggcccatggcgctccccgccccgacgcgctcccctgccctggcgcgctcgccccgctctgtcccggcttacccacccctccctgcgcgtccgcggcggcgtggccccgctgctcgcccgtcatggcacgttcctggcgcggcgcgtccgcggtttggcgcggccccgctgcttgcgcagcgcgttcggcctcggcgcgacctgctgcctgctcgcggcgcgcagcgcgacgcgtggcaatgagaatggtggttttggcattggctatggtaatggtaagtggtattctttctgtttggaaagggttgtctgcattgcaaccactgctcaggagaagatgaagccttggaaggagacttccaagagttccaagattacgacgagttctaggcatgggttagtggcaacccccagtcggctgcctgtgaaggccgcatgtatctacgtttcttttccgcactttgattattgtaaagactatgtggatgtctcagacatacgatgtaattga

SEQ ID NO: 11657 - DNA, 300 bp, Zea mays
  Peptide Sequence Number=SeqID_55032
atggcgcctcctgttgacgtggcgaacttgtgccctaggttgggcgatgtggaggctcctccgaagccgaggtcgagtctgtcttccatggccctgggtcgggcgaggcggaggtcgtcggcagaggccagggcggagtccgagccctggggtcgggcggagcggagttcgtcgtcttctggggctgagcccgagtccgagccctgggtcgggcggagcggagttcgccgtcttccgggatttagcccgagtccgagccctgggtcgggcggagtggagttcgccgtcttctggggctaa

SEQ ID NO: 11658 - DNA, 429 bp, Zea mays
  Peptide Sequence Number=SeqID_55033
atggccggatacctccacacccttgatacccactacgatgatctctcctcccactgcacccacctaaactcccgggtggaaagcctagagcagcaagtccaagagctgaagaaggagaaggcatctctccaggagtgtctcgacatagcagaaggcgaggaggccaacacccgtgaggcctatcgaaccttaaagatggactatgataagaagctcgcccccacaaagaaaatccggaagaaaaccacaagccaaggatgccagacagaaaggaggaagaaagctcccccagcgccagtacccgccaggatagaaaatttgtctgatatcgaggatatgtccctcgctagccttgatgatcttctcaaggaatttggggacactctagaaaaggaattcggtagtacctcagggaacgctcgcgtgtag

SEQ ID NO: 11659 - DNA, 456 bp, Zea mays
  Peptide Sequence Number=SeqID_55034
atgcagtgcgcgctgttcactgcacgtccactccagcagtgggcagtggcccgctggtggcgttctcccgctgagtcagccgagtccgcgcccgtgcgtctctgtctcgtgacgaatccggccctctgtggctgtcacatgacggatccggccctcggacaccctggattagctccagtatttaaagaaagaaaaattgcctctgcatcatcacgtcgccgagaactgggaaagtccttgtgcgcgctacaggtcgacgtggccagtggggccggcaccgccaaggccgtcgcggctatgcccatgccgacggatgccggaggcagtcacgccgtgggaatccacaccgtgcgcgccacgaagggcctgcgcacccgtgtcacgccgccggaccgcggtttcgcgccatggccgtatctgcgcaagggtaccgcacccgcgtgccgggggctgtaa

SEQ ID NO: 11660 - DNA, 270 bp, Zea mays
  Peptide Sequence Number=SeqID_55035
atgccgcatttcgctgctacgaacaacggacatggctggcccagcgggccttgtgcctccttcctccgacgcagcgactcgcaggcagatagatgcggccaggccaggcgcccggcacagctggagcgctttgctgcgcctgcacggctcggctcggctggccctggcctgcctctgctctgcctgcctggcacaccactgccgctcgcctgctccagcgcagcggcagggcacgtgcgcgcgccagccagcccggcgcgatccgtctaa

SEQ ID NO: 11661 - DNA, 306 bp, Zea mays
  Peptide Sequence Number=SeqID_55036
atggtcaccgacgtagcttactactcgtcgacgtcgcccctgctcgccgatgtcgcacctctggccgcccctcgcgtctcacgtgatgctcgcgactcgcgcctcgggacatcgtcgtcaacctccgctcgtcgccgctccgcctccatcatcgacaacaacttgtcgtgcaccagacgctcgacggtggccgccgagaactggacgaaccgcgccaagtgcatctcgatgttggcggccttccgctgcacgcgccacgaggcgccgtcgtgggcggtctccgtcgccgccgctgctcgtgcctag

SEQ ID NO: 11662 - DNA, 1404 bp, Zea mays
  Peptide Sequence Number=SeqID_55037
atggtgaccaccagttcgatggtggagagaagcaagccgagctgcggcctctgccccgccctcagcttcaaggatcttcatcatccttgctgcggcggggggcgagctgagccggagctctacctaccgtatgggccagcgggccacctcttccttcagcattcaggggagagggcgctcaccgacctagcggagggggcggacttcgacaacatggggccggtcggccgcaggcgtcgtcaactccagcatgcatggcttgctggctcagctggctctggcgctgcttccagtgccacctcccaccgctggggcagagcgtggctatccgtccgccgtacgggcggctgttgcgccgtgcgcaccgggggaccgcccaagatgtcgcacgccgctagggcggttcatgttcttgggttgtcttgtcctcactccggcacgacgcctctgcgcgaaggtcggtgctcgcccgtccgggaggacttgagtggggatctgccggtgggcaggtggctgcctgtcatcgatgctgaggtggtggcagccggagaaggtttctccgccgatgagaccgtcagcgccacccgcggacttacctccggctctttggcttcgatagcttgtccttgcccctcgagtggggatgcgggcgagggccttgtcgcagcagcgtctgccctgaggtcatcgctgctgctgtttagccgcgcggagcggaggtcgttgtcgctgctgctgcagtggtcggcggcgagccacccggagagtccctcggctcgatcggccttgccacccaaggcttctcttgctcagttaaagaaccctcggctgctctgtgatgagccggagccggaggcagcggtgttagcgtggacaaaggcggagtcagctcaggaagaagcttcgttggcccgggagtacgtggcctccctggccggagaggtgcatcagcggcgactggagcttggccaggtcgcccgctggcgagaccaaccccggagtcaggctgccgaggccatgagccgggctgatatcctaggggacagctggctgaggctacggagcggccggtcgagagaccttggctatgatggcccgagcttggtgctagtctcctccttcgaggtggagatccttccgcccacgtcgccgtccgagtccgggccagattcctccgaaggtggagacgacgccgagggtgctgctgctccctctgttgatgacttgttcgtcggtagcagaatcgtttatccgagcgagagttacttttcacgaaaggtgatgattgagaaggtgatgagtgaggatctcgctatcgaagcagtcgaaaagcgcgaaagatgttctggcagaaagactttttccgaagaaaattttgacgcagagggggtcccccccttctag

SEQ ID NO: 11663 - DNA, 1959 bp, Zea mays
  Peptide Sequence Number=SeqID_55038
atggacccgtgcccgttcgtgcgggtgctggtcggcaacctcgcgctcagaatgccggtggcgccgccggccgccggtgctggcgcgggcgtccacccgtccacgtcgccgtgctactgcaagatccggctggggaagatgccggtccagagcgtcccggcgccgctcgtggtctccgacggcggggagcagacgccggcgtccggggccctcgccgccgcgttccatctgtccaaggctgacctggagtggttcaacgggaagccgtcgctcttctcgtcgcgcggggaggccagcctgaaggtgtcggtctacgctggccggaaggggagtgcctgcggcgtcagctccgggcggctgcttgggaaggctacgatcgcgctcgacctcaagggcgccgaggccaagcccgccgtgctgcacagcggctggatctccatcgggaagcgatccgggaagggcagcaccgcggcgacggagctcagcctcaccgtccgcgcggagccggacccgcgattcgttttcgagttcgacggcgagccggagtgcagcccgcaggtgctgcaggtgcgcggcagcatgaagcagcccatgttcacctgcaagttcggatgccgcagcaacagcgacctgcgcaggccggggatgcagccggagcgcgacgccgcgtcggccaaggagcgcaaggggtggtcggtgacggtgcacgacctgaagggctccgccgtggcgatggcgtccatggtcacgcccttcgtgccctcgccgggcacggaccgcgtgagccggtccaacccgggcgcgtggctcatcctccgccccgcgggcgacggcgcctgggagccctgggcgcggctcgagtgctggcgcgagcgcggcggcgccggcgcgtccgacagcctgggctaccacttcgccctcctcgtccccggcgcggaccacgccgtcgccctagccgactcctccatcccctcgtccaacggcggcaagttcgtcatcgacctgaccgccgcgcagccgctgagccggggcggcacgccggggtgcagcccgagaggcagcggcgacctgagcaactggcccctggggaactaccgcggcttcgtcatgtccgccgcggtccagggcgagggccggtgcagcaagccgacggtggaggtcggggtggcgcacatcgggtgcgccgaggacgcggcggcgttcgtagccctcgcggcggccgtggacctgagcatggacgcgtgcaggctcttctcccaccggctgaggaaggagctctcgcacctgcaggccgacctactccggttgttagtattagatggagttgtgggagattttcaaaaggagaacaaaaggaacgtgaaaggcagggcaaatgacagtaggagcagtgcggaggcatgggcgcatcgcatgggacagcaggcgagcagagagagggggaggtgggtggtggtgggggagcacggcgggtcggcttgcccctccggcgcgggctgggcagcagtgggcgcgcccgacgcccaccactcactcggcgttggtttgcaggccgtggggccgcccgaggcgggagtggagtgcgggcagcggcaggcgccagtagtgatgactagtccagtcctgctgctgggaagtttgttgggattggcgcccagctatgcctgcccgctcctttttcgtttggctgcctgcccgcttgcagctgcggtggagctgggtccgcccggtccgggcaaacccaaaaggaatccaacgcacaacgcagtaatgtggagtcaggctcgcacgatacttaaagcaccctgggccaggctctgcaggcgcgagcaaattggtcgcatctttggagccaggctcccgccggcctggctcatgcagccgggctaccaggagaagccaaccaaacaggcgactgcgatgtttggtttcatttctgaggtcgtcctggctaagtga

SEQ ID NO: 11664 - DNA, 291 bp, Zea mays
  Peptide Sequence Number=SeqID_55039
atgaagggcatcagtcgtcgaccgagtgctgcatccacctgtggatgcaaatctaagtttcaagatgcaaagcacaaactgcatcgcagagaagaggccaagaaccgaacctgccccctgagctcaactgatggcaaccaggtgtacatgatcgtgctctttatggtcgacagcatggaaggcgaaaagccctggcacgattattgtcgtctctgtgtagcgtcgacccctggccgtcgtatccagggtctcgacacggggcgtcgtcttgcggggcctgtaggtggctaa

SEQ ID NO: 11665 - DNA, 87 bp, Zea mays
  Peptide Sequence Number=SeqID_55040
atggccgtcgaggacgccgacgtcgccgtcaccgtgcagctcgacctcggcttcatggtcttcaaccggagaagaaaagaaatgtaa

SEQ ID NO: 11666 - DNA, 864 bp, Zea mays
  Peptide Sequence Number=SeqID_55041
atggaggaagaggattgctccttgtgcttgtgggcggactccctcgagtgtgttctccccgagcttgtggacttgtcgccgtcggtcccgatctccctcatggtggatgctcctgacatcacttcgagcggttcggttcttgcaaacctactcgccgttgaggtggtcacaaagaccgggtccctttcaagtaatggctcaccaggagaggtgcccaatcataccagacaccttggtgaagtactggccgaggtgcaccaggatgaggtcgaagaacagcatgaacccgagcaggaggagaggatgaggacgactttgaagacgggccactcgatgtgggtgctgcgggacaccgactgcgcaggcatgcgcggcggggcagggcatgctacgaccgaggccctccgcaccgctacgacgcccaagctcgacccttttgtgcaagtacctccaagtcggcgtcctgcgctcggtgaggccgttcgcggtgccgtggccgagggcggtttgtccaggcaggacctacaggagctcgttgccgaagatggaggaggacctcttgccgctcctagatcccatcgcgcccggaaggggggaatgggtgatcccatcgcggggtcgtggagcggggttgtgcaggggcatgatgacgtggcaaaggtcatcatcgcggccaccggacgggggagaggccacagaggcgcgggtcggggatgccatgggccgcgcttcgacgtcgagaaaggagctcctccgccgtcatccctcccgcttggacccaagtgtcgtccctcccgctcaaacccacgtcatgccctcctgcgcaaccaaacccgccacgacctcctcaccgcccgctcctag

SEQ ID NO: 11667 - DNA, 171 bp, Zea mays
  Peptide Sequence Number=SeqID_55042
atgtccggtggtgcaccggacactgtccggtggcacaccggacagtccgcatgccccgccccgccgcgcatgcctgcacggtcggtgtcccgcagcacccactccgagtggcccgtcttcaaagtcgtcctcatcctctcctcctggctcaacgagaccatcaacgtctag

SEQ ID NO: 11668 - DNA, 1050 bp, Zea mays
  Peptide Sequence Number=SeqID_55043
atgtcgtccaactgcggcgaggatgagaaggagctggtgtgcgtgaccggcgccggcggcttcatcggctcgtgggtggtgaatgagctgctccagcggggttaccgcgtcaggggaaccgcgagggaccctgcggacagcaagaacgcgcacctgctggctctggagggagccaaggagcgcctcaccctgtgccgcgccgacgtcctcgaccgcgcctccctgcgcgccgccttcgccggctgccacggcgtcttccacgtcgcctccccggtgtccaacgacccgactcagtgctcacgcctcaccacgccgcttgcgtccgcgcccggcccgcaggagcttgtcccggtggcggtggagggcaccaggaacgtcatcaacgccgcggcggacgagggcgcgcgccgtgtcgtcttcacctcctcctatggcgccgtgcacatggaccccagccggagccccgacgccgtcctcgacgagacctgctggagcgactacgacttctgcaagcgaaccgacaacctgtactgctgcgccaagatgatggcggaggtgacggcggcggcggaggcggacgcgcggggcctgcagctggccgtggtgctgccctgcatgaccacgggccccatgctgcagcagacgctcaacttcagcaccaaccacgtcgcgcgctacctcatgggcaccaagcgctccatccccaacgccgtcgccgcctacgtcgacgtccgcgacgtcgcgcgcgcgcacgtgctcgcctacgagcgccccggagccaggggccggtacctctgcatcggcaccgtgctgcaccgcgccgacctcgtcgacatgctcagagacctctttccgcagtaccccgtcacggccaagtgcgaggaggacggcaagccaatggcgaagccgttcaagttctccaaccagaggctcagggacctggggctggagttcactccgctgaggaagagcctgtacgagaccgtgctgtgcctgcagcagaagggccacctgcctgtcatccaaccgcagcagcgcgcgtacctgtga

SEQ ID NO: 11669 - DNA, 1299 bp, Zea mays
  Peptide Sequence Number=SeqID_55044
atggcgctccctgctgacgtggcgggcctgcgcccgaggccgggcgacgtgggggctcctccgaagctggggtcaaatctgccttccgttgccgaggccgagtctgagcccctgggtcgggcgaggcggaagtcgttcggcagaggccagggcggagtccgagccctggggtcgggcgaggcggagttcgtcgtcttccggggccgagcccgagccctggggtcgggcggagcggagttcgccgtcttccgggtcttagcccgagtccgagccctggggtcgggcggagcggagttcgccgtcttccgggtcttagcccgagtccgagccctggggtcgggcggagcggagttcgccgtcttccgggtcttagcccgagtccgagccctggggtcgggcggagcggagttcgccgtcttccgggtcttagcccgagtccgagccctggggtcgggcggagcggagttcgccgtctttcgggtcttagcccgagtccgagccctggggtcgggcggagcggagttcgccgtcttccgggtcttagcccgagtccgagccctggggtcgggcggagcggagttcgccgtcttccgggtcttagcccgagtccgagccctggggtcgggtggagcggagttcgctatggcgcccctggcgaggcctgactgcctgtcagactcactctgtcgagtggcaccgcagtcggagtggcgcaggcggcgctgtccttctgtcagaccgctttatgctgatgggggttaccagctgagaattaggcgtcttgaggatcccttcctgtcgttgttcataataccaaaaatctcctctcaccctggcaacatccaaagaagagcaaagtggagagatgttttcaatggcaccatcaccaactctggtaactcgagcccaccgtgctcaagggaggagaccaacgccaaggagtacaacatttttcttcagttctgcaaggcgataggtggacttcaatcgcttaaaggcatggtagtggacgagagtctgattaattatgatgtcctcctgcatgtgcaccagtgctgcccagactttgtggggctgaagctcgagcacctggacatctcaggttacgagacatcagccatctcaagcacggttcttgagaaagcttcgtggctcaaggtctttctctggaattcgaaatttgagcttggggagttcgtggactgttccaattgtggagagcacaacattaaccctcaagaaccctgcaagtgcatgatggagcacaaggtcatggactggctggctggaccttcataa

SEQ ID NO: 11670 - DNA, 105 bp, Zea mays
  Peptide Sequence Number=SeqID_55045
atgacgaccgataggccactggagctcctacacatggacctattcggcccgatcgcttacataagcatcggcgggagaaaaatctcataccccaagagactttaa

SEQ ID NO: 11671 - DNA, 291 bp, Zea mays
  Peptide Sequence Number=SeqID_55046
atggcgtccccgacccacgcctctatggtctctccgccgtccggtggccgcgatgatgaccttcgccacgtcatcatgcccctgcacaaccccgctccacgaccccgcgatgggatcacccattccccccttctgggcgcgatgggatctaggagcggcaagaggtcctcctccatcttcgacaacgagctcctatgccatgaacctgtctaccgtgggggtcaagtcgtggcgccgctcccacgagcgcaccaggacgccggcttggaggtgaccgttggcgcgaagtag

SEQ ID NO: 11672 - DNA, 405 bp, Zea mays
  Peptide Sequence Number=SeqID_55047
atgaaggacccgttcgaggcggccgtcgaggagcaggactcgccgccggactcgccggcgccgcccgaggaggaacccggcgccgcgggcctcgcggacgacgccgaggactacgacggcggcccgcccccgcgccagccgtcggcgccggcgtcgcacgcagcatcggccgcggccaaggccaagggccgggtccagagggagcagcaggaggatgacgacgacgacgaggaccagatggaggttgacctcgacaagcttcccagcagcactggcgaccctgacaagctcgccaagatgaagttcgtgcctaaactgttcacttttttttttaatctagcaaatggcactgcattgttatctgtacaaattcgctggttactcgtaattggaatgattctctga

SEQ ID NO: 11673 - DNA, 441 bp, Zea mays
  Peptide Sequence Number=SeqID_55048
atggaatataaaaagcaaataaaaaaggtggctactagtcactttgctgagtgtaacactcggcaaagatgttctttgccgagtgtcaaggccatagcactcggcaaagaactaagacctgggcaccggtataggttctttgtcgagtgtaatgtctctgacactcggcaaagaggcacgctttaccgagtgccgtacatagcactcggcaaagaacctgacatggggaccctccctggcgggttctttgccgagtgtcccaggtggcactcggcaaagattgattctttgctgagtgctgccgggcagacactcggtaaagcattattggtggaagtcacaataggcctaataataattaaactgcacaaagtacacaacgacgaggtgcatgctaccctgcaagcaaggtttattttaatcgacaagccttgtctgtag

SEQ ID NO: 11674 - DNA, 216 bp, Zea mays
  Peptide Sequence Number=SeqID_55049
atggcgcggcggtgggcgaggtcgcggccgcggtgggcgagggcgcagtggcgacggcgcggcgacgtggagagcagcggcgacggcgcggcggcgtggagagtagcggcggcggcgcgtgagaagagactggatggcaagttcacgggcatgttgagtgagcatggtgctcgaagtttacggtccgctcctgaaatcggtcgtaacttgtgctaa

SEQ ID NO: 11675 - DNA, 784 bp, Zea mays
  Peptide Sequence Number=SeqID_55050
atgccctgcctccgatacaaggataactccatgaggcaccgtgtgccgggcgcgtccaacggcatgagcaaacccatctgccagcgccagtgcgaggtggccatggtcccgaagtcgtggatgacgggggagccgcggcttccccggtggcgaccagtagcgaggaggcaatccgtactggtcacttggtcagggcgacgtggagatcagcaccagggcgacctcgaagccgaggagcccgacgcggcgcagtgcgcaggtgaaggtgtcgggcccgaccccacggggcacgaagctctcgagcatgccggtgttgaggatggactcaagggcgtccaggtggcacaggaaatcgctgccgccggcaccggagacaccgtctggcagcagcacgctcttccaccgcctcgtcgacagccggatcctctcgccgacgggtttcgtcgcaaaaccggcggtaaaccgcccacggggagagacataaaggcatacttccagcttgacatagataagacaaaggaaaaaaagagttctaggttcaggcagcagctgagggcagatgaggcagcacgaacccattttggggacaatgagtatgaggatgaacttaaagcggctctgcatcagtcacgtgtggagcacgaatttagtcagagggctggtacaaggtatgataggggtggtggatcctccagccagagggtacctgaacgtgttagagactacaatcttgctcaagcatctggactaaggcaacagaggatagatactggtccctggacaa

SEQ ID NO: 11676 - DNA, 597 bp, Zea mays
  Peptide Sequence Number=SeqID_55051
ggctgctaccctagaaccaagcctgcggcagaggggtataacctcgccggagaagacaaccccatggaccgaagcaccaaggcagttgcccgaatgaaggagacgaccctctttggccgtgcaggggggctgcatacccagatctcgacttctgcagtgggttcaaaaagtatagacgagacctggtggttgggcgcgcaggctgcgagttggtgcagcgatgagctgatcagcaagtgcagcttccgcaccgcccgcctaacaaggaagccgcgcactacggcttgcaggcgcaccacggcctgctcatgtgatgacggccatgggcggtggaacatcacaacgaattggtcccacttctcttcgagccgagtgaatgcatctagagttggagagggcgggtgggagggcgttgcggcagcagatggtgcggcggctggtggtggtgagggatgggcggctggtggtggtgaggataacctggagctgataccaggtgtcatggaccttcggtccatggggatagctgtcttctccggcgaggttatacccctctgccgcaggcttggttctagggtagcagccctaggcgcttga

SEQ ID NO: 11677 - DNA, 384 bp, Zea mays
  Peptide Sequence Number=SeqID_55052
atgggcaagggtaacaaacgcaagcgcgagccgactcctccatccgaggacttcggtgactcggaatactcggaggaggagttctcctctgagtccgaggggtctccggctcccgtctctcccccgacgtcgtccgacgactcggacgactctcacgggattgccgcggagggctcggatgagtcggagtactcctcggacgaggaggactcgcccgaggaggacggcgatggtgacgacgacgacgacgacgaaggcgacgacggcgatgacggtgacggcggcggcaggggcggcaacggcgacggcaagggtggcgacggcggcagcagcaggggcagcaacggcggcggcagcaagggcagcaacaaggccagtggctag

SEQ ID NO: 11678 - DNA, 489 bp, Zea mays
  Peptide Sequence Number=SeqID_55053
atgatgaccgcctcaaaaaagggatcggaaaagggggatattttcgaaaggatccttctcagcgaaaggaaacaggccctgagccctcctactgatcaggggttcgaaggttgcgccctgcggggtccggcgaccgccccagagcactcgggctccgagccctttactgatcaggggttcaaaggctggcccctcgaagggattcgacagccgccccagagcatgaaaacaacactattcaccctgttccgactactgcgccaaccaccaggcctcggcctcgggggaaggtctccgcctcgcccgaccccaggcctcggcttcagcctcggcctcgggagaaggtccccgcctcgcccgacctcagcctcaggagaagtcgccgcctcgcccgacctcagcctcggcctcaggagaagtcgccgcctcgcccgacctcggccttggaccgactacgctacaagggatacatcattaccctacctctag

SEQ ID NO: 11679 - DNA, 465 bp, Zea mays
  Peptide Sequence Number=SeqID_55054
atgccgtcgtcgagttcgcctctgccatgcgagctgacgaccgtcgttgttgtcgtgctgcggggggaggagtaccatgttgtagctgccgtcgcgggacatgaactcgagactcccaaagcggagcaccgacctgggctgaagaggctgccgaagattgtccatctggaactcaacgggaaagtattgccaacacgcagcagcccctacctggcgcgccaactgtcggcgttttggacccgcgtggaccctcaaccgaccagtgaatttgacgctgcgtgtccctgcccagatgggttgataataagtgattattcattagcttttaagggagtgttcaatggacaactatatttagttgatttcacttatgacaatgttgaactagacacttccttaattgctaatactgtcggtgttttgggtccgaccacacacccggggttgcccctcaaggtgttttag

SEQ ID NO: 11680 - DNA, 1185 bp, Zea mays
  Peptide Sequence Number=SeqID_55055
atggatccctatgttattgggcatatttcactctttgcttacttgcagtgcaagagagaaggccgcacgtaccgctcggatcttcaggtctacagattacaagtacgtaacagccccctaataaccaaattgccacgccccgcgccgggggcagtctggggaaaatgggagcggtggcagaagggtgattggtaccaaaggctgagcccggactgcctcccgctcggcaacggcggtggcggaggcggaggcgccgtgccccgcaagcaggcgtccagatcctcctacatcagagaggacgacgccccggccgtggccacggatggctcccgcctcgcatcgtacctggcggcctcctcgcacgagcccaagccgctgcgggcccgcgcgccgcagccggcgcctctctcctcggtggccggccggagcccagcgcgcgaccacgcacaccaccaccacacctccgactcctccgacaccgcctccccgagctccaccggcggcggcggcggcgccgtcgtcggcgacgtgctgctgcagtgggggcacaagaagcggtcgagctgccggcgcgactcggccaccgccgcggcgccgtccgcgcagcgccgacagtctgccgtcggtggcggggtcaagatccagcggcgcgcgtcggcgccagcgcacgcggagaagctcatgccgccgccgccgccagccgccacgcgtggatctaacttgcggtcggcgtcctccttcccgtcccgcgcctccgcctccaccgctgccaccggcagccaccacccgccccaccaccacaggaccgtcgaggatcgatcaggcgggcagaagcggtcgtcgccggacaagacgcataggtccaccatggatggcgtctaccaccatcaccaccaccaagagtcgccgttgacgggcaacggcgtcgccaccgccggtgagaagctaggcgtggagcggttcgagctgccgctgatctacatctcgctgtcgcggaaggagaaggaagacgatttccttgcgatgaagggcaccaagctgccccagcggcccaagaaaagggctaagaacgtggacaagaccctccaatttgtcttcccgggtatgtggttgtccgatttgacgaggggacggtacgaggtgcgggagaagaaatgcgtgaagaagtttattcagcgacggtaa

SEQ ID NO: 11681 - DNA, 330 bp, Zea mays
  Peptide Sequence Number=SeqID_55056
atgggcatcttgtacaagcaagagcgcgtagtgcgtttccaatgtggcaaaatggattcaggaaaaaccaaacgattaaggccatatatgtttgggagatctacacttcaagaatttcagatgactgttctagttggaaggaaccaaaaagatttgaaccataacatttcggaattcgatttcgaccctaagttagcgtttggtcctagaaccggttgggatggagcggctccagcatcgtcagagaacggctccgtccgagagattttggaggacggatgtacaatatgtgagcataatttttttagagtcactctgatacttacatag

SEQ ID NO: 11682 - DNA, 828 bp, Zea mays
  Peptide Sequence Number=SeqID_55057
atggccggttctaaggatcacaccaagatctccaccaccaacatcatcaagccggccatggaggcgctcccggctgatgaccaaagaccctttgaagacctcgtgatgcgcgatgagaaggaggtgatgcggcaatggaacgaacaacgtgacaaggaagaggcggaactgctgcataaactcttcgaacggcgcaaggaggcggcggaaaagtacttgtcacacttcacggtggatcgccaccagaagatcatccgtcaaggggagatcgatatggtatctctcctacctccacttcagggtcccgatccgcaaccactaggcactcggcaggtactggacacgaccggaccgtccgagcatcatctcagacagtccggttataccgcggaccgtccggcgtatttcgccggaccgtccgacccgatgcaggcccgcacacaaaacgctcgggtcgcaccgtacatggccggaccatcagggtacaaccccgaacagttcggccccatcacggaccgtccggtgcatcacgccggaccgtccggatatgtggcgaaccgtccgccatcttacgtcggaccatccggatatggcatgaaccagtcaacgtattacgccggaccatccgactctacacgagtccacgcgcagactgcccacgtcgcgccatatatgaccgatccgtccgggtacagccctggaccattcggcccgatcgcggaccatccagttctttacgacagacggtctgggtacgagactacccacgtagcaccatatacgactggacaatccggatataccttcggaccgtttgaccagggctga

SEQ ID NO: 11683 - DNA, 732 bp, Zea mays
  Peptide Sequence Number=SeqID_55058
atggaatacctctttgatgaactctgcagccatcagcttgtggatctcctcgcctatggctctgcgcttttcttcgtcgaaacggtgcagaggctgcttcacgggtcgggcaccgtctcagatatccaccggttcgaagttgccggcgtggcgcttcgcatcaggcacctccttggagaggcactccaggtcagcgatgagggcatcggactcggcaagggcctcagcgtactctacgcaatccacgtcgcattcgtacgcgtgtcggtacgtggatccgacggtgatgaccccgttggggcctggcatcttgagcttgaggtacgtgtagttggggacggccatgaacttggcgtagcacggtctccccagcaccgtgtggtaggtccctcagaacccgaccacctcgaacgtgagggtttccctgcggaagttggagggagttccgaagcagacgggcaaatcgagttgtccaaggggcaggacgcgctttccggggacgatcccgtgaaagggtgccgcatcggcctggatcatggacagatcgatccccaagagcccgagggtctcggcgtagatgatgttgaggctgttgcctccgtccatgaggaccttggtgagcctggcgttgctgatgacaggattgacaacgagcgggtaccttcctgggctcggcacgcagtcggggtggtcgccttggtcgaaggtgatgggcttgtcggactagtctag

SEQ ID NO: 11684 - DNA, 309 bp, Zea mays
  Peptide Sequence Number=SeqID_55059
atgtcgcgaaaaatgtgtcggggagaggagccaacttcctcaaggccatatgcttttgcatgtgatgaaaggaagggtaaaaagaaggctcccactccaagttcctcaagtgaaggagaggaagaagaagaaagtgatgatgatgaagataatcaaccatgcacatcatcctccgaggacgaagaaacaatccgacgcgtcgaaaagatatcccccgggtccactagaaggaggaaagacctcacgaaaggcctaagggcccaatggatcgtaaggtcactccttcatgggcctggggaggaacagtaa

SEQ ID NO: 11685 - DNA, 552 bp, Zea mays
  Peptide Sequence Number=SeqID_55060
atgggcacaacaatctcgtcgtgcgtgcacgcggtccacgcgggcgagcggttgaaggaggggagagggactggcaagcggggcccgcggaacagcgacacaggcgcgcgagcgcgcaacgggctagggcgccaacgaggcggccccactgggcagagagggagagggcaggcggccagggacgataccctgctactgctcctccacgacagcaaaatcacgcccacttcgtgtccagcagcgggagcctgctcggtcttctgctcgcctgcccctgttcatcagcgcgcgccacctggtgctacaggatcatcatccagcaccatgctggcgtcctccctcaagctgcgcccaagacttagccacatagacggtgttttaaccgcgtccccatcacgtcgcacgactctgcaagaccttgacccgtcatgggcacttctctatgtccatgctgctggtttggattgtcgccatgaggcttggcctcatcgcactcattgtgtccacgacatcgttggtccaacagcgttgtcgcttcttgtgttcgcgctg

SEQ ID NO: 11686 - DNA, 252 bp, Zea mays
  Peptide Sequence Number=SeqID_55061
atgacagaggaggtcaatagcagaggtcgcagtactcttcgcaagcttcggggcagcaacaaagctcttctcggccgccagctccaagaggcagaggcgctaggggcttgggaggaagatatggggactagccctggaagatctactgcctattttgtggtgaagacaagggtcacaatacgagaacatgtcaaatcaccatacaaaagcaaaaagagattgcagaagccgaagcccggcaaagccaactga

SEQ ID NO: 11687 - DNA, 300 bp, Zea mays
  Peptide Sequence Number=SeqID_55062
atggctaagctttggtactacatcgagttctttgtggattcattactcttggagcttctagctcctaggcgactaggtgtttcttatgttgatcctagggcaatagaccttgccatgataatcgccaaaaggatgttcctcaaaatgaaggaagatggggcgaagaacaagattgaagaagaaaatgatctatggagaccaaacgacgaatccacctcttcacaagctaagcaagaaaaatcgaatgagcttgctcaaactcatgaaaagagcggaagaacaaaaagagatgctacataa

SEQ ID NO: 11688 - DNA, 318 bp, Zea mays
  Peptide Sequence Number=SeqID_55063
atgtttgctaacgtcatcgactcgagccaggtgagggttcagcgtggagtttcattgaggtctgctgctcgtagctcccgtcgctccactcaagatccagcagaagtggagcaactgcgagaagaacttaggcaacatcaggattacttgaagcaacaagctgcgcaacatgaatattatgctacacagattcagcaacagcaaacactcatacaaacccctccagctaccttgccgacgcatgaacaagaggacgggttagactttgtcgaaaccctcttcaatagtggaggtatcgaccatcactgttcagtgtaa

SEQ ID NO: 11689 - DNA, 612 bp, Zea mays
  Peptide Sequence Number=SeqID_55064
atgaacaaaaacactggcattcagagtgccattacaaacggaactccggttccacctccgcaggtacgaacaaccccactcgatgggggagggcctgcggagcaacagaagaccgacgaacggcgcgccgtcgcccgctccagcagcagcgacgacgacgacttctgctccggggggccgaacagcggcagcactgacctcagggcggatgctgctgccaagaggcccccgcccacgcccaaactcgtgaggcaaggatgggcagaaggccgtagagttggaggtcggtccgtgggcggccctggctatctcgtcggcggaagaacctcttccagctgccgtggcagacgccggcgccgcgagcggctccgaagccactcgcgcccgagagccaggcacgctgcagctgccggtgccacggacgacgcccgcccttccctccgatcactgagtggaggagcgggccaccgcccacgcaggggccgaccccaactcggcacactcccctccccagccctggtgatgaaaatccttgaggctgagggaggggcagaggtcgcagcctggctcgctttcccccaccatcaaactggaggtcaccatcttgggtga

SEQ ID NO: 11690 - DNA, 459 bp, Zea mays
  Peptide Sequence Number=SeqID_55065
atggcgcctcctgttgacgtggctggtctgcgccctaggttgggcgatgtggaagctcctccgaggtcgaggtcgagtctgtcttccgtggccgaggtcgagtccgagcccctgggtcgggcgaggcggagttcgtcgtcttctagggctgagcccaagtccgagccctgggtcggcccgagtctgagccctgggtcgggcggagcggagttcgtcgtcttccaagacttagcccgagtccgagcccttggtcgggcggagcggagttcgtcgtcttctggggccgagcccaagtccgagccccgggcggcgctgtccttctgtcaggtcggtcagtggagcggtgaaatgaccgcggtcacttcggctctgccggctgggggcctttatgctgatgggggttaccagctgagaattaagagccttgagggtacccctaattatggtccccgagagtag

SEQ ID NO: 11691 - DNA, 579 bp, Zea mays
  Peptide Sequence Number=SeqID_55066
atggctgaaaggtaccaactcccgtggagttgcgttcccccgacgacaaggcagaaagacggcgggtatcccccatccgggggcttggaaggtggaaagacacgatgcataagggagcacgaagacatggtcgccttccaagggggtcaccctccttttaaaggcgactatccctacttgcgtccccagccgtcacgggctgagtcttctccaacacgctccaaggccctcccctgcggcgcgggggctggtcccacatgtcatgcaagccggctcagagcagaagaagccaaaccgtcgtgcgcgggaccgggaaagagggataccccaaaaaggatccttccctgtgaaggaaccaggctccgagccaccctactgatcagaggttcgaaggctggccccccggaagggttcgacagccgcctcagatcgcgtgggccctacacccactactggtcagaggttagaaggccagcccctcggaagggtcccacggccgcctcaggctactcgggctccgcgcccattactgatcaggggttcgaaggctggcccccgaagggttcacagccgccttag

SEQ ID NO: 11692 - DNA, 1389 bp, Zea mays
  Peptide Sequence Number=SeqID_55067
atggaggcccaggcccacgcgtcattcaaccggcgcgccggttgctacgtgcgagcaaccgcaccgccactcgcaccactaccacgcctcctcgactgtggaaccggtaccgcgactcgaggcaaccctgcgtatgacccagcagcgccaaccaggcgcgatggtcaatacggccaaaatgggccggcagtaatggcggtggcaggcgggcaggacagcggtcacgtcatcagccaagcttacgtcccatccaggggcagcgagagaaccctctctcacggcgtgaagacggcgcgcccgtgttccgttcctcgaacggctcgcgcacgcgcaacggccgcctcgcgaaccactcgccccgtcgcattaactccgcggcgggacaggcggtgcctcaggcaggagaagcaagtgatgcttcgccttcgccataatgaccgcgtcaaaaaagggaccgggaaaggggatacaccgaaaaggatccttctccgtgaaggaaacaggccccgagcctccctactgatcagaggttcaaaggctggcccctcgaaggggttcaacagccgcctcagagcgcctgggttccgcgcccactactggctggccctcgaagggttcacagccgcctcagacacaaagcgagggatgaccctggcgcgcctccgggcctctagccgacccctaacaaatggggcacgggcgtccactcggatcacccgtcagcagctcaccggagacaccatgttcggcgccctccgagggcaacctggcgctttccccccctcctccttgcggaaaggcgacgcaggggccgccgcctgcgccgctccgactgttgtgccactcggcagagtgaggctgacagcagccaagtccggcctcatgcgccataggaaactccgcttcgcccgaccccaaggctcggactcgggctcagccccggaagacggcgaactccgctccgcccgaccccagggctcggactcgggctcagccccggaagacggcgaactccgctccgcccgaccacagggctcggactcgggctcagccccggaagccggcgaactccgctccgcccgaccccagggctcgaactcgggctcagccccggaagacggcgaactccgctccgcccgaccccagggctcggactcgggctcagccccggaagacggcgaactccgcctcgcccgaccccagggctcggactcgggctcagccccgaaggacgacgaactccacttcgcccgacccagggctcggactcagccctggcatcagccgacggtctccgcctcgtctgacccgggggctcggactcgacctcgaccttgggagatagactcgacctcgatctcggaggagcctccacctcgcccaacctag

SEQ ID NO: 11693 - DNA, 558 bp, Zea mays
  Peptide Sequence Number=SeqID_55068
atggtggcgctcgcctcactctcatctctctgtccctgcggcatcgcccgccgccgcgctgcgtcagccacttcatccaccgccttttccatctcgtgctgcgccgtcgcgaccccgtccttctcagggaaaggaccccaggaatctagaacaccccgaagaaggctgaggaaaactgagggtgctaccaagagcctggaagattcggtcaagcgaaagatggagcagttctatgaaggggccgatggtccacctctgcgagtgctccctattggcggtcttggggaaatcggcatgaattgcatgcttgtggggaattatgatcgatatatcttgattgatgctggggttatgttcccagattatgatgagtttggtgtgcaaaagattataccagacaccacgttcatcaagaaatggagccacaaaattgaagctgttatcatcacgcatggccatgaagatcacatcgatcttttttatgctgtttcttatctagaacatggactattggaaaattatctctttgttcctaagttggtctatgcgaaagaataa

SEQ ID NO: 11694 - DNA, 264 bp, Zea mays
  Peptide Sequence Number=SeqID_55069
atgaacaaaagaccagcattcaaggtgccattacaaacggaaccccggttccacctccgcagaggcaaggacgagcagaaggccgtagagttggaggtcaatccgtgggcggcaccggctatctcgtcggcggagaaacctctttcggctgccgtggcggaaggcggcgccgggagcggctccgaagccactcggttcgaagagccaggcacgcggcagctgccaacgccacgaacggcgaacgcccttccccccgatcactga

SEQ ID NO: 11695 - DNA, 474 bp, Zea mays
  Peptide Sequence Number=SeqID_55070
atgggctgcgtcgtgtccaagaatgtcgtctcggtgacaccggcggccgactcgtccagcgggctcagggactggagccagctgcgcgctcatgggtcagttgccccgttgccggtgcccgtgccttccctgtgcagctcgtcgtccgcggcgaggaggctagagaaggtcaaggacgaagccgaggagccagggaaggccgtcgtcgccgtggcagccgcgtcttggagcttccggctgcggagcctgcggaagagccttgagggcgacgccgtcgccagggaggccatccaggggtggatcccactcaaggccgactccttcgagaagctagagaagaaaatgaatagcgcacatcagcagattggaagacctactgaagaagacttaggaagttggggacatcactgtgacccatcaactatacctgatactatactgcaatgttctgctggcgaagaggtgacaacctaa

SEQ ID NO: 11696 - DNA, 432 bp, Zea mays
  Peptide Sequence Number=SeqID_55071
atggagctaataaagaagcgtttgaaggagtttgggatcttcctctcatccaggcttaaggttttaagaattaaaaagagatttcaggctggaccttttgaagttgaacccatccgtgtaactcattcaattcctgactgttgtggcttagtgcttcgctgtggtgatgggataattttccatactggtgactggaaaattgatgaatcaccagtggatggaaaaaaatttgaccgacaagcattggaggagctctccaaagaaggtgttactcttgtgtttgttggaatgtcactcaggacataccttgaagctgctttcaaggatggaaaggcaccactggatccatcaaccttgtttggaggtgcccagctcttccagacccgcttccagggagaaaaattgatggtccctgtaaacatagagttgtaa

SEQ ID NO: 11697 - DNA, 348 bp, Zea mays
  Peptide Sequence Number=SeqID_55072
atgacagagctccagggcctaacctcatctctcctgccgcaggacgataaatacttgtcatctgatccaaataagctgactgatatgaaacaagatgttttcggtagctacagaaacatctttggttactctggaaatactagggatgatatgttggcactttcaagtacttctgaggaatctcgctttatgaaaatggaggagaacaatttcaggaaaacaggagattctgtcactactctcaaagaacttcagtgcacagttgagggatataacttagtttttcaagcctgtccatctctagcagatggtttagttgggaaagaatcttatgctcaggcttcatag

SEQ ID NO: 11698 - DNA, 1611 bp, Zea mays
  Peptide Sequence Number=SeqID_55073
atggtgcctcttgcgcctacagctccactaacacgacaacccaaccacaactacgttgacctcggctaccttcagcatgacttcttcaaccatgacaactatgcccttaagcttagctacatcgacatcgacacaaaggattgtcatctgcatgagctccttgttggtttctattctggttgcaacatcagcattgctacgccaactagggagggggtcaaggtagaggacatggatgcatatgcgcctaaagatcttctggtggtcactacaggttcacaagtcattcctggaaatgagacacgggtaatgaagatgatgaatcgtctcactgatcttggccccaaaattatcatgggtaaagattctggcctccatacctctggacatgcctaccgagaggagctggaggaagttcttcggattgttaaaccacaacatttcttgcctgttcatggagaactcctatttctcaaagaacatgaattacttggaagatcaactggcataaggcacacaactgtaataaaaaatggagagatgcttggtgtgtcacatctaagaaacagaagagttttgtccaatgggtttgtttcattagggaaggaggatcttcagctcatgtatagtgatggtgataaggcttttggtacatccactgatctctgcgttgatgagagactaagaattgcatctgatggcattatttttgtaagtatggagatcttccgacctcagaaggaacatgggttagcgcagtcaggtttgaaaggaaaatttaagattaccacaagatgtctatggcttgataatggaagattattggacgcgctctacaaagcagctcatgctgcattgtcaagctgtcctgtgaattgtccacatagtcacatggagaggatggtagctgaaatcttgaggaaaatggtacggaagtatagtggaaagaggcctgacgtcattgctgttgctacagagaacaccacagcaggtttctcagaacacctcgacactaaagcatctggaaattttggaccgtcctcagctactagccacctgagcaggagtccagctacgagtcttgaaggcagttataaaacacacccagacaacccagaggtggatgctgaagaaatccttcccgagactgtgagaacaacacccgacgatgcaaccacaagctccaatggcgaagcattattctcttcagatttacatcagcctaaaacattggagcacttttgggagtcattcaaatcccctacagctgtcaaaattgcacggatcgtcaatgggggggacaaacaaaatttcggcaagattggcataatgggtcaggactcattaatccagtcagctcctgctccagttaaatcctcaaaacggaacaagtggaaacctgaggaaattaagagcttaatacagatgcgtggcgaaatgaatgagaaatttcagagcgtgaaaggaagaatggtactgtggaaggagatttctgataccatgttgaaccaaggagaaagcaaggatacggaaagcatgaagacttggccgtatttctcggccatggataagattctatcgcagcaaggggagatggcaaccaaaggatag

SEQ ID NO: 11699 - DNA, 408 bp, Zea mays
  Peptide Sequence Number=SeqID_55074
atggcggtggtaggcaagggcgcggtggaaggcaaggttggggcggcgaaccagagaggggtcgcgacctggacgagcgactacggcacggatggagcccctggacaacggatggagagccctccgttgtgcccctcgcggatgaaggaaaagtggtggggaggtctgcaggagatgaaagaagtttgctatgtctatggagagtgggcccactacgaaaagaactggagggatccaaaagaacggagggaaatatatggatttatcatcgctgtcacaacccaaccaagttatcgggcccacgtacaccaatccttgccctcaaggcctcggatagatatgagttgcgcggaagtgactgggccgaaaccgacgcaggttatctccggcaaggatttgcattcttaa

SEQ ID NO: 11700 - DNA, 690 bp, Zea mays
  Peptide Sequence Number=SeqID_55075
atgcagcagttccgcctcctccttgtcgcgttgttcgttccattgtcgcatcacctccttctcctcacgccctacgaggtcctcaaagggctgctggtcatcagccgggagtgcccccatggccgacttgatgatgttggtggtgcagacgttggtgtgatccttaccgagtggccgattggggtggtatttatagccaccaaccaaaatctagccgttggtgaagtgtgctggcgaagggcggaccggacagtccgagtcgaccgttgcgcgcagatagccgttggtccgctggtgcaccggacactgtccggtggcacaccagacagtctggtgaattatagcggagatgcgcctgggaaacccgaaggagaagagttcgagctgaagcaccctggtgcacgggacagtccggtacttttccgctgcctctttgagccattgggagagtttatgcagcagttccgcctcctccttgtcgcgttgttcgttccattgtcgcatcacctccttctcctcacgccctacgaggtcctcaaagggctgctggtcatcagccgggagtgcccccatggccgacttgatgatgttggtggtgcagacgttggtgtgatccttggaaccgaccatccgccacccaagacgcctctagtcgacgtagagccgaagagaggtgaagatttgaggtag

SEQ ID NO: 11701 - DNA, 726 bp, Zea mays
  Peptide Sequence Number=SeqID_55076
atgaaaaagttcaagaaaatactcagaaaagcttgctatccatgtggacgtgaagtaatttttggaacactagtcattcgcacaaccatcgccaccgtgttgtatgatcctcgtacaacacattcttttattagtgcccagtttgcaacaaagtatggtatctttaagtgccccttaagatcaagaaagaccatcagtacacctgaaaggaaagtgttagcgaactacatatgtccgaaaatgttgaaccccaatggaaatgaagtaaacgatgccaacgacaatatttctaccttaacaactatgaacgagaaaaacgagtcacggagatattcgatgaatggaatgaagaacaacaaaaggaatagaaaaatgtttggatacatgattagttcacctcaaccacaagcaaaagccctgaaacacatggatacccaaacagaagaatcaagtcagactcagctatatgagatacagacacccagtcaaccctcaccccctgttggtcaagcaaagttgactcgcaaagaactcaaagcaagaggtgcttgctactactacaaaaatgaaggacatataattcgcgaatgccccaagaagcgtctagaccgactagagaagaaagctgccaagcatgacctaagcaataattcagaagacctaccattttatcaatatgatgatgaaggacgcttgattagtatacatttcggagcagagaagtaa

SEQ ID NO: 11702 - DNA, 1560 bp, Zea mays
  Peptide Sequence Number=SeqID_55077
atgcaggcggcatgcaaccgcaccaagggggtgcaccctttcgacttggacgcgtccagcatggaggcccaggcccacatgtcatcagtgccaaccaggcccatcggtcacgggccagtcagccgcgggagaaggcgcgatggtcgatacggccagaaatgggccggcagtaatggcggtggcaggcgggcagaagcagcggtcaagtcgtcagccaagctcacgtcccctcctggggcagacaggcggcacctttggcaggcgaagcaggcgacgcttcaccttcgccataatgaccgcgtcaaaaaagggactgggaaaggggatgccccgaaagggatccttctccgcgaaggaaacgggccccgagcccccctactgatcagaggttcgaaggctggcccctcggaggggttcaacagccgcctcagagcgctcgggctccgcgcccactactggtcagaggttcgaaggccggcccctcggaagggttcaacggccgcctcaggccacttgggctccgcgcccactactgatcaggggttcataggctggccctcgaagggttcgacagccgcctcagacgcagagcgagggatgaccctgggtacgttcgatacagaaccaaggctcgggctacgctcccgaggtaccctaggacatttccgagaccaacgggaacgattttgtaacagaatcccatcagagggaggcatcgagccctcggaccccgtcaaaaggggaccgggtctggcaaatcacccgcagggctcggactcggcatcggccccggaagacgacgaactccgcctcgcccgaccccagggctcggactcggcctcggccccggaagacgacaaactccgcctcgcccgaccccagggctcggactcggcctcggccccgaaagacgacgaactctgcctcgcccgaccccagggctcggactcagccctggcctcagccgacggtctccgcctcgcccgacccaagggctcggactcgacctcgaccacggaagacagactcgacctcggcctcggaggagcctccgcctcgcccaacctgaggctcggaccgaccacgccacaggaggggccatcattaccctacccctacgctcctccgacggccacgacattacacgaacagggtgccaaaacctctccggctgccacgacggcatggccctcttacagagggttggccgcgcgggggaacgggacggcgtgcataagcctctcgctctctcccacacggacgcttgtaaccccctactgcaagcgcacccgacctgggcacgggacaaacacgaaggccacggagagtgaagatgtcgatgatgttgctctggaggttgaagacgccgacgatgttgctctggaggttgaagacgccgacgattttgtcgcagaagatcagttgttacatgactacctcgatcagattggtcagaatattattgctaacttgcaagaacgaaggaaaagacgtcgatcttttggaagaaggatgaatcgaccactttttattcagatcgttgaagctcttggaaactga

SEQ ID NO: 11703 - DNA, 582 bp, Zea mays
  Peptide Sequence Number=SeqID_55078
atgcaggaggcgtgcaaccgcaccacggttgtgcaccctttcggcttcatcacatccggtggggcaagcgacacctttggcaggcgaagcgggcatcgtttcacctccgccatgatgaccgcgtcaaaaaagggtcgaagtgaccacagtcacttcgcccttccactgatcgacctgacaggaaaacaacgccgcctgccccgctccgactgttgtgccacccgccagggtgaggctgacaacagccaagttaggcgcaacaggaagctccgcctcgcccgaccttgggcctcggcctcggaaggtggtctctgcctcgcccgaccccagggctcagcctcaacctcggcctcggaaggtggtctccgcctcgcccgaccccagggctcggcctcaacctcgacctcggaaggtggtctccgcctcacccgacctcagggctcggcctcaacctcgatctcggaggaatcgcgtcctcacccgaccccggcctcggcctcaggaggagtctccgcctcgcccgaccttgggctccgaccgaccgtgccacgggggatacatcattaccctacccctagctag

SEQ ID NO: 11704 - DNA, 1050 bp, Zea mays
  Peptide Sequence Number=SeqID_55079
atgccttcgcactcccctcatgcatcgcgcccttccacctttcgagccccggatggggagcgtccacgttgccttcgtcttgctgctgttggaggagcgcaacctcgcgggggtcggcacccttcagccatcgctcggcttcaaggattttcatcatgcagcccggctgcattcccccaccaatggtcatccaggatgatgaccaccatttcggtggtggggagaagcaagccgggctgcagcctctgccccgccctcagcttcaaggatcttcatcatccttgctgcggcggcgggcggggcgagtcggggcctgcctccgcgtgggccgacgacccgcttcttcctccggcattcgggggaggaagacatcctccagctctacggaggaggcgtcctccagccatgcgggggaaggcgaactgctgcttcctggacagggtgcaactgtccgtcctccacccaagcgactgtggccggctgcaccggggggtcgcacaacacgtcgtacgccgcgagggtggtactcgtgttctgggacggtctcgttctcgttctcgtggcgagaacgggagtgaggacctgccggtgctctttggagcgactgccgcttgctggtgtggtgttggtgggcaggtggctgtcggagaaggtttctccgccgacgaaaccatcggcgccacctgcggtccgggcctccggctctttggctttaatggctggttctcgtctcctgcgacgggacgtgaacgagggccttttagcagcagcgtttgccctgaggccgtcgctgcatctgtcttgtcgcccgagacggaggtcgttgtcgctgctgcagtggtcggcggtgagctacctggagtttgttgtcccgcaggccctctgaaccttcgaccgctctgtgatgagccggagctggaggcagcggcgtcggcgtggacagaggcggagtcgactcgaaaagaggcttcatcggcccgggagcacgtggcttccctggccgaggaagtgcagcagcggtggcaggagcttggtcaagttgtccgctag

SEQ ID NO: 11705 - DNA, 414 bp, Zea mays
  Peptide Sequence Number=SeqID_55080
atgacagagtatctacatgctttcaacaacctgtctcattacgtgcctgactatgtggacactgagaccaagaagattgctagtttcaagaggggcttaagcccgaaaatgatgaagagtatggggatttcttcccgcacttccttcaacgatttcgttagcgactgtttgactcaagagaacgacaacaatcttaaatgtgaacccttgcttgaaccaatagaagacctaggtctcatagacatagattatcatagagtgctagtgtgtgtcggcgcgagagcaattacaatccagcgtgaactgtacgggggtattgttcacctatttataggcacgggacgcagctcaggtggtcagatgtactacgggtactacgagcactgcttatacccggctacgggagatgactaa

SEQ ID NO: 11706 - DNA, 854 bp, Zea mays
  Peptide Sequence Number=SeqID_55081
atgaaggagaacacgcacaccagcgccaccctgtcgtcgccccgcgacacattggcacgtgtctccacgacgttgaaggcgcacaacatcgccagcgtgctgcccaggctatggcccttgaccgtcacgctcacctacccgccccgcatgtggtacagctccaccagcttgcgcaccttggccagcacctgctaccgtgtcgagtacctgcacaagcggcagaaccctctatccgccttcacgttggggtccaggcacgacaatcccgtctcgcgcagtgatcgccagatttggatccccgaggtgagctctccctctctctctccctccctctctctttctctctcccttcccttctccctccctgcgcgcccctttcttttctcctgcgcgcgctccggcggcggccgcgccctcgcccccacggtcgtgcccgaccgcgcccggccccgcgccttcctccccgtggtcgcgcccccggtggctcaccctccccgcgaccgtgtgccccccctggcggctcgcgccccggcggtcgtgccctccccccggtgggctcgctccccgacggctcgcccgccccggcggcttccctccccgcggccgtgccctcccccccctggcggctcgctccccccggtggccgtgcccctctcccagccgccccctcggcggtgcctcccgcgctccctagcgggcctcgcgcgccccctggtgggccccgcgcgcctacctgtggccccgcgccgtgcccctgcagcgactcgcacctcatgccccgcgtccccgcaccgtgccccggcaacggcccgtgcccccggcagccccgcgcctttccccggcagcccctgcac

SEQ ID NO: 11707 - DNA, 699 bp, Zea mays
  Peptide Sequence Number=SeqID_55082
atgggtagagctcccccaccttcatctgcttctcgtttgttttgcttgcgctggcgtagtggtggccgtgctaatggcgtcgtgggttgttttgggtttcttcacgcaggtatctcacgtgattcgatgcacaagcgtcaggccaccagtggaaagcagaaggcgtggcgcaagaagcgaaaaagacattcaagcaaggttcacaatattgaagaaatgattctctcaatggatgctcaatttgatgtgactcaagaatggcttgatagggtgaagatagcaaggaaagggcttcgaggaactaagcgaaggtatgagcttggccgccagcctgctaacaccaaactgtctagcaataagacagtgaggagggtctatgtccgtggaggctacgtgaagtggagggctctccaattggatacatgtaactactcgtggggaagtgaggctcttacccgcaagactggcatcctggatgtggtctataatgcatcaaacaatgagcttgtgaggactcagactcttgtgaagagtgccattgtacaagttgatgctgctccattcaagcagtggtacctcactcactatggagtggacatcggtaggaagaagaaggtgattatcgctaagaaggatgcgactgagggacaagagggtgaggctatagttgaggaaacaaagaagagtaaccatgtgtag

SEQ ID NO: 11708 - DNA, 96 bp, Zea mays
  Peptide Sequence Number=SeqID_55083
atggacgtgcaaaaattgactataaaactaaatcacacttctaagagcaaagatgaccacacttctaagagcaaaggtcaaagtctattatattaa

SEQ ID NO: 11709 - DNA, 471 bp, Zea mays
  Peptide Sequence Number=SeqID_55084
atgaacaaaaacactggcattcaaagtgccattacaaacggaactccggttccccctccgcaggtacgcacaaccccactcgataggggtgggcctgcggagcaacagaagaccgacgaacggcgcgccgtcacccgctccagcagcggcggcgacgacgacttctgctccggggggccgaacagcggcagcactgacctcagggcggatgctgctgccaggaggcccccgcccatgcccaaactcggaccgggaaagggggatgccccgaaaaggatccttccccgtgaaggaaccgggctccgagcctccctactgatcagaggttcgaaggctggccccccgaggggttcaacaaccgcctcagatcgcgtgggccctacacccactactggtcagaggttcgaaggccggccccccgaagggttccatggccgcctcaggctactcgggctccgcgcccattactga

SEQ ID NO: 11710 - DNA, 434 bp, Zea mays
  Peptide Sequence Number=SeqID_55085
aggcctactcagagcattattctatcactgagcaggacactgtcaaggcagccatgcatgatgctgcacggcgtgcactttcgcagtactgttcgttgttcagtggggtggttgacggtctcaacctgaagtattacccccgccgctcgactggcagtaccagaggtgtgattgtctcacatgttggtgagggcaatcccggattgagtagcatggtcaacctagtcgtcgtcctcaacgccgagctggaccacacccttgacaagttgggcaaggctcgggcgaagattgcgaaactacacgctgagcaccgccatcaggaggatggttcccccacccctatttggactcaacacccttaccgctcatcgccccgtggtcatcatgcttatggcacccctgactacaagacctggataaacttggagccctag

SEQ ID NO: 11711 - DNA, 601 bp, Zea mays
  Peptide Sequence Number=SeqID_55086
gtcgagtccgagccccgggtcgggcgaggcggagttcgtcgtcttccgaggccgaggtcgagtccgagccctggggtcggacgaggcggaggtcgtcgtcttccggggccgagcccgagtccgagccccggggtcgggcgaggtagagttcgtcgtcttccggggccgaggccgagtccgagccctggggtcgggcgaggcggagttcgtcgtcttccggggccgagcccgagttcgagccctagggtcgggcgagacagagcttcctatggcgcccgaggccggacttggccgctgtcatcctcactctgtcgagtggcacaacagtcggagcgacgcgggcggcgctgtcttctttgttaggctggccccctttgcattaaatgctcctacgatacggtcggttggcgtagcgatctggtcaaggttgcttctcggcgaagactgggcctcgggcgagccgaagctttgtgctgatgggggttaccagctgagattaggagtcttggggggtacccctaattatggtccccgacagcacttgagagtaagaagtgagaaggaaaagaaagccaagccaagcaaacaagagcaacaatga

SEQ ID NO: 11712 - DNA, 1142 bp, Zea mays
  Peptide Sequence Number=SeqID_55087
ccgtgcagccgcgctgcctccgcccggcgcccgtcgcgctgccctcccatatacctccggtgttgtgtgtcattgtcagggtgcccaagacccaacgcgccaggagggagcttctcaagcacgcgcccaagcttgtaagcttccttctctacccatcctctcaccctcattcccttaacaaaaccatcctgcgacgtgcaagagtggagaggcacccctcaggtggacccctggcggctgcccacaagcggatctacgactgcaagatgagcgaccgtgcgggggttgagaccagcaagaagacactgatcctccatggtaccaagactagtgctgtgttgaactctgtgctgtcagatatttaccacctaaagcgtgataatgctgtgaaatataccaagaagaatgacaacattaggccttttgaaagtggtggagaatcttctctggaatttttctccctcaaggcagactgtagccttatagtgtatggttctcattcaaagaagaggcccaacaatctgattttggctagaacgtatgaccaccacatatatgaccttgttgaagtaggagttgagaactacaagtcaatggaatcttatgtttatgataagaagctagcaccattacttggatcgaagcctttctttgctttcataggggaacactttgagagttctgaagagctgaaacatttgaaagaagtgctgcttgatcttttcagaggagaggtcgtagagaatctgaaccttgccggtgtggatcggatctatgtgtgcactgcaatctctcccaccactgtctacatgatgcactgtgctctccgtctaaaaaggtcaggtacatctattcctaggatggagctggtcgaagttggaccttcaatggatctggttgtaaggaggcacagacttccagctgaaagtttgaagaaagaagctatgaagaccgctgaacatgctaagaagatgaaaaatgtcaccaaggatccagtgcagggcaagctgggcaaggtctacatgccagaccagcaggttggaaagttgaccttatcaaacgacgtaaagggactaaagagggagcgccgcgaagccaagaaaaatcaggactcaaagaagcaaaaggtcaaccctgagtaa

SEQ ID NO: 11713 - DNA, 442 bp, Zea mays
  Peptide Sequence Number=SeqID_55088
gcgtaaggagaggatccaggtgtacaatgggggtgtagcagagtgctacgtgtctagcgggggagagctagcgccctgggtacatgccaatgtggcagccggagagatcttggcacccagctgggtgatgatggcgcttcctgttgacgtggctggcctgtgccctaggttgggcgacgtggaggctcctccgaagtcgaggtcgagtctgtccttcatggccgaggccgagtccgagccctcgggtcgggcgaggcggaggtcgtcggcagaggtcagggcggtgtccgagccctggggtcgggtgaagcggagttcgtcgtcttctggggctgagcccgagtccgagccctgggtcgggcggagcggagttcgccgtcttccgagccttagcccgagtccgagctctgggtcgggcggagcggagttcgccgtcttctag

SEQ ID NO: 11714 - DNA, 537 bp, Zea mays
  Peptide Sequence Number=SeqID_55089
atgaactcaagactccccgaaacggagcaccgtcccgggttggagaggttgttggagactgcccatctggagcttgacgggaaactgctcgtcaacacgcagcaggcccctacctggcgcgccaactgtcggcgtttcgagaccggggggtccctaagccgacgagtgagtgtgccacgtgccctagcccagatgggtcgagcgcgtgggcgagcgcgaaggggggaaaggagcgaggagggcggagtccggcgtaaggagaggatccaggtgtacaatgggggtgtagcagagtgctacgtgtctagcgggggagagctagcgccctgggtacatgccaatgtggcagccggagagatcttggcacccagctggtgtggtgtcgtggctgtcggagaagcaacagagcctggcggagggacagctgtcggagtggttgtgtccttgctgacgtccccctgcttccgtaagagaactgagagccgccgtcgtcacagggcatgcggggcgccatcattgcctatctggcggagctag

SEQ ID NO: 11715 - DNA, 1311 bp, Zea mays
  Peptide Sequence Number=SeqID_55090
atgggccgcctccgtgacgggcgagccttcctccaccgcgcgcttgtcctctcgtcgctgctccttctcgcctccggcgaaatcttcttcgaggaacggttcgatgatgggtgggatagccgctgggtgaaatctgattggaagaagagccaaggacaagctggaaccttccgacacacagcgggaacctactctggagaccctgacgataaaggtatacaaacaactggggatgccaaacattttgctatatcagcaaaattcccacaatttagtaacaaggaccggacattggtgatccagtactctctaaagattgagcaagatattgaatgcggtggtgcttacatcaaacttatgtctggttatctcaaccagaagaaatttggtggcgacactccttacagcttcatgtttgggcctgatatatgtggggatcagaaaaagaagctccatctcatactttcataccaagggcaaaactaccctatcaagaaagaactaaaatgtgaaacagacaagttgacacatttttacacatttattcttagacctgatgccacttatagcatccttatcgataaccgggagagagaattcgggagcatgtacactgactgggatatccttcctcctcgtaagatcaaagatgttaatgcaaaaaagccaaaagactgggatgacagggaatatattgaagatcctgatcaagttaagccagagggatatgattcaattcctaaagagatacctgatcccaaggacaaaaagcctgagtcatgggatgacgatgacgatggtacatggaagcctagaatgatacctaatccagaatacaagggaccatggaagcggaagaaaattaagaatcctaactacaaaggaaaatggaagaccccatggattgtcaatccagattatgtctactgtctgttgatgacagttttgagtatttctcttggcaagtttgaggatgacccagacctatatgttctgaaacctttgcagtatgtggggattgaagtatggcaggtcaaagctggttcagtttttgacaacattttgatttgcgatgacccagactatgcaagacatgttgtagatgaaacttttgctgcaaataaggaggctgaaaaggaggcctttgaaggagctgaaagaaagaggaaggctagagaagaagaggaagcacggagggcacgggaggaaggggagagacgaaggcgggagagggatagggaccgcggcagggaccgatacaaggatagatataagcgtcataggcactacgactaccatgacgagctatag

SEQ ID NO: 11716 - DNA, 342 bp, Zea mays
  Peptide Sequence Number=SeqID_55091
atggctgaaaggtaccaactcccacggagttgcgtccctccaacgacgaggcaaaaagacgacgggcatccccccatccgggggcttggaagggggaaggacgcggtgcataagggaggaccgggaaagggggataccccgaaagggatccttccccgtgaaggaaccaggctccgagccttcttactgatcaggggttcgaaggctggccccccgaagggttcaacagctgcctcagatcgcgtgggccctacacccactactggtcagaggttcgaaggccggccccccgaagggttccacggccgccttaggctactcgggctccgcgcccattactga

SEQ ID NO: 11717 - DNA, 252 bp, Zea mays
  Peptide Sequence Number=SeqID_55092
atgctggcgtgtcaggagtcggagaagcgcgtccacttggcgcggttgcatgccgcctgcatggctgcccgcctctttcgcccgttggtctgggcaaagggggagggttacttcccggctgcacccctccaccggcggtcacccaagatggtgacctccggcttgatggtgggggaaagcgaaccgggctgcggcctctgcccctacttcggcctcaaggattttcgtcatccaggccaagatggaggatga

SEQ ID NO: 11718 - DNA, 357 bp, Zea mays
  Peptide Sequence Number=SeqID_55093
atggccacgacctccctctctctcgcgcccgcgcccctccgctctcggcccacctcggtccatctcccctcgcgcccgcgcccgcaccgcgctctcccctccctcgctgcctactcggccccacttgcccgctccttcgcttccctgggcgcctataaaagggctaccccgagcccctcatctcctcgcaccggcctcggccactccccacccctcccctttaactcaatcaagccaagccccgccacctccttccgctgcgcgcaccattctttcccccctatcacgcgcagtggcctcgccagcgaccaagccgccgcggaagcccgccacctcaccgtggactggccgtcctaa

SEQ ID NO: 11719 - DNA, 315 bp, Zea mays
  Peptide Sequence Number=SeqID_55094
atggagacccgtgcactcttgttttgcttaggaaccagggagaagatcgaaagggaaaaggatttgaacatgctggattcgaactgcagaagaacacaaacttgtgacggtcaccacggtcacatgctggctcggattggaatgttcaagcacaacatggaaagcctatcaagtctactttcatatggatccggaattatagacgagtgccctagtggccagggtgtcacgctccacaagatcgtgacagccacaggaggtggtgtatcggttgctaaggcgcagcgtctttggaaggctgcagtcgggccgtaa

SEQ ID NO: 11720 - DNA, 609 bp, Zea mays
  Peptide Sequence Number=SeqID_55095
atgcaggtggcgtgcaaccgcaccgcgagggcgcaccccctcggcttcgtcgcatccagcatggaggcccagccccacacgtcatgtaaccggtgcgccggttactacgtgcaagcaaccgcaccgccacttgcgccaatgtcgcgcctcctcaactgcggaaccggtgccgcgactcgagacaaccctgcgcatggcccaacagtgccaatcgagcacatcgatcacaggaagcgggcccagagccctcctactgatcaggggttcgaaggctggcccctcgaaagggttcgacagccgcctcagagcactcgggctccgcgcccactactgatcaggggttcgaaggctggcccctcggaagggtttgacagccgccccagagcacgcagagcgagggatgactctgggtacgtctgttacatggccgaggctcgggctacgctcccgagaggctcgggggctgctctcgcaaacccggctacggccaaaccgttgacagcgtcaacaaaccagcctgaaaactcggaacctgaccatgcacccgggccacaatcagatcgcatgagggaacaaccagaccagccgaggcatcacgaaaggcattaa

SEQ ID NO: 11721 - DNA, 783 bp, Zea mays
  Peptide Sequence Number=SeqID_55096
atggagcagcgtcccgggctgaagaggttgctggagactacccatctggaactcaacgggaagttgttcgtcaacacgcagcagacccctacctggcgcgccaactgtcggcgttttgaccccggggggtccctggaccgacgagtgaaattgttgctgcgtgtcccagcccagatgggttggcacgagatggaacacaaggggggaaaacgtggctcgtgttatcctgcaccaggggatgcactcgtagtaggggttacaagcgttcgcaagggagagagagtgagcctgttcgtcagcccgtcctcccgcgcgaccctcccgcatgagggccctggaccttccttttataaatgcaaggagagggtccagggtaatgatgcatcctccgtggcgcggtcggtccgagcccaaggtcgggcgagccggagactcctcctgaggccgaggctggggttgggcgaggacgcgattcctctcgaggtcgaggttgaggccgagccctggggtcgagcgaggcggagaccaccttccgaggccgaggttgaggctgagccctggggtcgggcgaggcagagaccaccttccgagggcgaagcgggggccgagccctggggtcgggcgaggcggagacctcctcctgaggccgaggctcaaggtcgggcgaggcggagcttcctgttgcgcctaaggctggacttagctgttgtcagcctcaccctggcgggtggcacagcagtcggagaggggcgagcggcgctgttttcctgtcaggtcggttag

SEQ ID NO: 11722 - DNA, 1500 bp, Zea mays
  Peptide Sequence Number=SeqID_55097
atggttgccatccaagggggtcaccctccttttaaaggcgactctccccacttgcgtcctcagccgttgcggactgagtcttcaccaacacgctccaaggtcctccccctacgacacgggggctgggtcccacgcgtcatgcaagctggcccagggcagaagaagccaaaccgccgcgcgcggagcgtacaaccgcccagcggttacaagcactcctccactttcgcccagaccagcgggcccacacgtcatgtaaccggcgcgccggttactacgtgcgagaagctgcacaaccacttgcgccagtaccgcgccttctcgactgcggaaccagcgccgcgactcgaggcgaccctgcgcatggcccaacagtgccaaccgagcacatcgatcacgggtcagtcagccgctggagaaggcgcgacggtcaatatggccaaaagagggccgacagtaattgtggcggcaggcaggcggaaacagcggtcacgtcgtctgcaggctcacgtcccctcctgggacagcaagagagccctctcccacggcgtgaagacgacgcgcccgtgttccgttcctcgaacggctcgcgcacgcacaacgactgccctgcgaaccactcgtcctgtcgcattaactctgcggcaggacaggcggcacctttggcaggcgaagcaggcgacgcttcacctccgccataatgaccgcgtcaaaaaagggaccgggaaaggggatactccgaaagggatccttctccgcgaaggaagcgggccccgagcccccctactgatcagaggttcgaaggctggcccctcggaagggttcaacagccgcctcagagcactcgggctccaagccctcctactgatcagaggttcgaaggatggccccttggaagggttcgacagccgcctcagagcactcgggctccgcgcccaccactggtcagaggttcgaaggctggcccctcggatgggttcgacagccgcctcaggccactcgggctccgtgcccactactgatcaggggttcgtaggctggcccccgaagggttcgacagccgcctcagagcacgcagagcgagggatgactctgggctcgggggctgctctcgcaaacccggctccggccaaaccgttgacagcgtcaacataccagcccgagaacttggaacctgactatgcacccgggctacggccacctcggcctcggaagacggtctccgcctcgcccgacccagggctcggactcagcctcgacccccggaagatggaatccgcctcgcccaaccccagggctcggactcagcctcagcctcagaagacggtctccgcctcgcccgacccagggctcggactcagcctcgacatcagaagacgaactccccctcgcccgaccccagggcccagactcgacctcgacctcggaggagcctccgcctcgcccgacctcgggctcggacccgccacgtcacagggaaggccatcattaccctacccctag

SEQ ID NO: 11723 - DNA, 513 bp, Zea mays
  Peptide Sequence Number=SeqID_55098
atgaacgctcaaaatgccaccttcgcgaatccgcccaacggccgactgcagtcgcagaggaatcccgacggcggcggtgcggaaggtgggagaaagtcccctggcaccacggagtccgcgcgaggtggcgatggatccgcctggcgcgacgctttccgcgcggcgacgaagaccgagaggtggaagacgggatcggctcagctctactccgttctgttcgcttctgctttaggtgcgtgcctagcagatggtgaggcggcgtcgcgcggccctctcgacggctcgccggccgcgctacggggcctgctgcagcagcccctcctccacgcctacgaggccaaggacccggccgcgtgcatggacatccggcgccctcgtggagcggcggctgcctcgccacgtccgtgttcgtctactttggagcctattcccggaggaggacaatctggacaagctgttcctaggcagcaacctaagcctttggcaaggatgctacagctgttttggagctga

SEQ ID NO: 11724 - DNA, 645 bp, Zea mays
  Peptide Sequence Number=SeqID_55099
atgggcagcaacgccgttgtcaacttcccatttctgcgcctccgctgcgtgctcatctcatgcggcattatcagcatcctcatcggcgctgcctcgctagctgtgacgctgaccgtctaccgcgtccgcgagcccgtgatgaagatgaacgccatctgtgtcaaggaccccggcgccaccgtcgcgtcatcttcggcctcctcgacgccactcctgtcgctgacggtggtggcggacgtgtcggtgaagaacccgaacgccgcatcgctgcggtacggtgcgacggagacgtcggtctactaccgcgcgcgtcaggtcggggaggccctgggccctcctggcacggccccggcgcggcggaccgtgcggctgaacgtgacggtggacgtcgccgtgggcgcactcctgggggacccggcgttcctggaggacgtcgtggcggcaggcgccgtcgtcgtggccactgccacgcgtgtgcgcgggcgcgtcgccgtgctgggcggattggtgcaccggcgcgtggtgctggagataaactgcacggccacagtcgccgtggccgacatgtccatcagcgatcagagggtgtacaaggaggatacacaagtcttttacttggagttgatcaaggtgctgcttcagtag

SEQ ID NO: 11725 - DNA, 687 bp, Zea mays
  Peptide Sequence Number=SeqID_55100
atggtgaccaccagtttgatggtggggagaagcaagccgggctgcggcctctgccccgccctcagctttaaggatcttcatcatcctggctggggcggaggccaggctgagccggagatctacctcccgcacgggttcgtgggtcaccttctccctcagcattcaggggagagggcgctcaccggcctagcggaaggggcagactccgacaacgcggggctgctggccctggcttggctcccggtgccccctcccgccgtacgagcggtcgtcgcgccgcgcacaccggaggaccgcccaagacgtcgcgcgctgctagggcagcattcgtgttcttgggttgtcctgcctttgctccggtacgacgcttctgcgcggaggtcggtgctcgcccatctaggaggatccgagtggggatctgccggtgggcagacggctgccgtcgttggtgccgaggtggtggcggctggagaagtcctcgtcgccgacgagattgccgccaccatccgcgcttcgggcctctggctctttggctttgatagcttgtcctcgcccctcgagtggggatgcgggcgaggaccttatcgcagcagtgtctgccctgaggtcatcgctgctgctgtttggccgcccggagcggaggtcgttgtcgctgctgcccggagcgggcggcggcgagccacctag

SEQ ID NO: 11726 - DNA, 876 bp, Zea mays
  Peptide Sequence Number=SeqID_55101
atggggagctcccgtgttgccttcatcttgctgctgttggaggagcgcaacttcgcaggggatgatgaccaccagttcgatggtggggagaagcaagctgggctgcagcctctgccccgccctcagcttcaaggatcttcatcatccttgctggggaggagggcgagcattccgtcctccgtccgagcgactgtggccggctgcaccggggggtcgcacgacacgtcgtacgccgcgagggcggtggccgccgccgtcggtgctgaggtggtggcagccggagaaggtttctccgccaacgacaccgttagtgccacctgcgctctgggcctccggctctttggctttaatggctggttctcgtcccccgcgaggggacgtgaacgagggccttccagcggtagcgttcgccctggggccatcgctgccgctgtcttgctgtccgagacggaggttgttgccgcgctgttggtgcagcggtcgccggcgagccacccggagtttgtcgtcccgcgggccctccggagtccctcagctcggtcggccttgccgctcaaggcttcccttgctcagtttgagaaccttcggctgctctgtgatgagctggagccggaggcagcggtgtcggcgtggacagaggcggaatcggctcgagaagaggcttcgtcggcccgggagcacgtggcttcccaggccgaggaagtggagatccttccgcccgtgtcgccgttcgaggccgggccagatctcgccgagggtggagacggcgccgagggtggagacgatgacgagggtgccgctcctcccccgggcgatgattctgttatcgatatagtcggaaagcacgaaagtcgttttggtagaaaacctttctga

SEQ ID NO: 11727 - DNA, 183 bp, Zea mays
  Peptide Sequence Number=SeqID_55102
atgcccatggatgaacaaagtgcaaatcttcaacaaagccaaggggctgtttcggtctggggcaccggactgtccggtggtgcaccggacagtgtccggtggtgcaccgaacagtgtccggtgcgccaggctgccccagccgaagaggccgctctcgggtttttctccggcgacttcggctaa

SEQ ID NO: 11728 - DNA, 426 bp, Zea mays
  Peptide Sequence Number=SeqID_55103
atggcagatccggccaggaaggccacggcagcgacggatccagccgggaagacgcgatctagccaaagggacagcggatcgagccgggaaggtcgcagcaacggggatccggccgggaaggcagtggcaacgacgaatccaacgaaggcgatgaagagggggtgggcggcagggtgggtccagccgggcagggggcctgcgtcggacctggcaaggggtgttgacgacaccggtgacaggagaagctcgaagtgggaggcgctgctggggtgtcagcgcgagcaagtaggaggtggccatcgcgatgatgaggggctgcgtaggagggagagatgtcgcactgtggaggaaaggttggtcactgttggggaaggtagcgcccacgaggccgtggcggctgctgcacatgtgcctgcgtggccgtag

SEQ ID NO: 11729 - DNA, 324 bp, Zea mays
  Peptide Sequence Number=SeqID_55104
atggacatggtggactcctcctccagcaactccaccctgacatacagcctctccgctgtatacggcttccgcaacaaaaactaccaccgtgacgccgagagggtcgccaagcttgccgtggcgcccatgtatggcggccagcagctggggccgggatccagcctgccggcggccttccgggtggggtattgggagacggccacggttccctgggacgtgcgcggggagcagcccgctggcgcgttggtcgccaggacgtacgcggacgacgccgcgcggggctactacgccatacagctagctattggcatctttggaacataa

SEQ ID NO: 11730 - DNA, 594 bp, Zea mays
  Peptide Sequence Number=SeqID_55105
atgaaaactctagccacgacaaatgttgagagtggatcgaaacttcgagaacaccgaggatggaagatccttagtgaagatgtctgcaaactgcgcactcgtcagaacgtgatgaacacaaacatccccaacaacaacgcgctcacggatgaagtaaagatagatctcaacatgcttcgtgtgcttgtgctgaaccgagttgacagagaggtaggcggcgttgacattgtcacagtagacaagagtacttatcgtgaagggattgtggagctcccgaaggacctggcagcgtcagctcactttagccacaccattggcaacaacgcggtactcagcctcagccctcagcgctggagcaggagaccacgagctgacgcttggggaaccagaagacgaggatcatgggcgagatcaattcccaccagtcgactaaggactcatgctagtctgaagggcagtctgcagacttccaaagttttcccagggcgccaccttgctccaaacctcctgtgcaaaggggcagcgaagacaagtgcccattttcaagcaggccattgcataagatacaatcgtcctggtgaagccaccctctga

SEQ ID NO: 11731 - DNA, 1386 bp, Zea mays
  Peptide Sequence Number=SeqID_55106
atgagtgttggcttctcctactcggtttccctttatatttctggacccatgagcatatccagaatgcagtcggttgctaaaggttttcagggagtctcctggacagttcagtgtgacattgtccagcagtttatgcttggtgctgaaccacaagatgaagaccctatgcccccttatcctcatgatggtcatcagcttcctgtggagtactttgggatggggcagcctgtggccaactttcaatttgatcttaatatccccccatgggagggattgaagaggaagaagtcaatgctaataatgctgatgatggccgggatgcctggccagttcaacaagttcaacctcctgcgccagtgccaaatgataatattgtggaggaccaattcagttatcagctctcaggccttgaagatatgccctctgatgaatttgtgggtctcttcaatgacatcattatcccacaagaggtccacttccctcaggtggaagctccaaaacctgtggatgcagttcttgctttgcgagcctttcccccagcggcccaaccatgatcctgcatatgaagattacttggctagaaaacgcctttcttcttgggctgacttgttccccaccaactcagaattagttcctgttccaaaggtgtcaaaggttcacaacatagccaataaaatgaccaagtgttgggttcaacaaaagggcaaagagccaaccgaaggccctctggtctgggcgcaccggactgtccggtgtgccaccggacagtgtccggtgcaccaccggacagtgtccggtgcaccaggggactccagctcgaactcgccaccttcgggaatttccaggggctctcgcgctataattcaccggactgtccggtgtacaccggacagtgtccggtgcgccatggagaagcggccccaggaactcttcagcttcgggaaaagccaacggctcgtccgctataattcaccggacatgtccggtgtgcaccggactgtccggtgtgactccagcacaacggctatcccgcgccaacggctacctgcagaggcattaaatgcgccgcagcgcgcgcagacgtcaggtgtgcccatactggcgcaccggacaatgaacaggagctgtccggtgcgccaccggacatcaggggtggcccacaagtcagaactccaacggtcagattccaacggcactgatgacgtggcaggggcaccggacatgtccggtgtgcaccggactgtccggtgcgccatcgagcagactggctccccaacggccacatttggtgtttggggctataaataccccaaccaccccacattcattgccatccaagttttcccacttctcaaccacttacaagagctaggcattcaattctag

SEQ ID NO: 11732 - DNA, 1905 bp, Zea mays
  Peptide Sequence Number=SeqID_55107
atggtgcccaaaatcacggacttcggtttgtcaagactcttgggtaatggaaaaagccacaccattacacaaacaagaataggaacatggggttacatggcacccgagtacttggatgatggagtgatcacaatgaagacagacatctatagcttgggtgtgataatcagacacatggtgaagggacgtaactcggcagacaccactgatgaagaagtactggcaaactggttgattaggctggaaaaggatccatcacagatgatgaggcagcagacgacccgattattatttgaaacagagtacaaagagcaaataaaagcgtgcatggatatatcatggaggtgcacgctgcgtaaaccaatggacaggccaacgacgcagcacatcctacttacactggaggaaacagaagcaaagatcaaatcggtcgttgggcctactccaccaaatgccgggcagcttcagattgccaaatttgggccgtggggtggagatggagggaagacgcgagacataagaatgacgccttgccatttgcatagcgtaacaattagcagtggaactattatcgattctatcgggttttcattcactgatcactatggtcagcaccacacaacagggccttggggcggtaaggagggtacgaataagattgaactaggcccttcggagtttcttacaggagtatctggaacaagcggcccattcaaaaatctaacaaatgttgtaacgtcacttacgtttgtcaccaatactcgtagttacggaccctttggaaaagggcgaggaacaccgttccacatccaaacgcagaacaacggcaggatcgttggcttctttggccgttctggccagtatctctatgcgattggggacctcagtgggcagcagcgcagcagaggtggaggtccatcgggagaatgtggagacagcgacgacgagcccaacggtgatttcgccaaattcggcccgtggggcggcgacggaggacagccgcaggacatcggaacactaccctgccgtctagacaggatcaagatcagcagtgggcttatcatcgactcgatcgagttctcgtacgctggccctgacagccagtaccgcaccgcaggcccttggggtggtcatggaggagacaacagctcttttcagctagctggttcagagttccttacaggtgtgtctgggtcaatcggcacattcaacggccatgcaaacgtcataacgtctctgacgttcgtcaccaacgctcgtagctacgggccgtttggaagagggcgaggcacatccttccacatcccagtgcagggcaatggctgcatcgtcggtttctttgggcgctccggacggtacctcaacgcgatcggtgtctacacggcgccgaaacccgaaccaaaagcagttgggaaacaagatggtggtgatgaggccgtcgtcgccaggattgggccttggggcggggttggaaatgctctccatgacatcgcagagaggccgcatcgcctgcacagagtgacgatcttcagcgggacgatcgtaaactcgctggagtatctgtacagcgatggcgacgggcagcagcacaccaccggtccgtggggcggctgcggaggaactggtcgaaagattcatcttgcccctgaagagttcatagtggaagttactgggacattccatccatgcgcgtgggacagaacaatacccagtgtcgtgtcctctctgacgctcgtgaccagcacgggcaaaacacacgggcctttcggaacgcagctgggagccgcgttccaggttccggtgcagagcgacagcaggatcgttggcttcttcgcccacggagacaattacatcgaagcaattggcgcctacgtgaagaaattgacagaatccagcaaccgttaa

SEQ ID NO: 11733 - DNA, 297 bp, Zea mays
  Peptide Sequence Number=SeqID_55108
atggacgatggcagacgaagcctcgtggttgcgcagaatgggatgtaccccttgaattgcgtccctcgcatgtggatggtcgcacactcgatttgggtcgccctcgcctgtgagagcaccaagagggagacaaccgatcaagccaaggatggaggcaagaagagcttcgaggtaccgagtgcacgagagaaggtcaaggagaccaggaacccaaagctaggggtgaagaagaagacatccaaagtcaaggttgatcgagttaagaagagttatggtgcatcaaggatcactacataa

SEQ ID NO: 11734 - DNA, 1024 bp, Zea mays
  Peptide Sequence Number=SeqID_55109
gaattgggaggacctgtcctttgacggcaagggacaccacactcaggttaaccttacgttgggttctctttgccgccttcactaccctggtatagtgaaggtgtcaaacggtgataccgaggatgagcttcgatatcggttgcctgatggagaggattacatggggcacgctgaacgtgtcttgcaaaacaatgcaaagaagctggtgaaggatgccatatactatgcgagaattcaggctacaaacctgtattttcaaaagcatccggaagaagcaggcaaagcgcatggccctgactacgactggcgccatgaaccggtggatccctcggtggtgtacgcaagtggtggtggcaaagcgcatggacggcgcagcagatcggaggatgagcgttgttgctggtgcttctcctgtgactgcgattatatcgagaaacccgagcagaagtgcgggttctgggcagtctgcgtcttcgtctactccctcgtcgactacttcatcccaatcagcctggtctcggtcctcctctggctcgtcctccgccccagcaaccttcggccgcgggtggacgccgccgtcgccgtcagcttcagcctcgacaacgcgacctcgtcgctcgactacgacttcgccgtggacctgcgcttccgcaacctgcaccggcacctcgacgtccggtacctggacctggtagcgctggcgtcgtacggcggggaacggctcggccccagcgccgacgtgctgcccgtcttcgtccagcgccccatggcgtccaacgctgttcgcgccagcttccagggcagcgccgctccgctgtccccggcagcagccgagctgttcgccatggaggccgccaacggctccttcggcgtcctcgtgaaggtcgcctcgacgttcatgtacaagttcccgttccagaagacggtctactacctcgaccatgagtgctacatccgtttcccggcgcccaacggcggggtggtgacgccggggacgctttgcagcgccacagcgcggaaataa

SEQ ID NO: 11735 - DNA, 1062 bp, Zea mays
  Peptide Sequence Number=SeqID_55110
atggctttgcctatagagtcaggaaattttctgagtatgacgtcgatggataccgtttttgcacaacaagctatgaccaaagtcgtccctatcgaaaaaccacgtgttctggagtcttttacgcccgggcttgacaaggtcgagtattatggaaggattgaagaaatatatgaactcaattttcatggttccaaacctcttactccagtgatattcaaatgtcattggtttgaccctgaagtgacgagacaaacacattctaatcttgggctaatgattggacaaagatggtgggctatggggcgaggacgaggaggagggggagcacccgtaggacggaggaggtggtgtagcaggacgccgtcgtacaatagtaggtggagcaccaggccgctgtcgatgcagcacaacatgacaacgacgacgacgatgctcagcgggacgcctctgggtctggcgcatcagtccttcgaccactatgctataataagcaggtcggatgtggtggctaccacgagctataagaagctcgtcgtggacatgcactacaaggcgcacatccaggtcgtcgtcacatactacggcttcatccttagggagaagatgattccttgtccatgggccagattacgatccgaggaccgaggacatcgacgaagatgtcctcatgagggtcggaggaggcaagaggaatgggcggtactagattatcgatggggcaatctactcgtcctctactcccgctctatcttaggtgcgagtaaggagcacgagcgtgagcccagccatacgaccttggcaggacaactcacaacatcacatatagaaactccagctagaagaagagaggtgggaacaaatggagatggaggggaggatgggggtgaagcgggaggtagagtgggtggctcgcttggcagatcagcagaggatgacagagatgttccagtacaagttgtcgtacatagttttgctccaccacctctgttgttccctccaactgaccttgctcagttccatactcttgtgagcatcaaaattctagtcttgcatgatatataa

SEQ ID NO: 11736 - DNA, 120 bp, Zea mays
  Peptide Sequence Number=SeqID_55111
atgactacagatgaattaagagctcaaattgagcaaatggaaaagagattcaaagatcctaagaaaggaaaggaacaatttaaagagaataatgtagtgaatgtggactttgagttctga

SEQ ID NO: 11737 - DNA, 501 bp, Zea mays
  Peptide Sequence Number=SeqID_55112
atgtgtatgctccagcaagcctgttgcaagtttgaggcttccaaggagaaaaaggagaggagactccaatatctatcaagcatgtgcctgcctcgattgagtcaactgtggtcaagatgggccaaaaagaaaaagaaagaggagaggaagaagaagaataagaagatgatgaggtcctcccttgttttccatgaaaagcgatcaaaggcgcataatgacccggtcagacttgcctcacgggagcatcggttcaagctccagagccatcagagaacactccgagcattagaagttcctcactgtgaagaacaagcagatgatgagggagacttaaacactggggacacaatgcttctagtagccgagccggttactgagccagaggtaggccccacttccatatctagggctaaaggatctaagcttatgactaaaatagtggctaagctgcagaccgactcaaccctagccctcgggagtgaaggggctaaggcgtcttga

SEQ ID NO: 11738 - DNA, 894 bp, Zea mays
  Peptide Sequence Number=SeqID_55113
atggatgagctttttagcaagctcaagtgcacaaagattgacaaccagacccaggccaagactgagaaccctagcgcacccaccatagccatggtctctagatgtggttcttcctctaacccttcattttctatgtttgctttgtattctttgttgaccatcatagagaacgacctcgaccacttcatcaccaactgccccaagaagggcaagctagaggccagccatcgtgaccatcactccggtcggtgcaagggcaagcatgagtacacctacgacaagcacaagtctaaggggaggtttgacaaggaggcgctcatgaagaagtacctccaaaaggccaaggccaaggatcataccttcctcgcctccctcagcaaccttgaccatgacttcaacgactcatcttcttcctcgagtggtgtgaagcttgagaggtgggtcgaggacaagctgaatggactttgcttcctcaacaacaccacgagaggcctctgcaccagtgcacttggtgatgacacggtgagttgcggtgacaaggacatcggcgataactccccttttgaggacaagtttcttaggcttgctgctcatgtgaggaaacaatgcaagagcaagtatgagatcatgcttagggagattgagtctgctagagcttctattttggtgtccgacaaaacaaaatacgatgagtgcgctcttcatatgtcgaacatcaccacttcacagagcaacagtgaggcccagttgggcatgatggtcagtcagttcaagaggggaactggtggaccgagcctcccaaagcttgtcaaaatcactccacgaaaatctgccacccctgttgtgagagatggaatgcttgtggagcctttgagagccccacctcagaaatag

SEQ ID NO: 11739 - DNA, 153 bp, Zea mays
  Peptide Sequence Number=SeqID_55114
atgaacggatccggggttatgggccccaacatgccaccaccggtgataccagcaccaggaggagcttatgcaggggagggagctactacaggagagaattcaaaccggttaaacaacttcgtcaacgagttgttcgcttttggagaattgtga

SEQ ID NO: 11740 - DNA, 933 bp, Zea mays
  Peptide Sequence Number=SeqID_55115
atgtcaaaaacccccgcggaaccacttcgagcgagggcagcgtctccgccatctagcgacgtcttcggcaccagtcgctggtctaacagagacaaaacgggcagggacacccttcgctcgattcagcaccagacgaaggcctgcgacggcgtcatcccacagtgcggcctcgcccagctcagaggcccaccttcaaggatcttcatcatccttgctggggctggggggcgagctgagccggagccctacctcccgtacgggccagcgggccacctcttccttcagcattcaggggagagggcactcaccggcctagcggagggggcggacttcgacaacacggggccgatcggccacaagtgtcctggctctggcaaagcttccggtgccacctcccaccgttgggcggagtgtggctatctgcccgccatacgggcggctgttgcgccgcgcgtactgggggaccgcccaagacgtcgcacgctgctagggcggcgttcgtgttcttgggttgtcctgccctcgctccggcacgacgcctccgcgcggaggtcggtgctcgcccgtccgggaggacttgagtggggatctgccggtgggcaggtggctgccatcgtcggtgctgaggtggtggcagccagagaaagcttctccatcgacgagaccgtcagcgccaaccgcggaccgggcctccggctctttggctttgatagcttgtcctcgcccctcgagtggggacgcgggcgagggccttgtcgcagcagcgtctgccctaaggtcatcgctgctgctgtttggccgcccggagcggaggtcgttgtcgctgctgacggagcgggcggcggcgagccaactggattttgtcgtcccgcaggccctctgatgtggaggttgttcgtacccgcgggagtggaactggagttccgtttgtaa

SEQ ID NO: 11741 - DNA, 1872 bp, Zea mays
  Peptide Sequence Number=SeqID_55116
atgcaggtagtcgagttggttccttgcgcccgcaacaagtggggcaactggaatgagttttggttttacgttgctgagggtaccgtcgaagaccatgagggactccccgtgtccgagatgtgttctcatttttactcagcgtacccgccctttgaggtggcggaggaggatgcggacgagggggcccttcggcgcgccgctggcctgagcaatgggcgcgatttggttgaagaatttgtggcgtacggggtatggcccttggcgcatggctgggcgttgggcgaagtgtgccctcgccagatgcccttccacggtgggagggtggtgcgaagtcccgtcttcgcgctgaatctgcaaaaccgcgatccggtcgcctttgtgcgtgaggcggaggacagggcggtgcggctcgttggtcgctatgtgccgaggacagagggccagcgcagttgggaaatccgcgggtcgaatgaccgtctgaacagggtttttgaattgaatcaactgccgtttgacggctatcccggtcaagacgatgtggaccgccgtgggaagaagtcggtggtggagactagagacgaccctgcgccggcggccgccccatcctctaagaagaggaaactaggtactgccatgggaggacttggggtttccgatggttttgctagagagttgatgaggacatgcgtggccccggggggaaggatgtcttcgcccgagctccgggagtcttcggctcggatgctgagggttaccgggggttgctggcctaggaatgttcctatcccccgcgcggctggcgaggacttttttacatctcgcatggttcgtgaatggagagtttttccttacgggcggaatattgctgctgttgtgtcggcagtgatggacaaggatcgccagggagctgcacaaaagcgccaggcggctgtcaggctcgttgaagccaggccgaagaggcagcggggggctgcgaaggctgcggcccccggcggaggcaagccgccgctggcggcgaagtcgggcgtccctgcatctagcaaggcgccggaggcaacggcaggcgccggaggctccaaatcgacgaaggcggtgcctccgtccagcggagtggcggaggtcgcgaaggcggcccgagcgttgccgttgtcaggcaagcgtgtcgccgactttgccaccgatattaatgtggacgactatcttggtgggtcggacgaaggccaacttgctatagttgcgcctgccgcggcgaccacgacggctgccgtagtgccgaaggcgaagggcggggctcttagcgccggaggcgaggtgtcggccctcgcggctgtcagggatgaggcgggcgctgtgtctcgccggctgaaggaggtgaaggaggcactaagtcaggcggctgacttcgtcgaccgcacagcgtcgggggcgctcacggcagttgtgtctgccgaagtcgagagacttcggacgcaacatgctgacgccgtccgtgaaaaatcagccgccgacagtaagtgctgcaagctggcggacaaggtggtcgcactggagagggagaaggctgacctccggcgccaactagcgggggagaggagggagaccaacgaggccctcgccaaggagcaggctgcacaggcggaggccaaattggcgcgggcggagggcaatattgccagggagcgcgccgagcagctgcaggagcggctcaccgctctggagagccgagtggagagggccgaggccgtgtcgcgcgcggaggcagagcggacgcgcaaacagcttatggatacataccgtgagctgggcgcgcggaccggtgacttcgaagtgccggaccgagagcccggacttcgctgcctggagtgggtgtag

SEQ ID NO: 11742 - DNA, 453 bp, Zea mays
  Peptide Sequence Number=SeqID_55117
atgaacgcgctctcccgcgaagggtgccggcacttcgaggtcttcgaccaagccgatgaagattttgagcgagatatctataaggttgaggaccccgtagtgaaggaatccgccggagccatctacgaccggatgtggggtccgcacggtcgcgaggtggtcagggagcgggccgagacggcgagggctcaggcggcgcgtggcgagagggtggacgacttcggggcgttgaacagcgcgctgcctgacccggagccgaccccggcggaggccatgtccggggccgccctggagccgcccccagagactgcggaaggcgcaccggatgcccccgcagccgctgcgtcgagggctcaagatcctgcgacggtggcggcggaagcaacagcggaggcaacagcggaggcaacgacggaggatcccgcaacgacagggtcttcgcaggtggcgtag

SEQ ID NO: 11743 - DNA, 803 bp, Zea mays
  Peptide Sequence Number=SeqID_55118
ccgctctgtcttccgcgcgccgccagccgccgtcggccttcttgcgcgcgcgcccgccgccagagagcgctgcctccggccgccgccccgccgtcctccccggcgcgtcccgccgccagccgtcgcgttccctgcgcgctgccgcggccgccgccccgaccggcttcccctgcgagctgtcgctgccccgacgagccccagccgcgctcgcccttgcccgcgcggcagccgcaagcgccgctcgtcgtcccggtcgtccgacgccgccagcgctgctcgccgtcgccaccggatcctaccactccaccgtcgcgtcaccatccatagagattggaagcggcgtaaactatttggccgatgaggcgcatgcgagatatgttcaggataaaatggcaacggttgagctgatggaggaggaggacgacgacacatctagattgagtgagcttatcgccctcgcagaggccggattacataaagaagaggaggacgacatgtcaaggttgagtgagctcatagcactagctgaggcaggattacgtgctcaagaggaagaggatgagtttctgtcacaggccaccgcagaggtagaggcagcttattacaagaagaagtctgatgaggctgaggctgaggatgagctattctcccaagctgcagatgaagcagaagccaattattacaaaagaactggtgacaagtgtgatgcaggacaatgcagcaagtggaatgaggttgttgttgaggattgcgagacggatgactccgaagatgagttactcatagattgtgattcagactga

SEQ ID NO: 11744 - DNA, 948 bp, Zea mays
  Peptide Sequence Number=SeqID_55119
atggcccccattggtacaatagagatgaccccaatggaaccgatagctggcttcaaccctggtccggttcaaacatttccctcacgattgattcatggctttgatgatgatacacaggtttttcagcatatctcttcttgcattttttgtgctttggtatacctctacaccagggcagtccggacctacctcccagtactcaagatgataattgatttgaataactctctgcatctgaaggttgctttgctaaatctcattaccatatcgtcaacttgggcaagggtaattgatgtcatggacagtgagtttcttatttctcttttagttcagtcaggttcaaggttatttggttttattggagctggtgctacgctagggcaactttttggttcattgttcgctgcgagtatggcatggctgggaccatgtttctggctgatcttgcgatcaccctacctgatatacatatctctgtttctttggttaagtgcagttgtctcgtctgtattttactttcagggtcatattcttacagtagctggtgtcacagttgctatctgtgcatctccctttgttgctgcctcaaatttggttgcccttgctgtatggccaacttgggttgccgtggctgtcactgaaacaattagaaaggtaacaacttatgttttgacaagacctggaagggagttattattcactgttgtctcacaggatgaaaaatacaaagcaaaggtctgtatagatgtgattgtccagaggcttggtgacgcaacagctgctggaatttacaggtggttgttcagtagccttgagaagaaaacatccaaggtcaccctgtttgcattgccgctctgcttcctgtggcttgtcattgcatttcacttgggccggctgcagactaatcttgccaggcttcaggctgcttctgctccgtcctactcctga

SEQ ID NO: 11745 - DNA, 1074 bp, Zea mays
  Peptide Sequence Number=SeqID_55120
atggtggtgatgcactgcactgcacttgaatacttgattgatggagtccgcccacccacatccttttggcgcggcaggcggcctgccaagatgctgctgcactgcagctgcagctgcagcgacgccgacgccccgaccgagcctgcacatgttgggccggacccggacccggacccggaccgggggagggcctgtacccctcctcggtttcttgccgtgccgaacgaccccaagtccccaacacggaacggaaccgtcaatccgctacgccacagcaacgaccaaccggagccgccgccgccgccgccgacggggacggggacagggaaaccaccaccaccaccaccggccatattaacagctgcgcgtgcacggtggagttctacttccgcccgcgattcgactcgactcgactgctcgttccgtctcgaccttcaggcggctgagctcccggatcatattgctattaccttgaaggagcaggtttcttcgaccaagattcctgtccgtctcaagagtggcagcccgctgtgctcagcctgtgaaaacttcacgggcaaagctgtcagttatatcagtgagaaacagacgcaagataaggtcatgggattccttcatgacgcttgctctcagtcattctcgtttgaacagaagtgtgatgaattgatggactcttacgcaaccctcctgtttgccaagatcacggagatcaaaccagaagcgttctgcaaacagtatggcctgtgcaggggcacggctcttttctctggtgtgacaagtgacagcacatgtgtgttctgccaccacctgcttgatgaagttatgtccaaactgaaagatccggacgcggagtttgagataattcagattcttatcaaggagtgcaataagattgaaggccacgtccagcagtgcaagcgactggtcctgcaatacattcccctcatcctggtgaacggcgagaagttcctcgagaagaacgatgtttgcgcgctcgtacaggcttgtccagccacccataagaagactttcagctcagtcttgaagggagccttgttgctgagtgacgcttga

SEQ ID NO: 11746 - DNA, 357 bp, Zea mays
  Peptide Sequence Number=SeqID_55121
atggcgacgcctcgccggctcatccgggagcgcgccgaggcggcggtggctactctcgtggcagtccgcccccacgagatccccccgttgatgagcgcggccgccaccttcttcttcatcctgagcgcctacttcgtggtgctgccgctgcgggacgagggcgccatctccctggggctcgacactctcccgggcctcttcgccggctccctcctcctcaccgtcgtcgctgcccccatcgcctccctcgccttctccctcccctccatccccaagcccaaggttccacctccctttcctagcttgggcgcatacattcgtttgggaatcataaaactaaccccggtgataaattga

SEQ ID NO: 11747 - DNA, 444 bp, Zea mays
  Peptide Sequence Number=SeqID_55122
atggggaacgcgtcgcagcggcccggcgtgcaagtaaactggataaggaagacagaggatgcatggattggttggttgctgttacgtaccttgcgacgacgacgacgacgagagccaaggcttcgttccggtcgccgggcgctgcactttttcagggtcgccgggcgctgcactaccttgcgacgagacgacgagagccaaggcttcgttctggccttctgggcgccggctgctggactttttcagggtcagtggacgtcgagacgatccccgccggtgttccggcgagcttggagaggtgggtgcaggtgggatgcggcgacagcgagcgaggagagcgtcaggtctggggcggctcaggggccctttatatgccttgacgagaagataatgacccgggcgctgcatgcagctggtccgctggaatattgcgtggctatctag

SEQ ID NO: 11748 - DNA, 840 bp, Zea mays
  Peptide Sequence Number=SeqID_55123
atggcagcctgcacgacagcgcggcgtagaaagcaccaccagcgccccctgtccatgaggtccaacagcggcatgactgaatggcttgtttgcgtcgagctgggtgaagcagtaaaagagctggaggaggatggaaagagggtaggcgctgttcttgttacttcacccacctaccatggtgtatgcagcaatgtgcaaggtattgtcagtgtttgtcatccacgaggcattccggttatagttgatgaagcacacggtgcacatttcaggttccatgacagtttgccaagcactgcaattgagcaaggtgctgacctagctgtgcaatccacacacaaggtcatgtgctcccttacacagtcttcaatgcttcacatgtctggagatgtcgatgtagataaagtaagccagtgccttcagctcctccagagctcgagcccgagttaccttctactgtcatctctagatgctgcgagagatcagctgagccagaacagaaatatatttgatgagccattagttatagcatcggaaacaaaagacctgctggcgagaatccctgggatatctgttctagacttaccatgctccgcttcctatttccctgccattgatccgttgcgcatcacactcagtgcctcaaatctgcaattatcgggatacgaagccgatgacattttatatgaaggccatcaaatcgtatctgagcttgttggcacaagggccgtgacatttgcagtcaacttaggaaccagagtgcaggacgctgagaagcttgtgcagtctgcaaagcatttatcagaaaaacatttctttgccaccggccacttggccaaataa

SEQ ID NO: 11749 - DNA, 1047 bp, Zea mays
  Peptide Sequence Number=SeqID_55124
atggcgatagtggatgaaggcggcaaaggagaggcgcagccgcctggattagacccaagaacccgccgatctgcggtgaccagggcgaccggcgacatggatggcggtggccgaggagaggagtgggagggcccccccggctacgtgctctcgctccctgcggcggcgctgcccctgcccgtcgccgtctcctgcctggacgccaccgtccggcgcaaggggcgcagccatatccgccaccgtggccatccatcgggctggtgggccttcagtctccccgtccccgcgccggaggaggcaaaggggccggttcccccatcgtcgacggccaataatccgaccgaggagggcccaagtagcaacacgagaggaaagaatttggccgtgagtcgcgaccagggagctgtgcagatgtcgaccatcatcgtctcggtggacctggaatgcagccgctgtcgtgccaagatcgagaaggtgctcaacaggatccaagaaagtcaacctttgagcaggtataagcctggggactggattgagggagtcggaggcgcaaaggctggacattttgtcttgcctgaggtcaccacattgctcctggtgggccctagaggttctggcaagagcacacttgtaaaccgaattactagggtctttgacaaggatgatgatccttttgcaccagatcgagcacaggtgtcatgcaattcaaaatcaaatggtacaatgtttcttcgcgagtatccaattccaaggaattcaagtgccctccagaacataaaatctgaaatagctgatgtgtctgctaatcctcaaggtctacttctagaggcccttcattcggttggatattccggggcactggcaaaacctttgatggcttcagaatctgctgtaaaccggttggatgttagcagcttggaagaatttgttgctgaacattacactgctcccaggatggttcttgcagcatcaagagttgatcatgatgcgctgatttcagttgtagaaccacttctgtctgaccttccgtgcgtgaaaacgtcctga

SEQ ID NO: 11750 - DNA, 1959 bp, Zea mays
  Peptide Sequence Number=SeqID_55125
atgctcccgtggctcgtcgtcccgctcatcgtcatctgggccgccacccagctgctcctcccggccgcctaccgcttcgaggtcacctccccgcgcctcgcctgcgtctccgtcctcctcctcaccctcttctggtacgagatcctcctcccgcgcctctccctctggcgcgcccgccgctctgcgcgcctccgcgaggagcgccgcgcccacgccctcgagctgcacaagctccgcaagaccgcaacgcggcgctgccgcaactgcagcaacccgtacagggaccagaaccctggcggtggtaagttcatgtgctcttactgcggtcatgtctccaagcgccccgtgcttgacctcaattcagccgggaaggcccccaccggatggccttgtgctcaggattgtggatattggctcgacttgcgctgctcctccggcaataacagctccttcttgggattctcctggcgcttgctttcgtccttttgctcgacagcaatgaggtggttattgaggaatatattcagacttacgtcctcaggagatggtgagggcttgagcatagatggtaaaaggttggcaaagagaggggagaatggaggaaaaaccgaggagagcaagaccgagaaggcgagaaggaaggcggaggagaagagactggcaaggctggagagagaaatgctggaggaagaggaaaggaagcagcgagaggagatggctaagctagtggaggaacgcaggaagctgagggatgaaaaagcagaggccgaggagcggtcaaaaagtgctacacctgtcggggagaaggatgctaagagggaggcagagaagcggcgccaggagaggaagaagaaagaggacaaggggtcaagcaagagcaattcagattgtgaggacattgataggagattggtccgagaaggcgataggaagagagactttgacagaaagagtgacttggataggcgtgagggttacaagcctcattactttgattctaacaatcacagtaataaaacagaagtgctcaggcccctgccccctcaagttagcaaggttagtagacctgtagttcctgcaactgaccaggcatcagtgtctccttgtcctgacgttacaacttcagctcatgatatggttcggaaggcagaaccaaatggagctcaaatatacaatgctcatacatttctctctcagtatccgcctctggactacaagccaagttcaagccagtctatgcaatttccaggttttccaccgcttaatggagcacctcccagtaacccactacctcattttcctgctggacatatgcctttctatgatgatgcagaatcaacactacttgaagaaccagagcaatttgaggacccatgctatgatccagatgcaattgcattacttgggccagtttcagaatctctagataacttcccgttggacttagattgtgggtttttctcgagtgatgttgctaaagagtcacatgggaggccttcaccaattgagtctcctctctcaagatctcgtacggttgaagaaaagcctatcgagcccccacactcctcagttgcaagaggccctggtggttccattctacccgagtctagcagtgaacaaggcacatggcaaatgtggagcacaccattggttcaggaaagtttaggtctgcaaggtcctcagagccagtggcttcgacaaaacacaaatcaattcaaccatagtgccaaccttttcagcagcggaggcggagcaataagtccccttggtactggtttgaatgacagtgatccatggctgcagaaagcacctttccagcaattgccacctgatacaccaagcctgttcctttcacatgaaatgccaggaaaattacacaatgacttggtttttgggtctccaaacaaatcagcccgtgaacgcccatttggaccgcctggttatttgtggcccaagtaa

SEQ ID NO: 11751 - DNA, 768 bp, Zea mays
  Peptide Sequence Number=SeqID_55126
atgtcttctccctcccttatgcatcgcgtctttccaccttccaagcccccggatgggggatacccgccgtcttttcgcctcatcgttggaggaacgcaactccgtgggagttggtacctttcagccatcgttcggcttcaagtattttcatcacacagcccggttgctcccctccgctggtggtcacccaagacggtgacctccagcgcctggatggggagaggcaagccgggttgtggtcccgatcccgccctcagcatcgagggtgttcgtcatcctcactggggcggggagcgaggcgagccggggctctacctcctgcgcgggtcggcgggccacctcttcttccagcttctggtggtggcaatcgccctcccgcccctcggcggagacgtcctccagccatgccggggaaggcgaactattgctgcccagctaggatgcaacattccgccctctccctcgcattcgcgctggttcgcgtcccttaagcgggaccgcgaacgagagccctctggtggccgcgtccactcgggaccatggctgctgctgcagaggtcgctggcgtcccccgacgctcgtcgccccgcaggctcgaggggtaaccggccgagccgcctgctcgggccggattcccggagaagtccctggaccgcgtcgccgtccgaggctgggtcggacctcgctgaaggtgtcgtcgatgccgaggttgctacagcccccttccagagtgaagacccgagcctgcaggatcagagtgtcttgtag

SEQ ID NO: 11752 - DNA, 255 bp, Zea mays
  Peptide Sequence Number=SeqID_55127
atgacgaaccacacggcgtgcacgaccacgacgatctccatcgtcctgctcagtgtcaccgccgtagtcctactccatctttgtggtcaacgcatcaaggcgtgccaggatggtgtcgagtgtggtgcaattcgccgtttgagcaagcacaaggagcaacaaaacaggagctacacgaagtttcacctaaaacagagtttagatgtggtctacagaaaatcaggaatttctctgaaaagcgtgcgagaactttga

SEQ ID NO: 11753 - DNA, 105 bp, Zea mays
  Peptide Sequence Number=SeqID_55128
atgagctatggcagttactgggcagtcactacgactcgtgacgatgtgctctacaagtttgctatattgaccaagagcaaaatcctcaagaattatgagatatag

SEQ ID NO: 11754 - DNA, 464 bp, Zea mays
  Peptide Sequence Number=SeqID_55129
gccgtatctgccccggcgtctcacagttgagtgacagccctaggtgccaggaagaggtctgcggcggacttttgcaaagattcgcacgtatgcgacctctggcgacatttgaacactggaagaaacaaaccgccacgtgttcgacgccgtctgccgcgccagagcacgcccgcgcgcgcgcccgcgccgcgcccaagccgagccagtgccctgccattcccagccccgtccagccctcggagaggactgtgcgcgtctccgtgaagctccccgagcgaggaatcgggctctgcttcaccggagaggccggcccaaggtcaccggacttcaaccgaccgccggcaaccgtggaccgaggttctctggaggagatggttgctgggattacttggccgaccaccctgccaccgggttggactgtcgagtgggaccctgcctcggctgaggaggagcatgaggagtga

SEQ ID NO: 11755 - DNA, 252 bp, Zea mays
  Peptide Sequence Number=SeqID_55130
atggataggccgaagcacccgccaccgacgagctcgcccgcctgcgcacgtggactggccgcttccggccatcaccgtcatcgagccatacctcgtcgtgaccgcaaggacctcccgaagccaaccccacccttcgccggacctccctcgccgcagtcaaaccaattttgccagattctaaataaggtaaactacttaggaaaaatacaaaaccccctaagtgttgcagaagaatttaaagttctaaattaa

SEQ ID NO: 11756 - DNA, 432 bp, Zea mays
  Peptide Sequence Number=SeqID_55131
atggctgggcttgctcggtacggcgatatggtaatcatcatcggaagcagcttcctcaatatctccttcctccgcttcggcagcaacttgttctgtatcggcaatagtctgttctgtctcgtcagtgggggttccttccgaggtcaccaatccggatcgtcgcattgcttcggagataggaacagtctccgctccttcggcttcgcctccctcacggcaaacagctgctcaaacccgctgcgcggtggaccgcagagaccaaatagtaaccctgcagggtgggaccgctacgcgcttggaaactgtatcgtttctcgacaacgagctcagggaagaaagagacagcttcggctgaagctgctcgcacgtgacgccgaagggggcttcggcttccagatgaaggtcttctctcatgacaagatgaagatgtag

SEQ ID NO: 11757 - DNA, 718 bp, Zea mays
  Peptide Sequence Number=SeqID_55132
atgccagagccaacccatctggtaaaccccatcagcacaaagttgcaaaggcctgatgagcgcgattccggtcaaggctccgtccactcaagggacacgatctcgcctcgcccgagcccagcctcgggtaggaacagtagaccaaggcagattcacgcctcgcccgagggtctcctcaagcaacggacgcaccttcgactcgcccgaggcccagctcgggcaggcttcgcggagaagcaaccttggccggatcgctacgccaaccgaccgtatcgcaggagcaatcaatgcaaggatcgcctgacaccttatcctgacgcgcgctcttcagtcgacagagccgaagaagctccgcctcgcccgacctcagggctcggactcaacctcgacctcggaacacggactccgcctcgcccgacccctgagctcggactcagcctcgactctggaaagcggtctccgcctcgctcgaccccagggctcggactcaacctcgacctcggaagacggactctgcctcgcccgacccctgagctcggactcagcctcgactccggaaggcggtctccgcctcgcccgaccctagggctcggactcagcctcgacctcggacgacggcctccgcctcgcccgacccctgggaccggactcagcctcgaccccaaaggagccttcgcctcgcccgacctcgggctcggaccaaccacgtcacaggggg

SEQ ID NO: 11758 - DNA, 252 bp, Zea mays
  Peptide Sequence Number=SeqID_55133
atggcggtacagcaagcatgcagagtgcagactggtagcagtggccttgctgctaatgggaaggagatgggaggacgaacagatgattctctcaaaacaattcttgatgcattctcatctcctgatgcagatatgattggaaagaagttgttcatgttcctggcgtcttcatctcaatcggatgacaagagaagctggacaaggatcaggatcctcggagcgcatgggaggttgttccgcaataatccatga

SEQ ID NO: 11759 - DNA, 1263 bp, Zea mays
  Peptide Sequence Number=SeqID_55134
atgacgaagccgcattccccttcctcgtgggccgcctcctctctctcctgtgttttctcctcctccggctcttgctacgtgccgccgtcgtggtcaccgaagcgcagcagcaagaagaagaggagcagccgtaggagggccaagaatggtgccgcggtcgccacgaggaggaccagctccatctacaagggcgtgaccaggcacagggccaccggcaagtacgaggcgcacctgtgggacaagaatgctcggaaccggaccgggacaaagaagggcaggcaaggagcatttgacaatgaggaggcagcggcccgtgcttatgatctcgcagcactcaagtactgtggctggggctcacacagcacactcaacttcccactggaatcttacaggcatgaacacgagaatatgcagcgcatgacaagagaggcgtacctggccgctctacggcgcaggagcagctgcttctcgagaggcgcctctggttacaggggagtggccaactttctgcagccacccctccttccagtgaagccatgcagcagcaaatctgatgagagagttttggttcgcaggcaccaccacaacggcaggtgggaggccaggatcggctacccttgcggcaagaaatacgtctacctggggacgttcgggacgcaggaggaggcagcccgggcctacgaccttgcagctctggaactgcgggggcacgccgcggtcaccaacttcgacatcagcagctacacggcggacaaggactaccagcagcgacggcatgaaccggcggtccgcacggcccagccgaagcccaagcccaaggtcgagctggtggacgaggcaccactgccccaggctcgtcgtccggctccgacgttcctgacgccgaagcccgagcccgagtacgagctgggcgagcccctggcgctgccacccggccccgtgctccgcgacgccgacgacgcggaccacgccatcgccgagatcctgccggcgctctgcatggaccccgccgacttcgaggcccggtaccccgcccgccgcgcccgcgcgctcggctgcccgccggacgaccagctgcgcggcctggcgctgccggacagcgtgcgcttcgaggacgacatcgagacgctgttcgacgcgcccggcgaggtccgtgtgcaattccctcccgccgccgctgtgcctgacgtatccgcagccgacgcggtctcctacgcggccgccaccatcagctcgctggcgtccgggcgctggtggccttga

SEQ ID NO: 11760 - DNA, 711 bp, Zea mays
  Peptide Sequence Number=SeqID_55135
atggaggggcgcataaccgcgagagggtgcaacctcacgggggttggcatccttccgccatcgctcggcttcaaggattctcatcaccattcgggggagaagggtgttcgccggcctcgcaaaggaggcaaacttcggctatgcggggtcagccgtctaaggcgtcgtcagctgcctcgtgcctggctcctcgccctcggtggctttggtgccacctccggcgctgcctcctgccgcttggatgaagcgtggctgtccgtccaccacacgggcgacggttgcgccgtgcgcaggtcgtccacatccacggcttctcccgcgccgccggccacaccgggggtcatacgagacgtcatacgccgcgggggtggtggtgacattcttggatggtcttgtcctcactcccgtagtgacgacgggagcgaggacctcttcgcgcgcgctggggcggccgccatccgccggtacggcactggtgcgcaggtggccgctgtcgtaggtgctgaggtggtcgccgctgctgaggtggccgccaccgtcggtgctgatgtggtcgcctccgctggcgagccgctcggagctagctatctcgcggcccttactggtgtggagatactaggacatttgtcgcagggcggtggagcgtgcaggcccacggtacgggaccaggctgagcggctgcacgggctccggaccaccccaggagactaa

SEQ ID NO: 11761 - DNA, 306 bp, Zea mays
  Peptide Sequence Number=SeqID_55136
atgaaggtgttgcacccgtacgacacctccaggtcacacggagagcagcgcccgaccctaccacatgggcaggccttagggcaccacgtggcgaggaaggataatacatcccaggaagcgccgttgggtctggaccaccacagaggaacaccggacccctgtgagtacgagtccagagctcccgaggagacacgccgggtccccccgatgcgcccgtgccaagcggcgcactatactcatcatcccttctacaagaagcttcccctacacgccgaggatacggagatctcgggcatcagggcataa

SEQ ID NO: 11762 - DNA, 858 bp, Zea mays
  Peptide Sequence Number=SeqID_55137
atgaagaaacgaagaaaccctaagtgcaacaatggaggtttctcaccggggaagaagaccctcgccggagccgagaggaaatccgtcgattgccgcagattcggggatccaatcgacgaaccaaacgcgctgcgacgaagccctcaacgagacgaacgcagcgggggcctctacgtgagcaacgtcggcctccaaatggccctctacgcgctatatcgcaaggggaggccaccgccgtcctcagatcaaggggagcactataatcgcggaagcccagcggctcagagtccagggggagggagctcgcggcggctgaggaaggcgttcaccaccgtcgcggatttcattgaggaagagatggggctctcctttgggaagctgttcagccgcctcttcgccaagaaggagatgaggattctcatggtcgggctcgatgccgccggtaagaccaccatcctctataagctcaagctcggcgagatcgtcaccaccatccccaccattggattcaatgttgaaactgttgagtacaagaacattagcttcaccgtttgggatgttggtggccaggacaagggacttatttttgttgtagacagcaatgatagggaacgtgttgttgaggctagagatgagctccacaggatgctgaatgaggatgagctgcgtgatgccgtgctgcttgtatttgcaaacaaacaagatcttcccaatgctatgaatgctgctgaaattactgacaagcttggtctgcattctcttcgccagcggcactggtacatccagagcacttgtgctacatctggtgaagggttgtatgaggggcttgattggctttccaacaacatcgccaacaag

SEQ ID NO: 11763 - DNA, 1751 bp, Zea mays
  Peptide Sequence Number=SeqID_55138
tctggcgcgtgctagtatgccctcgccagatgcattcccatgaaggaaagcgggagagaagtccagccttcgagatgaatctgcgtagccgcgatccgggcgccttggtgcgtgaggtggaggacggggcggtgcgaatcgttggtcggtatgtgccgaaaacagaggggcagcgtagctggtatattcgcgggtctaatgaccgcttgaacagggtttttgacttgaatcgtctaccgtatggtggttaccccggccaagacgatgtggatcgtggcggacagaaaccggtggtagagactggagacgaccccgcgtcgacggccgccctgtcctctaagaagagactactaggcactgctatgggaggacttgtgtatattgctgctgttgtgtcgggcagtgatggacaaggatcgtcagggggctgcacagaagcggcctggcggtcgtcaggcttcatgaggccagggccgaagagcagcggggggctgcgaaggctactgcccccggcggagcctgacgcgctggcggcgaagtcgggcgtccctgcatccagccgggcgccggaggctgcgaaggcggctgccgccggtgtttccaagtctgcgaaggctgcccctgcgtccagcacggtgccggaggccgtgaaggtggctcgagagttgccgccgccgggcaagcgcgtcgccgacttcgccaccgacattagtgtggacgactatcttgttgggtcggacgaagggcaatttgttgttgttccgcctgccgcggcgaccacggcggctgccgtagtgccaaaggcgaagggcgatgctcttagtgctggcggcgagatgccggcactcactgctgtcagggacgaggcgggtgctgtgtcccgccggatgaaggagatgaaggaggcgctaagtcaggcggctgacttcgcagaccgcgcggcgttgggggccctcacggcagttgtgtctgccgaagtcgagagacttcggacgcaacatgctgacgccgtccgggaaaaatcggccgccgacagtaaatgccgcaagctggcggataaggcggaggccaatttggcgcgggcggagggcagtcttgccaagcagcgcgccgagcagttggaggagcggctcagcgctctgcaggctcgtgtggagagggcagaggcctcgacgcgctcggaggctgagcggacacgcaaacagcttatggattcataccatgagctgggcgcgcggaccgctgacttcgaagtgttggaccgagagcccggacttcgctgcctcgagtggatacaggaggagctgttggcgcttcccgccatcgtggaggggtttatgtcatatgcgtccctggtcacctgcgagggggcgatgaacgcgctctctcgcgaagggtgccgacactatgaggtcttcgaccaagctgatgaggacttcgagcgcgatatctacaaggttgaggaccctgtggtgaaggaatccgcgggagccctctacgaccggatgtggggccccccacggtcaggaggtggtcagggagcgggccgagccggggaggggttcagcgagctgcctgagccggagccgatcccggcggcggctgtgtccgaggccgccctggagccgcccccggaagccgccgaaggcgttcctgatgtccccgcagccactgcgaccggcggaggcccgtcgccaactgccgcgccaagggctgaggatcctgtgaaggtggcggcggagccgccagcg

SEQ ID NO: 11764 - DNA, 1161 bp, Zea mays
  Peptide Sequence Number=SeqID_55139
atgggggtaccggacccggagaaatggttcatcctgggccgcgtcgtcgtcgtgaggcactacaaaaaagccttggatagctctagccttgacctcaggctgccgctcaccaggacgccgccgcgcatctccaggctcgccgcggtcacgagggaccaagtcgaacgcggccagctctccatcgtcgccaccagcaacagtgtcctcctcctccacgagctcgagaggccctccgagcccaacagcccgaacatcttcttcctggcgctcgaccccatgcttgatgagcgggccttcgccgccggacgcagagtgttcgaagtcgccgccacgcgcctcctcgaccggcatccggaattaccccacttctccggcgtcaggaacgtcggcttcatcgagctctgccgtggaggcacgtgcgtgttcgtggtcgcggagctccaggccaccaatcgccaagcgaacaacagcgtccccttcatcacctgctgcctctctggcgatgggaacgacacgtgggaccagatggaactcgtctggcccgtcctcgatgacgaagcccacccgcagtggattaaccacgccgtgatcgcccacgacaagaagctctggtgggtcaacctctcgcgcggcctggtcgcctgggacccggtcccggtccaacatgcagagccgaggctggagttcgtgccgctcccggtcctccacgggttcgaggacaggcaggagccgccggagcaaatcgacaggtaccgcaccgtaggggtgagcgccggccagatgcggtttgtggacatcgttcgcaggcgcaacgatcccctcgaaggtacgctggtggtcgtctggacgctggacttgccacagatgaggtggcgggactaccccagggtgacgacgctggtgaacatctggaacaacgccagctacgtgccgatgccgaggggggtcgtccccgtggtggcgcttttgcaccccaacgagcccgaagttgtctacttcttcctgggcaagtacgtcttctccgtcgacgtgaatcgaagcgccgtcgtgcacttcgcggtgatgccgaaccagcaggacggcgtgccacggccgatcaaccagcgagacgttctctcttggaagcaagcgccctttcttgaaaacgtaacacttgactga

SEQ ID NO: 11765 - DNA, 279 bp, Zea mays
  Peptide Sequence Number=SeqID_55140
atggcccttggcgcacggggtgggaaggggctgcagggggcgaactggccgagctcagccggttggcagggcgccaggtcgggactaccggccatgacggtggggcaggctgcgccggtgtcacacccgggttttagggcaccaaaacccggacgcgaacataatcaccagccattcacctcggtagtgtctaagggccttgcaaaccctggcgacatgggaaacacgacttgtgggtacagggtacaacctctgcagagtgtaaaactggtatactag

SEQ ID NO: 11766 - DNA, 369 bp, Zea mays
  Peptide Sequence Number=SeqID_55141
atggccaagacacagccacacccggggaaggaccgtgatcaacttggtattgggaaggaaacaacacgtcgtttgggaatgagtactaaatgtacccttcctcttccttactctaaacagaataaggatgagtcacttgcttccttgccaattgatgaattgaccgagaagagttgtgttgacgagtcgagcaattttccaaaagagaattacacaatctatgttgtatcaattaccatccgtattgtgtttgacttcgcaccatttatggtccagatcattgccatcctcaatgacgttcataatgcaagccgcatattaggtaacctaagagcaactccaagagaagtcgtataccaaccccagtag

SEQ ID NO: 11767 - DNA, 261 bp, Zea mays
  Peptide Sequence Number=SeqID_55142
atgaagaattacacaatctatgttgtatcaattaccatccgtattgtgatcattgccatcctcaatgacgccgcgcacgcagttttgttcgaggaaaggagggcaagagcgggagagacaccatcgtcgttggaggagccagccgaggcgttggagtcgtccttcggcgaggaccattcatcctttgacctcccggcaaatggtacagatcttgcacttctcaaaatcgagctgtcaaatgcttctctgagatccaattag

SEQ ID NO: 11768 - DNA, 441 bp, Zea mays
  Peptide Sequence Number=SeqID_55143
atggtggctcctgcagctcgcctaccaccggccgcaccatttcacgccggggttcatgctatgcgaccttgtctaggtgaacaacaaaagtcgtcctcgatctcgatctcgatcctcttatatttatccatgcctgaatttgtacaacgagatctcctctccatcgctgccgccctgcctagattcgtgtccgacggtggcaataagaatcgcacgatcttctcgctgcagagaggaagaaggtaccaagccccacagatttgcttcaccgtgcccaagatcgacgccggtgaccaagcctggctcctccatgccggcgtagagcgtgtcgaggacatcaagcttctgcgcttcccggagcggctatggcggctcctgcagctcgcctaccaccacccgcaccacttcacgtcgggcttcgtgctctgtgaccttatctag

SEQ ID NO: 11769 - DNA, 690 bp, Zea mays
  Peptide Sequence Number=SeqID_55144
atgacttctcacggatcctcagacgaagggaatgcacagtcccacactgatggacttgcacgagagggtttcccccgtatcttgtgggaggtacttcaaggagctggttacacgacgcctccccagtatgcggtgcagctgtttgagaagcaccgagtgccccgctgtaggaaggaggacgaccaaatgtggaaggaccaagtggagcatgccaaggatatatgggctatctacccaggtcagaccgctcacttgacggtgcggtgcatgaatgccctgtatcgtctgcaagtgatgcgaggagaggcaatgtcccatctgatggcattgttggaggctaccaagatcaccttggataacagagaggaacttgtggtagacttgtccactgagatggtggaaaaagacctacaagtggaacagatgtcaaatgagatccaagagcttgaggagctagtgggaaccagggagaacaccattgaggttctcgaggatcagcttatcaacactcagcagcaacttgcggaggccaaccagcatctggatatgcaccaccaggagatccaggacatggaggccaacgaggatgtcgacatcgagggaggagaggagcctgcctccagcttggacactgctggctcaggaagaccaccttcccctgagtcgagcgttgcctcgtttgctcactag

SEQ ID NO: 11770 - DNA, 1473 bp, Zea mays
  Peptide Sequence Number=SeqID_55145
atggcactagggttaccaagtccggagaaatccccaacaaaagtcgggctcgtcatcttcctcggaacccgagggcccggtgaccacataccgtaccccggagggtttggacacgcctctatgaaagcgtccaccgaagcgaagtcgcttggtgggtcgaggctgaatccaaaaggcacgagatgggaatcggtcggtacctcttggtcgacgggcggtgacgaagtcacgtcaggggcagactgcaccgtcgtctcaggtacgagggtgacgcccagcaagtccttcgcgagcatgctggcgtcgtccgtccgcttggagttggcgtgttgcggggaaacggcgctcgtcttcgtctcagacgcgaggtcgatgcccgacgtgtcccccgttggggcgccggcgccgtcgactcgctcgacagccgacgaggtgccgcctcctgcttggccttggttgccccgcctcctcctccgtcggtgggggaggcgacgggacaaacccgaatgttgttcttccgccacgtggggaagacgtcgtcgattcagccgccggcgggcgggttgtcggccgccattgtcgctgtcgcgcggcggggggaaggagtatcatgtcgtagccgccgtcgagggacatgaactcaagactcccgaaacggagcaccgtcctaggatgaaaaggttgctggagactacccatctggagcttgacgggaagttgttcgtcaacacgcagcaggcccctacctggcgcgccaactgtcggcgttttgaccccggggggtccctggaccgacgagtaaattatcgtcgtgtgccccagcccagatgggtcgacgcgagacggagcgcgaaggggggaaaccagagggagacaggcgtaaaggggaaacccgcggccttcgtgtttgtcccgcgcccaggcgaggcggagtccgtcgtcttccggggccgaggcagagtccgagccctggggtcgggcgaggcggagttcgtcgtcttccggggccgagcccgagtccgagccctggggtcgggcgaggcggagttcgtcgtcttccggggccgagcccgagtccgagccctagggtcgggcgaggcaaagttcgtcatcttccggggccgagcccgagtccgagccctagggtcgggcgaggcggagcttcctatggcgcccgctgtcgggcgaggcggagcttcctatggcgcccgaggccggacttggccgctgtcagcctcactctgtcgagtggcacaacagtcagagcgacgcgggcgatgctgtcttcttgtcaggctggccacctttgcattaaatgctcctgcgatacggtcggttggcgtggcgatctggtcaaggttgcttctcggcgaagactgggcctcgggcgagccgaagctttgtgctgatgggggttaccagctgagattaggagtcttgggggtacccctaattatggtccccgacacatag

SEQ ID NO: 11771 - DNA, 444 bp, Zea mays
  Peptide Sequence Number=SeqID_55146
atgaccttggagcctcatcccctgtggccaggttggcgttccttggactcggagtccttcggtttcagggacgatgacactatagagttcgcagctctgcatgtgctgacgaccttctgtggatttcaccccttggagatgtcgacccatcccgttggcttgttcctcgctgagaaggagaacgacccaatgtggaaggatagggttgagcacgccaaggatgccttacgaggagagacgatgtcccagcttatgagcctggtggagtcgaccaagatcaccctggacaaccaggaagatcttgtagtggatctatccactgagctggtggaaaaggatcttcaagtggaacaaatggccaaccacatacaagaactcaaggatcaggtggaagccagggagaatactattgaggttctggaagaccagctccagaacacctag

SEQ ID NO: 11772 - DNA, 477 bp, Zea mays
  Peptide Sequence Number=SeqID_55147
atggaacatgcgcgagatagccgccgtattgctgaactgtcggcagagtttgatcccttgcagcgggagatcgtggaacgagacagggctatagattgggtcgtaaattcgtgctctatagcctgggattgcgaggcgaatgcccaagcccgagtgatggagctaaacgtagccctggagaatctgcaagcatacaataacactctgcatgaggaagtgcacgtgttatacgatcagctgcacccgaacgtgccaccggaggttgtagcaatgggagccggaacatctggagcagctggtggaggaccttatggggagttggatctctttggagcccctccttccatgaacctcgcagatgaacatgccattaagaactcgtgctcaagacgggacgtgtctgacgagtgccctgtggagaatactgagctaggcgcggtcctcctcctggacgagctggtgtaccctaggcggaac

SEQ ID NO: 11773 - DNA, 459 bp, Zea mays
  Peptide Sequence Number=SeqID_55148
atggacaaatctcctatcggatcaggacctgctagggccgacacacgcaaagatgtcgcagaagctgtaaatgggactaggctgattaatgggagtaggcgcacaggcattgtcgacacgagcaacattgattatggcactagtagattacgtccgcgacatcgattatgtaggacacatgatccggcgcagagatataatcgagtttgggatggtcttttagacgccattagacagatgcaattatctgccaatgagttgaggaagttgagccgccgcaatcatgtgcctgagtatttggatatggtgcataagaattgcttggttaatgccatgagtgatgttactgaaattgcaaaaggtctagacactatgagcaaggatttggaggaagttcttattggcccacaacctctacttgaggattacgaagcccttggaatgtacgatgatttctaa

SEQ ID NO: 11774 - DNA, 588 bp, Zea mays
  Peptide Sequence Number=SeqID_55149
atggctgaaacccctccgtcggacgccagagacgcggctgcacctacaccccctccgctgcagcccctccgctgcgacagcggacagccccaagagggtcaatctgaaactgcaagtgcaccagagggagttagtggccttagaagaaattcagacgatttgggatgggagtatggggttcttgttgatataaacaataaggacaaggtaaagtgcatactgtgtgacaagcaaatgtgtgggggggtttatcgattgaagcaacatatcgcccaggaaggaaagaatgcgaagaaatgccagggcatgaagaccaccaaagagaagttgttggaggctcaagaaaagtgcaagaaagcactagatgaagcaaaaaggaaaagggaggagaagactgttcgtgagctagagcttagagaggaagttcatgtgtctagggttggaggatcaaaagaagtgacttgtgttggaagttcagagcctcacaaattaggccccatggacaaatggacaaaagctattgatcctacagcaaccaaatctgaatctttgactcaacagaggctgaacaaggaactttggaaataa

SEQ ID NO: 11775 - DNA, 1116 bp, Zea mays
  Peptide Sequence Number=SeqID_55150
atgcaggcggcatgcaaccgcaccaagggggcgcaccctttcgacttcgacgcgtccagcatgggggcccaggcccacacgtcatgcgggcggaagcagcggtcaagtcgtctgcaggctcacgtcccctcctgggacagcgagagagccctctcccacggtgacaggcggcacctttggcaggcgaaggaggcgacgcttcacctccgccttaatgaccgcgtcaaaaaagggaccgagaaaggggatactccgaaagggatccttctccacgaaggaagcgggccccgagccctcctactgattagaggttcgaaggctggcccctcggaagggaccgacagccgcctcagagcactcgggctccgcgcccactactggtcagaggttcgaaggctggcccctcggaagggttcgacagccgcctcaggcccctcgggctccgcgcccactactggctggcccccgaagggttcgacagccgcctcagagcacgcagagcgagggatgactctaggtacgtccgatacatggccgaggctcgggctacgctcccgaggcccgggggctgctctcgcaaactcggctccggccaaaccgttgacagcgtcaacataccagcctgagaacttggaacctgactatgcacccaggctacggccagtcaaggctctgtccactcaagggacacgatcccgccttgcccgagcccagcctcgggcgaaggcagccgacccacgaggattcacgtctcgcccgaggtcacttcgctgctccactgaccgacctgacaggaaaaacagcgccgcctgccctgctccgactgttgtgccactcgacagagtgaggctgacagcagctaagtcccagcctcgggcgcccataggaagctccgcctcgcccgatcctagagctcgggctcaaccctcgacgccggacgaccagactttcgccctcgcccgacccccaggggctcggactcagccctcgaccctcggacgacggacaccgccctcgccccaacccccggggctcggactggccacgacctggacgacggttccgcctcgccgacttgggcctgattcacctgacttggaggacctcgctcgctga

SEQ ID NO: 11776 - DNA, 135 bp, Zea mays
  Peptide Sequence Number=SeqID_55151
atgaactggggtgtagttcgcttcgccgttgtgccgttaatggggctcggtgtatgcggctcgctctggcaaggtatagaaggcgtcgaggcggatctccaggagttccaggacttcgacgagttcgaggattag

SEQ ID NO: 11777 - DNA, 541 bp, Zea mays
  Peptide Sequence Number=SeqID_55152
gggaggtcctcagggtcacggcaatgtgcgggtcgccgttggggatggtcggagtcggccgggtccacgtgcgcaggcggggaagctcatcggcggcgaggagtccggcctatccagggcacaattgatcaatcaaatgggtcagaaggcttcaccagggatcaaggaaggcgggcggtcgacgtccggcgaggacgatcttggttctccggtgaagttctgtcgggtccaagggctagggaagcttcacaagctcttggcgaagctatccgagcggctggcgcggcttggaagcgactggagtgggctggccacggtggcaaaggctcgggtggcaatggcgggcggaaaagagctcgccggagctaaggaggggcgtctggccgacgaaggcgagcacggccgagggcggggctctgacaagcgctcggagcatgcgcgggcgaacgcctgtgcgtgctctggcgcctggcacggcatcgagcacgaggcaacgcagagagaggtcgagttcaagcgcggattggctccaaatctttga

SEQ ID NO: 11778 - DNA, 222 bp, Zea mays
  Peptide Sequence Number=SeqID_55153
atggggtctccgacgcttggcgattcctcatcggtgtggtgctcggcctggatccgcacgctgtcgtggacactcgcccatggtgacatttggggcttgtgcgctggaccgttggatcggatcggatggatccagagtgatctcgtcttctttaaatccccgcccttgattttagatccaagggttcctgctgcgtaccgtttcgatattagggcaatctaa

SEQ ID NO: 11779 - DNA, 288 bp, Zea mays
  Peptide Sequence Number=SeqID_55154
atgccgaagctttcctgctcacaccttcggcgctgtatcaaccttcgtattattctggtctgctgtgataccgacttgagtccgaagatacctgttcacacattaaactccagaatactgttaaatcctgtttttgaggaccttcactgtaatcttgctgacggagagtacatcctcgtgccggagcaaggagctgctcaggaggtagccccggatccagcacccgagcctgcaccagaggacctgcctgccactgctttggaaggcaagccccggttttatgcataa

SEQ ID NO: 11780 - DNA, 398 bp, Zea mays
  Peptide Sequence Number=SeqID_55155
atgcggcgcttctggcaggagaagcgggcgatgcttcgccttcgccgtaataaccgcgccaaaaaaggctggccccccgaggggttcaacagccgcctcagatcgcgtgggccctacacccactactgggctcggactcgggctaagccccggaagacggcgaactccgctccacccgacctagggctcggactcgggctaagccccggaagacggcgaactccgctccgcccgactcaagggctcggactcgggctaagcccaggaagacggcgaactccgctccacccgaccctcggggctcggactccgccctgggctctgccgaacgaccttctgcttcgcccgaccagggggctcgggctcggcctcggcatggaagaacgactcgacctcgg

SEQ ID NO: 11781 - DNA, 462 bp, Zea mays
  Peptide Sequence Number=SeqID_55156
atggttgtgaagcagtatgaattagcggacacatttgctgagatgatcgatgatgcccatcgcgcggagtctgttgatacagacaatgaagcggaagcgcctcaaccagcaaaaccatcagatacatctcatcatctatcatcaggtgaccttcccacattttgccgcaccacctccctctccatcgccagtaccccagcctcgcctccgtcgcctatggggcaacagcctaagtcgcccgcgtccccatccccactgccatgctcgccctcggactcagacccggacccaggcagcggcttcgaccccatcgaggagtggttcgtggactttgactcggccatgtcgagtgagctagaggccaagggccccgaactcgctgagcaagcggcggcggttccgcacacgctggagacggcagcgcaaaagagcttcgagctcgagtttggtgtgaaggtctag

SEQ ID NO: 11782 - DNA, 612 bp, Zea mays
  Peptide Sequence Number=SeqID_55157
atgttgagggtcatggacaagctcaaagggaagaagcgcggagaccgtggtgactcctcgaggtcacggtcgactaggggttcaggtggtggggatacatcctctatgttgttccagggctctacagcgtcaaggcaatggctagagcagctccttggttgcatggaggagcaggggcgcgaagtggcaagtcatagtgcacctgggcaagagcgcgaggtggcaggccatagtgcacctgggcaagagcgcgaggtggcatgccacaatgcacttgagccgaagcgtgaggcgataggctcaagtggacctatgctagagcaggaccacaatgcatttgagcaagtgcgcgaggcggcagaccacaatgcacctaggcaggaggacgagctggcacaccaaggttcaccgatgcgtgatgatgatgactatggggaggactacgatggagaggccgatggagaggccgatgacgaggttgttacaacgacacaggcaatgaactttagtgcacaatttacaatttttgttggtttcggcggtcccttagagttccacccgacacaacccttggaccaacgtagggtcataaaccctgcaaggagagagtag

SEQ ID NO: 11783 - DNA, 183 bp, Zea mays
  Peptide Sequence Number=SeqID_55158
atgacgctcgggctgatgcaaagcgagctgaagaggctgctgaacgcgaaagctgaactatcccctccaccagaaccgtatgatcccctagctgatccagaaatgaaggaagcactggatattataagcatggcggactccattattgaagaagttgtagattttattgtaataatattttga

SEQ ID NO: 11784 - DNA, 864 bp, Zea mays
  Peptide Sequence Number=SeqID_55159
atggcccctcctgtgacgtggtcggtccgagccctgggttgggcgaggcggaggctcctccgaggtcgaggtcgagtctgtcttccgaggtcgaggttgagtccaagcccttgggtcgggcgagacggagaccgtcgactgaggccgaggtcgagtccgagccctgggtcgggcgaggcggagttcgtcgtcttccggggccgagcccgagtccgagccctgggtcgggcgaggcagagttcgttgtcttccggggccgagcccgagtgttggagcgaaggcagagacgccacccttcgctcgaagtctccgctgcttagccgctgctctgacagacaaagcaggcagggacacccttcgcttgatcggcaccagacgaagaccggcgacgaaggcatcccacagtgcggcctcgcccagctcagaggcccacgtgcgatccggcccattgtaacgggccctgcgtggccgccgcgtgttacgggcctaatttgtaaaggcatccatgtagctgagggcacatgcgtccttaacacaaggcgctgggcgttcagcaagttccaacaccgagtccgagccctgggtcgggcgaggcgaagttcgtcgtcttccggggccgagcccgagtccgagccctgggtcgggcgaggcggagttcgtcgtcttccggggccgagcccgagtccgagccctgggtcgggcgaggtggagtttcttatggcgcctgaggccaggcttcgccgctgtcagcctcactctgtcgagtggcacggcagtcggagcgacgcgggcggcgctgtcttcttgtcagactggtcagtggagcggcgaagtgactgcggtcacttcggctcagtcgactga

SEQ ID NO: 11785 - DNA, 552 bp, Zea mays
  Peptide Sequence Number=SeqID_55160
atgatgaagatgacttcacccacccccatcaacggaggagacacttgttttagttccgactacctttcctacgagggtttcccttccatcttgtgggaggtgctcagctccgccagttaccctacaccccctctgtacatggtgcagttgtacgaggagcatcgggtgccccattgccgagtctggctgactttggaggctcaacctctacagccgagttggcgttcccttgagtccaagactattagattcagggcgaacgacaccaccgaggctgcagctatgaagaccctcacaactttctgcggatactatcccttggagatggtaatgcacccactaggactcttccccgctgagaagagagatgaccccatgtggtgcaacctagtgagccatgtgaaggacgagtgggccatgcatcccgaccaggttgggaggatcactgttcagtgtatgagcgcactgtaccgcctacaagccctgcaaagtgatgccatggcacacctcactaaccttgctcagaccactaagctcaccctcgacagttga

SEQ ID NO: 11786 - DNA, 225 bp, Zea mays
  Peptide Sequence Number=SeqID_55161
atgggggactccgtcccaggtccaatgagggggaaagtctacgggcaggttcaatcagtttgcataaaaactagggcttgccttcaaaagctgaggctgcaggaggtcctcggtggcaggctctggagctggctcctggacttcctcttgggtaactccttgctcaaggatgagcactggcttcccactggttcacataagcctgtctcaaaaattgaggcttaa

SEQ ID NO: 11787 - DNA, 457 bp, Zea mays
  Peptide Sequence Number=SeqID_55162
cgctctacccgcgcacccatagcgcccggccccgccctcgccttgcgctcgaccggccccggcgagctcggccgcctccagcgagctcggccccggcctcggccgccccgcgcccggccgcgcccgccctccccgagccgctctccggcgagcccggctcggccgccctcggcctcggccgcctcgccccgctcggccccgaccccggccgctcggctcggccgccccagcgtaccccgcccccacgcgagccccaccctccccgcgccgctcgccccgaccccgcctcccggcgagctcggccccggctcggccgccccccggcgggcccgtccgccccgccctcggccgatccggcgagccccgcccccggctcggccgccctcggccacctcgcctccggcgagccccgcgcccgctcggccccgcgccgcccggctcggccacccgcctcccg

SEQ ID NO: 11788 - DNA, 600 bp, Zea mays
  Peptide Sequence Number=SeqID_55163
atgcggcttcatacccttaaagaggtattgttgacacagggaagtgttatacaacctattgtggttgttcgaggaaatgagatgtttgatgtcttctggggatctcttatggacactaagttccataagcatcaggtgattgactgggagtacatgcagggtcaatcagtcatggagggcttaattgctaaatttcagacatctggcttgctgggcatccctaggcgatttggagagactacaggactgaggcatcatcctgccgttatcaacaagattgtcaagggggaggttatgaatgtggttatattcatgatgaggctgctcaatgaccttaagatggataagaatcagaatttagcctacgctccctatattatggctctaatcaaggccaaaactagatttgaggggcggtgtgagacgactcacattacttttaggcctttcaagaatgagattagttttctaactaggcctctcaccccctttcctgatgatgagacagtccttgtagatgactatgctgctcagcctaaggcacttccagctcagcagatgccaccttctccacctcctcatcagcaagaacagtactag

SEQ ID NO: 11789 - DNA, 312 bp, Zea mays
  Peptide Sequence Number=SeqID_55164
atgaagtccgtggatcgtcctccggctaatcctaaacgtataaccatcgagtcaagccaagaattcttcagtgttgagataccacgttcggtctctactggagaccctccaaacacaaagcactttgttcatcgtcctgcacccgttgagagaccagctgttattcatgaagccaatgaccaaactggatctggtgatgacgacgatgattttatgacacctacgaagaagcgtaatgctactggaagtcctatcaaaatcttagggaagacatgcacaaagaggatgaaagtagttgaaactccacgatag

SEQ ID NO: 11790 - DNA, 115 bp, Zea mays
  Peptide Sequence Number=SeqID_55165
atgtcgaccgatgagcccgaagatggatggactaagcagatgtcagaacaaaagttgatcgtcaactggccttcatttaacaacactaacgtagtgttatcccaggcaagccccg

SEQ ID NO: 11791 - DNA, 197 bp, Zea mays
  Peptide Sequence Number=SeqID_55166
accagacgctgagcaggaaaggtcgcccgtctgtgtcgcttaaggaccgttctgattgttggcctgctgatctaggaccctttaactggccacatgcctcgtcatggaatactaacccacaacctgggaagggtaatgcatacatgtgtaatgttgtttttgaagccattcagtttttgaatggttcgacgctcaag

SEQ ID NO: 11792 - DNA, 363 bp, Zea mays
  Peptide Sequence Number=SeqID_55167
atggatgtgttggatgagctcgatggcgttctatgccgattagagccagatattggatgtaatgagtcatgtgatgttagtgatgatgaggaaaaccaggatggggataaaaccatgactggatgtgaacatgcgttaaaattaataacagctggtaaccaggtggacaacatgagaattccacctgagattggagatacaagttctccatgtcacgtagcacatgaacaaatggaacatattggtgcatcctcagaagctaaaaagaggttgaattttaatgtggatgttataaatctgagtatgccggatcgtgcaagaccaaaaggacggacaataaaaatacagaagataggattgtga

SEQ ID NO: 11793 - DNA, 603 bp, Zea mays
  Peptide Sequence Number=SeqID_55168
atgctgccgaccctcgacgagagcggcgtggcagttcgccagaccggcggtcgggatcccctccgcgggatccagatctccggtgtgccggctggtccccatcccatcggtgtggcccccagcgccaaccccaccgtggcccctagccccttggataagggcaaaggggctgcaagcaatgcctccgccctagttggctccgggggggcttcttcctccgtcgctccgaaggccacacctcctccgccaggcaccaggaatctgcagcacgaatctgctaggagtggtgccgacggtccgcctccagccgctgtccagactgcgccagcggcttctcatgccccagccgggggtccggcggcagcggcgccagcatcaggcggcatcgcagcgacagaggatatcccagttgggggatccagacccgcctccgacatcgcgcccactcctgacgttgggggtgacaccggaggcgcgtccagctccaaccccccgcctgcacaggaggagatggaggtggtgttcgggcgacggctccggtcaggtgccgaggaagaagctgcgccaatccccctcccccgcatgctgtcccgcgcccactag

SEQ ID NO: 11794 - DNA, 1074 bp, Zea mays
  Peptide Sequence Number=SeqID_55169
atgcaggcggcatgcaaccgcaccaagtgggcgcacccttccaactccaacgcgcccagcatgggggcccaggcccacacgtcatgcaaccggcgcgccggttactacataccaggaactgcaccgccactcgcgccactaccgtgcctcctcgactgcggaaccagtaccgcgactcgaggcaaccctgcgtatgacccaatagtgccagccaggcacatcggtcacggggaccgggaaaggggataccccgaaagggatccttctccgcgaaggaaacgttccccgagccccctactgatcagaggttcgaaggctggcccctcggaggggttcaacagccgcctcagagcgctcgggctccgcgcccgctactggctggccctcgaagggttcacagccgcctcagacgcagagcgagggatgaccctggctgaccccggaggatttacgtctcgcccgaggaccccctccagcaacggatacaccttcggctcgcccgaggcccagtcttcgccaagaagcaaccttggccaagtcgccacgccgaccgaccgtatcgcaggagcatttaatgcaaaggcctcggactcgggctcagccccgaaagacgacgaactccgcctcgcccgaccccagggcttggactcgggctcggtcccggaagacgacgaactccgcctcgcccgaccccagggctcggacttgggctcggccccggaagacgacgaactccgcctcgcccgaccccagggctcagactcagccctggcctcagccgacggtctccacctcgcccgacccaggagctcggactcgacctcggcctcggaagacagactcgacctcgacctcggaaaagcctccacctcgcccaacccagggctcggaccgaccacgtcacaggaggcgccatcattaccctaccccaagctaactaaggctacggggaacaagaccggcgtcccatctggctcgccccggctccagcgctcctccgacggccacgacaccacacgaaccgggtgccaaaacctctccggctgccacgacggcatgtacttagggcactag

SEQ ID NO: 11795 - DNA, 222 bp, Zea mays
  Peptide Sequence Number=SeqID_55170
atgcccccccccccccccccccccccccccccccccccttccaggctccagcttctctggctgctcgcgctcgcctttcagctgtgccggttgccgcatttgccctttgcccccgtccatggatccatccgtcaggccgcgcacggcccactcgcggagctcgcccaacgcataggccttgggttgggccgtggctcgatggctgacaggcagtttgactga

SEQ ID NO: 11796 - DNA, 288 bp, Zea mays
  Peptide Sequence Number=SeqID_55171
atgtacgacaagctccggcgcagccaccgcttggacgcggtgcagagcggttgctccgcgctgtccatcgtcaagcagggggggctcatggtcgtcaccaacgtcggcgactctcggcccaaccaagagtcatcagtactcggtatgtcgcgcgcgttcgacgactactatatcgaggaccgtggcgtcttcttgacgcaggaggtgacgcagaggagggccgacaacaatgaccagttcgtcatcctcgccaccgttgtggtagcttttgtgccgacttgcctttaa

SEQ ID NO: 11797 - DNA, 1239 bp, Zea mays
  Peptide Sequence Number=SeqID_55172
atggggagcgcccgtgttgctttcgtcttgctgctgttggaggagcgcaacttcgcggaagttggtacctttcagccatcgctcggcttcaaggattttcagcaggcagcccagctgcatcccctcgccgatgcttcaaggatcttcatcatccttgctggggcggaggccgggctgagccgggacctgccttcgcgtgggccggcgtcccgcttcttcctccagcttctaggggtggaaatcatcctccagctctgcagaggaggcgccctccagccatgccggggaaggcgaactgttgctgcccagcccagggtgcaacattccgtcctttgtctgggcgacggtggccagccgcaccggggggtctcccaacacgttgtacgccgcgagggcgacactcgtgttctgggacggtcccattctcgttttcatgacgaggacgggagtgaggacctgccggtgcgctttggggcggccggcgcccgctggtgcggtgttggtgggcaggtggacgtcaccgtcagtgctgaggtggtggcagctggagaaagcttctccgccgatgagaccgtcagcgccacccacggaccgacctccggctctttggctttaatatctggttctcgtcccttgcgaggggacacgaacgagagccttccagcggtagcgtccgtcctgggacagtcgctgctgctgcagaggtcgccggcgagtcacccgaagtttgtcgtcccgcaggctctccgatgtggaggttgttcatacccgtgggagtggaaccggagttccgtttgtaatggcaccttgagtgtcggtgtttgttcattgtggctgtcggggcctgaacgtctatgtatttgggcgagtccctcggctcggtcggccttgccgcccgaggcttctcttgctcagtttaaagaaaccctcggccgctctgcgatgagccagaggcggagttggctcgaaaagaagcttcgtcggccggagcctggctgggctgtccactggcgggaccaacgccggagtcgggttgtcgaggccatgagccgggctgatgtcctcgggggacagctggctgaggctacggagcggccggtcgagccttctgctcgggccgggttcctggaggagacccccgcgatgatggcccaggcacgaaggtgggagtccctcggctcggtcggccttgctgcttacgtgtactccatcgttttcaggatcccactatcgaagtag

SEQ ID NO: 11798 - DNA, 828 bp, Zea mays
  Peptide Sequence Number=SeqID_55173
atggataagaggggaaagagagccgtatctgccccggcgtctcacagtcgagtgacagccctaggtgccaggaagaggtctgcggcggacttttgcaaagattcgcacgtatgcgacctctggcgacatttgaacactggaagaaacaaaccgccacgtgttcgacgccgtctgccgcgccagagcacgcccgcgcgtgcgcccgcgccgcgcccaagccaagccagcgccctggtccgcgtccgcggctataaaacgcccgggagcctcggccgtacccctccgcacgcactcaagcctcaccggagctcagttcgccgccggttgcccatacgcgacgcgcccgcggccacccgagccccctgccaccgtagaccggccagcccagccattcccagccccgtccaaccctcggagaaggctgtgcccgtctccgtgaagctccccgagcgaggaatcgggctctgcttcaccggagaggccggcccaaggtcaccggacttcaaccgaccaccggcaaccgtggaccgaggtacaccgtgcacctctcttcgattccttgcacggttagactccttagacctccacgaagctccctatgcccttggattgaactatgccgccgtggataggccggagcacacgccgccgacgagctcgcccgcctgctcacgtggaccgggcgattccggccatctccgacgacgagccgtacctcggcgtgatcgccagaccctccccgagccaaccctacacttcgccggaactccctcgccgccgcacaaagacctattatcaccagaggatgtcagcaaaaataacctttag

SEQ ID NO: 11799 - DNA, 513 bp, Zea mays
  Peptide Sequence Number=SeqID_55174
atggccgaatccatggcggatgcatggctgccagtgtccggcgaggtccccctgctagcgcgaccccttgaccccggtgtgatcctgttcctacgcagctgtccagggctatccgagcctccctgcgtgctgcagcaaccagtcccttgtggcttgcaagccctggccatggccggacccctctccctcccacactgctgtctcaacgaagaagaaattgtcgattgcgatccgtttctgagcttcgagggatcgaagatcaagcgttggcgaccaagtgatctggctcttcgagtctacaaggtggcaacgagattgatggtttttggtattgactctggtaatgctagtccactacagccaaacaggacgcttgctgagtatgttgatgtgtactcacccttgctctacacaccaaaccccccaggttgtccgcattgcaaccactgctcaggagaagatgaagccgtggaaggagacttcctggagttccaagattacgtcgagttctag

SEQ ID NO: 11800 - DNA, 225 bp, Zea mays
  Peptide Sequence Number=SeqID_55175
atgttcggattacaggtggcaacgagattgatggtttttggtattgactctggtaatgctagtccactacagccaaacaggacgcttgctgagtatgttgatgtgtactcacccttgctctacacaccaaaccccccaggttgtccgcattgcaaccactgctcaggagaagatgaagccgtggaaggagacttccaggagttccaagattacgatgagttatag

SEQ ID NO: 11801 - DNA, 678 bp, Zea mays
  Peptide Sequence Number=SeqID_55176
atgtatcctgacgatgctggcgccgagccttgtatgttgtcttcttttatactgagggagctcagtggggaagacctaaaggtgaagactgttcccttgccccaaagaaactccatgttcagttcaagaccaaagtacaaaaagaaatcttcaacctacaatactactactccatttcattccttacaagcggaaaaactcagggagaagctgaggcaggagtgcctgcggaaggggacggaactggcgcatggggtggctgacgccctcttcgctgtaccacccaccgaggacctcgacggccctatcgtacacctcccattgcccgttgtccgactcccgcgcgagaagcatgtgtccgaggaggccggaaatcatctctttgtggagtcatgcattcctctacacgactacatgtacattattgtttcacaggacaatgctacagttacactcttatctaattcgcacgtatcatttttgcagcttggtgctgggacctcactgccacgattagtagctgcaaaggttggggcagatgtaacactaacagacattgcgcagaatgcagaagagataattcaacaccttaagcatagttgtccggcccatctatatgctacttccatgtcgccaccagcagtccaacaagaaaatatcaaaattgctccaaaatga

SEQ ID NO: 11802 - DNA, 1098 bp, Zea mays
  Peptide Sequence Number=SeqID_55177
atgacgacatcatccaccataaggaatacgacgcaactaggtgatcatggggcccacgggcttcacccacttagttttacctttgactggtggctccttccgaaggccccttacttggcctataaattgaagatgttggccctcggacggacggagcagatcccgtcactcgctctccacaagcagagcaccgcagcagaacgaggaaggatgctggccatcttccagaagcaggtggcgcacgcgccgcaggagctcaacagcccccgcgccggcgcgtcgcccagcaagccccggaaccccgacgagatcctgcgcgacttccacgccgcgcacccggccgccgccttctccgcctccttcggcggcggcgccgcgctcgcctgcgtcggcccctcctcctccgccaccgccaccggcaccgccacctaccagcggatgttctgcggcctggaccacatctactgcgtcttcctgggccgcctcgacaacctcagcggcctcatccgccagtacggcctgtgcggccgctccaccaacgaggcgatgctggtcatcgaggcctaccgcacgctgcgcgaccgcgggccctacccggccgaccaggtcgtcaaggacctcgccggcgccttcgccttcgtcgtcttcgacagccgctccggcgccgtcttcgccgccctcggcgccgccgacgccgggggagcgccggtgccgctgtactggggcgtcgcggccgacgggtccgcggtgatcagcgacgaccgggacctggtcaagcgcggctgcggcaagtcctacgcgcccttccccgcgggctgcatgttccacagcgacggagggctcaagagcttcgagcaccccatgaacaggctcaaggccatgccgcgcgtcgacagcgagggcgccatgtgcggcgccaccttcaaggtcgacaccttcaccaagatcaactccatgccccgtgttggcagcgccgccaactgggccgcctgggacgaagccatctatcgaactctcagtaacagtttcaggtctgaacttgatatcacaggcagcatctcagtgaaggcaacacttgggcaagggggaaagcagtaa

SEQ ID NO: 11803 - DNA, 246 bp, Zea mays
  Peptide Sequence Number=SeqID_55178
atgccgacatatgggaagacgcctccggactttgcactgtcgatgccaatgctggcgcctccacctccgcctccatcacaattccctacgggatttcagacaccacccgcttcagttgccgcacctggagatgggtctggtcaagacgacgcatcacattcttgggtgaacaaccttttcaacacgcagagttcatccggaggaagtggctataactcgaaccaaccaggtgatagatatgagtga

SEQ ID NO: 11804 - DNA, 627 bp, Zea mays
  Peptide Sequence Number=SeqID_55179
atgccgtcgtggcagtcggagaggttttggcaccctgttcatgtgatgtcgtggccgtcggaggagagctggagccctgcggaaggtaatgatggcccccctggcgacgtggtcggtccgagcccgagtttgggcgaggtggcgattcctccgaggtcgaggttgagtccgagccctagggtcgggcgaggcggagttcatcgtcttccagggctgaggctgagcccgagccctggggtcgggcgaggcggagtccatcgtcttccggagccgaggctgagcccgagccctggggtcgggcgaggcggagtccgtcttccgaggtcgaggttgagtccgagccctgggtcgggcaaggcggagaccgtcttccgaggccgaggctgtgtccgagccctggggtcgggcgaggcggagtccgtcgtcttccgaggccgagacgggggccgaaccctagggtcgggcgaggcggagcttcctatgtcgcccgaggctggacttagccgctgtcgacctcactctggcgagtggcgcggcagtcggagcagggcaggcagcgctgtattcctgtcaggtcggtcagtggagcggcgaagtgactgcgttcacttcggccctgtcgactaa

SEQ ID NO: 11805 - DNA, 1197 bp, Zea mays
  Peptide Sequence Number=SeqID_55180
atggccgccattgtcgctgtcgcgcggcggaggaaggagtatcatgtcgtagctgccgtcgagggacatgaactcaagactcccaaaacggagcatcgtcccgggttggaaaggttgctagagactacccatctggagcttgacgggaagctgttcgtcaacacgcagcagggtaatgatggcccccctggcgacgtggtcggtccgagcccgagtttgggtgaggtggcgattcctccgaggtcgaggttgagtccgagccctagggtcgggcgaggcggagtccatcgtcttccggggctgaggctgagcccgagccatggggtcgggcgagatggagtccatcgtcttctggagccgaggctgagtccaagccctagggtcgggcgaggcggagtccgtcttccgaggtcgaggttgagtccgagccctgggtcgggcgaggcggagaccgtcttccgaggacgaggctgtgtccgagccctggggttgggcgaggcagagtccgtcgtcttccgaggccgagacgggggccgaaccctggggtcgggcgaggcggagcttcctatgttgcccgagtctggacttagccgctgtcgacctcactctggcgagtggcgcgacagtcggagcagggcaggtggcgctgcgatccttgcattaaatgctcctgcgatatggtcggttggtgtggcgatttggccaaggttgcttctctgcgaagactggtcctcgggcgagccgaagctttgtgctgatgggggttaccagctgagattaggagtcttgggggtacccctaattatggtccccgacagatttgttgctcccaatctctgcatcgcgtggacgccttccatagagtctctgtacctcacggaagtggctaccgatgacatcatcgagattaagcccttctacgccaagagggctttctccagagacgattataatctacgagttggttggggtgccaccgatgccatagggaacccctcgctggcgggtctggtcgagtctggtgcgcttgtacgcgtatcgtggcattggtttggcccagtcccggcgtggtggctgctagacttcgtggagctcgaggacatgtggatcctcgacacctcgcacctctccgaggactccatcgccaacgtcaagcgcgtcctccacaccgtccaacctgacaacgtcgtcgtctag

SEQ ID NO: 11806 - DNA, 501 bp, Zea mays
  Peptide Sequence Number=SeqID_55181
atggctgcccagcagcaggagactttctcccctcggctcccccatccgagcacccaaacagtgcccctccctgctccatttttgctgttcctgcgccctcctctgcccacagcggtgaacccctcctcgctgttcgtcgtggtgcctgccggctgttcgtcaaaatgcgcagcaagccgcgcgctgccggctcgctgtttcgtgaagcccagtggacagcacgccgtcgacgctcaccgtgactgtaaccttgctgacggagagtacgtcctcgtgctggagcaaggagctgctcaggaggtagccccggatccagccccagagtctgcatcagaggatctgcctgccactactttggaaggcaagccccggaatcctgttgagatgaatactagttctctggaggacatggttgctggagtgacttggccgtccatcttgccaccgggttggactgtcgagtgggaccctacctcggctgaggaggagcatgaggagtga

SEQ ID NO: 11807 - DNA, 1146 bp, Zea mays
  Peptide Sequence Number=SeqID_55182
atggggagcgcctgcgttgctttcatcttgctgctgttggaggagcgcaacttcgcggaagttggcagcctggctgcatcccctcaccaatggttacccaagacggtgaccaccagttcgatggtggggagaagcaagccaggctgcggcctttgccccgccctcaacttcaaggatcttcatcatccttgctggggcggagggcgagctgagccagagctctacctcccgtacgggccggcgggccacctcctccttcagcattcaggggagagggcgcttcccggcctagcggagggggcggacttcaacaacgctgggccaatcggccgcaagcgtcagtgtggctatctgcccgccgtacgagcagctgttgcaccgcgcgcactgggggaccgcccaagatgtcgcacgctgctagagcggcgttcgtgttcttgggttgtcctgcccttgctccggcacgacgcctccgtgcggaggtcggtgctcgcccgtccgggaggactcgagtggggatctgccggtgagcaggtggccgccgtcgttggtgctgaggtggtggcagtgggagaaggcctcgtcgccgacgagatcgtcggcgccatctgcgcttcgggcctccggatctttggctttgatagcttgtcctcgcccctcgagtggggacgtgggcgagggccttgtcgcagcagcgtctgccctgaggtcatcgctgctgctgtttggccgcccggagcggaggtcgttgtcgctgctgctggagtgggtggcggcgagccacccagagttaaagaaaaccctcggccgctctgcgatgagctggagccggaggcagcggtgcgcggtgctgacatcttccttcgaggtggagatccttcgcccgtgtcgccgtccgaggccgggtcggattccgtcgaaggtggagttgacgccgagggtgctgctgctccccctactgatgacttgttcgtcggtagcagaatcgtttatccgagcgagagttacttttcacggaaggtgatgagtgagaaggtgatgagtgaggatcccaccatcgaagtagtcgaaaagcgcgaaagatgttctggcagaaagactttttccgaggaaaattttgacgcagagggggttccccccttctag

SEQ ID NO: 11808 - DNA, 447 bp, Zea mays
  Peptide Sequence Number=SeqID_55183
atggctgcccagcagcaggagactttctcccctcggctcccccatccgagcacccaaacagtgcccctccctgctccatttttgctgttcctgcgccctcctctgcccacagcggtgaacccctcctcgctgttcgtcgtggtgcctgccagctgttcgtcaaaatgcgcagcaagccgcgcgctgccggctcgctgtttcgtgaagcccagtggacagcacgccgtcgacgctcaccgtggtttgctgtttttgcgcagcccctttgtcgtcgtcgttcacccccggagaggaaccctgcgttttgcgagaagaaggccaatcattcaacgctcgtcggatgtttggagcgatgcacaaatcagaatcaccgtcattcttgcaaacaccgtttggtctaaatgcgtatggttatggttgcagatatgtgctatagaaaagtggtag

SEQ ID NO: 11809 - DNA, 180 bp, Zea mays
  Peptide Sequence Number=SeqID_55184
atgaagattaagaagaaagaatttttgtcgctgaagcaggggagcatgtcagtcagcgagtaccgctatgatctagtggctcatacatttccatcattccagaggctgctcgaaaaggcccaagctattgaacacaagcgtgttcagctaggggatctgaggaggaaggctatatcctaa

SEQ ID NO: 11810 - DNA, 1578 bp, Zea mays
  Peptide Sequence Number=SeqID_55185
atgaaagcaacgcaggcgctccccatccgggggctcggaaggtggaagggcgcaatgcatgaggagggtgcgaaggcatggctgccacccaaggtggtcgccccccttttaaaggtgactctccccacttgcgtcctcaggcgtcgcagactaagtcttcaccaacacgctccaaggtcctccccctacgatacggggccgagtcccacgcgtcatgcgagctggcccaggacagaagaagccaaaccgccacgcgcggagcgtgtaaccgcccagtggttacaagcactcctccatcttcacctaaaccaacgggtgaaagagtggactgccatgcaggcggcatgcaactgcaccataggggcgcaacctttcgacttcgacacatccagcatggaggcccaggcccacacgtcatgtaaccggtgcgccggttactacgtgcgcaaaactgcaccaccacttgcgccagtaccgcgccttctcgactgtggaaccggtgccgcgactcgaggcgaccctgcgcacggcccagcagtgccaaccgagcacatcggtcacgggtcagtcagccgcaggagaatgcgtgatggtcgatatggccaaaagtgggccggcagtaatggcggcggcaggcgggcggaagcggcagtcaaatcgtctgtaggctcacgtcccctcctgggacagcgagagagccctctcccatggcgtgaagacgacacacccgtgttccgttcctcgaacggctcgcgcaacggctgccccgcgaaccactcgtcccgtcgcatttactctgcgacagggcaggcgacacctttggcaggcgaagcgagcgacgcttcactccgccgtaatgaccgtgtcaaaaaagggaccgagaaaggggatactccaaaagggatccttctccgcgaaggaagcgggccccgagccctcctactgatcagaggttcgaaggctggcccctcgaaagggttcgaaagccgcctcagagcactcgagctccgcgcccactactggtcagaggttcgaaggctggcccctcggaagggttcgacagccgcctcaggccactcgggctccgcgcccactactgatcaggggttcgaaggctggccctccgaagggttcgacagccgcctcagaacacgcagagcaagggatgactctgggtcaaagctccgtccactcaagggacacgatctcgccttgcccgagcccatcctcgggcaagaacagcagacccaggaaaatagcgccgcctgcaccgctccgactgctgtgccacccgccagggtgtggctgacagcaaccaagtccagcctcgggcgtcataggaagctccgcctcgcccgaccccagggctcggactcaacctcgacctcggacgatggactccgcctcgcccgaccccagggctcggactcaacctcgacctcggaagacggtctccgcctcgcccgaccccagggctcggactcagcctcgacctcggaggagtcaccgcctcacccgacctcgggctcggaccgaccacgccgcaggggggtacatcattaccctacccctagctag

SEQ ID NO: 11811 - DNA, 483 bp, Zea mays
  Peptide Sequence Number=SeqID_55186
atggcgcctcctgttgacgtggtcggtccgcgccctaggttgggcgatgtggaggctcctccgaggtcgaggtcaagtctgtcgtctgtggccgaggtcgagtccgagcccctgggtcgggcgaggcggagaccgtcggctgaggccagggctgagtccgagccctggggtcgggcgaagcggagttcgtcgtcttccggggctgagcccaagtccgagccctggggtcgggcggatcggagttcaccgtcttccggggctgagcccaagtccgagccctgggtcgggcggagcggagttcactatggccggtcagtggagcggcgaaatgactgcggtcacttcggctctgtcgaccggaggacgtgcgtcaggataaagctttgtgctgatgggggttaccagatgagaattaggagtcttgagggtacccctaattatggtccccgacagtgcccaatgagattgtcattgaggccatga

SEQ ID NO: 11812 - DNA, 441 bp, Zea mays
  Peptide Sequence Number=SeqID_55187
atgtcgtcgattccgccgccggcgggctggctgttggccaccattgtcgctatcgcacggcgggggaaggagtatcgtgtcgtagctgccgtcgagggacatgaactcaagactcccgaaacggagcaccgtcccaggctagaaaggttgctggagactgcccatctggagcttgacgggaagctgttcgtcaacacgcaacaggcccctacctggcgcgccaactgtcggcgtttcgagaccggggggtccctggaccgacgagtgaaatgtcgccgcgtgccccagcccagatgggtcggcgcgagacagagcgcgaagggggaaaaggcagccggagagagggaggtggaaatcccgcgaccttcgtgtttgtcccgcgcccaggtcgggcgcaaggagaggatccaggtgtacaatgggggtgtagcagagtgctaa

SEQ ID NO: 11813 - DNA, 336 bp, Zea mays
  Peptide Sequence Number=SeqID_55188
atggaggcaagaagagcttcgaggtaccgagtgcacaagagaaggtcaaggagaccaggaacccaaaagccaggggtgaagaagaagacttgcaaagtcaaggttaatcgagttaagaagagttatgatgacaactcaattaaaggactaacaagtatgctaagtgttgaacaggtgcttaatggaaagctaacagagttcaacacaaagacaaccgatcaagccaaggatggaggcaagaagagcttcgaggtaccgagtgcacgggagaaggtcaaggagaccaggaacccaaaagccaggggtgaagaagaagacttgcaaagtcaaggttaa

SEQ ID NO: 11814 - DNA, 1005 bp, Zea mays
  Peptide Sequence Number=SeqID_55189
atgcaggcggcatgcaaccacaccaagggggcacaccctttcgactccgacgcatccagtgtggaggctcaggcccacacgtcaagtaaccggcgcgccggttactatgtgcgagaagctgcaccgccacttgcgccagtaccgcgccttctcgactgcggaaccagtgccgcgactcgaggcgaccctgcgcatgacctaacagtgccaaccgagcacatcgatcactggtcagacaaccgcgggagaaggcgcgacggtcaatatggccaaaagtgggtcagcagtaatggcggcagcaggcgggcagaagcagcggtcaagtcggaccgggaaaggggatactccgaaagggatcgttctctgcgaaggaagcgggccccgagccctcctactgatcagaggttcgaaggctggcccctcggaagggttcggcagccgcctcagagcactcaggctccacgcctactactgatcagaggttcgaaggctggcccctcggaagggttcgacagccgcctcagagcactcaggctccgcgcccactacaggctggcccccaaagggttcgacagccgcctcagagcacgcagagcgagggatgactctgggtacgttcgatacacaaccaaggctcgggctacgctcccgaggccactagccgacccttatcgaacggggcatgggcgtccactcggatcacccgttcgcaactcactggagacaccatgttcggcgccctccaagggcaacatggcgcttcccccccctcctccttgcggaaaggcgatgcaggggcgtatgaaaaaagctgagtctgtccttgaccgtcctctcgctctgtgcggaggctcgggggctgctctcgcaaacccggctccggccaaaccgttgacagcgtcaacataccagcccaagaacttggaacctgactatgcacccgggctacggccagttcgcatgagggaacaaccagaccggccgaagcatcacgaaacgcgctaa

SEQ ID NO: 11815 - DNA, 663 bp, Zea mays
  Peptide Sequence Number=SeqID_55190
atgtcaccggcggcgaggcgcatcctgctcgccgtcgccgcccgtcgccgccgcttctccacggacgcagcggcgtcggacccgtcccgggcgtcgcagcagctgcccaggggcaagcgatgggatgcggtggtgatcggcggcggccacaacggcctcgtcgcggccgcctacctcgcccgcgctggccgctccgtcgccgtgctggagcgccggggcgtcctgggtggcgcggcggtctcggagtcggaccttgtccccggattccgcttctcccgctgcagctacctcctcagcctccttcgccccgccatcctccgatacgaggagaagctggagaacttctgcaagctcatggactttgtcatagactcagctccacccgagctgaggcaggaggcccacttctcgatggttgacaggatgaagcatagggttgagaagtcagcattctggggccaccttcttcggcatgtgatgcagcaggggcagaagaacatggtgtatgtccaaggtggtatgggttcagtgtcatcagctataagcaaagcagctcttgaagcaggagtgcagattgtaacaaatgccgaggtttcccaagtaatggttaatgaaactagtggaatggtagaaggggtaagtactttgaataacctgacctag

SEQ ID NO: 11816 - DNA, 2016 bp, Zea mays
  Peptide Sequence Number=SeqID_55191
atgtcgtcggagcctccacccgccccttctgccgccgcagcagagggactggctgctgacctttccgccgccaccctcagcaagaagcagcagaagaaggacgccaggaaggcggagaaggctgagaaggcggcgcagcgccagcaacagcagcagccggccgacgccgaggacccatttgcggccaactacggtgatgtccccgtcgaggagatccagtcaaaagccatttccggccgcttgtggtcccagatcggcgacctcgacgactcctctgcggggcgctctgtgcttatccgtggatccctgcaggctatccgcccggtcagcaagaagatggctttcgtcgtgctgcgccagagcatgagcaccgtgcagtgcgtgctcgttgccagcgccgacgccggcgtcagcacgcaaatggtgcgcttcgccaccgccttaagcaaggagtccatcgtcgacgttgagggcgtcgtgtccctccccaaggagcccctcaaggccaccacgcagcaagttgagattcaagtcaggaagatctattgcatcaatagggctatcccaacccttccaattaaccttgaagatgcagctcggagtgaggcagattttgagaaggctgaactggctggagaaaagcttgttcgtgttggtcaagatacccgcttgaactacagagctattgatctacgaacaccctcgaatcaagccatattccggatccagtgtcaagttgaaaaccaccaaggtagttgcccgaatgaaggagacgaccctcttgggccgtgcaggagggctgcatacccagatctcgacttctgtagggggttcaaaaagcgcaccacggcctgctcatgtgatgacggccatggggtggccctggaggccacaacaaggtgcttctccccacgaagggactcggtggaacatcacaacgaactgatcacacttctcttcgagccggccaaaactctcttcgagccgactggtggtggtgagggatgggcggctggtggtggtgaggataacctggagccgatatcaggtgtcattcggtccatggggatagctgtcttctccggcgaggttatacccctctgccgcaggcttggttctaggaaattcagagaatttctgttgtcaaaggactttgttgggatccacacgccaaaattgatttctggatccagtgaaggtggtgcagctgtattcaagcttctgtacaatggtcaacctgcttgcttggcacaatctcctcagttgcacaagcagatggctctatgtggtggttttgaacgagtatttgaggttggccctgtgtttagagcagaaaattcaaacacacacaggcatctctgtgagtttgttggtcttgatgctgaaatggagattaaggagcattattttgaggtctgtgacattatagatggcttatttgtatcaatatttaaacacttgactgaaaactgcaataaagaactcgagacgataaacaggcagtatccatttgaacctctgaagtatctagacaaaacattgaagctcacttatgaagaaggagttcaaatgttgaaggaagccggaacagaaattgagcctatgggtgacctcaatactgaagctgagaaaaaacttggtcggcttgtcagggaaaagtatgacacagattttttcattatgtatcgatatcctttggctgtgcgtcccttctacactatgccttgttatgacaacccagcttacagcaattcttttgatgtctttattcgaggcgaggagataatatctggagcgcaaaggatacacactcctgagctgttgaccaagcgtgcaacagagtgtggaatcgatgtcagcactatctcgacctacattgaagtcttcagctatggcgcgcctccgcatggtggtttcggggtgggtttggagagggtggtgatgctgttctgcgccctaaacaacatcaggaagacctcgatgttccctcgcgacccgcagaggcttgtgccgtaa

SEQ ID NO: 11817 - DNA, 792 bp, Zea mays
  Peptide Sequence Number=SeqID_55192
atggaaaggttgctggagactacccatctggagcttgacgggaagctgttcgtcaacacgcagcaggcccctacttggcgcgccaactgtcggcgtttcgaccccggggggtccctggaccgacgagtaaattgtcaccgcgtgccccagcccagatgggtcggcgcaagacggagcgcaaaggggggaaaaccagagggagacaggcgtaaaaggggaaactcgcggccttcgtgtttgtcccgcgtccaggtcgggtcgagtccgagccccgggtcgggcgaggcggagaccgtcgtcttccgggccgaggccgagtccgagccctggggtcgggcaaggtggagtccgtcgtcttctggggccgaggccgaggccgagtccgagcccctggggtcgggcgaggcggagttcgtcgtcttccggggccgagcccgagtccgagccctggggtcgggcgaggcggagtccgtcgtcttccggggccgaggccgagtccgagccgtggggtcgggcgaggcagagttcgtcgtcttccagggccgagcccgagtccgagccctagggtcgggcgaggcggagttcgtcgtcttccggggccgagcccgagtccgagccatagggtcgggcgaggcggagcttcctatggcgcccgaggccggacttggccgctgtcagcctcactctgtcgagtggcacagcagtcggagcggcacgggcggcgctgtcttcttgtcaggctggtcagtggagcggcgaagtgattgcggtcacttcggctcagtcgactga

SEQ ID NO: 11818 - DNA, 255 bp, Zea mays
  Peptide Sequence Number=SeqID_55193
atggagtctgctctccacttctcaagtgtctatccagaaccaaagacctttgctggggaaggtcttcagacaaggattttattggccgaaggcggcttcggatgcaacggatctggttcaaaagtgcgaaaattgtcaaaaatgtgcaagagaccagaaacaaccttcatcgctaacctagctaatacaaccaacctggccattgcaaagatggggcctggttcttttccacttccaccagcacaaggcaattaa

SEQ ID NO: 11819 - DNA, 210 bp, Zea mays
  Peptide Sequence Number=SeqID_55194
atgagcaagaacacaagagacacaagatttatcccgaggttcggtcacaccaccaaggtgccctacttcctcgttgaggcgcccacaaagagccgggtctctttcaaccctaatcctccctttgccgaccacaaaggttgtgggggacagatatcccccgggtccactggaaggataaaagacctcacgaaaggcccaagagcccaataa

SEQ ID NO: 11820 - DNA, 211 bp, Zea mays
  Peptide Sequence Number=SeqID_55195
gatgaggatccggctcaaaatgatgaagatgaagatcaagaggatgagctacctcaagaggaggacaatgatcaagggggagatgaaggcaatgaaaacaaggaagatgatcaagagattcagggtcaaagaccgccacacccaagagtccaccaagcaattcaaagagatcaccccgtcaactccatcctttggtgacattcataagggg

SEQ ID NO: 11821 - DNA, 474 bp, Zea mays
  Peptide Sequence Number=SeqID_55196
atgatcccccctgtggcgtggtcggtccgagcccgaggtcgggcgaggcggagactcctcctgaggtcaaggccagggtcgagcaaggacgcgattccgcccgcggtcgaggtcgaggccgagccctggggtcgggcgaggcgaagaccaccttccgaggtcgaggtcgagccctggggtcgggcgaggcggactccatcttccgaggccgaggcgggggccgagccctggggtcgggcgaggcggagtccatcttccaaggccgaggcgggggctgagccctggggtcgagcgaggcagagcttcctgtggcgcctgaggctggactcagctgctgtcagcctcaccctggcgggtggcacagcagtcgaagcggggcaggcggcgctgctttcttgtcaggtcggtcagtggaagggcgaagtgattgtggtcacttcggccctgtcgactgaggaccgcgcgttaggataa

SEQ ID NO: 11822 - DNA, 175 bp, Zea mays
  Peptide Sequence Number=SeqID_55197
ccgtgctcgcggttatgagcgcacattgaagctccagagattagtgatacttgatcagagatactttggtacagaagccaatgagattgatggttctgattacgattatggtattggcgaagatgaagctgtggaaggagacttccaggagttccaagattacgacgagttctag

SEQ ID NO: 11823 - DNA, 519 bp, Zea mays
  Peptide Sequence Number=SeqID_55198
atgacgggcctcatgtcctttacctccctcgtcacctgcgaggtggccgtgaatgctttgtcccacgaggggtgcgggcatttcgaggtcttcgaccagtcagacgaaggcttcgaacgcgtaatcttccaggtcgaggacccgatggcgcatgacgaggaggtggaggaccttggcgatctaaacagcacgctgcccgacagcacgctgccggaggcctcgggggtggagctggcgccgtcgcccgatgcgggcaagggcccctcggcaacccccgcgccaactggagccgacggagacttcaaccgtagtgcctgcaatgatagtttgtttggttctgtgtctgatggtgaatttgggagctcgtttccttggatggaggagtccttagatgaaggcttggattattttgttgcgttggatgtggatgcggcggagacgtcaccacgtgtggagggtgctaggatctcttgtgcgagtactggtgtagcgtgcaaggtgatggaaactatgtggtga

SEQ ID NO: 11824 - DNA, 651 bp, Zea mays
  Peptide Sequence Number=SeqID_55199
atggagagggatcgtcaagacacggcgcggaagcgccgggcggtcaccagggtcggggaccctttccgcgaagcgaagaaggcgtggggggagcgcgaagtctgccgcccctggcagcagcaaaccaccgccggccgccaagtcgaccgcccctgggcccagcaagtctttggcgggtctgaaataagatcatggtgcagggtcagatgcggggcagctggctgttgtcacgactgcggtggcggccacttcgccaacggcggcggccgacttcgccgaccatgttgcgtcgggtgctctgacttcggagtttgctaccgaaatcaagcgtctccgggcgcagcatacggatgctgtttgggagaaagtcggctgcgaaaaaataaaagtcgcaggctgacggagaggttggctgctgtggaggccaagaggggggatcttcggcgccagctggtggaggagaggagggacgcgaacaaggccattgccgatgcacaggccgctcaagccgaagccaaacttgcgtgggtggaggccagtctcgccagccaacgcgccgaggagctggaggcgaggctcaacagcctgcgcaatcgcgtggacaaagccgaggcctcgatgcgcgcggaggtcgagcggacgcatgcgtag

SEQ ID NO: 11825 - DNA, 594 bp, Zea mays
  Peptide Sequence Number=SeqID_55200
atggcgtctttccctcctccctttcttctctcccaaggccgatgctctctgctccattccctccccagcgccccttcttcttccatggattgcagcagctcgaccctcctctccatggcgcaagctccatttttcagagccgccgaagctcctcccatggcgcaggatatcccaccagcgagctccctccctgtccatggccgccagcccctgctcctcttcgctctactacgcagcacccctctctgctcgaccagcagtagcgagcggcctcaccaaccttgccctggcgctgctcgccgacgatcccctgcagggcgccatcatggcctcgtcgggctcctgctcgccggcgagctcatgttgctcatggcgcctttccctgcctgctcgctgtccccaatgaccagcagccctcgcccactctgccctcccccaaaacagcagccatggtgtccaagttctctgcgcagcggtgccgttcaaaaaaatagcagccccatgaccgcgtcgtcgatctgcgcagcgcttgtgagccgtcgtcaaaaatctttgctagatgttgccgcagtgtctcgcgcgatgcatgattag

SEQ ID NO: 11826 - DNA, 264 bp, Zea mays
  Peptide Sequence Number=SeqID_55201
atggcgagcggcctcgccagcggggtgctggttggctatgttatgcacctgctgctgactgcgagcgacagctcggccaaggcatcggtgtctgggcggtacccttggaagttaagcaaaaacttgtctcagagacttctccaggagtcgatggacaatgggggcaacctggtgtaccaggtcaaggccggacccttgagggcgatgatgaaggacttggccattgtggcgtcgtcccctccggatgatgcgacggcgacctga

SEQ ID NO: 11827 - DNA, 1005 bp, Zea mays
  Peptide Sequence Number=SeqID_55202
atggatcctggcccacatatgctatgcattcagttttgcccccagaaccggatggttcgtaccattcaaaccactcggatcaacaccaactacatccctccgccacgacaagttcctgtctacctagtggtagtcgaggaaaaccctgtggatctccctcgcattcgggtggagaacagagtcattctagaggacagctcagaggagtttctgcctacgcccaccccgttggcagagtcaccagccttcatagctagatcgtcagcttcagcaccaccagcactagcagtccaagcccctgctcccggaggcgatgactctggtgacgatgatgaagacgacgaagaaaaagaagaagatgaggaaaacatcaacgaggaagccaacgaagaacagcaggaccactacattgggttatggcctgtcactgaacattacacttcaatgttcaagacagggcacttccctaacctgctgcaggatgttctgcatgcgttgggaacctacgttcgacccatgtatgagacaaggcgagtgtacgagcctcctcgggcttgctactatattactcgcattcatttcagggtgatggatgcaggtgatagtgggtttaggactctatcaactcatgagtatctgacgccgctatccacctacgctgcttcgctgcacctaccggcagctgctaacacgaagtacaagcatcttcctctgtgtattcgtggagagaaccagaccatcattgttccaggtggagctggagaagatagcctcaacaccctagctggtgtggtggcaggtcttaacactgacctggatagtgctaccctggacctctctagggtacacatggagctggaggatgcacatgcaaggatcacagccctggaagctcagcttgatggaagtaatccccctgaagttcaagtccctactatggcgttatcccctccccacaagaggatccgctatggagaaccaggatccatcaccaggctgctttag

SEQ ID NO: 11828 - DNA, 681 bp, Zea mays
  Peptide Sequence Number=SeqID_55203
atggtccacatagtcgagcaccacgatttcttgcccgaggacttcgtggtggaagaagcggctgcctcttccacaccgcgggccaccaacctcccggcgcctggtgcgaccacagctgtgcactctgcgcgacaacacactcccgcgcaaacgtctagggcatctagggctgcgcttggggcgctgtcagcggccagagaattgttgcgccaccctcccagctccacggcctccccaggggccatgaagcagtggcgcgacgacgtcgatcgcctactcgacatggcgcactctggatcaaccaggccaaggcctcgctcccgacgccaacccgaggcgtcggcatcagtgcgctctccctcggtgagggctgcactgacggaggacctgcaggcagagctcaaccgcctgcaagcaagtgaggatgccccagtctctatggagaggtctaacgacctgcgggcggaacttaaccacaggcgtgtgggtgaggatgcccgcgtctctctggagagggcgcgcgagcgccgacaaaatgttgagggtcgcaaccttgactacgagttcgctgcggttgcaccgacgggcgcccagattcaggcgggtgtcccattggccggcgtgggctgcgccgcgctggcagatcacctccgcgcggcgatctggccatccaagttctag

SEQ ID NO: 11829 - DNA, 471 bp, Zea mays
  Peptide Sequence Number=SeqID_55204
atgggcaagagcaagaaaagtggaagttcgtcgcaccactccggcgacaagcggaagcgcgagccgagccctccctcggaggactttggcgattccgagtactcagaagaagagtttccctctgagtccgaggggtcgctggtctacacctctcccccggtatcgtccgatgactcggacgattcccaggggatcgccgccgaggtgtggacatacatctgggccgtcgagcgcttcgggctcgagggctcggatgagtcggaggtctcctcggacgaggagaactcccctgactcatctgaggaggggagcggcggtgacgacgacgacgagggcgacggcaacgacggaggcgacggtggtggtgacggtgaaggcggcaagtgcgacgacaagggcgacgatgatggtggcgacgacaagagcggcagcggcagcagcaaggccagtggaaaagcgccactgggttaa

SEQ ID NO: 11830 - DNA, 306 bp, Zea mays
  Peptide Sequence Number=SeqID_55205
atgatgctggtagactacacaatgggtctcctacagcagccgggatgccctgaggtggtgcagggggcatctctggctgaggtgcaggggaaggcggcctctcagactccacctcctgctgaggcgagggggaagagtcctactgctcctgctcctgctcccggcgtcggcgctcctgctcctcgtgaaggcgatgatgcagtctctccaggtgacaggactaacctggcactgtgcgacgcaggggacgctctgccaggcgagaaggcaaaaatgggatcacatatttacatgcagtgcgcctga

SEQ ID NO: 11831 - DNA, 444 bp, Zea mays
  Peptide Sequence Number=SeqID_55206
atgcacataataaaagactctccaacacctcttggaaagtcccgttgggaagaagcacgtgaacgttgtcctaggattggcaagccacttagagcactgtcaaaactcattgagagatgcaatgaaaaacaagatagaggtcggggtttcacaactagactggccactatagtcgccatggcagaggaagttggcctggttgactttgggaatctagccttactacatttggaggttggcctaattgactttgtcatcgtgatggtgtgcgaggagacacaagcgattatcctggttcaggctactcaaggccctacttccagtagagaggatgaggcttatattactcgcaccgtggtgcctgtagtaggggagtacaagcacaacgggagaggagaagtccccaagtccctagagatgattgaggcaagtgtcaatatctaa

SEQ ID NO: 11832 - DNA, 243 bp, Zea mays
  Peptide Sequence Number=SeqID_55207
atggagatgctgatgaagcctaggttggtcatcctagatgagcccaccattggtttggataggcgctcaagcaattcgaggcgccttgctcgcctaccttgcctaggcgtccaggcggtggccatttttcttgcctcaccataccaccttaagaaccatgctggtgtcaaggatgatggggtgctgcaccattgcatggttcgaagagcttcacaagcagagttcagagagttgctgaattga

SEQ ID NO: 11833 - DNA, 348 bp, Zea mays
  Peptide Sequence Number=SeqID_55208
atggacaggccgctccctgttcggctgttctgcgtggagagccagagaggaacatccaaagtccaaacgcaatcaatgcattacgcagtatgcactgaagcaagaagcaaagaaagccgtggtgtactggtggccacgatcgagcacaagacagccaggcaggagctaaccgaggtccggcgcgaggggcagagggcgagccggtgtccggcgaggcgaccgcggttggcgcagtggcgcctggcggctgcggctagcaggcagcagctgggcgcctggggcctgggcagcgccgcagcggcagggacacaggtagggtggcaactggcaaccggggtcgggtattaa

SEQ ID NO: 11834 - DNA, 696 bp, Zea mays
  Peptide Sequence Number=SeqID_55209
atgatgaccgcgtcaaaaagggaccgggaaaggggatactccaaaaaggatccttctccgcaaaggaagcgggccccgagcccctctactgatcagaggttcgaaggctggcccctcggaagggttcaacaaccgcctcagagcactcgggctccgcgcccactactggtcagaggttcgaaggctggcccctcggaagggttcaacggccgcctcagagcacgcagagcgagggatgaccctgggtacgttcgatacataaccaaggctcgggctacgctcccgagcctcgggggccataggaagctccgcctcgcccgacctcagggctcggacacagcctcggcctcggaaaacggtctccgcctcgctcgacccagggctcggacacagcctcggcctcggaagacggtctctgcctcgcccgaccccagggctcgggctcaacctcgacgctggacgacggactccgcctcgcccgaccccagggctcggacacagcctcggcctcggaagacggtctccgcctcgcctgacccagggctcggactcaaccttgacctcggaagacgaactccgcctcgcccgaccccagggctcggactcagcctcgacctcggaggagcctccgcctcgcccgacctcaggctcggacccgccacgtcacaaggaaggccatcattaccctacccctag

SEQ ID NO: 11835 - DNA, 1236 bp, Zea mays
  Peptide Sequence Number=SeqID_55210
atgagcttctcgtccatgagcaaacagcaggtgctggacgccggtgacggggagggggaagaggtcgtggagcttatcccgggcctgccggaagaggtggccgagaagtgcctcctccacctgcccttcctctaccaccgtctcttccgcaccgtctcctccacctggaaccgcttcctcaccgactcccctgccaagccgctgctgttcactcccgcggagggggcgggggctggcgcggggagcgcagccatgggctcgttgtccttatcgctgcccttcctcttcgccttcgcgtttgaccctgtgtcgcgacgcctccagtgccaggcgctcgaccctttctcgaggaggtggctcctgctcccgccggtgcccggcggcgccgcggccgggtcgtttgcggtggtggggctcccccgccgcggcgagatctacgtgattgggggcgtcgaggagggcagcgacaaggcggtgacgagcgtggccgtgtacagcgccgcgcggaacggatgggaggaggcggcggcgatgcggacgccccgcgggtacatggcggctggggaggtgggagggcgggtggtggtggccggggaggacggcgaggccgaggtgttcgacccggatgccgggcggtggtcgccggctgcgccgcgccggggcgcggcggtggcgtggtacgacgcggcggcggcgggtgggaagctgtacgtgacggaggggtgggcgtggccgttcgagcgcgcgccgcgcggcgccgtgtacgactccgccacggactcgtggtgcgagatggcgcgcgggatgcgggaggggtggacgggctcttgcgccgtcgccggcggccggatgtacatcgtggcggagtacggggagtggcggctgaagcagtacgacgaggcccgggacgagtggcggatggtggccggcagcggggtgccccccgaggtgcgccggccacacgtcgtcgccggggagatcggggaggtcgccggtgggaggcgaaggatatacgttgttggcgccgggctggacgtcgccgtgggcactgtttcggcctcagacaccgccgcggcacccggcgtccacggcgtcgaggaggaagtggtggagtgggaggtggtcaagggccccaccgagttcgtcgggctcgcgccctgcaacgcacaggcagcacagtctcgccacgtgggaccagtctgtgagcgagcagtgatgggacttggaagaggctga

SEQ ID NO: 11836 - DNA, 981 bp, Zea mays
  Peptide Sequence Number=SeqID_55211
atggcgtccaccgccgccactgtcacgtttggcggcaagggcgccgccctatcgccggccgccgtctacgcgctctccatcggcctcgccgccccgggcatcgacccttcggcgcacaaggcgctctccacccgcgcgccctcgccacaggagacccccgcgccccttgccgccgcgctcccggcgctggcgcccgccgagtcccgcgccgccgcggccgtgttgctgaacaagctggtcctcactgcgtccgactctgcctccgcgctcgtcaccgccgccacggccgtcggcctcgcaggctcgctcgacctcgccgccgcgctgccgctcggctcccgggacgaggtcgcggtggcagcggcttccgcgcctgtcgcggtcgggctcgcagcgctggtcgactgctgcgccgcgccgctcgcccgcgttgccgacgccgtcgccgcgctgtcgtgcgaagccgtgcgcggggacgccgcggccttcgacgtgcaggcctccggcgacgggctctcctccaaggacgaggccgacgtcgctgccgacatcaaggtgctcgtcttcgggtccaagcttgtcggcgctgccgggggcgcccccgccgccgccacgttcgccaaggtgcccgcgctgaacgggatcttccgccaggcggttcgggcgctgcacgcccaagtgcgcatcgagctcaacgcgcctgtgaaattggggaagaaggatgccggtcaaaccgatgctgtgtcagtcttgaagggggtgtacaaccacttgctcaagttcagggactttctctcctgggaagcagctatggccatggcagtaattgaaacagacagttcaattgagaagccgcaatctgctgttgacaacgaagcagctggttcaagtgaaaaggcacaggctggtggggacaaagcaaagggtgacaagaagagcaagaagaagaaaactttggggaaggattgtgcagaaggctaa

SEQ ID NO: 11837 - DNA, 1140 bp, Zea mays
  Peptide Sequence Number=SeqID_55212
atgagtgaggaagaaagaacaggaggcgttgttgtcgaactcgcggccattgtcgcactgcagggcacggatcgggcgtcggaactgggtggatacccaggcgaagaagtgagggtggagacgtccagagatcacagtggacaagatcaaaggcctgaacagccctggacgtggaagtggaaaaaggaagacaggagtgacggccgagctgacaagcatgacagaggcgctcagaagagccccgatacgtgggaagacaagcggtccaggcacgtgacggcccgcctgagggtggacctcgacgcagtcccgaagaatagggttccagactggatcgaaggacacgaacatgccccggatgagctggccgtcgtggaggaggacacgcacagtcacgagagcggcgggcgaaccgctaggattgggtcgggcggtgaggctgggagcagaggccgacagtgcccgacggcaggggaagaggatgccgcggcagggagcgctcgcggcagggagaagggcggctggggaccagcggttgacggaggagagctagaggaggaggtcgcgaaagtcggcgacagggcagagatgcggagccggacgcggcgggatcccggcgaggagaggccgggcgcagcgggatctggcacagggcggctgcggtctagggggcgagaccggcagagaggacgcgcggcggcagggcgcctgggcgcgacacgggactcggttgacggcacggcgagggccggaggcggcagcaagagccaaggtggaagaaggagaggagtaggagcagggaggaaagcgaggccggagagagcacgagcagcagcaccggccgaggcagcggtcagctcttgcgcgaccggctggccgcagggcgccggggtcgcggcggggaaggggcgcgctcagcgggagcggagctcgcgcgtcggggctactgctgggaggccgacggagggaggagccagggagggaggagccgcgcgccgccggtggaagggccaggcgaaggcggctgcagggaggttgacggccagagatggacgcccggcgggggaaggggagcagcccggcggctgtgggtgggagggaagagagaaaaaaaatggctttggtaccaagttggaataa

SEQ ID NO: 11838 - DNA, 3336 bp, Zea mays
  Peptide Sequence Number=SeqID_55213
atggccgatcccgccgccggaggcgccatggtccccgctgccggaggcggcagcgtgtgggcgaacggcgccccccgcttcggcgacatggtctgggccaaggtgaagtcgcacccgtggtggccgggccacatctacagcgtcagcctcaccgacgacgaggaggtgcaccgcggctaccgctacgggctggtcctggtcgccttcttcggcgacaaaagctacgggtggttcgagcccagcgagctcgtccccttcgaggagcacttcaccgagaaggcggcccagggcggcagcacccgcagtagtttcgccggcgccgtggcggaggccgtcgacgaggtagcccgtcgcagcgcgctagcgctgctctgcccgtgcaagagccccgacgccttccgcccccaccccagcgacggcaacttcctcctggtcgatgtcccggcattcgacactgacgctgactaccaccccgaccagatccaggccgcacggcagcggttcgtgccgcggaaggcgctcgactacctgctggacgccgccgtgactcagcgggacgcggcggaaaaagcggcgcgcaccgtgcctgggatggagatggccgcgctgttctcggcgtaccgtcgcgcagtgttctcgccgatagacaacacctacgcccaagcgttcggggtggatcccgagctggcgcttgctgccgagcagaaagccgcggcagagcgagctcaacgaggtatcaacactcacacgcccaatcctagctgtattattgactgcgccgttgttcttgttgctctgtacttgaaattgatggctaaacaacgttattactgcactgcttctatagatcaagcaacgaattattttgatggatctaacatgaaagattccgatggtacatcactgaccattgagcctgttggactagcgattggcgtgcgtgcgtgccccattgctgcgattggaggctttctgagcttcctcttgaggacgaagctctatggggaaagagtggtggcaatgtcttggcttcctgctagcccggaccagtcaccctgcagctggtcgcttggcccagcagagcagtgtggttcagactctccccaacaagcgcggccgctcaaagggggccccaggaagacggcggaccaggccacaccggcggccggccgccggaggggaggcgccggcggcgccgccgccaggctcatggagaagatcgtgcccggagcgcccgccatgaagaccaagtccagcaagaaggaccagtacctgctcaagcgccgggacgcgcccgaggcctccgcacacagccagccgcagctcccagacgcgccgccgccggcacccacgctcgcggcggaggacggaccacctggcttcccggccagcggcgacccgcccacaccgccgctgcccgggagctccgtcgctgacgaggacttcatgctgcagaggcgcgtcccgctcgtcgatgtccctcccgccgtccaggcccagccgagcgagggccccgccgcgcccaagaacgcgaccaagctcaagaagccccgcaagcgcgagcgggaggaaggccccgatgcaacccccgactccgcggacgccgccggcgaccccaagaagaagaagaaaaagaagaagctttccgacgtggacggcgctggcggcaaggtcgccttcgtggttgagggccgcgacgtgcttgatctgacgcaggtactatcggacatccggaacctcccgctggctcccttccatggcgccgaacgtctcatctctgacgccgctcgctccttcgtcctcgcgttccgctcaaaatactacaagaagagctacgagaacgacccacccgaggagttgaagagcctggacaagcccagtgccgccgccactgacggccagtcgcccaagaagaagaagcctgccccgaggcctggcgcagggaacgaccccaccaaagccggcgtcaagcgcgggccatcggaccgccagggggagctggccatcaagaagaaagccaagctcgataagatcaaggtactgtccagtgagaagaaggccgccggtctggagcagaaagacacggcggcggcggcggcgcagcagcaggcacgggctgcaggcgccaaggacaaggccgagatgggcgcagccaagaagaaggagccggcgtcggctcgcacagtcaggaccccgtcgccgacagcgctgatgatgaagttcccgctgaacagcacgctgccgtcggtggcgtcgctcaaggcgcggttcgcgcgcttcggcccgctggacgtggacggcatccgcgtgtactggaagtcccacatgtgccgggtcgtgtacaggttcaagttcgacgcggaggccgcgctcaggtacgccaaggccaacgccatgttcgggcaggtggacacgcagtaccacctccgcgaggtcgaggcgggggcgggccgcgagccgctggcggcgccggaagcagccccgcagcagcgctccgagctgcggctcatggagaccgctgcgttcaggcccggcacctccggcaacggagctccgctgcccatgtccagggccggggccgcgccggcgcgtccggccgtgggggtggggcagccgcccaagtcgatcttgaagaagagcaccgacgagggaagctctgggaccaccagggaggtctcccgtgtgaagttcgtgctggacggcgcggacggtggcacgctcgcgccgccgccgagcgtcggcggcaatggcaatggcgcagacgggggctcatcaatggtggccaaggccgctaaatccgtcgggttcgctccttcccaggctctgcagccaccaccgcgcacgctgcagccgcccatgcgcccggcgcaccagcagcctccgcgcgccgccgtcacgcagcagctcccgccgccgccgctgcctcagcatctcccgtaccaccagcacccccgcggcgccgacgggactccgctggcccctcccccaggtcagctgctggcatacccgcctcgtggccacggcgagggcccctccgcgcttcctgggctaccgccgccgctgccgtaccagcctcgccccaccggcttccccggtggacagcagctggggtacccgcctcgctccggtgacaacctgccactcctcgctggacagccgcagttcccgcctcgtcccagcaacgccaaggctggcagtgagggtccagcgtggaggaggggggagaaggagttcaaggaggaggtgtggaggctgatgacggggatcgccaagatggtggagcctctcacggacaagaacggcttcttcccctaccacctgttccgagcgcagtga

SEQ ID NO: 11839 - DNA, 168 bp, Zea mays
  Peptide Sequence Number=SeqID_55214
atggaggctggggttcgtcgtaggggctgcacccagccatggccacggttagacgccgggatcctcacctcagagctcgacgaagatggcgagggcgtgactcgacagggcgcggacgacggcgttggcgagcagccctgcgcgaacaacaagataagcccaaaataa

SEQ ID NO: 11840 - DNA, 405 bp, Zea mays
  Peptide Sequence Number=SeqID_55215
atgactgctgtgccacccaccagggtgaggctgacaacacccaagttcagcctcatgcgcaataggaagctccgcctcgcccgacctcaggcctcggcctcgggaggagggctcggcctcaacctcggcctcggaaggtggtctccgcctcgcccgaccccaaggctcggcctcaacctcggcctcggaaggtggtctccgcctcgcccgaccctagggctcggcctcaacctcagccctgggaggaatagcgtcctcgcccgaccccggcctcggcctcaggagaagctacgggggaacaagaccggcgtcccatctggctcgccctgggctcaagcgctcctccgacggccacgataccgcgtccccggggctctagcacctctccgacagccacattggcat

SEQ ID NO: 11841 - DNA, 486 bp, Zea mays
  Peptide Sequence Number=SeqID_55216
atgacttcacccacccccatcaacagaggagacactcgttttagttccaactacgtttcccatgagggtttcccttccatcttgtgggaggtgctcagctccaccggttaccctacaccccctcaggcggatgacaccaccgaggctacaactatgaagaccctgacgactttctacagacaccatcccttggagatgataatgcacccactgggactcttccccgctaagaagagggatgaccccatgtggtgcaatcgagtgagccacatgaaggacgtgtgggcaatgcatctcgaccaggttgggaagatcactgttcagtgtatgagcgcagtgtaccgcctacaagccctacaaagcgatgccatggcacacctcactaaccttgctcagaccactaagctcaccctcgactgtcgagaggacttcgtagtcgactgtcttcagaattggtggagaaagacctacaagtggaatagttga

SEQ ID NO: 11842 - DNA, 336 bp, Zea mays
  Peptide Sequence Number=SeqID_55217
atggggacagtggccaggacaagctccagcgtcgcatccactgtggaccggtgttgggtggacgcaggcacgtccaggcacttggatggctccaccaccccaaggatcgcaaccagtccggggatgggtgccaccggtctcctagacactggcgggctctcaaccatttcaagcgtggatggcaccgccaccgacgggggttcagtgtcaaatgctcagggatcggagggtgctgccaacgtccaagacttcctcgtccatggttctggagggagtggccaccttcctggtggcggaggagggagtggccaaaactcccatagcccgcaggagtga

SEQ ID NO: 11843 - DNA, 375 bp, Zea mays
  Peptide Sequence Number=SeqID_55218
atggccggttcaaggaatagctctgacgtctctcccagcaacattataaagccgacttgggaaaccttgccggctgtcgaacagctccagttcgaggagcacaaggagcagctgattcaagaggcaaaggcgaagttcctggccaacttcaaggtggacaggaacaataaagtcgttcgacaacgggcgacggatccggcttcgcttcgacccacaccagacatccccaatgccccgaccgcgccttacccctaccccactgtcggcacgcgcgaaagtcgcgacggcgccattacagcccgtcttgagctcgcccagcggccactaccgtccaacgccgaagcctacatccgcgcagcacgcagaggctactag

SEQ ID NO: 11844 - DNA, 240 bp, Zea mays
  Peptide Sequence Number=SeqID_55219
atgggggagtctgacggtgatgacaaagaccagcacgctggaggcaggcgggggattaacgttggaggtgccgccagtgctaagggccagtggaaatcgccatttggcggttattcaagaaccgccagtggaaatagcatttccactggcggttttcttaagcaaccgccagtgaaaatagcattttcactggcggttttattaagaaaaccgccagtggaaatgctatttctactggcg

SEQ ID NO: 11845 - DNA, 1634 bp, Zea mays
  Peptide Sequence Number=SeqID_55220
atggagttccaaagtactagaaatgtgaaagaaaaagaaaaggggtccgtgcgtggttttggtttctacacgaggagtccgtgccatgacctcttcgccgtcgacgacaaaggtccagataagaccggctgggctccctctcccccggccgggttcgccgtcgtcatcggcgccggcaaccaacgcagccagacgggcgccgagcgcgagctcggcggcacatcacccagccactccagcggtccagccagccacaaggcagctgcttcatgtgcacctacactacctagtcgcagtcggcacctcttcctccttcggcgacgcgagctgagcggtcctgacgagcaaggcgccatggccatccgcgagagctcccagatgccggaactgctccggctccctctgccgccgccggcgacgacggggagcccgtactctgtgtgcttgagcgtgccggcgtcgccgtcggggctgcacctcggcgtgtgcgcgtccgtccgcagcgtggcgccggctccacagccacagccggcagaggaccagcagctgctgcagaaccaggcgcggtaccactcgcagccgacgctgacgatccggaccgaggagccgccgccgctgcagcgggtgcgcaccgtgtcgcgcagcgacagcgcgcgcgaccgccgcttcgaccacttcaagaccttctccggccgcctggagcggcagctgtccaacctccgcggggtggtgcccgtggacatcgagcccgccggcgccgactctacctcgaacaagatcatctccgaggaggagaccgacgacgacgacgaggtccccagcgcggaccgctacttcgccgccctggagggccccgagctggagacgctgagaccgacagaggtgtcggcgctgcccgaggacgagacgtggccgttcctgctgcggttcccgatcaacgcgttcgggatgtgcctgggcgtgagcagccaggccatgctgtggaagacgctgcagtcggagccgtccacggcgttcctccacgtgagccccgccgtgaaccacgtgctctggtgggtctccgcctcgcttatggcgctcgtctccttcatctacctcttcaaggtcgtgttctacttcgaggcggtccggcgcgagttccaccacccgatccgcgtcaacttcttcttcgcgccgtggatcgcctgcctcttcctcgtcaagggcctgccgcacccggtgtggaccatccaccacgtggtgtggtacatcctcatggcgcccatcttcctcctcgacctcaagatctacggccagtggatgtccggcggcgcccggcggctgtccaaggtggccaacccgaccaaccacctcgccgtcgtgggcaacttcgtgggcgcgctgctgggcgccaagatggggcttcgcgaggtgcccatcttcttcttcgccgtcggggtggtgcactacctggtgctgttcgtgactctgtaccagaggctccccagcaacgcgcagctccccagggagctccacccggtgttcttcctcttcatcgccgcgcccagtgtcgcgtccgtcggctgggcaaggctgtgcggcgacttcaactacgccgccaagatcttatacttcacctccctcttcctctacat

SEQ ID NO: 11846 - DNA, 893 bp, Zea mays
  Peptide Sequence Number=SeqID_55221
ggggaaaaaattgcccaaccggttggtccggggtcctccctgcggaacgtgggctccggaattgggagaattcggggggcaaccccgcggacgccgtcccgggagaaattggctgctgagaacaaaaaacccgcaggctggcggaaaaaaagggttgccttggaggccgagaagatggacctccggcaccagctggtggaggaaaggaaggaggcgaaccaggccattgctgaggcgcaggctgcgcaggcggaggccaaagtggcgcgggcggagggaagtctcgccagccagcgcgccgaggagtgggaggtgaggttcaatgccctgcgcggccgcgtggacaaggccgaggactctacgcgctcgaaggttgagcggacgctcgcccagttcgtgaactcgtaccgcgagctgggcgcgcgtactgctgacttcgaggaggagttgctggtactcccgaccatcgtcgagggtttcatgtcctttgcctccctcgtcacctgcgagggggccattaatgcgttgtctcgcgaaggctgcagacactacgaggttttcgaccagtcagacgagagctttgagcgcgagatcttcaaggccgaagaccctattgtgaagcagtcagcgggggcactttttgataggatgtgggggcacatgatggagcgtgccgaggacgtcgaggaccttggaggtctggtcggcgcgccgcccgaggctgcggagggcaatccggtgctgcccttggatgccggtgaaggcccctcggccgtgcccgtgcctgctatggccggcgaagacccagcgtcggcccctgagccgacggtcgaaggcgccccggaggcggtggcggagccgacagtcggagacccctcttcgcgccctcgcag

SEQ ID NO: 11847 - DNA, 459 bp, Zea mays
  Peptide Sequence Number=SeqID_55222
atgaacaagaacacaagagacacaagatttatcccgaggttcggtcacaccaccaaggtgccctacttcctcgttgaggcgcccacaaagagccgggtctctttcaaccctaatcctccctttgccgactacaaaggtcaagctcacacactaatctttgctcaaacgagcggataccggttgaacctctctggaccccggttgaacttgccctggaccctggttgaacctgcctggaccccggttgaacttgaagttcatctggagttgagaaagctcaactcagctgaagttcagctcagctgcagctcaagaagctcaactcagctgaagttcagttcagctgcagttgaagaagttcagctgcttttcaacaagaacactctaggtttctcaaacctaaccgcggaccttcggcgacgaagcatggtcccaacagtagccccttcacggtgctag

SEQ ID NO: 11848 - DNA, 576 bp, Zea mays
  Peptide Sequence Number=SeqID_55223
atgtctacgtctcgtatagctcgtggcttgaggattttcccttacggtcgtaatattgctgctgttgtgtcggcagtgatgaacaaggaccgtcaggatgctgcgcagaaccgccgggcggtcatcaggatcgcggatccgaggcgtgaggcgaagaaggcgcgggggagcgcgaaggctgcggcccccggtagcagccagccgatgccggctgcgaaaccggccgcgcccagatccggcaagtcgtcggcgagcgcgaaggctgccggcgccggcgggaccaagcctcccccggtcgaggctgcgaaagtacgggagctgccctcgccgggaaaacgtgttgctggcttcggcatgaatatcaacgtggaggactattttgttgggtcgggcgagagacagatggttgttgtcccgcctttggtggtgaccacttcgccatcgacggtggtaagggcgaaggggaccgcgcaggacccgtgggccaccttctgcgcaagcggtgagatcctgacagaagctgccgctaaggacgtggcgggcaccatgtcccagcggctgagggatacatcgtag

SEQ ID NO: 11849 - DNA, 1107 bp, Zea mays
  Peptide Sequence Number=SeqID_55224
atggaggacttgagtacaatgaccccgaccatcgtgattggaaaaatcgcggccttcgagatgtcgcgaaaaatgggtcgtggagaagagccaacttcctcaaggccatatgcttttgcatgtgatgaaaggaagggtaaaaagaaggctcccactccaagttcctcaagtgaagaagaggaggaagaagaaagtgatgatgatgaagataatcaaccatctaaatcatcctccgaggacgaagaaacaatccgacgcgtcggaaaggtcgaagatcttctctttaacattgacaggaaaaggcaaaggaagagaggatgcttcgcatgtggggagaagggccacttcagggacaactgtccaaatatggccgaacccaaaaaggggaggagcaaaggcaaggcactaacaagtgttagaacttgggatgattcttcaagtgaagatgaacctccaaggacgcgcagccaccggtcctcatcacgctcatcacggtcatcacacaattgccttatagcaagagaaaaatttgaaacttttgcaaacttaaatagtgagctatcaactaaaattgagctattagagtctagtgttccatccactgctaccgatgatggccttattaaaaagaatgaaaaacttaaggctaagttagctagctcccaagaagctattgaaaatttgctagagaaaatggaaattcttagcatacacaataatgagctaactactaagctagaaaacattggtagcaccccagcaacatctttagttgaaatacctgaaattattaagaaagatgcttctacttcttgctttgatttaattgatgattctaacccctgcaaccaagttcttgttgagaatattgttgtagaaacatgttcggatgacgttgcaaaggaaaatgaacaattaaagcaagaagtggctcgccttggcaaggctttgtatgacaagaaaggcaaagccaaacaaatccgacctacacaggataacaccactgcgggagtgaacaagcctatggagggcgaaaccgtgatttgtaggttatgccacaaggaaggtcataagtataaagcaatgcaaggcgatgaccggggataa

SEQ ID NO: 11850 - DNA, 528 bp, Zea mays
  Peptide Sequence Number=SeqID_55225
atgcaagatgctgcacgacgtgcactttctcagtattgctcgttgttcagcggggtagctgatgaccttgacctgaagtactacccccatcgttcgaccggcagcgctgggggtgtgattgtctcacctgttggtgagggcaatcccaggctgagcagcatggtcaacctggccgccgtgctcaacaccgagctggaccacgcccttgacgagttgggcaagtcttgcagttttgattttcattttggtgatgggcacttcgaagaaatcgacgctctgtcatcagcttatgctttagatatcagcattttgtcctttggaattaaggattcattgggtgcaccaaaggaagggagcggcggcgacagcgacgacgagggcgacgacggcggtggcggtgacgacagcgacgacggcaacgacggcagcaagggcagcggtggaggcagcggcggcagcagtggcaacgacgacggcaagggcggcagcatcgacggcaaggccagtggcaaagcgccactagcttaa

SEQ ID NO: 11851 - DNA, 372 bp, Zea mays
  Peptide Sequence Number=SeqID_55226
atgctggtagactacacatcggtactcgatggaccaaatgtgtcgatcgaaagctcgacgcagcaaggtgtcgagagcgtcgtggaagtgacacccgcgagcagtgtcacgagtgatgggtctagagatccaccccttcgactccggctcctccaagagctccgtgccgtggctcgaactgccaccggcgtcggcatcgtctccgtctccgtcaagggggcatctctggctgaggtgcaggggaaggcagcctcccagactccacctcctgttgaggcgagagagaggagtcctgctgctcctgctcctgctcctggcatcggcgctcctgctcctcatgcaggcgacgatgcagtctctccaggtggctag

SEQ ID NO: 11852 - DNA, 2115 bp, Zea mays
  Peptide Sequence Number=SeqID_55227
atggaagcgcagaccgactccgcccccggcggcggcgacgatcttgcgatcatgcgcgagcagtgccggacactggaggagtccatttccacccgccgtgaggcgcagctcgacctcatcggctccctgcagcacctcgtccccgacctggttccatccctcgaacaatcgctccgcctcatcgccgccttcaacggccgccccttcgtccccacgctgtaccccaacgccagcgtccacgtgcagaaccccaaccttaagccccagcaccgccgcgccctccccggcccggcccgctccacacgcctcaagacctcgccggggtcctccccagcttccgccgccgcccggtgtgcgggaaccagtggtggcatccacgccgttcgtaccatggttgccgtctgtctcctcgagctcgtcccctttgccgagatcgatgccgccgcgctcgcgcgccgcctgcagtccgaaacgtcgtctgccagcgaggccgagcgcgctgctctggccgacctcgccgcggagcttgggggctccgcccccgctgctgttgctcttgccctccgtcgcatcgcagaagacagcggcggcttgcagatcgaggaggccttcattgggggcaagcagatgactatggtctgggccatcgaccggagcaaactcctcaaagagctaccagaatccgcttctgtgctccaaatccaacctccaccaactccacaggtggttcccctcgatactgatactaacatcataccaaggcctccgccactgcagcagtcggatatgtggggtaacccaatgccaccgatgttcccacgtcccaggggcatgacaatgccaagaattccgccaggtttgatgccgctgcagcgaccattcatggcaccaggggcagttatcccaatgggtggtggtccggtgccgagttccacacagctgaagctgaggacagaggaagatgatcttaaggaccttgaactgctgctaaacaagaagacgtatagagagaagcagaatacaaagactggagaggagctgctggatctcattcaccggcctacagctaaggagactgcagtcgctgcaaagtttaaaacaaagggtggctcccagctgaaggaatattgtaccaacttaactaaagaagattgccgacgccaaacaggttcttttgtggcctgtgataaggtccactttcggcgtattatagctccacatactgatacaaatctaggagattgttctttcctagacacatgccgtcacacaaagacttgcaagtatgtccactacgagcttgatcaaacgccagatgtacctcaaatgatggcaggtgccattgcaccacctaggcaaataaagccccagagagctgaatattgttcagaaatagagcttggagaatcgcaatggataaactgtgacattcggaacttcaggatggacatcttaggacaatttggagtaattatggctgaccccccttgggatattcatatggagctaccatatggcacaatggctgatgatgaaatgaggacgcttaatgttccaactctgcaaactgatggtttgatttttttatgggtcactggtcgtgccatggagcttgggcgagaatgtctggagctctggggttacaagcgtgttgaagaaattatttgggtgaagaccaatcaacttcaacgtatcattcgaactggtcgcactggccattggttgaatcacagcaaagaacattgtcttgttggaataaaaggaaaccctttagtgaacaggaacatagataccgatgttattgttgctgaagtccgtgaaacaagcagaaaacctgatgagatgtacgcaatgctagaacgaattagcccaaggacaaggaagttggaactgtttgcaaggatgcataatacacaagctggatggctttcactgggtaaccaattaaatggagtaaggcttgttgatcaagggttgagagcaaggtacaaagctgcttaccctgatgttgaggtccagccaccatcacctcccaggacaagcacgccaatggatgttgaccaaagtagttcacagaaggttgctgcgctagatggtggcgagaggcccgcctga

SEQ ID NO: 11853 - DNA, 312 bp, Zea mays
  Peptide Sequence Number=SeqID_55228
atggccggctcggcccgccccgcccggccgcgccctggccggctcggccagcccccggccgtgccccccgccggcgcgccccctggccgcccagccgtccgcccgcccggccccctggccgcctggccgccctggccgaggatccggggtgtagttcgcttcgccgtcgtgccgtcaatggggctcggtgtatgcggctcgctctgccaaggtggcaatgagattgatggttctgattatgattatggtattggcgaagatgaagctgtggaaggagacttccaggagttccaagactacgacgagttctag

SEQ ID NO: 11854 - DNA, 717 bp, Zea mays
  Peptide Sequence Number=SeqID_55229
atgcagccagcgcagaggggcatgggcggttccctgattctctatctcgcatgcaaggtgggcgcgcagagcaacgccatggctgctgccacggccggtggcgccatggacacgcggtggggctgctgctcgccggagctggcatcagcggccatggagcggcaccgacggctcgccggctgggaagtagcgggcaaagcgacgccgagcacatgcccacagtggcgcggccggacgcgacatgggatgggcgcgacactgcaggccgttgccggcacggctgcaacacaaggagggggcgcgaccaagggagcgcaaagacgggcgtgggagagaggaagaaggagaggggcttacctgctcatggtgaccgttgacgttgggacgagcatggcacatgcggaactctgggcgcaggctcctagtgcagacggctgggcggcgggtcgagcttggcgcggttgctgtgcacgtcgaggaagagaggaggcggggctgaactatctagacgaagaaagtggaggacgtggtgttgagtggttccggctcttgggggaagatcaacagggcgctggtgggcccgcggcggctgggcggttctcccacacacgaccgttgcgtgacgagatgacgcgaggtgagattgatggagggggtggacttagacagagggtagtcaagggaataacaaagggtcgacgagatagccggggatag

SEQ ID NO: 11855 - DNA, 525 bp, Zea mays
  Peptide Sequence Number=SeqID_55230
atgtcaatgtcaatgtcccaatggatctatgatcacagaaagtacgaactgcagcgtggtggggacgttgagaacccgaacgtcaccggcagcaacacgctcgcggacgaagtgcaggtcgatctccacgtgcttcgtgcgctgatgctgcacgggattggtggagagatagaccgcgctgacattgtcgcagtagacgagggtggcgcgctaaaggggactgtggagctcgtggaggagctgacgcagccaggaggcctctgccacgctgttggccacggtgcggtactcggcctcagcgctggagcgagagacgacgggctgccgtttggcggcccaagagacgaggaggtcgtagtcgagggagtcgtggaggtagcgcaggatccgcttgagagcggtgaggtggggctcccgcggagacgtcgcgtcggcgaccggaggcccgtcgtcctcagagagctttgcctgagtgtcaacaggcgtggagcagggcttgcagtcagacatgccagcccgctctag

SEQ ID NO: 11856 - DNA, 288 bp, Zea mays
  Peptide Sequence Number=SeqID_55231
atggcgccaccggccgtggcagcaggcatggcattgctctgcgcgccctgcaccctggccgaaaacgagcgccggcgagcccaagcagtcgcgccccggctgtccccaagcgaccttgatcggcaaccgttttggcgtgtgggactcgagcggtttctcgagtgcctctccgtaaggactggttcgttggatgaccacccgagaaaacagtgcaaccatgagggtggtaaagaaggtgtcgaagcggatctccaggagttccaggacgtcgacgagttcgaggattag

SEQ ID NO: 11857 - DNA, 285 bp, Zea mays
  Peptide Sequence Number=SeqID_55232
atggctcaccttgggtcggctctggtgaccccagtgatgtggagctgctcctcagaatggcctccgctaagctccgtcggcgcgaggcggttgacggctttgacgacgacagcgggcaaggcaactgcgatggtgcggggcgggtcacacacgggggaaagggggctttatgcacctgagctctggtcatggcgggtgggtgggcgacgtgcatttggggaggggaggggatgtcaggtggggtcgggggacgtggccaggagggttctggcggggtggggttga

SEQ ID NO: 11858 - DNA, 774 bp, Zea mays
  Peptide Sequence Number=SeqID_55233
atggagtgggcgtcggcggcgtacacggccgcggcgctggtgtgcgcggcggcggcgtgcgtggtcgcgctcgcgcacatctaccgccacctcctccactacgccgagccaatctaccagcggttcatcgtccgcatcatattcatggtcccggtaaatgctcaacgctcgccgctcatacctaaccctcgcggcggcagatctggcgccgagcttttccgtactggctatgatgcttgggtcatctacaattttctctcactctgcttggcatgggtgggaggtcctggtgctgtggtgggcgtcctggttttccttgctgcaaaatctcgatttatcaagaatgctgataaggctgctgatctccagaactttgtgttgtgtgttgagatgctaatagcagccgttgggcacttatttgccttcccctacaaggaatatacaggcaagtggggcccacctgttatccactctgcacgtttcttccttgcattaaaagaaagagagccgcatggtccccaatcggtgcgcctggtgctgaggccaccgggtccgatgccgatgagcctgtggccaccgtgcttgaggccagtgagcctgcagctgaagtatctgagtttgttgcgcttgaggccaccatgcccgaggcaagcgagcctgcggctgtctgatgccgtggagtctgaggcttgctcgtgcactcttgtatctgctcgtcccaccttgttccccccaatttctggttacgagctcgtcccagatatggagggatag

SEQ ID NO: 11859 - DNA, 2148 bp, Zea mays
  Peptide Sequence Number=SeqID_55234
atgactcttagaattctcattgcagctgacaatgctcagaatgcaaacggccaggagttgctatccactcttttgaagaacctaggatctgttgccaaatcactggagccaaaagaactatgtaaattcctggaggcataccaaagcctgcaaaatggattgaatgctggaacctctggaatagctaatggtgcagaagaggctgcaggaccatctaactctaagttgccttctgtgaatgatagtcattatggacaggcatcatcatctgttgtgccagtacaatcgaaggctaccacggtggtaactccagagcctgcatcatgcaagcttaaagattttgatctgaatgacacttgcattgatatggaaggctttgaggatgggcaagaaggttcacctacacctgcctttaagacagctgactctcctaattgtgcatcatggatgcagcaagattctactcaaagcccaccacagactagtggcaactcagattcaacatcaacacaatcattgtcaagctcaaatggagacactcagtgccgaactgataagattgtcttcaagcttttcgataaagttcccagtgacttacctccagttttgcggtcgcagattcttggttggttgtcgagtagcccatctgatatagaaagccatattagtcctggctgtattattctaactgtatatgttcggttagttgagtctgcatggcaagagctttctgagaatatgagcctgctcctgggtaagcttttgaatagctccactgacgacttttgggcatctggcttggtatttgtgatggttcggcaccacttagcttttatgctcaatggtcaaattatgttggacaggcctctggcacccagttctcatcattactgcaagattttatgtgtcagacctgttgctgcaccttattctgcaacaataaatttcagggtagaaggttttaacctactcagtacttcctcaaggctaatttgttcttttgaaggacactgcatattccatgaagacacggattctggagcagagaatgttgagtacaaggatagggacatcgaatgcctcagtttttgttgttctgttcctggtccaagaggaagaggatttatagaggtcgaagatagtggttttagcaatggcttcttccccttcataattgctgagaaggatgtatgcgctgaggtttctgagctggagagcatatttgagtcatccagtaatgaacatgcaaatgccagggaccaagctctggagtttctaaatgagctgggttggcttcttcatagagcgaacagaatgtctaaagaggatgaaactgacacatctctagctccctttaacatgtggagattcagaaatctcggtgtatttgccatggagcgggagtggtgtgccgtgatcaaaatgctgttagatttcttatttattggccttgttgatgtgggatctcggtctgcagaagagatggtgctttcagaaaatctgttgcatgctgctgtacggaggaagtctgttaacatggttagatttctgctgagatacaaaccaaataaaaactcgaagggaactgcacaggcatacttatttagacctgatgctctgggcccttcaaagattacccccctccatatagcagctgccactagtgatgcagaggatgtgttggacgcgcttacccatgatcctggactgattggaattagtgcttggagcaatgcacgggacgaaacaggttttaccccagaagactatgctcggcagagaggcaatggcgcttacctgaatctggtccaaaagaagattgataagcatcttggcgaaggccacgttgtcctcggtgttccgagcagtatatgccctgtaataaccgatggcgttaagcctggcgatgttagcctcgagatatgcagggcaatgtctgcatcagtgccaggttgcctcctctgcagccgtcaggcacggatgcatccaagttctacggcaaggaccttcctttataggccagcaatgttaactgtgatgggagtcgctgtggtttgtgtctgcgtgggcatactcctccacacctttcccagggtttatgccgcgcccacattcagatgggagctgctggagcgtggacccatgtaa

SEQ ID NO: 11860 - DNA, 396 bp, Zea mays
  Peptide Sequence Number=SeqID_55235
atgaggatagcttcatctagggtttgggtgctcggtttggcacagcatgaaaggaagagaaggggtgggcgtacctgttgggtgctcgtcgccggtcgaggtcccgaagatagatacctgggaatctggcggcgggcgtcggcgtcggcggccggcgagcagccgcctagtcgtcgccccgagagacagagagcgcacgcgaggggcacgggagaaccacgagaagacagagtacgcgaccgggaaggacgggagaagaaaaggccacagggcgtgccaataatttatttgcttttaacggtgtgcttttcgggtttttcagttccatccgaaaagccactaaaagcaggtccaggggtgctttcagatttgcactacgagaaagtcggcttttag

SEQ ID NO: 11861 - DNA, 1762 bp, Zea mays
  Peptide Sequence Number=SeqID_55236
caagcgcacctaccctacccgccgccgccgaaggcgaaggcctagctcccggtccggcgcgatggctgccgcggcccgccgcggccccggggcgctcctcctcgtggcgctcctcctgctggcgctggtcgtctccgggcactgcctggacgcgcaccaccgcgggctgaagcgccgccggcggaagcacgagattcactctccgatcaagacggtggtggtcgtggtgatggagaaccgcagcttcgaccacatcctcggctggctccgccgcacccgccccgacatcgacggcctcacgggccgcgagtccaaccgcctcaacgcctctgacccctcctccccggatatcttcgtcacggacgaggccggctacgtcgactcagaccccggccacggtttcgaggacatccgggagcagatcttcggctccgccgacacctccgcggtgccgccgcccatgtccggcttcgcccagaacgcgcgcggcatgggcctcggcatgccgcataacgtcatgagcgggttcaagcccgacgccgtcccggtatacgcctccctcgccgacgagttcgccgtcttcgaccgctggttcgcctccgtgcccacctccacgcagcccaaccgcctgttcgtccactcggcgacctcccacggcctcaccttcaacgcccgcaaggacctcatccatggtttcccgcagaagaccatctttgacagtctcgaggagaacggcctgtcgtttggcatatactaccagaacatcccggccacgctcttctaccagagcctccgccgcctcaagcacctcgtcaagttccaccagtacaccctcaagttcaagctgcacgccaagttggggaagctgccaaactatgcggtgattgagcagagatacttcgattgcgagatgttcccagcaaacgatgaccatccgtcgcatgatgtggcgagggggcagaggttcgtgaaagaggtgtatgagacactaagggccagtccgcagtggaacgagactgccctgatcatcacatatgatgagcatggtggattctatgaccatgtacctacgccggtcgttggagtgccccagcctgatggaatagttgggcctgatccatactacttcaagttcgaacggcttggggtgcgcgttcccacctttctcatctcaccttggatcgacaagggcactgaggatgctctaattttcctagaagctgttgatgacttcctccatgtggagatatccttgatccataaaccaaacggtccacaggatacttcacaatatgagcattcgtccattcctgcaacagtaaagaagctattcaatttacattctaactttctgacaaagagagacgcatgggctgggacctttgagaactactttaaaatccggagaacgccaagaacagactgtcctgagaagctcccagaggtgacaaagtcactgcgaccatttggtcccaaggaagattcgtctctctcagagttccaagtggagttgattcaacttgcctcgcagcttaacggcgaccatgtactgaacacgtacccagatattggcaggaccatgactgtcggggaagcgaaccgctacgcagaggatgctgtcgccagattcctggaagctggtcggattgctttgagagctggtgcgaatgaatctgctttggtgacgatgaggcccgctctcacaagcagggcctcaatgtcctctgacattggcattctcatgtctacaagcatggcctga

SEQ ID NO: 11862 - DNA, 63 bp, Zea mays
  Peptide Sequence Number=SeqID_55237
atggccaactggggctcactacacgacacccacctcaagaccaatcgaaggactcgagagtag

SEQ ID NO: 11863 - DNA, 792 bp, Zea mays
  Peptide Sequence Number=SeqID_55238
atgggaaaagggcatgcttttactaaacgatgttttcaaaaagtgtatgatgaagggtattcaccctcatcaccttgtgagtgggatgatcagggactccctggtttaggggagggcctaagggttatgaaggctggggagcaccgggaggataaggagggggaatgttttgtccagtttgggcatggcggtggtctgattccttccggtataaccgttaagacccttattttcctataccagatggaaggctctttggtcattaggacatcctactgctcagaggtggaaggatttcctcatctcttgaggagttgcacgcttcgcatggggatccgcaagaagccggagtacgtctggaaagaataccacgagaatggaactgagaagtgctctatggcagtctacctgggagaaagccgaaactacccgaaccaccctcctttccaagtcaccttcaccggacaccgcttcccagacacttgccaaaatgtcacccaaaaagccctccgacagctatgccaaaactacagcagagaggtctttgaaaccccccttcgttacttcccacccagcaacaaaaatacccctacctggaggaaaatacttaaggccctgtcaggaagagatcatactgaggatgaccccaccatcgtctacatggccggatatctccacactctcgataaccactatgatgacctttcctcccactgcacccacctaaactcccaggtggaaagcttagagcaacaagtcaaggaacttaaaaaggagaaggcgtccctctaa

SEQ ID NO: 11864 - DNA, 1011 bp, Zea mays
  Peptide Sequence Number=SeqID_55239
atggatgcagatagacagttcctggtggttcagtttcactggtttcttggttggagggctgctgctgctaccgccaccgcctttaatggatgcaggctcgacgggccgaggaagggatctgcgtttcaccatatgcagttatcggggatcccgcgtcaggtgcaggataggcacaagagaatagcggcatcgaaatacattgtgatgatgaagaggagggatctgagaatgcagaacataacaacaacttggaaagcccaaaggaagccgatgccagtgctgaatcacgagaagcaaatgaagactggtagcagcagctctacagaagcaatcaaagccttagcgggcttgatggaaacaaacatggactttgaagaactaaaagatttgaatggaagatcagaagaattggaagaagataataatggcaacatggaaaagctggtagagctcttcttggataaggggttgttggatgaactgaagcccataaaagttgagtcccagcggcgggtacgtgcaacacttagcatcattgacaaaatgatgagctctcggatagtgaagggtggtaatggtgcaaatgatattcatggaaacgatggagcacaacttacttctattgaagaggaaggaaggactgcagaagcgagtgatgacggagatccagctgaggttgagtcttgtgttgcagagaaggtggaacttggacatgagacaactcatgattctacaggtactgctttggatggaggcaatgatgggtcctattttccttggagggaggagcttgagagcttggtttgtggaggtgtgccaatggctcttagaggagagatatggcaagcatttgtgggtgttggtgctcgaaggattcttgggtactacaacaaattgcttgatgacaggactgagacattggatgaaaaggatcttgtggacccagtggtcaagaacagggaagtgcacccagaaaagttacctagcttgagaaatggaaaggacatgtag

SEQ ID NO: 11865 - DNA, 141 bp, Zea mays
  Peptide Sequence Number=SeqID_55240
atggagagtcatgatctctgggcagaaagggaatcacgacttgtgggtggcaatgagaatgatggttttggtattgactctggtaatggtaagtggtattctttccgtttggaaaggaaaaatcatatagaagagttgtag

SEQ ID NO: 11866 - DNA, 114 bp, Zea mays
  Peptide Sequence Number=SeqID_55241
atggggattggttgtctacgggataaaaatttgaataaggattatggtgtggtaccgtacctccttgttatggttgatggtgtgactagaccttcgtccctgccaccgggatag

SEQ ID NO: 11867 - DNA, 90 bp, Zea mays
  Peptide Sequence Number=SeqID_55242
atggggattggttgtctacaggataaaaatttgaataaggattatggtgtggtaccgtacctccttgttatggttgatggtgtgacttga

SEQ ID NO: 11868 - DNA, 666 bp, Zea mays
  Peptide Sequence Number=SeqID_55243
atggccaccaatggcgccgacctttacagggaagtgatggggaaaggaaacggaaggaatgaacgctccttaatacacgaagaagaacggacgcggcttcatggtgcggtggacgttgggctcaatgcaggcgcggtcgctcggctggtgcagtggcgcaggtcggtccgcagttgggctggggctctggtgagcgcgcgtccgggcgtcgggctcgcgggtgcagtcgggcgcgctccagtgcgcgcgcgcgagcgggactcagctgaggcagtcatgcaagatgccgcacggcgtgcgctttcacactactgctcagtgctcgacggggtagctgatggtctcaacctgaagtactacccccgccgtccatctggcagcataggaggcgtgattgtctcacctgttggcgaggacaatcctaggttgagcagcacagtcaacctagccgccgtgctaaacacggagctggaccatgcgctagacgagctgagtagggctcatgctgagatcgcccagctgcaggcagagcgcgaggagcgtcgtcacctagaggatggctcccccgctcccgtcaggactcagcacccgtaccgcttacctcggtgtggacaccagtcttatggcaaccccgactgcaggaccaagataaatttagaaccatag

SEQ ID NO: 11869 - DNA, 423 bp, Zea mays
  Peptide Sequence Number=SeqID_55244
atggcgccgctcggcccggcgcggccgaccacgtcgtgcgcgcccaccgagccccctccccgcgtggcacgcggcctgcccgcggcggtgcccggcgcagcctcctcgcgcggcctgcccgtggtggcccgccctcgacgcgtggcctcggcgcggccgtcccgacgcggccgtcccggcgtgcccgccctggctcggcgccccccacctcctcctcatgcccgcgcgcccacgaggtcccctgctccggcagtggcctggcccagcctcggcggccccgacgcctcgcgcccgcccgccccggcgcgttcccccgcccccatccccttggccggcgtggtggcgcggtgccctgcgcgtgcgcccgcccccggcgtgctcgcccacccggcgcggcgtccccgtccccggccgcgacgttag

SEQ ID NO: 11870 - DNA, 315 bp, Zea mays
  Peptide Sequence Number=SeqID_55245
atggagagtcatgatctccgggcagaaaaggaatcacggcttgtgggtggcaatgagaatgatgattttggtattgagtctggtaatggtaagtggtattctttccatttggaaagggttgtcagcattgcaactactgctcaggagaagatgaagccatggaaggagacttccaagagttccaagattacgacgagttctaggtgcgggttagcggcaacccccagtcggctgcctgtgaaggccgcgtgtatctatgtttttttcccgcactttgattattgtaaagactatgtggatgtctcagacatatga

SEQ ID NO: 11871 - DNA, 516 bp, Zea mays
  Peptide Sequence Number=SeqID_55246
atggccggaatcgctcggtccacgcgcgcaggcaggtgttctcgtcagcggcgagtgtaccggccaaaccacggcgatctggttcaatccaagggcacggtgagcttcctggggctccgattccttgctcggggagcttcactgagttgtgcacactcgtctctgagggttggatggggctggggcaagctggactggccggtctacggcggcagtggctcgggtggccacggacacgctgcgcacgggcaaacggcggtgaactgggctccggtgaggcttgagcgtgcgaggaagagtgtaaccgacgcttgggagggctttataggcgcgggcgcgggacaagacgccggctggccgttggcgcgacgcggggggcgcgcgggcgtgctctggcaagctcagggcgcgtcgaacacgtggagcttacaatctgcccgtgttccacagctcacccaagtcgcaaacgtgcgaatcttggcaaaaatccggcgcgagtcttttcctggcacctag

SEQ ID NO: 11872 - DNA, 171 bp, Zea mays
  Peptide Sequence Number=SeqID_55247
atggagggggggctggtgttgccggcgatgatggcggcggtgggcgcgctgcaaaggggggcgtggggtggtgttagtgtgtatgggggtggagcacgcatgcagggggcatggggcttcaacagcaatgacttcacgactttccaaggcagctacacgggcttgagctga

SEQ ID NO: 11873 - DNA, 1101 bp, Zea mays
  Peptide Sequence Number=SeqID_55248
atgtgtgcattggaagagcagcagctgcttgaggacgaccccacagtcgtgtacctcactacatacctgctcaccctggatgcgcagtatgatttcttggctcggcaccaccgtcagatgattgcccgagcagaagatgtagagaagtgcaaccgtcagctccatgtggatctcaccgcagctcaagcccgtgcaactgccttggaaagtcgtgaagtcattgttgttgaagccctgaagcaagccaaggacgagcatgtccagaagttgatggaggcctacttggtaacccataaccaatgtatagccctgcggatccaagagcccgcctcatccaacccagttcaatctgtgagagcagaagatccccagattcttgaaggtcacccggtctctatcagaggagagaagaaggtttgggaactaccggaaggagccatagtcttggaaggaattccagtcttccctcaggctatgaataagcaagagctccccgagttctcccaagaccccccgccagagttgtttgagcccctcaccatgaagaagattccagcaccgtcccaggccgacgaaaatagtggtcctacatcgtcgtccccagccttctctggctcatttgaaaccgttctcaccacgccgcgccgccgcacgccgcgccgccgcacgccgcccccgcccacgacgctgccccacagcagcgcccaaggtcccgcgcccctcgccgcccaaggtaccgcgccgcccggcccccacgacgccgccgcgcagcccggcccccacgacgccgcccgccaacgccgccgcgcgccgagccccacgccgcccaaggtcccgcgccgctcggcccccacgacgccgccgcgcagcccggcccccacgacgtcgcccgcaagctcccgcgcccctcgccgccgcgcagagctcctgcgcccccacgacgccgcctgcacgccgcccctgcagccgcgcccctcgccgcccgcccctgcacgccgcgcccctcgcccctgcacgcctgccgagccccacgcccgccccgccgagccccacgtcgccgcacgaggcccgcgcgccctcgcccgcccgcgaagaagatag

SEQ ID NO: 11874 - DNA, 159 bp, Zea mays
  Peptide Sequence Number=SeqID_55249
atgaagtggaaaatcagcgtggcaagaaaattaaagcactacaatctgattgtggagcggaaattaactaacgatgaaataaagggaggatggggaagcctggcccatcactcctcatgctcctctccagctgaggcaaggtcccactcgactgtctag

SEQ ID NO: 11875 - DNA, 1677 bp, Zea mays
  Peptide Sequence Number=SeqID_55250
atgcaggtgctctgcgacgtctgcggcagcgcgccggccgccgtgctccgctgcactggcgaggccgcgctctgctccgcctgcgaccgccgcgtccaccgcgctgacaagcgccgccgcatcccgctcgtccatccctgcggcgacgactccaccgccgccgcgccgctctgcgacgtctgcaaggagtggaggggcctcgtgttctgcatggaggatcgcgccatcctgtgccccgattgcgacgaccccatccacagcgcctacgacctcaccgccaagcacacccgcttcctcctcgtcggggccaagctctccgccacgctcgtcgaccaggcgcccccctcccctgacgacgatgatgacgacgacgacgtcgccaagcccgacgctgcccccgccgcctgcgcggccaaggcctatcgcgaagaagctcttccccatagtcgcaaccatgacaaacccgttgttctcaaagatctacgatgggtaggggcgaatctggcggccacagaggagacagagtgggcgacgcgtggtcacggaggagacggcccttgcagcggcaccatggaggcggcgcacagtcgaaaaggtttgtgtgggaaccgacggagggacgtcgcggcgatcgaaagagccagcagagatgcgcgctgcaacgacaggacgagggagagagagaggcagagggaggaggggtactacctcactgatgagcccgtggtgcacttcgtttggcagccgaaccaagagtcatcggtactcgtcatgccgcgctcgttcgacgactactatatcgagaattgtggcgttatcttggcgccggaggtgacgcagaggaggattgacaacagtgaccagttcgtcatcctcgccaccgtcagggctacagacagaaacagacatgagacatgcaatgcaatccccacaaaattcaggctacagacatcagggttgtccggccaccgggcgaagcggcagtccgacggcgcagccacggtgacatcgcccgcggcgaagcgcgcccgcgacccgtccgcgcccgcgttccccacgaacaaggaagtccccgacatgccccccaagacccgtatcttctgcgatatcctggcctcccgcgccgctttctttcgctgggcgggacaccggcacctcggccacgagcactcgccctactcgtggaacctcttcgttgacatcctcggtaaaaatcgcctcttcgagcccatgtgggacactgtcaaatccatgcactcgcagcagctgctctcgctcgccactttcgcctccgtattctcctctctggcggcgacccccggcggttccccgctgaaggcgttcatggacatgccgcgctacggcatgacccgcgacacggcagcgctcaactcgctgctctccgcgctctgccgtgccaaccgcttcgacgacgcccgcgccgcgatccctgtagccgcgctgaggctggcacgcgcccggatgccgactcctacgccatcctcctcgagggctgcgagtctgcctccgacctgcgggttgcgcgcgaggtgttcgacgaaatggtgcgcgccattggctttgatcctgacaacatgcctgcctatgactccttcctcactacgctggtttcaagcgactcctccacggcgccaccagaagcaatggggtacctaa

SEQ ID NO: 11876 - DNA, 303 bp, Zea mays
  Peptide Sequence Number=SeqID_55251
atgtgttcgttcaaaatcccctcaagatcggatgaggaggaagggctcaaagccagatgccactaccggagcgctaaggtggacaacgttgtctactgtcttgaggatgacgtctatgtcaagctgcgtcagatgggcggcgccttcccgcgacggggcggcgccggacttgtgcgccaggaagagcttcttgagcagcctgagcatcatgaggaggcccatcctccgccggcggacgacggcgtgcttgcgcgtctccaaggcgccgtcgagccagggctccctcacggcagacaattataa

SEQ ID NO: 11877 - DNA, 771 bp, Zea mays
  Peptide Sequence Number=SeqID_55252
atggtccttcttccccaccacgtcgcgcgagtgacagagcccggtagtcgacggcgagctcgccgctgcgacggcgaacaacccaagccgtacccagctcatgccaaaacaaacctctcacgcttcctaatcacgctgcagagaggggaatggaacgtaccgccgcagagggaggtgaggacggggctggcgcacatggtccgaaggtcctccacgcgatgggagcgtcgagggtccctgacgccgagataccaaggagctcccgccgccgcaccagaggctcatgccgcgcccggactccgtagcggccacacgaaccgagcacgggtgtggcaaatgctgtggtcgcggtgcttgttctctctcttctctttctctcggcggctgccgcgatgggttctaactatggcggcggaggttagggctctatgggaggggaggcaaggtctctggaggcggacgcacggatgcgcacaaggaggaaggaacggctgccgctatatatctagggaatacccggtcgccggctccgatcttcgcgcgcgccagctgcgggatgcgttcggccaggttggggatggtgctgacgaggccggcccacccgtcagtgaggaggtgaggcgagcgtgctcgagagaccgcccggtgggtcagtgtgccggtgaacgaacagatgtgagcgcgagtgtgactggccagtgggcccatttagccgcgacacggcgtggacgcaaggaacagacgcggtgcgggccccgctggtcggcgtaa

SEQ ID NO: 11878 - DNA, 132 bp, Zea mays
  Peptide Sequence Number=SeqID_55253
atgacgaccgacaggcctctggaactcctacacatggacctattcggcctgatagcttacataagcatcggcgggagaaaaatctcatacccaagaaacattaaaggaattcttgagacaggctcaaaatga

SEQ ID NO: 11879 - DNA, 864 bp, Zea mays
  Peptide Sequence Number=SeqID_55254
atgtcttctcgctcccttatgcatcgcgtctttccaccttccaagcccccgaatgggggatacccaccgtcttttcgcctcatcgttgtaggaacgcaactccgtgggagttggtacctttcagccatcgttcggcttcaaggattttcatcacatagcccggttgttcccctccgctggtggtcacccaagacggtggcctccagctcctggatggggagaggcaagccgggctgtgatcccgatcccgccctcagcaccgagggtgttcgtcatcctcgctggggcggggaacgaggcgagccggggctctacctcctgcgcgggtcggtgggccacctcttcttccagcttctgttggtggcaatcgccctccagccctgcggcggagacgtcctccagccatgccggggaaggcgaactgttgctacccagctaggatgcaacattccgccctctccctcgcattcgcggcgaggacgacagcgaggacctacaggtgcgcttgggagcggcccgctctttggctttaatagctggttcgcgtcccttgagcgggaccgcgaacgagagccctccggtggccgcgtccacccgggaccaaggctgctgctgcagaggtcgctggcaggtcccccgacgttcgtcgccccgcaggctcgagactcgcttgttgattatctgaaccgcttcaccaagcatgagtcgccccgtgtcaaggtgacgagtgagagtggggatccctggaccgcgtcgccgtccgaggctaggtcggacctcgctgaaggtgtcgttgatgccgagggtgctactgcccccttccatcgtcaagacccgagcctgcaggatcagagtgtcttgtag

SEQ ID NO: 11880 - DNA, 1797 bp, Zea mays
  Peptide Sequence Number=SeqID_55255
atggcgcctcctgttgacgtggtcggtccgtggtgccctaggttgagcgatgtggaggctcctccgaggtcgaggtcgaggtcgagtctgtcttccgtggccgaggtcgagtccgagcccctgggtcgggtgaggcggagaccgtcggctgaggccagggctgagtccgagccctggggtcggatgaagcggagttcgtcgtcttctggggctgagcccgagtccgagccctgggatcgggcgaagcggagttcgtcgtcttctggggttgagcccgagtccgagccctggggtcgggcgaagcggagttcgtcgtcttccggggctgagcccgagtccgagccctggggtcaggcgaagcggagttcgtcgtcttccggggctgagcctgagtccgagccctggggtcgggcgaagcggagtttcctgtggcgcctgaggccgggcctggctgctgtcagcctcactctgtcgagtggcacagcagtcggtgcggcgcaggcggcgctgtcctctttgtcaggccggtcagtggagcggcgaagtgactgcggtcacctcgactctgtcgtctggagtgcgcgcgtcaggataaaggtgtcaggccacctttgcattaaatactcctgcgatttggtcggttggcgtggcgatttggccaaggttgcttcttggcgaagactgggcctcgggcgagccgaaggtgtgtccgttgctggaggggggcctcgggcgagacgtagatcctccgggctttctgctgatgggggttaccagctgagaattaggagccttgaggctccctccaggtttcaccccaagcgcatatctcaaagcaacgctgcttggtcctgctgcaaagcagaacgctgctgctttggcgttgaggttcgtggaagagacggatggcgacgcgagcggaaaggtttgagtttgaccgagaccgacgccggggagaaggcgcagcgcaagcgcaaggcacggcatggagcagcggccaatgagaattcaaccactgaccccgggattagaataaggtacgaccgtgcctccgcccccgcctccgtgacccccgcgcaccccgctcaggtccgcaccccgctcaggtcagaacgagatcctctgacgtggggagaggacactgtcgcgtggtccgcccccatcccctccctccccccgcaggtgggggcgccttcgccggtgaggtacctggtgggggcagcgatcatgatgagcggcgtggtgccttcctccctccatgtcctcctccgcgccgagcgcgccctccgcgaacgcgacgtcggcgaggtccacatcccgctgtccgagctcctctccggcgcccccgacggccccgtccccgccaagttcgtcgcctaccaggtgcgcaagatctcctccggcaagccccagggagtcctcaacctctcgtacaagctcggcgaggtcgccaacggctacgcccccgccccgccgcccagtccgcctacgcccagcctccaccgaccgccgcgtacccgcctccttcaggcaaggctgatgcctacccgcctcccgccgcccaaggccgacgcgtacccacctccatacggcgcctacccgcccgccggcggcaaggccgacgctgcttacccgccctcatccggctacccacctgcggcaggcaagccaggcaaggggggcgaaccggaagtaggacgattgctttctacccccgtgtccgcgcacacattctatcctatgccggttttgaacccaccacatggctttctgatatgcttttatctgaaccagtag

SEQ ID NO: 11881 - DNA, 654 bp, Zea mays
  Peptide Sequence Number=SeqID_55256
cgcggactgaggaaggactcggcaagcgacgacgcgaggagtaaagcgagatcgtggtcgggcgaactctatggtgcggactgcctcacggccacgacagctgtcgtgacacgcacgacgttgccacaccacaatatcaccacgaccataaaccgatgtgcgcacaggcagctagagaccgagcgtggcgagatggacaggaccgagctcggcatggggatagagggaggcgagctggaagctgaaattggggctgggcgtcggccgttgctgaatcacgaaagcagcgcgccatccgccagcgccgccaccacgaggttccactggatcttgacgtccagccggaatgcagcatcgtctgccgcggcgtcgagcagagaaggaagaagaagactggagctcgcggctacacacgacggccatgggaacgagcagaggatgggtgagctcgccatggggaagaagcacgcgcagggggacgtttgtgcgagcgagagttgcttctcgcggaaggtgatgagtgagaaggtgatgagtgagccgaagcaccaggtcgcccacctggaggtctcgggaccggacccctcgggcgtggccctcgtcctcggggagccgtattccaggtctgtgggcaagacggcctcggccccgtag

SEQ ID NO: 11882 - DNA, 1098 bp, Zea mays
  Peptide Sequence Number=SeqID_55257
atgtcttcgcgctcccttatgcgttgtgtctttccaccttccaagcccccggatgggggatacccgccgttttttcgcctcatcgttggaggaacgcaacttcgtgggagttggtacctttcagccatcgtttggcttcaaggattttcatcacacagcccagttgcacccctccgctggtggtcacccaagacggtgacctccagctcctggatggggagaggcaagtcgggctgtgatctcgatcccgccctcagcgtcgggggtgttcgtcatcctcgctggggcggggagcgaggcgagccggggctctacctcctgcgcgggtcggcgggccacctcttcttccagcttctggaggtggcaatcgccctccagctctgcggcggagacgtcctccagccatgccggggaaggcgaactgttgctgcccagctaggatgcaacattacgctctcttcctcgcattcgcggcgaggacggcagcgaggacctgccggtgcgcttgggagcggcccgctctttggctttaatagctggttcgcgtcccttgagcgggaacgcgaacgagagccctccggcggccgcgtccacccgggaccatggctgctgctgcagaggtcgctggcgggtctcccggtgttcgtcgccccgcaggctcgaggctgctcatacccgcggggacggaaccggagttccgtttgtaatggcactttgaatgccaactcgcatgttggttatctgaaccgcttcaccaagcgtgagtcgccccgtgtcaaggtgacgagtgaggccaggggtagcgatatcagcattaacaggggcagagttggctcaaaaatgaaacctggttggctggagcctaaccgggtcatccgttggcgggaccgacgctggggtcgaccagccgacgcctcgggtcgggctggcgcccttggtggaaggctggtcgaggccccggagcgaccgaccgagccgcctgctcgggccggactcccggagaaaaccctggctgtggcagaacctcccaagttattgggcccacatgcacctgtccttgtctcaaagactgctatgcatgtgcaccagataacttaa

SEQ ID NO: 11883 - DNA, 117 bp, Zea mays
  Peptide Sequence Number=SeqID_55258
atgaaggtgggccgatctatgatgccatggcctgtggtagcacgagcagagagttgggatggcccagaagctcgggcggtgcctgaagtatgggtctatggcatggtgaaagcatga

SEQ ID NO: 11884 - DNA, 1110 bp, Zea mays
  Peptide Sequence Number=SeqID_55259
atggagtcttcggcgaaaacaaaggcttccactccgtatatcatacttcgccatcactccaagcaactctctattccttgggggagaaatgagcatcaaagaaaaggacttcgtctctggaagagagtgccaaagattcaacataaaaccaataaaaagaacaagacaagagtcaaaataaaggagcaaaggggcaaccgagggcacccctggtctggcgcaccggactgtccgatgaattcacccacccccgccagtggaggagactctcgtttcagttctgacttcctttctcgcgatggctttccttccatcttgtgggaagtgcttaactccgccgattaccctacgccccctttgtacacggtgcagttgtatgaggagcatcgggtacctcgttgtcgggtctggctaactttggaggctcatccccttcagccgggttggcgttctcttgactctgagacgattggactcaggacggacgacaccgttgaggcagcagccatgaagactctgacgactttctgtggctaccatcccctggagatggtgatgcaccccttgggactcttccctgctgagaagaaggatgatcccatgtggtgtaaccgcgtgagccatgtgaaggatgtgtgggcaatgtatcctgacttggttgggagggtcactgttcagtgcatgagtgcgctgtaccgccttcaggcccttcagagcgatgctatgacacttcttgctaacaccgctcaggctgccaagctcactctcgacagtcgggaagattttgtggtcgacctatccacagagttggtggaaaaggatctgcaggtggagaggctgagccagcgtatcaccaccctggagcagcaagtggagaaccgagataacactattgatgtcttggagaaccagcttcacgacgtgcagagggaacttgaggaagccaatgaccacttggacatgcaccacctggagatggaggccaatgaagcaggaagcgagggagaagaggctcccgaggagctaggaccagcccctggtgccaatgggactacctccgcgatacctccttcacccgtatccagtgtcgcttccaccgctcagggttaa

SEQ ID NO: 11885 - DNA, 549 bp, Zea mays
  Peptide Sequence Number=SeqID_55260
atgtccggtgcgccagccacgtcaccaggccgttgggattcgaccgttggagcttctgacttctgggcccgcctggctgtccggtgtacaccggacaagtattgtagattgtccggtgcaccgtctcgcgcgtgcctgacttctgcgcgcttctggcgcgcattaaatgcgcctgcagcaaatgatccaagtacgaaggtgattgtagcactcatcgaagccttggagaagattgagtatgagcatgcgataagagacaagctccctgagatcacagagagaggccaccatgcccttcatctggtggcaatactcgatgacgaagaggtccccttgaacgaaggtccaaatggttccatcaacgtggagagcgagagcctcacggatccacaggaccacactatccatgcgttgttaggaagggatagtgagggacatggtgtcagtgaggatgtggtcgtccagggtgtagcgctggagggtgaggaggacaaggtcatgccagtgggcataggtggaggaagccaagtcaaggatgacaagaattag

SEQ ID NO: 11886 - DNA, 1428 bp, Zea mays
  Peptide Sequence Number=SeqID_55261
atggatggctgcgaccacccccgcggcggtaaaaccaccgacgctgccaccccttgttcgaagacacaaggatggcggggatgtactgttgcgcacgcgcctgcctcaactggaggatgcaaccaccggcccgcactgccatgcgaactctcctttcccccgtcgtcaaggcaaaaggctccgcggagaagagatgggtccacagatcccagggggctcaatccccaaaaacccttcacaaactgccgcgaagatggctgcttgcacgatggagttggggttgagattgtgcagctccaccccgtagaaatgcagaatcgcccgcatgaagcgacttgctggaactccgaacccccgctcatggaaagagacggaactcagcacataccccgatggcggggacggggcggctccactcgaaggagccatccactccggctgcgggtcactagagaggggacgaagcaagccatcggcaacaagggcctccagatcgtccgccgtgacggtggagaaaggccacgggtcgcgtggcggaacgacggttacccgatcggccatcaccaagcgaaggagggcaggcggcacctttggcaggcgaagcaggcgacgcttcacctccgccatgatgaccgcgtcaaaaaagggaccgggaaaggggatactccgaaagggatccttttccacgaaggaagtgggccccgagccctcctactgatcagaggttcgaaggctggcccctcggaagggttcgacagccgcctcagagcactcgggctccgcgcccactactggtcagaggttcgaaggctggcccctcggaagggttcgacagccgcctcaggccactcgggctccgcacccactactgatcaggggttcgtaggctggcccccgaagggttcgatagccgcctcagagcacgcagagcgagggatgactctgggtacgtccgatacatggccgaggctcgggctacgctcccgaggtaccctaggacatttccgagaccagcgggagcgattctgtaacagaatcccatcagagggaggcatcgagcccttggaccctatcaaacgggaccgggtccggcaaatcacctgcaggctcgggggttgctctcgcaaacccggctccggccaaaccgttgacagcgtcaaataccagcctgagaacttggaacctgactatgcacccgggcaacgaccagttcgcatgagggaacaaccagatcggccgaggcatcacgaaagagtgaggccgacagcagctaagtccaacctcgggcgccataggaagctccgcctcgcccgaccccagggctcggccccagtctcggcctcgaaagatggtctccgcctcgcccgacccaagggctcggactcaacctcgacctcggacgacggactccgcctcgcccgaccctag

SEQ ID NO: 11887 - DNA, 1143 bp, Zea mays
  Peptide Sequence Number=SeqID_55262
atgggtctcccggttgccttcctcaatccgagcaaggatctgagacatcgggtcatctcctttcggtggcgccatctcttctcccttggtctgcaacctcgtccggattttactccgatcagggttcaacacaggcgtacgaggatccggacaggcaacaagccagccgccgccaacagcctggtcgtcgatctccagtggcactgtcttctgggccttggtgacaaaaatactcccagttctctacagccacccagcaatctatccacgagtatccacgcgctagctaggcttgggcgtcgccccctcgtttgtcgaccggcgcggcggcgagagacgcaccgtgtcgccgtgtcggtgccgatcgagatgtctacttctccgtcgtctcacaagcgtggccgcgagcgcgacgtcgacgctgtgtcgtcggcactgtgggtccggatggacaaggagttcctcgccacccaaggtcttcttaagagagccaagctcttgccccgtctccgttccgctggcccctccgccgccgacaagaagaactgcgcgccagcgctagcgtcacgacgatcaggggctcctgcagttgtgccgtcgacagcaccaaagagggagacgtcgtcgcaacccaaggcagcaacggaggctgcggatcggactcggatcgccgcaccagcagcgaatacgaagcagcagcagcgcgcaggcgcagccgccaagaacccgatccctccggcagttcgtcctagcaagaacctgccaccggccgaggcaccagcagcagcgaattcgaagcagcagcagcgcgcaggcgcagccgccaagaacccgatccctccggcagttcgtcctagcaagaacctgccaccggccgaggcaccagcagcagcgaagcagcagcacccgcggtccagcgtgcagttgctgccgagacggagaagtcggcgctgcctgatgagatggagaagtcaaggaaggagttccgccagatgctggaggagatggagaagtcggcgctgcctgatcagacgatatacccacaggacctctcggcctcacgccagtcgaacatgtcgtgacgaggacgaggaagcaggcatggttggaagaccacgccaagcgcttcagatcacttcgtag

SEQ ID NO: 11888 - DNA, 426 bp, Zea mays
  Peptide Sequence Number=SeqID_55263
atggcggagctccgctggagacaagggcgtgaacacgccaggggttctaaggcgatgggaatggctcagggaggttgggaaggtgcggcgaacacggaggtgggcacggcaccgacgcagaggcaccggagggtggaagcaaaactcaatgaggtcacgaacacggcgaggactcgacagcaaccatggaacacgctcgagaccaaggcggatggcagtggtgtcttctcctgcgtgtgcaccacgctgggcgaggatggtagctctacgggcgggaggttagagagacagagggagctgataggtgggatccgcgggtcagcgaaggagggcgcgtgtaacaccccaggtgtttatattccgctcgacagcgagtacggatttaagcacgtgatatcagtgaataagacggacactaaggtctaa

SEQ ID NO: 11889 - DNA, 339 bp, Zea mays
  Peptide Sequence Number=SeqID_55264
atggcttcgtacaacccaaataaaacccccagccctactctagcatttggggtgccaaaggttcacaaaaagccaataaaagacaaagaaaagggttcaacaaaaagagcaagggataaccgaagtgtgccctggtctggcgcaccggacagtgtccggtgcaccaggggacttcaagctgaacttcacaccttcgggaattctcagaggcgcttcgctataattcaccgaactgtccggtgcatcaccggacagtgtctgatgccccaaggaagagcaactctgaactcgccagcttcgggaatccgctccgctaaaattcaccggactgtccggtga

SEQ ID NO: 11890 - DNA, 360 bp, Zea mays
  Peptide Sequence Number=SeqID_55265
atggcgagagtggcacgtaccctcctggcaaaggaccgcctaaaaggggtggtgtgctctcgggtggcgcggacctgttcatgtggtggaggatccgtgggaatggtagacatgtgcaaaagagttaagagaagcatatgtcgtgtggttggagatccccagctgggtattaatcgattcggatcgccgaacttctcggatatgaagactggatcttcgaccctcatcgtagataacaagcgaaacaaaggttttaactttgtgctgctgttgatggtgttaagtgccggtgggctcggccttcttataagtctaagtaactcttctatacttcttattgaggatgttcacttgagctag

SEQ ID NO: 11891 - DNA, 561 bp, Zea mays
  Peptide Sequence Number=SeqID_55266
atgagccgagcaaggagcgctcgtgaactttatggcggaatcggtagcagccgatgccagagcgcacggcgaggggacttcggcggtgcggacagcaagcaggcgattcgacggcgtgggagttcgacacgccgtggcgagcaaacaaaatttgtgcgcgcggcaaacaaagaaagagcgagctgcgcgtgcgcagagagttcgacaatccacagcaggggcaaacgcagtccgagcagggaccagcagcagatatggacgccgatcttgaagacgcggctgcgcgcggaagctgtaacaacacgcgatagagacagagctccgcggctgggaaaaaggctcaacgccgccatggttgggagcttagggcagttagccgagctagagcaagggacgacacgggccatcacaaactccggcgaggaccagggagatccggttgagcctggcaaggaaaggcgcggagaagagaagccgcgagggagaaacgcactgcgcagggggttcggctatgcgcaggagcgagcaaggagatggacgtcgagcagagcgcggccatag

SEQ ID NO: 11892 - DNA, 1131 bp, Zea mays
  Peptide Sequence Number=SeqID_55267
atggagtgcgagccggaggaactgcagttcctgggcgtcgtcgtcatctaccgcttctccgcggagatcctccgaggcccgcaccgcccgctcttcgcgcgcatcgcggccgccttcgcgctgcccctctccgcgctcttcctcctgcacgtcgccatctcccacgcgttcttcacccacatcgactccgacgacacggccctggacgcatcctccccgggcaccgacacgcagcgccacttgctgtcccgcctcgcctccgactggctcgccctgctcctcttcaagtccgcctacctcctcgcacttctcctgctctcgctcctctccgtcgtctccgacaagcgcgacgcgctcaccttcccgcgcgtgctctccgtcgtgccccgcgtctggcggaggctcaccgccacgttcctcgccgccttcgcgctcctcttcgcctaccacgtcgtcgtcgtgctcgtcttcatcggcctcctcgtcgccgcggacaacggctccgccctcgcgggcctgcttgccttcctcgtcgtcgtcgcctacttgcttggccttggagacctcggcgtcgtctggcacctcgccaacgtcgtctccgtgctcgaggaccacaagggcttcgccgtcatgcgcaagagcaaggacctcatcagggggaagctcgtcaccgcgggggccatattcttcacgctcaacgttgtcttcgccgccgtcgagctcggcttccgcgcctgggtcgtcaggggatccggtgccgcgtcgtccaggctcttgctcggcctcatcatgctcgtcgtgcgctgttgcgtcgtcatgctcgcgctcgtcacgcagaccatagtctacctcgtgtgcaagagctaccaccacgagagcctcgacaacgccaacatctccgaccacctcgaggtctacctcggcgactacgtcccgctaaacgcgtccgacgtgcagatggagcagttccagttgctatggggatctggaactgagagggatgcatgcctgattgctgtgctaggttgtagaaactctgatggggatgagatttctctacaggttggttcttgcaggatagagtatgaccgctgggtgaacaccttctcgccggaggggtggttgttctag

SEQ ID NO: 11893 - DNA, 426 bp, Zea mays
  Peptide Sequence Number=SeqID_55268
atgggcttccatggagagcagaacacggggatggccttccatggagagcagaacgcggggacggccttccaaggagagcagatcgggcgtgggggagtcgatcgcgcggtcctgtgggtggacacagagatttcggatggcggcgccggccttccatggcgagcagaggggggagtggatcgcgatgacgcgccatcgagtgtgcgaggagattttggatcgcagcttccatggagagcgtgggcgaggagatttcggatcgcggtgcattccatggagagcgtgggtgaggagagccgggatgggggcggggcatgcttcacccactaccggaatccgagactttgccgagtgttggcttctttgccgagtgccttttgtcgggcactcggcaaagaaagctgtgccgagtgccgtactcggtaa

SEQ ID NO: 11894 - DNA, 378 bp, Zea mays
  Peptide Sequence Number=SeqID_55269
atggccgccgtcgcgctcctctcaccatggagcgtctctttcccacctcatctgagcctcgccctatgcttcaccaagagaccaccgccctacctcctcggcggtcatggcgtcgatgcgaggccaatcaagaggttgaacagagctgtgcaggtgagcatgcattcattatattcccacagttcatattctttgcggtactacatctatggtagatttagtcgctgctgccatacatcagatgcccagatcttcttcaggcccttcgtcggcgaggagtatcacaagggtgtgcatctgtatacccatgtcctttacaaggatagcagttcacgtgcctttgcagctcatattcactcctttatgtttgttgtctag

SEQ ID NO: 11895 - DNA, 444 bp, Zea mays
  Peptide Sequence Number=SeqID_55270
atgaagagagcatcactatgtaaaggtgccaaagattcaacacaaaccaatcaaaagaacaagttaggtctcaaaagaaaggagcaaaaagggaaccgaaggctgccctggtctggcgcaccggacagtgtccggtgcaccaccggacagtgtccggtgcaccagggtgcttcagctcgaactcttcaccttcgggtttccaggcgcatctccgctataattcaccggactgtccggtgtgccactggactgtccggtgcaccagcggagcaacggctatctgggcgcaacggtcgactctgcaaagtgaacaatactgcgacagaagtcaaagcagcggtcagaggggcaccggactgtccggtgcgacactggactgtctggtgccacatgaggatagagcctccaacggtcgaccagcttcaagacctaacggcaggatga

SEQ ID NO: 11896 - DNA, 273 bp, Zea mays
  Peptide Sequence Number=SeqID_55271
atggtgaagaagcttgagacaggaacaaccgtggcatgcactaaatcccttgaagaaaatgtcaaggacttgaggattgccaagaggaggaagcaaaagaagaaaatcaatacctcttccaaaagcctcaaccatgcctccataaaaggtaacatccaagatgggtaccaaaatatgcttgacaagctttgcaggaaaaagagatggtatgaagccttggagtgcttgaaagagtcaattcaattcttattgactcaagctatcaatctataa

SEQ ID NO: 11897 - DNA, 453 bp, Zea mays
  Peptide Sequence Number=SeqID_55272
atgggcaagagcaagagaggtggtagctcttcgcatcgctcgggcgacaagcgcaagtgcgagccgactcctccctcggaggacttcggcgactcggaatactcagaggaggagttctcctccgagtccgagggctctccggctcctgcttctcccccggcgtcgtctgatgattcagacgactcccaggggatcgctgcggaggtatggacctacatccgggccgtcgagcgtgccgggctcgagggctcggatgagtcggagtactccttggacgaggagaattcctccgactcgtccgaggagggcagcggcggcgacggcggtgacggcgacgacgatggaggcaacggcgacagcgacggcggcagcggcaagggcggtgacgatagcggcgacggcggcggcgacagcaagggcagcagcaagggcagcaacaaggccagtggctag

SEQ ID NO: 11898 - DNA, 198 bp, Zea mays
  Peptide Sequence Number=SeqID_55273
atggacaaagtgaaaatcaacataaagtgctggaaacatgagaaatcactttggaaaagagatggctttgttcagccaaagacagttcagtctggaagcaccggactgtccggtggcgcaccggacagtgtcccggtgcgccaggctggctctggtgaaaaggccgctctcgggaattcgtcggcagcgtacggctaa

SEQ ID NO: 11899 - DNA, 825 bp, Zea mays
  Peptide Sequence Number=SeqID_55274
atgcagtcggcatgcaaccgcgccaagtgggcgcaccccttcgactccaacgcgcccagcatggaggcccaggcccacacgtcacgcaaccggcgcgccagttgctacgtgcgagcagccgcgccgccccttgcgccactatcacgcctcctcgactgcggaaccagtaccgcgactcaaggcaaccctccgcgtgacacgacagtgccagccaggcgcatcaatcacgggccagtcggccgcgggagaaggcgcgacggtcgatgcggccaaaaatgggccggcagtaatggcggtggcaggcgggcagaagcagcggtcacgtcgtcggccaagctcatggaccgggaaaagggggataccctgaaaaggatccttctccgtgaaggaaacaggccccgagcctccctactgatcaggggttcaaaggctggcccctcggaggggttcaacagccgcctcagagcgcttgggctccgcgcccactactggtcagaggttcgaaggctggcccctcggaagggttcaacggccgcctcaagccactcgggctccgcgcccactactgatcagggcgggaacgatcttgtaacggaatcccatcagagggaggcatcgagccctcagaccccgttgaaaggggaccgggtccggcagatcacctgcagatgctcgggggctgctctcgcaaacccggctccggccaaaccgttgacagcgtcaacataccagcccaagaactttggacccgaccgtgcacccgggctacggccagctcgcatgagggaacaaccagaccagccgaagcattacgcgaggcattaa

SEQ ID NO: 11900 - DNA, 1041 bp, Zea mays
  Peptide Sequence Number=SeqID_55275
atggggagtagtattaatagacatagtaactgggccaggcccattacagtgagggggctacaagctaaaatttcctctggtgggtttttaaagagtacagtgtttaatcttgcttacagattcaagcagtttagaatgatgagcggagctaagcacaatgaagctgcttccatatgtgacaaagtagtttttagtaaggtgaaagagggtcttggtggaaatgttagagttattttatctggagctgctccacttgctacccatgttgaagaatacttgcgtgtggtcacatgtgcacatgtcgtacaaggatatggcctcacggaaacttgtgctggatctttcgtctcgctaccaaatcaaatgtccatgataggaactgttggccccccagtgccaaacatcgatgttcgtctggagtcggtcccagaaatgggttatgatgcacttgcgagcaaacctcgtggagagatatgcatcaggggagaaacattattctcaggatactacaagcgtgaagaccttacaaaggaggtcctcattgatggatggttccacactggtgacattggtgagtggcaacctgatggatctatgaaaatcatagaccgtaaaaagaatatattcaaactttcacagggtgaatatgtggcagttgaaaatttggagaatgtttatggtcttgtttctgctatagactcgatatggatatatgggaacagctttgagtcctttcttgttgctgtggtcaatcccaacaaggaggttctcgagagttgggctgcagcaaatggaataagtggtgatttcgagtccttgtgcaataatccaagaacaaaagaatacattttaggagagctgtcaagaataggaaaagagaagaggctcaaaggttttgaattcgtaaaggatgtgcacctggaaccagtaccgtttgacatggaccgtgatttgatcaccccgacatacaaaaagaagcgtccgcaactgctcaagtactaccagggcgtgattgacaacatgtacaaaagtgctaagtga

SEQ ID NO: 11901 - DNA, 948 bp, Zea mays
  Peptide Sequence Number=SeqID_55276
atgacttcccccggatcctccaatgacggaaatgcactgacccacactgacggacttgcacgagagggatttccccgcatcttgtgggaggtacttcagggggccggatatttgacaccccctcagtacgcggtgcagcagttcgagaagcaccgggtgccccgctgtagggtgaggatgactttggggcctcatcccctgcagccaggctggcgctccttggactcagagtctttcgggtaccgagcagaggacacaatcgaggcgatcgctctgcatggattgactaccttctgcggattccatcccttggagctggctacccaccccattggcttgttccccgctgagaaggaggacgacccaatgtggaaggatcgggtggagcatgccaaggacatctgggccatctacccaggtcagactgcgcacttgacagtacggtgcatgaatgctctgtaccgtctgcaggtgatgcgcggtgaggcaatgtcccatctgatggcactactggaggcaacaaagatcacgctggataacagagaggagctcgtggttgacttgtctcaagaaatggtggagaaggacttgcaggtggagcagttatccactgacattcaggagttggaggagctggtgggcaccagggagaacaccatcgaggttctggaggatcagctcattaacactcagcagcagcttgccgaggctaacgagcacctggacatgcatcaccaggagatccaggaccaggaggccaacgaggacgtcgacattgagggaggagatgagcctgcctccagtgtggacactactggctcgggaagaccaccttccccccgagtcgagtgttgcttcgttcgctcactaggtgtccagggtaggcttagaagttggatagtcggactcctcgcagctagcttagcttttgcacccttggggtactag

SEQ ID NO: 11902 - DNA, 2925 bp, Zea mays
  Peptide Sequence Number=SeqID_55277
atgcaggtagtcgagttggttccttgtgcccgcaacaagtggggcaactggaatgagttttggttttacgtcgcagagggtaccgtcgaagaccatgaggggctccccgtgtctgagatgtgttcgcatttttactcagcatacccgccctttgaggtggcggaggaggatgtggatgaaggggcccttcggtgcgccgccggcctgagcagtgggcgcgatttggttgaagaatttgtggcgtacggggtatggcccttggcacatggctgggcgttgggcgaagtgtgccctcgccagatgccttcccatggtgggaagatggtgcgaagtcctgccttcgcgctggatctacaaagccgcgatccggccgcctttgtgcgtgaggcggaggatggggcggtgcggctcgttggtcggtacgtgccgaggacagagggccagcgtagctgggatatccgcgggtcgaatgaccgtttgaacagggtttttgaattgaatcaactgccgtataacggctatcccgaccaagacgatgtggaccgccgtggaaagaagccggtggtggagaccggagacgaccctgcgccggcggccgccccatcctctaagaagaggaaactaggtactgctatggttggacttggggtttctgatggttttgctagagaattgatgaggacatgcgtggccccggggggaaggatgtcttcgcccgagctccgggagtctttggcgcgaatgctgagggttaccgggggttggtggcctaggaatgttcctatccccgcgcggccgacgaagacttttttacatctcgcatggcggaatattgctgttgttgtgtcggcagtgatggacaaggatcgccagggagctgctctgaagcgtcaagcggttgtcaggctttatgaagccaggccgaagaggcagcgaggggctgtgaaggctgctgcccccggtggaggcaagccgccggtggcggcgaagtcggccgttcctgcatccagcaaggcgccggaggctgcggctggcgccggtggttccaggcccacgaaggctttgccggcgtcaagcagggtgccgaaggtcgcgaaggcggcccgagggttgccgtcgccgggcaaggtcgtcgccgacttcgccactgatattagtgtggacgactatcttggtgggtcagacgaaggccaacttgttgttgttgcgcctgccgcggcgaccacggcggctgccgtagtgctgaaggcgaagagcggtgctcttagtgccggaggcgagatgccggcactcgcggctgtcagggacgaggcgggcgctgtgtcccgccggctgaaggagatgaaggaggcgctaagtcaggcgactgacttcgcagatcgcgcggcgtcaggggccctcacgacagttgcgtctgccgaagtcgagagacttcggacgcaacatgctgacgccgtccgggagaaatcggccgtcgacagtaagtgccgcaagctggcggacaaggtggccgcactggagggggagaagactgacctccggcggcaactggcgggggagaggagggaggccgacgaggccctcgccaaggcgcaggctgcgcaggcggaggccaatctggcgcgggcggagggcaatcttgccagggagcgcgccgagcagttgcaggagtggctcagcgccctggagagccgtgtggagagggccgaggccgcgacgcgcgcggaggctgagcggacgcgcaaccagctgatggcttcataccatgagctgggcgcgcggacctgtgacttcgaagtgccggaacgagagcccggacttcgctacctggagtgggtgcaggaggagttgcaggcactccccactatcgtggaggggtttatgtcgtatgcatccctggtcacctgcgagggggcgatgaacgcgctctctcgcgaagggtgccggcactttgaggtcttcgaccaagctgatgaagattttgagcgagatatctacaaggttgaggaccccatagtgaaggaatccgccggagctatctacgaccggatgtggggccctcacggtcgcgaggtggtcagggagcgggccgagacggcgagggctcaggcggcgtgtggcgagagggtggacaacttcggggccttgaacagcgcgttgcctgacccggagccgatcccggcggaggctgtgtctggggccgccctggagccgcccccagagactgcgggaggcgctccagatgcccccgcagctgctgcggccgtcggagacccgcccccagagaccgccgaaggcgctcctgatgcccccgcagccgctgcgccgagggctgaagatcctgcgacggtggcggcggaggcgacaacggaggctcccgcgacggctgggtcttcgcaggttcaagattttgggcctgcgcactcaaccgccactactaattttttggcggcttcgaccgtggatggtggtaataaatatgatgggtctgcatctaagttttctgattttgctgactctgggagctcggttgagtggactgaggagtcgtcagaggaggacttggactattttgcggccttggatgtggcagcggcggaggcttcaccgcacgctgcggacacagaagatgtgcctggtccaagtactgggcgcaggcggcgaagggcggttgcgaagtgtagggtgagcggggcggagggcggtcggcttcgtgtgagtagggctggccggcaggaactgttgtccttgcctgccgccgcgagtacaggcttgtatgatgaagttgtgtgccctcgcacatttggctatgctcgcaaaggctttacctgcttggtcaggtgtatttgttatgctggactgtggacttcggtttttcgcacttgctgtgctaatccagctgcacccttaggcgacttctgcacg

SEQ ID NO: 11903 - DNA, 417 bp, Zea mays
  Peptide Sequence Number=SeqID_55278
atgaggaagacgctagaagatctccgggcggagcatcgcatcgaggtccagcgtatcgctgcatgggccgacgaggcgatctcagctctagtgctgctgggggtgagccccatcccagtgtcgaagcagtcggtgtccatttccgacgcgctcccggtgctggattccgctgctgaccgcctccgacgcctggatcacatccttggcgcccgcttggaggctgagggcagcagactctgccgggcggtgatagagtacatcctgacgtgttttcggagccatgacccagctttctccttggggccggtgatcgccggtccggtggccaataccgaagacaccacccgggggagcgtgaaggacgctgtagacgtggtggccaagcgcttccagtgggatcctactgatgatgagtag

SEQ ID NO: 11904 - DNA, 888 bp, Zea mays
  Peptide Sequence Number=SeqID_55279
atgacttctcacgaatcctcggaaggagggaacacacattcccacacggacggacttgcacgagagggttttccccgcatcttgtgggaggtgctgcagggagctggttgtacgacgcctccccagtacgcggtgcagctgttcaaggagcaccgggtaccccgctatagggtgaggatgaccttggagcctcatcccttacagccaggctggcgttcgttggactccgagtctttcggataccgggctgaggacactatcgaggccattgctctccacgcgctgacgaccttttgtggctttcacaccttggagctgtccactcaccccattggtttgttcctcgctgaaaaggaggatgacccgatgtggaaggatcgagtggagcatggcaaggatgtgtgggctctctacccagggcagactgctcacttgacggtgcgatgcatgaatgccctgtatcgcctgcaagcggtgcgaggagaggcaatgtctcagctaatgggcttggtggaggctaccaagatcaccctggataacagggaggaacttgtggtagacctatccactgagatggtgaaaaaggacctccaggtggaacagatggccacccagatccaagaacttgaggagttagtaggagccagggagaacaccattgaagttctcgaggatcagcttataaacactcagcagcaacttgagaaagctaaccaacacttggatatgcaccatcaggagattcaggacatggaggtcgatgaggatgttgacatcgagggaggagtagagccagagcctgcatccagtctggacactgctggcacagggagaccaccttcccccgagtcaagcgttgcctcgaagagcgtgccgtggacagaatga

SEQ ID NO: 11905 - DNA, 732 bp, Zea mays
  Peptide Sequence Number=SeqID_55280
atggcggtcaatgggggtcggggcgtagtgctcgctctgccaagactttgtggatgtcttggacatcttgatgtaatcaagtacctttctgctatttatttcgagcattgtgtgatgatgtccaattatgtaatcactgtgtacatggcccatatcaggtgcactgcacgtaagtctgtgatcccctttttgccttctcgcctggcggagcgtccactacatcgcacggtgccaggtcagtccagtcacctagagagactgcatcgtcgcctgcacgaggagcaggagcagcaggactcttccccctcgcctcagcgggaggtggagtctgagagaccgccttccccagctcctcagccagagatgccccctacaccacctcagggcatcccggctgctggaggagaccgtgacggagacggagacgacgacgacgctggtggcagtttgagccacggcatggagctttcggaggagctagagccggagggatggatcgctagacccatcactcatgacgctgctcgcgggtgtcacttccacgacgctctcgataccctgttgtgtcgggtcttcgaccgacacacctggtctatcgagtaccgttatgtagtctaccagcatcgtcgcgggctatacccagaccagtgggaggctatttgcttggtgcgccatccggacgatgatctccggggtgcagaagccgttctcaaagcactattcgattactga

SEQ ID NO: 11906 - DNA, 489 bp, Zea mays
  Peptide Sequence Number=SeqID_55281
atggaggaagccacggggggcgtgccggattccatcccgtcgccccttccggaggagccagaggctctccgggagactgaggcggtgatcctttgggagtgggaggcactcgagactgagcaccagcaccttggtgattggcgcacccagctggaggaacgtaccaaggccgcgtcctgccaatttgctttggagcggtctgatcttgagcaggggcatgaggacctcaaggaggacttgaagaaaaagcagcgggatgaacagaccgcaactgaggcggcactacagaagctgcagcaggagcttgatgatagggctagcaacatctctctcgccgaagaaaacctcaaggcgaaggatgcctccctggaggagcgggcgacagatctcattcgacgggagaaggacctcgcttggagggaggagatgtgggaaaggcaggacaagttgctggccgagcatgagctcgagttggaggagaaggagtag

SEQ ID NO: 11907 - DNA, 390 bp, Zea mays
  Peptide Sequence Number=SeqID_55282
atggaggtgggtctgggtctggtctggcctggcccctcggaccgggactgcgagcctcgcttttcggtggctggagcgcgccacacgtggcgagcggcgcggcgaacctgcgggcgtacgaagcgccagcgccagggcgtggcccatccctcgtcctactaccgagggcgacagggagtcagggacacccctgggagccggagagaggcaactgtccgagaacacggctaccgcctgccgctgccgggctgcgcgcgcgcggtgcggacggagacgtggggcggtagcaggctgcgcgctgcacctggaccccggcatggcccgcacgtccgcaaccgtcgacacgcgccccacctcgccgcgctccaaacgccgctgtccctgtcgtag

SEQ ID NO: 11908 - DNA, 210 bp, Zea mays
  Peptide Sequence Number=SeqID_55283
atggcagcctctgaagcctgctcctggtcctcctcttggacagaatttacaactttggaggtgtatgatctacttgatttaaacaaggttgactttacttattggcttgatactggtgtatgtttctctgtctcaaaatttggggatcagaaagtgaatggttttcgcgggacaaaattattaaattctagggcagaaggggtgccttga

SEQ ID NO: 11909 - DNA, 129 bp, Zea mays
  Peptide Sequence Number=SeqID_55284
atggcgggcggaaatgcgctcgccggagctaaggagagggggctggccggtgaagatatatggagcccggaaatccggtctgtctccctgctcaaacccgaggcaaacccaaggttttgtcatgtctag

SEQ ID NO: 11910 - DNA, 426 bp, Zea mays
  Peptide Sequence Number=SeqID_55285
atgcgggacgaaggacccacgctgagggcccgtagctgtagctgttctttggccgagatgccgatgacttcgtcgtcctctgttgcgtctttgccctctggtggagcgaagtctggaggtggtgcttgtggtagtcctctggagctgcagcacgaacagtgggcgccaaatgttggtactcgcctttctgggcaaatagatccaacgggagagtggagagagtgtttgcaaagttcaacggggaacgacaatagctctgttaaatctggcctctcaagggcactgtacgggggtatttataggtacccgagtgtccaccgtcccctggcaaggatgtttatgccctcgggtacccggactatcctcaaaatattctcacaaggggaggttacagaccgtcattacagaaaaggctattacagatga

SEQ ID NO: 11911 - DNA, 675 bp, Zea mays
  Peptide Sequence Number=SeqID_55286
atgacgacgacggggctgcgcaaaaacagcaaaccaccgacgggcatcacggcgtgctgctcactgcgcaacaaaacagcaagccgacagcgcgcggagccgtcggggctgctgcacatttcgtcgagcaccctgcgcacatcagaaggagcaagggaaggggctctgcgcagggctgccgtttttttggatcggagggctgggctgctgttctcctctacgccatggaagttgcaaaggggaactcgacggggtggctgggacagcaggcgtggtgttgtgctgctggcgttgatggctgctgctgggcgccggcaagaggtaatcctcggcgccgtggctgctggccagagctggagctcggcagcaacagaggggcggttggccatggagaagaagctctctgctgaaattctgggcgccatccagggagcttcaacagtggggcgcttggctactgggctgctcttcgtggacagcagagggaggcaccatggtaatttgctgctgcgccaaggagcgaggagagagcacgcagggcggtggaggcgccatgggagggggcgagcagagctactgctcagccatgggagagagggggcgctgggaaagctgctgctccccgcgcttgctgctcgctggaggaagaagaaggcagggaaaagtggcggctga

SEQ ID NO: 11912 - DNA, 243 bp, Zea mays
  Peptide Sequence Number=SeqID_55287
atgtgcagcagccccgacggctccgcgcgctgtcggcttgctgttttgttgcgcagtgagcagcacgccgtgatgcccgtcggtggtttgctgtttttgcgcagccccgtcgtcgtcatcgttcaccccggagagaaaccccgtgtttgcgtggagaaggcaagtcgttcaacgctcgtcgatgttcggagcgatgcacaaatcggaatcaccgtcattcttgcaaacgctgtttgggtttga

SEQ ID NO: 11913 - DNA, 606 bp, Zea mays
  Peptide Sequence Number=SeqID_55288
atggctgaaaggtaccaactctcgtggagttgcgttcctccaacgacgaggcaaaaagacggcgggtatcccccatccgggggcttggaaggtggaaggacacgatgcataagggagcgcgaagacatggtcgccttccaagggggtcaccctccttttaaaggcgactctccctacttgcgtcgccagccgtcgcgggctgagtcttctccaacacgctccaaggtcctcccctacggcgcgggggctgggtcccacacgtcatgcaagacggctcagagcagaagaagccaaaccgccgtgcgcgatgcgtacaaccgcccagcgggaccgggaaagggggataccccgaaaaggatccttccccatgaaggaaccaggctccgagcctccctactgatcagaggttcgaaggctggcccctcggaagggttcaacagccacctcagagcgcgtgggctccacacccactactggtcagaggttcaaagcccggcccctcgaaagggttcaacggccgcctcaggctactcgggctccgcgcccactactgatcaggggttcgaaggctggcccccaaagggttcacaaccgcctcagacatag

SEQ ID NO: 11914 - DNA, 357 bp, Zea mays
  Peptide Sequence Number=SeqID_55289
atggcggggaagaggccacgaatccgagggcagagaggggagaacggcggcagaaggtctcgggcagaccggaggaactccggcgaggcattccggccacggggaaggggcttgaggcgtattaaggcttgggaaagcttcagcagaggcaggggtgacacagggacctacaccggggaactagaccgggctaaattggccggccaccttgcgagcacggtggacagccacgaccgagcaccggcgatgccaaaattggccgagcacagagcgaaactagggaaattaagcacgggcaaaggtgtctcacctcggggcggagctcggggaggcttggcgcggtctccggcgagctag

SEQ ID NO: 11915 - DNA, 645 bp, Zea mays
  Peptide Sequence Number=SeqID_55290
atggaaatcatactggagataagttctttgagagaagcacatgaagatgccataaggaaggctatcagtgcttttaatgtttctgctgttggtactaggtcagctcgttcaaaatttgaaaagcttcttcatagttctctcaaaaaggcctttgaggactacaataggaatgcttttctggaggctgacttgcaatgttctaataaagttcagaacatggaatcaaaggtgcgagcagcatgtaaccgttcgaatgcaaaattagatgacatagtcaggctccttgatgacctactcacagagtatgagtcaacggcctatggtcctggaaaatggaaaaggctagccacattcttacaacagtgtttggctggccctgttctggaccttttcagaagacagttagagcatatagatgctgaaaggaacgccatgagattgaaatgcaattcaagcgatgataagttggcattgctgaggaagcagcttgaagcaagcgagagtcacagagctgagtatgtgaggcgctatgaggaaattctgaatgataaacagaaaatttccaaggattactctattcgtataactgaacttcaggccaaaagtagcaagttggatgtgaacttatgtgaatttgtgaactaa

SEQ ID NO: 11916 - DNA, 960 bp, Zea mays
  Peptide Sequence Number=SeqID_55291
atgcgggtctgcggcaacaggttcacctacgctggagattctgacccaaccttcctagtgacgttggtgcgcggaatcgagtccaaagagccacggtcacgccgcaaggtccgccatcgtttgaaggaggcgaagctgatggtccggacccaccgattagtgagcggggagagcagcacgggcgcgacagcaaaggggaagttgggtcgtgctattggagctattgggccgcctgtcacctggagagactgcatcgccgcctgcacgaggagcaggagcgccggtggcagtttgagccatgacacggagctcttggaggagtgggagccggagggatggatcactagacccatcactcgtgacgccactcacgggtgtcacttccacgatgctctcgacaccttgccacgtcgggccttcgaccgacacacttggtccatcgagtatcgttgtgtagtctaccagcatcctcgtgggctatacctggaccagtgggaggctacttgcttggtgcgccatccggacgatgatctccggggtgtagaggccttctcggagcactattctattactaagagggatactgccaacgcagccatgcaagatgtagcacaacgagcactttctcagtattgctcgttgttcagcagggtagctgatggcctcgacctgtatgctagaggtgtgattgcctcgccagttggtgagggcaatcccaggctgaacagcatggtcaacttggctgtcgtgctcaacacagagttggaccatgcccttgatgagttgggcaaggttcgggcggaggttgcggaattgcgtgctgagtgcgcagcacgccactatctggatggtggttctcccgcccctgtcgggattcagcgcccttaccgttcaccgccccgtggtcgcttcgactatggtaccccagactgcaggacccggatagatttggatccctag

SEQ ID NO: 11917 - DNA, 252 bp, Zea mays
  Peptide Sequence Number=SeqID_55292
atggataggctggagcaaccgccgccgacgaactcgcccgcctgcacacgtggaccggtcgattctggccatcaccatcgtcaagccgtacctcgttgtaaccgcaaggacctcccgaagccaaccccacccttcgccggacctccctcgccgccgtcaaaccaattttgccagattttaaataatgtgaactacttaggaaaaatacaaaaaccccttagtattgcagaagaatttaaagtttggaattaa

SEQ ID NO: 11918 - DNA, 132 bp, Zea mays
  Peptide Sequence Number=SeqID_55293
atgaagccgcaccgtcgcgtggaccgaagaacctacaccccaacccgagaagagccagtggctgaggatcccaatgttcagcagatagaagttgctgagcaggagctcattgaaggcaagttgtgcccttga

SEQ ID NO: 11919 - DNA, 741 bp, Zea mays
  Peptide Sequence Number=SeqID_55294
atggcttctcacgaatccacagaaggagggaactcacattcccacacggacgggcttgcacgagagggttttccccgtattttatgggaagtactgcagggagccggttatgatacgcctccccagtacgtggtgcaattgtttgaggagcaccgggtaccccgctgtagggtgaggatgaccttggagcctcatcccttacagccaggcttgcattcattggactctaagtctttcggttttagagccaaggatactattgagtccattgctctgcatgtgctgaccaccttctacggctttcaccccttggagctatcgacccaccccattggcttgtttcccgctgagaaggaagacaacccaatgtggaaggatcgagttgagaacgccaaggatgtgtgggctctctacccgggacaaacctctcacctgacggtacggtgcatgagtgccctatatcgtctgcaggccctgcgaggtgaggcgatgtcccagctgatgggcctggtggagtctaccaagatcaccctggataacagggaggaccttgtcatagacttgtccaccgagttggtggaaaaagacctccagttagagcagatggccacccaaatccaagagctcgaggatcaggtggaggccagggatgaaagggaaatagggtcaaaccttttcctatatgaattttggtggttgaattgcccaacaaaaataattgaactaactagtttgctctag

SEQ ID NO: 11920 - DNA, 93 bp, Zea mays
  Peptide Sequence Number=SeqID_55295
atgacgaaggtcaatgcttgccgaaggtggtcgaatgagttcaccagagagggtgatgctgaggacttcgctgacgacgatgatgagttttaa

SEQ ID NO: 11921 - DNA, 558 bp, Zea mays
  Peptide Sequence Number=SeqID_55296
atgtcaggtcgattcatagctccagtcagaacgacgacaaagggagccagcctcagaggtcacagtacacctcacaatcttcggggtagtagcaaatctcttttaggccgccagctccaaggggcagaggcgccaagggcttcggaggaagatttggggatcagcccaggaagatctactgcttattttgtggtgaagacaagggccatactacaagaatgtgccaaatcaccatccaaaagcagaaggagatcgcagaagccgaagctcggtagaatcaaccgaagcaggtcttgcacactgcttcgtgccactcaccctacataccagaatatgtgggtaatcattctgcagcttcggctagccagccacaagcttcttggccacagcttccacctctgccaccactacaacccacctactcacgaggtcagcagtcagaagggcgccaacacacccaacagcagcgggatttcagggaggaatctgaagctcgcacagtcaacagtactgtgctggagtcaaagcacatctattgagagatatcctactttctga

SEQ ID NO: 11922 - DNA, 762 bp, Zea mays
  Peptide Sequence Number=SeqID_55297
atggcggcacaaccaaagggagaggagggagagagaggaagtcgcgggtggggcccaaccgtcgctgagagggggaaggggcagaggcagtggcgaagccacgagtggtgccggggtgggcctggcacccccaaggacccaactaagtttgttgatgtgaccaaatctctaaataagaatgataacaccaccgtttttcatcattataaatttgatgtgtttaatgttgcaattgatcaacaactgaatgagatagaagatcgatttggtggccatgcgacagaccttttatcacttcgtgcttccttgaatccaatacttggctattttgacatagaaaagatggttcgtactattcaaaccactcggatcaacaccaactacatccctccgccacgacaagttcatgtctacccagtgaacggagttattctgaaggacagctcagagaagtttctgcctacgcccaccccattggcagaatcactaaccttcacagctggatcgtcagcttcagcaccgccagcaccagcagtccaagcccctgctcccagaggcgacgacccggacgactctggtgacgatgatgaagacaatgacgaagaagaagaagggaacatcaacgaagaagccaacgatgaacagcaggaccactacattgggttatggcctgtcactgaacattatacatcaatgttcgagacagggcacttccctaacctgctgcaggatgttctgcacgcgttgggaacctacgtctga

SEQ ID NO: 11923 - DNA, 507 bp, Zea mays
  Peptide Sequence Number=SeqID_55298
atgacacggctggaagagttttcccaacatcttggtttgctacagggtgacactgattatggtgttgacaccgagtacgacgatcagccccatcgtctccggcacggatctcatcatgtggccacgccagagcacgcccccggcgctcagcccgcgcgtgcagccccgcgccgtgccaaccccgcgcccacaccggcgcccacggctataaaagccaccccggcctcgaccgtacacccccgcgcgtccctaacccagcccgagcacaagttcgccggcgttttcccagagagcggcatgcttgcggccgcgcaagccacgaccaccatagaccggccaaaccagccactccccatcccgtccgaccctcgggacctcccggatctcacccagcccttcaccagacctccctcgccgccggaggtagctcaggagccagcacaagagcctgccatcgaggatctgcctgccccagctttggaaggcaagccccggttttatgcataa

SEQ ID NO: 11924 - DNA, 204 bp, Zea mays
  Peptide Sequence Number=SeqID_55299
atgtctcagctaatggcattgttggaggctaccaagatcaccttggataacagagaggaacttgtggagatccaggacatgggggccgacgaggatgtcgacatcgagggagaagaggagccagagcctgcatccagcttggacactgctggctcaaggagaccaccttcccccgagtcgagcgttgccttgtttgctcactag

SEQ ID NO: 11925 - DNA, 699 bp, Zea mays
  Peptide Sequence Number=SeqID_55300
atgggtatcaggtgcatacgactatctgaggtctttaggacaaagacatctgtatgtgggactaatatcttgggaggaaacgatcttcgtgatcaggctgatcattcattagcaagacatggcacgcacgaagaccacccttcggaaaacgaccggacctcaggtttgcctcatcaccagttggctcctcatcatgaggggagcagcagtgggagcaatgatcccatagaagacctggaggctagagtcgaacgtctgactgtggagctgtgccatggaggcagggagcgtgcgtgtgctagtcgccgcatcgctgagttgttagaagaggtagagcttttgcagcgtgagattgtagaacacgatcgggctattgactgggatgtgaattctagatccatagcttgggattgtgaggtgactgcccgagcccgggtggaagagctgagcatggccttggaaaatctgcaagtgtacaacaatgttctgcacgaggaagtgcatgtgttgtataaccagctacacccaaacttgccattggaagttgtagagatgggagctggcgcagcagaagcagatgaaggaggaacttatggggagctggatatctttggagcccctccccctatgaacatcgtagataatcatccccccgaagctagcagcggatcgggagcagccaaggatgtggaggactag

SEQ ID NO: 11926 - DNA, 375 bp, Zea mays
  Peptide Sequence Number=SeqID_55301
atggaatcgacctcgcaagagtgggagatcccaccggcgatcgtggtccgagcggcacggagcatcccagtccaattcctcgcgccctcggcctcaccgacaccccgtggagctcgtcgacccattgggtcgagctctactgccactgatcggccggagcaggcgccgcagatgagccattctgcccgcgcacatggacagctcgcctctggtcaccaccggcgacaagccaaccatcgacgtgttcaccgtgactccctcggcctcacccgaccattcgccggagatctaccgccacccgtgagcctcgccgtctctttctttgcctctcactgttctggtgaagaagaggagcacatgttggatagttcataa

SEQ ID NO: 11927 - DNA, 552 bp, Zea mays
  Peptide Sequence Number=SeqID_55302
atggcttggggtttacttaggggtggaaacgagccgagccgagctcggctcggtacggcttggtgttgtgacgagccgagcctggctcggctcgattatttgacgagcttgagaaactggctcggctcggctcgatggaggctcgcgagctggctcgagccggctcgcgagcctgctacgcccaccgtacagtgcctgcagtatgcagagggtgaaggccgagcgtcgcgcgactgccgtgccgacaacactgtagagggcagaggccggaggtgttggggctcggggtcggtgggccgtccaggagacgacatcgagcagtcggagtcgggggtcggccaccgcccgtcggtgctcgcctgctcggctacggtaggaagcaagaatgagagaggtcggggacttggtgtcgagcagttggggtcggccaccaccggccggcggcgacaggacgcaagacttggcgggcggcaggaagcaagaacaagagagaagctcggcggcgcaggaagcaagagagagacgctcggcggcgcaggacgcgagagatag

SEQ ID NO: 11928 - DNA, 465 bp, Zea mays
  Peptide Sequence Number=SeqID_55303
atgggaaagagcaagagaggtggcagctcttcgcatcacttgggcgacaagcgcgagcgcgagccgactcctccgtcggaggacttcggcgactcggaatactcgaaggagttctcctccgagtccgagggctctccggctcctgcttctcccccagcgtcgtctgatgattcaaacgactcccaggggatcgccgcggaggtatggacctacatccgggccgtcgagcgtgtcgggctcgagggctcggatgagtcggagtactcctcggacgaggagaattcctccgactcatccgaggagggcagcggcagcgacggcgatgacggcgacgacgatggaggtgacggcgacagcggcggcggcagcggcaagggcgatgacgacagcggcaagggtggcagcggcgacggcggcggcggcagcaagggcagcagcaagggcagcaacaaggccagtggctag

SEQ ID NO: 11929 - DNA, 66 bp, Zea mays
  Peptide Sequence Number=SeqID_55304
atggctggaaaacagtgccgctcgctccgctccgactgccgtgtcagccaccccggcgatgactga

SEQ ID NO: 11930 - DNA, 588 bp, Zea mays
  Peptide Sequence Number=SeqID_55305
atgtcgtggctgtcggaggagcgctggagccctgcggaaggtaatgatggcacccctggcgacgtggccagtccggacccgagtttgggcgaggtggcgattcctccgaggtcgaggttgagtttgagccctggggtcgggcgaggcggagtccatcgtcttccggagccgaggctaagtccaagccctggggtcgggcgaggcggagttcgtcgtcttccggagccgaggctgagtccaagccctagggtcgggcgaggcggagttcgtcgtcttccggagccgaggctgagtctgagccctggggtcaggcgaggcggagttcatcgtcttctagagccgaggctgagtccgagccttggggtcggacgaggcgaagtccatcttccgaggccgagacgggggccgaaccctagggtcaggcaaggcggagcttcctatgtcgcccgacgctgggacttagccgttgtcgacctcactctggcgagtggcacgacagtcggagcggggcaggcggcgctattttcttgtcaggtcggtcagtggagcggcgaagtgactgcggtaacttcggcttctgtcgactga

SEQ ID NO: 11931 - DNA, 603 bp, Zea mays
  Peptide Sequence Number=SeqID_55306
atgcaggcggcatgcaactgcaccaagggggcgcaccctttcgacttcgacgcgtccagcatggaggcccaggcccacacgtcatgtaaccggcgcgccggttactacgtgcgagaaactgcaccgccactcgcgccagtaccgcgccttctcgactgcggaaccggtgccacgactcgaggcgaccctgcgcatggcccaacagtgccaaccgagcacaacggtcacgggtcagtcagccgcaggagaaggcgcgacgatcgatatggccaaaagtgggccggcaggaccgggaaaggggatactccgaaagggatccttctccgcgaaggaaatgggccccgagcccccctactgatcagaggtttgaaggttggcccctcggaagggttcaacagccgcctcagagcactcgggctccgcgcccactactggtcagaggttcgaaggctggcccctcggaagggttcaacggccgcctcaggccactcgggctccgcgtccactactgatcaggggttcataggctggcccccgaagggttcgacagccgcctcagagcacgcagagcgagggatgaccctgggtacattcgatacataa

SEQ ID NO: 11932 - DNA, 369 bp, Zea mays
  Peptide Sequence Number=SeqID_55307
atgccgccagcagctccgcgccgaataatcctgctggccgcggcggcggcggcggcggcgctgctgctgatgtggccggccgcccgcgtcacggccgacgacggcagcacggcattcttgccgccgccaccggggcccgcgtcgccgttcccgttctgcccggcgcggccgcctggggtgtcgtcggggccgttcccctggtcgccgccgtcgtcgtcgccgccgccgccgccgtcggtggcgatgttccctcaggacccggggttcctgccgtcgggggcgtgccccgtcggcggcgcggcggtggcgtggctgctgctgctgccgctgctcgctgtgctctctgctttcttgccgctttcgcagtga

SEQ ID NO: 11933 - DNA, 2046 bp, Zea mays
  Peptide Sequence Number=SeqID_55308
atggaaaaaaccaagtatgaggtggcaagggatgagactgtaaagcatgttcagcaagtttttaattctttgggcattcatgtcttagcacagactgttagagatgttatttcaccaaaaaagaaagagggaagagggaaggctatagattctgacaatgattacgatccatgctctgacattgaaaaccaatctgacactaatgatgactatgatgatgacctcaataatgaggtcaatactgaggcgacacagatggttccaggaactcgccctcaccaaaagaagcaaaaggcaggaacaatgccggctgccaaccaccagccaccatgcacaccagtcagattgacaaggcaaagtgcagccatgcctttgcctggaggccgcccgccacctaagccaagacatcccttgcctcctaagaccacttcgaaagccacccctaaaagaaatgccatttccagtagtacccaacaacaggtccgggccagtacaaccactactgagaccactgaaactacaaacccagtgtcttttcctccaaaaatgaccaggtccactcaagcaatgtcttcaccagttccaaacacaatgcctagacctactagatacacaaggactagtggaaccatgtctacgcctggtggacacaccatgcatagtcctcctagattcactagggctagtgcagccatgtcttctcctggtgcaaaccctcaccatagtcctcctagattcactagggctagtgcagccatgtcttctcctagtgcaaaccctcaccatagtactcctgcagccactgctattgtatctcagcaacctactcccacaactagtgttaacaaaacagttcctacggacaactcaccaggtgggcacagctctaggcaaagcaatgccatcaatgagtcagctgagcaatttgatgctgctacttcagagggtaatccgaatgaaggagaaccagttggtgacttagttccagggcccaaaaagaatgtccgcaagaaaaccatgggttatggcttagagaagatgcttaataggggaaaccggttggctatccacgtggctgaagggaagaaaagaccggaggtcccacttcaagtagcgaagctggcatcagaaactggtgttgcccttagagacaacctacctatctacaaatcttggaagctttatgacaattccgtggggcaggcagaagtaggaaaagtgcttgacaaagtcacttcaaggttggatgtcgatgttaagaatgagggaccaagcaaagatgcatgcatatatatcataaagaggggagtgaggcagacgaggtataacctgaaaaggaagtacttcgacgagtcactgacaaaagaacagttgttggccatgcaacctccacctaaaatgaagaaagaggattggactgggctggtagagtattggtgtgacccaaagaatcaggaaaaatctgctaagaacaaagcaaatcgaggcaacgtgcagcttcaccaaaggactggagctaggtcctatatagcccatcgttacagcctgaggactaagtacaacaacatggagccggatgctgttgatttctttggggaatgtatgaatagtccccgaaatggtcgtactccgcttgcaaatgagatatatgagcaaatggttgcagagaaggaaagagagctagaagaaggagaagaacaaaagtcaccctccaagattgttgctgatagtctcagccagattagccgctcatccaacttccttccaaacattggtgtccctacaatgtccaagactggtcggtccacatcgctagctgcacaagcacgcatgcaagctcagtttgaggaaaaactccaagctgaaagagaggaagctgctaggaagcaggaagagttgcaagcacaactacaagctcaacatgccgcacttgaagaaaaccaaagtttgctgcaccagacccaagaggaagtgaaggggatgcataccaagtttgaagagaccaatgcactgctacgagctgtcctgaaacttcagaaagattga

SEQ ID NO: 11934 - DNA, 465 bp, Zea mays
  Peptide Sequence Number=SeqID_55309
atggcgatgggtcacggcgatggcgatgggtcacggcgatggggcacgacgaggaggcgggcacggcgagggctgggcacgccgatggggcacaacgaggaggcgggcacgacgatggccggtgcggcgatggggcacggcgaggaggcaggcacggagaaggccggcgacgccctcatcccctccctgttcatctttcaattggaatcacagttgctaatcattcccatgtgcatcaatcaggggtcatgtcgcaggcctggaactgtgcccattggcgtcgatctggaggcgccgatcaatgatgtgaccgggttgccgttgataatgtgcccagattgcaaggatgtgagggtgtttgctgctaataccacgataatggatatctaccgtcagcatcctccaccattgcagcaggttcgacaaccaaggttcctgagctcgtggaaaaaattgacagcttag

SEQ ID NO: 11935 - DNA, 1050 bp, Zea mays
  Peptide Sequence Number=SeqID_55310
atgaatggcggcaaccacccccgcgacggtgaaccctctttctcgcagctcctccaaggccttcaaaaggggctggagattcttctatctctcgcgcggggtcccgtagcgccagttctcggcggcggcgatcaccactcgttgagaaaacgatgggagcctcccgtcgtcatttcggagataaaaccaccggcgctgccaccctttgttcgaagacgcgaggatggcagggatgtactgcagcgaccgcgcctgcctcaactagaggatgcagccaccagcccgcaccgccatgcgaactcttctttcccccgtcgacgaggcaaaaagctccgcggagaagagatgggtccacaggtcccagtggggggcaatccccaaatatccttcgcaaaccgccgcgaagatggctgcttgcgagatggagttgggactgagattgtgcagctccacaccgtagacgtgcagaatcgcccgcataaaacggctcgccggcactccaaacccccgctcgtgaaaggagacgaagctcagcacataccccggcggcggggacggggcagctccgctcggaggggccatccactccggctgacaggcggcacctctggcaggcgaagcaggcgacgcttcacctccgccataatgaccgcatcaaaaaagggaccgggaaaggggatactccgaaagggatccttctccgcgaaggaagcgggccccgagccccccctactgatcagaggtttgaaggctggcccctcggaagggttcaacagccgcctcagagcactcgggctccgcacccactactggtcagaggttcgaaggctggcccctcggaagggttcaacagccgcctcaggccattcgggctccgcgcccactactgatcaggggttcgtaggctggcccccgaagggttctgacagccgcctcagagcacgcagagcgagggatgaccctgggtacgttcgatacataactaaggctcgggctacgctcccgatgtaccctaggacatttccgagacccatgggaacgattctgtaa

SEQ ID NO: 11936 - DNA, 579 bp, Zea mays
  Peptide Sequence Number=SeqID_55311
atggctcggcacctagcgcagtggcgcagatcaagcaaggaagcaatcagggatttatatatcccagaaggtggatccaaggccgcacgtcaccggccgagtcagagaaaaatacggcggcggttatggaagctagcttgttcgggatttgcggaggagtttgttacgaaggagacggtcgaagcttcaaaacgcccgtgcccacgacatctgccgaaaggctcgcgtgcaagtgacgtgaagcggtattcagaatcaggcgtcgcccggagaaggagccgcgccctcggcttcgtccccaccctcggcgagatccgccccggcctcggacgacggcgcgagcgggaggatctctgcttcgaaggtggtcgccagcaccgcgcttgggcccgcggcggccgcgtcaagcctctggacttcggcgagggcagcttcatcttcgtcgggaaggcaatacccctcgctgacccgctccagatccacgtcatagtgggaagcaagcacggcgaaggcccgcctgacgtcgtggtgcagcgcctcgcggagtgtgccgcgtgcgtggtcacccaaggcctgtaa

SEQ ID NO: 11937 - DNA, 612 bp, Zea mays
  Peptide Sequence Number=SeqID_55312
atgacaggaccaaagacccaaatggataaggacaagggccttaagactactaatggcaccaatgactttgagtcgaggacgactcaaaaccaagagggggagaatgatgagtatatggatgatgcccaatcaatcatagagtcccaagctcaaggggagttgaagtccagtttattcaggattccagttcggactgacttgtacatccaaggtttgctcggccaccgtctgagacaaggacgagtccaattcaagttggggaggatgatgaggacatcacccccatacaaacaatgcatggaccgacaacacgagccctgtgctcccactagaggcgccccctgcatcacactgggcgcccccgctgctggagaagaccctgacgacgaagacgacaacgacagcagctcgagctacaacaccgacctctcagaggagcaagagccagagggatgggtcgcccgacccatcactcgtgacgctgctcacgggtgtcacttccacgatgcgcttgacaccttgttgcaccgggactttgaccgacacacttggtcaatcgagtatcgctgtgtggtctaccagcatagtcacgaggtatacccagaccgctag

SEQ ID NO: 11938 - DNA, 456 bp, Zea mays
  Peptide Sequence Number=SeqID_55313
atggcgctgatggttggtagggcaaggaggggtaggggcgaatctcacccgcctgtgattaatggcggcgcgggcgaccgagatccagagagatctgatgacaatggacttgaggggcagaatctggggtggggtggggccgccggaggaggtggtcgggagaagagaaagaggccagaggtccaatcctacatcatgtgtctcgtgtgtttcactgtcgtgcttctgggaatggatacgggtcttctacaacttcttgcgcctctactgctaacgggagggaagggagcggatctggtgatccgtggtaacgtagttctcaacacgttatcagcacgctctacctcgacgttgctgcaagatcagatcagcatcaactctccgtcaagccgacaggtctctggcctagccgaactgtcctacgtgacaggcttcgattcccctctacacagttga

SEQ ID NO: 11939 - DNA, 258 bp, Zea mays
  Peptide Sequence Number=SeqID_55314
atggccatttcccaggaggactgtatcacagctcgtcaggcagagaagaagaggaagaccactgtggcaggaccttcagctcagccacagcgcttcaggattaggagcaatcaacaacagcagcaatatcgccaggcaaatgacaacaggtatttcacatgtggcaacaccggacattatgccaagaattgccacagaaaccagcagaggcaggggcagaatgttaatcagaatcaaggcaagagacagaaggtgcaa

SEQ ID NO: 11940 - DNA, 741 bp, Zea mays
  Peptide Sequence Number=SeqID_55315
atggcccgcgcccgcgcttataaaaccctcccagacttagattgttcccttccgcgcaccctcaaacctcaccggagtctagctcgtcgccgtttgcccgtgcgcagtgagtccgcggccgcccactccctctgccaccgtagaccggccagtggagccattcccaactccgtccagccctcggagaagactgtgcacacctccgtgaggctccccgagcgaggaatcggagtttacttcgccggagaggccagtccatgctcgccggagctctcaaccccgccggagtacgtggaccgggtaaaccactccaccatccttcgattccttgtgcacacggtcgctatgttaccccgtgaagctcaccatgccctcggattgaaccagttcgccgtggtttggccggtatactcaccgccgacgaggacacccgcctgcacgcgtggaccgggcgattccggccatctccgacgtcgagccgtacctcgacgtgaccgccagagtctccccgagccaaccccacccttcgccggacctccctcgccgccgacaataccaatccactatgttatccttaaagaaaacctaagcttgaaagactgtaatcttgctgacggagagtacatcctcgtgccggagcaaggagctgctcaggaggtagcccccgatccagcacccgagcttgcaccagaggacctgtctgccactgctttggaaggcaagccccggttttatgcataa

SEQ ID NO: 11941 - DNA, 741 bp, Zea mays
  Peptide Sequence Number=SeqID_55316
atggcccgcgcccgcgcttataaaaccctcccagacttagattgttcccttccgcgcaccctcaaacctcaccggagtctagctcgtcgccgtttgcccgtgcgtagtgagtccgcggccgcccactccctctgccaccgtagaccggccagtggagccattcccaactccgtccagccctcggagaagactgtgcacacctccgtgaggctccccgagcgaggaatcggagtttacttcgccggagaggccagtccacgctcgccggagctctcaaccccgccggagtacgtggaccgggtaaaccactccaccacccttcgattccttgtgcacacggtcgctatgttaccccgtgaagctcaccatgccctcggattgaaccagttcaccgtggtttggccggtatactcgccgccgacgaggacacccacctgcacgcgtggaccgggcgattccggccatctccgacgtcaagccgtacctcgacgtgaccgccagagtctccccgagccaaccccacccttcgccggacctccctcgccgccgacaataccaatccactatgttatcctaaaagaaaacctaagcttgaaagactgtaatcttgctgacggagagtacatcctcgtgccggagcaaggagctgctcaggaggtagcccccgatccagcacccgagcctgcaccagaggacctgtctgccactgctttgaaaggcaagccccggttttatgcataa

SEQ ID NO: 11942 - DNA, 528 bp, Zea mays
  Peptide Sequence Number=SeqID_55317
atggcgaggcactctgtccccacacacatcaaccgtccccatcgattccctggcaacagatcagggctcaccgtcttgatcctcgatggcaggctctggtgctggatccggggctacctcctgagcaactccttgctccggcacgaggatgcgggcgagctcgtcggcggcatgtgctccggcctatccacggcgatacaggtcaatccaagggcacggggagcttcacggggtgctaatgagttgacccgtgcaaggaatcaaagaataactcaccgtggggctcggtctacgttcaccggcggtcgggtgaagtccgaagaccttgatccggtgtctccgatgaggcagagctcgattcctcgctctgggagcttcaccgaggcacgtagagtctattctaagggttggatgaggttggggatggctgtgctggccggcgcgggcgcggggcaggagacacgggcgcgacttggcgtggcgtggggcacgcggggtcgggcgttgggcgtgctctggcgcgtttag

SEQ ID NO: 11943 - DNA, 504 bp, Zea mays
  Peptide Sequence Number=SeqID_55318
atggtggggagaagcaagccgggctgcagcctctgccctgccctcagcttcaaggatcttcatcatccttgctggggcggggggcgagctgagccggagctctacctcccgtacgggccggtgggccacctcttccttcagcattcaggggagaaggcgctcaccggcctagcggagggggtggacttcaacaacgtggggccgatcggccgcaagcgtcgtcatctccagcatgcctgcttccggtgccacctcccaccgctgggcggagtgtggctatatgcctgccgtatgggcggctgttgcgccgcgcgcaccaggggaccgcccaagacgtcgcaggctgctagggcggcgttcgtgttcttgggctgtcctaccctcgctccggcacaacgcctccgcgcggagctagctgaggctacggagcggccggtcaagccgtctgctcgggccaggttcctagaggagaccgtggcggcgatggcccaggcgcggtgctga

SEQ ID NO: 11944 - DNA, 825 bp, Zea mays
  Peptide Sequence Number=SeqID_55319
atgcagcccggttgcacccctccgctggcggtcacccaagatggtgacctccggtttgatggcgggggaaagcgaaccgggctgcggcctctgcccctccctcagcctcaaggattttcatcaccagggctgaggaggggagtgtgccgagttgggatcggcccctgcgtgggtgagccgctctcggcgccggcttccgccacggtagctggaagaggttcttctgccgacgagatagccagggccgcccacgggccgacctccaactctacggccttctgcccgcccttgcctcacgagtttgggcacgggcgggggcctcctggcagcggcatccgccctgaggtcatcgctgccgctgtttggccccccggagtagaagtcgtcgtcgtcgccgctgccggagcgggcgacggcgcgccgttcgtcaatcttccgttgctccgcagcccccccccccccatcgagtggggttgttcgtacctgcggaggtggaaccggagttccgattactcgcctgttggttctctgaaccgcttcaccaagtgtgagtcgccccatgtaaaggtgacaagtgaggggacagctggtcgaggcctcgggggtggccagccgacccgcctgcctgagccggattcttggagaagaccctggcggcgacggcccgggcttggtgatgacgccgtccttcagagtggggatcttcggaccgcgtcgccgtccgaggctaggtcgggcctcgccgaaggtgttgccgacgccgagggtgctgctgctcccttcagccgtcaagatccgagcctgcaggatcgtattgtcttgtag

SEQ ID NO: 11945 - DNA, 66 bp, Zea mays
  Peptide Sequence Number=SeqID_55320
atggctgccgccgtgtgggtcggcggcgccaccgcgctcggccgttggtattcaataactccataa

SEQ ID NO: 11946 - DNA, 924 bp, Zea mays
  Peptide Sequence Number=SeqID_55321
atgtgctcccattattatgtggcgtacccgcaatttgaggtggcagaggatgatgaggacgaaagagcccttcggtgcgttccccgcatgaatagcgggcgcgatttagttgaggaattcatcgggtatggggtatggcccttggcacatggctgggcgttgggcgaagtatgccctcgcgagatgccctccctgggcggacagcgggtgcgaagtccacccttcgcgttggatctgcatggctgggatcccgccgcattcgtgcgtgaagcggaagacagtgcgacgaggattgtggggtgctatgtgccgaggacagagggtatgcggagctgggatatccgtgggtccaacgttagattgaaccgggtcttcgaattaaactgcttgccatacggtggctatcccggggatgacgctgctgaccgccgcgagaagaaactgttggacgtgactgaggaagggccttcgcaggaggctgccccagccactaagaagagaaaattagccctcgggggaaggatgtcttcgcccgagctccgggagtcttcggcgcaaatgctggaggttaccgggggtcgatggcccaagaatgttccgatcccccgcgcggctggcgaagacttctttatgtctcgcatggctcgcgacttgaaggtttttccttatgggcggaatattgctgctgttgtatcggcagtgatgaagagggaccgtcaagacatggcgcagaaacgccgggcggtcgtcaggatcgtggatcctatgcgcgaggcgaaaaaggcgtgggggagcgcgaaggctgctgcctctggcggtagcaaaccggtgccggctgcgaaaccggccgcccccgggcacggcaaggcgtcggcgagtgcgaaggctgccacctctggcgggagcaagccaccccgggtgtaa

SEQ ID NO: 11947 - DNA, 612 bp, Zea mays
  Peptide Sequence Number=SeqID_55322
atggcgagagtagcgtgtaccctctatggcaagaggctggacgatggtgtatctgtgctctcggttggcgtgaacccggtccgttggacaaggacaactgtaggtgggcctaatgacttgggaggttccgtcacagctggtatcggagcgaaccccatctcttcagatattatgaagcatttgaaaaagaattttcaaacacttatccaagaaaatttctgtcattcttcccttgccactttctggaagttctcatcttgcaaaaccagttggctccaagacatgaagggagcagcagcggcagcaacgatccaatcggagacttggaagcccaagtggaatagcttcggacggagctacgtcaccgaaactgggtgtgggcacaagatggtgtactgcaatactttacatgaggaagtacatgtactgtattcgcgactgcacccggacatgcctgccgaccctgttgcaacgggagtcggtccatcagggacagcaggtgaaggaactgatggggagctagacctttttaggcctcctccttccatgaacctggctgatgatcggtatcccacggcaggaaatgaagaaaccaatgacgacaaagactag

SEQ ID NO: 11948 - DNA, 900 bp, Zea mays
  Peptide Sequence Number=SeqID_55323
atggcgtgctgccgctgtgttgccgcacctcgtgaagtggagggctcgtcgatgtggccgttcgaagcgtgcttggggactccgggggctcgcgcggggtcaccgatgggtatccgctgcttgttcgggcaggacgggcggttggcatggcagaattcctcaccggagggcgccaccgccgtgcggcccacatcgtaccgtgactggggattcgggtctcatgggtttatgtgtcaggcggccgacttcgccgacctcgtcgcgtcgagtgccttgactgcggacgttgctgccgaggtcgagcgtctccgggcacagtatgcggatgttgtgcgggagaagtcggctgcggaaagcaaaaactgcaggctgtcggagaaggtggccgccatggaggcagagaagacggatctccggcgccagctggcggaggagaggagggaggcgaacaaagccatcgctgatgcgcaggctgcgcaggccgaagccaaagtggcgcgggcggagggcagtctcgcccgccaacgcgccgaggagctggaggcgaggttcaacgccctgcgcggccgcatggacaaggccgaggcctcgacgcgcgcagaggtcgagcggatgcacgcgcaattcgtggacgcgtaccgcgagctgggtgcgtggactgctgatttcaaagtgcccggtcaagaagcgggcctttgcttccttgaatggttgcaggaggagctgctggtgctcccgaccattgtgacaggtttcatgtccttcgcctccctcgtcacctgcgagggggtcgtgaatgctttgtcccgtgaggggtgcaggcattacgaggtctttgaccaagcggacaaaaactttgaacgtgaaatcttcaaggtcgaagaccccgtggtgaagtag

SEQ ID NO: 11949 - DNA, 297 bp, Zea mays
  Peptide Sequence Number=SeqID_55324
atgtgtgtcagcttctttaaggctgctctatggactagcaagctccaagagcatggtatgaatgccttagaagatttcttgattggttaccaaacccccaaaaacacccactgccctatgaactcctttacagactccggaaaccaacgtgaagaagaggtagaagtccccgaagagcaagtgcaaccacctttggacactcaggccgggaatagtttctacttcgacatttgtggatccgagcctgaatcacctgcaaaagaaggcaagccccggtgcatttgccacctcccttga

SEQ ID NO: 11950 - DNA, 552 bp, Zea mays
  Peptide Sequence Number=SeqID_55325
atgcggggctgcgggggaaactcggctgcgaggagctgcgctgtagggggttggatatgcttcagccgaagtggagggggtggtgctgtccattggactgtgcaaaacagtgagccgacagagcgtggagttgtcgcggctgctgctgggggaatgctcgtgtgctatggaggtcggctggtttccatggtaagtggagcgcagagctgctgcgccgtagagcgaagaggagcaggggcgtcgatagagggctcgcggctgggagaggagcacagagacgccctgctctgtggagatgaagggcgcaacttcctgcaacccaacggcatggagaacagggagctcgacatggctcccatggcagcagcggccaccaagaccagccatccaactggaggagccaagcacctagggcagggagcgagcgctaggggaagaagggcgcgcgcatccgggtgcccagggagaagatccggcgcaggggcgtccatggagctagctctgttcgaccaccatgggagaagagcaggggctcagggtaccgagcgctag

SEQ ID NO: 11951 - DNA, 2481 bp, Zea mays
  Peptide Sequence Number=SeqID_55326
atgcaggcggcatgcaactgcaccacggggatgcaccctttcgacttcgacgcatccagcatggaggcccaggcccacacgtcatgtaaccgacgcaccggttactacgtgcgaaaaactgcaccgccacttacgcaaaaactgcgccttctcgactgcggaaccggtgtcgcgactcaaggcgaccctgcgcatagcccaacagtgccaaccaggcacatcgatcacggatcagtcagccgcgggagaaggtgcgacgaccgatatggccaaaagtgggccggcagtaatggcggtagcagacggacgggagcagcagtcaaatcatctgcaggctcacgtcccctcctggagcagcaggggagccctctcccacggcgtgaagccgacgcgcccgtgttccgttcctcgaacggctcgcgcaacggctgccccgcgaaccactcgtcccgtcgcattaactccacggcagggcaggcgacacctttggcaggcgaagcgaggtccgggaaaggggatactctgaaagggatccttctccgcgaaggaagcgggccccgagccctcctactgatcaggagttcgaaggctggcccctcggaagggttcgacagccacccagagcactcgggctccacgcccactactggtcagaggctgccccccgaagggttcgacagccgcctcagaacacgcagagcgagggatgactctaggtacgtccgatacatggccgaggctcgggctatgctcccgaggccactagccgacccttatcgaacggggcacgggcgtccactcggatcacacgttagcaactcactggagacaccatgttcggcgccctccgagggcaacatggtcaaggctccgtccactcaagggacacgatctcgcctcgcccgagcccagcctcaggcaggaacagtagaccaaggcagattcacgcctcgcccaagggcatcctcaagtaacaggcgcaccttcgactcgcccgaggcccagctcgggcaggcttcacatcggcagggccgaagtgaccgcagtcacttcacccctccactgactgacctgacaggaaaacagcgccgcctgccctgctccgactgctgtgccacccgccagggtgccataggaagctcctcctcgcccgaccctagggctcagactccacctcgacctcagaagacggtctccgcctcgcccgaccctagggctcagactccacctcgacctcagaagacggtctccacctcgcccgaccccagggctcggactccacctcgacctcagaagacggtctccgcctcgcccaaccctagggctcggactccacctcgacctcggaagacggtctccacctcgcccgactccagccttcttggcctgatagcgggatctacattaaaacttgagccgcttgtgattgggagcaccagcttcgtagccaaaggtgccacagcttggttgtcttgcgaagccattgtcgcagtcgtggaagtgagttcaccggaggtgggcgccaatgttggtcacttgttctcgaatgcttcggcttgctccaagccaaagctatcggtagcttcagcgttctgcattgttgctccttctcgaggtcttcgtcttgagaaccttcggcagaaggagagcgaacttcttgtgtcactttgtcgaaggttgaatcctgacaaagtcgttgaacccgagtggttcggtgcaccggaccagtctggtgcaccaggccacgggagtctacagagctctctgcgtaagtggtctagcgcaccaccggactggtccagtgcgccaggccgtcgaagaccttcggcggaggtctccacgcgtccacaggtgctgttctgcccgccacgatttctccacgtgcaatccgccgcctgccatcgccagcgcgcaatcctttccatccgcgtccgcaatccgccgcgcccctgcgccaaatacgccaccacgcccctgctcaccgatggaaggtctccacgcacaatctgccgcccctgcgccaaatccgccgccatgcccctgctcgccgatggaaggtctccacgtgcaatccgccgcctgccatcgccagcgcgcaatcctttccatctgcgcccgcaacgctcgcccatgtgccaaatcctccttggacgcgccccgacggctggcgcaacccctcctcgtgccacgacttgcggagaatggaaggtccgtggagcaataaagggtggagcgaaggttattggcggcggcgggatcttcaacctatttgattggaagcgaaagtcgcgcaagaagctgttctccaactcgcccgaggggtccaagcttgttaagaggagcgaagaaacattgctgtcagggtgtctccacttggtgagttatctttggcgtcctcaaccttgttctgaacagcaaatcgttgttgctttcctgcttgtcgttcgtccttttcttgctcttagactggctcctgtttag

SEQ ID NO: 11952 - DNA, 1431 bp, Zea mays
  Peptide Sequence Number=SeqID_55327
atgcaggcggcatgcaaccgcaccaagtgggcgcaccctttcgactccaacgcgtccagcatgggggcccaggcccacacgtcatgtaaccggcgcgccggttgctacgtgcaagaaactgcaccgccactcgcgccactaccatgcctcctcgactgcggaaccagtaccgcgactcgaggcaaccctgcgtatgacccaacagtgccaaccaggcacgtcggtcacgggtcagtcagccgcgggagaaggcgcgacggtcgatacggccagaaatgggccggcagtaatggcggtggcaggcgggcggaagcagcggtcaagtcgtcagccaagctcacgacaggcggcgcctttggcaggcgaagcaggcgacgcttcacctccgccataatggccgtgtcaaaaaaggtgcgccacgtcactcgatttcgtatccttttcctcttcctctttctctctcttacaacagggaccgggaaaggggataccccgaaagggatccttctccgcgaaggaaatgggccccgagcccccttactgatcagaggttcgaaggctggcccatcggaggggttcaacagccgcctcagagcgctcgggctccgcgcccactactggtcagaggttcgaaggccgacccctcggaagggttcaacggccgcctcaggccactcgggctccgcgcccactactgatcaggggttagtaggctggccctcgaaagggttcgacagccgcctcagacacagagcgagggatgaccctaggtacgttcgatacataaccaaggctcgggctacgctcccgagtcacttcgccgctccactgaccggcctgacaagaggacagcgccgcctgcgccgctccgactgttgtgccactcgacagagtgaggctgacagcggccaagtccgggcctcgggcgccataggaagctccgcctcgcccgaccctaggggctcggactcgggctcagccccggaagacgacgaactccgcctcgcccgacccccagggcttggactcgggctcagccccggaagacgacgaactccgcctcgcccgaccctaggactcggactcgggctcaaccccggaagacgacgaactccacctcgcccgaccccagggctcggactcgggctcggccccggaacacgacgaactccgcctcgcccgaccccagggctcggactcagccctggcctcagccgacggtctctgcctcgcccgacccaggggctcggactcgacctcggcctcggaagacagactcgacctcgacctcggaggagcctccgcctcgcccaacccagggctcggaccgaccacgtcataggaggcgccatcattaccctaccccaagctaactcaggctatggggaacaaaaccggcgtcccatctggctcgccctggtaaacaagtaa

SEQ ID NO: 11953 - DNA, 588 bp, Zea mays
  Peptide Sequence Number=SeqID_55328
atgccttcgcactcccctcatgcatcgcgtccttccatcttccgagccccccggatggggagcgcccgcgttgctttcgtcttgctgtcgttggaagagcgcaacttcgcggaagttggtacctttcatccatcgctcggcttcaaggattttcatcaggcagcccggctgcatcccctcgccgattgtcaccgaagacgggtgcagcatttcgtcctttgttcgggcgactgtggccagccgcaccagggggtctcacaacacgtcgtacgccgcgagggtgatactcgtgttctgggacggtcccattctcgttttcgtggcgaggacgggagtgaggacctgccggtgcgctttggggcgaccggcgcccactggtgcggtgttggtgggcaggtggacgccgccgccggtgctgaggtgatggcagctggagaaagcttctccgccgacaagaccgtcagcgccacccgcgggccgacctccggctctttggctttaatgtctggttctcgtccctcgagtggggacacgaacgagagccttccagcggtagcgtccgtcctaggaccatcgctgctgctgtag

SEQ ID NO: 11954 - DNA, 87 bp, Zea mays
  Peptide Sequence Number=SeqID_55329
atggcgcgggagcagagggtggctgctggagtcatatggtcccatgagactgttacgcccttcccctcatgtgtcaagatcctttag

SEQ ID NO: 11955 - DNA, 1068 bp, Zea mays
  Peptide Sequence Number=SeqID_55330
atggcgacctccagcttgatggtgggggaaagcgagccgggctgcggcctctgccccttcctcagcctcaaggattttcatcaccaaggctggggaggggagagcgccgagttgggcgtgcccggtcttcagccgcgggtggcttcggggccgctcgcggcgccggcgtccgccacggcagctggaagaggttcttccgccggcgcggcggccgggaccggccacgggctgacctccaacttctcggccttctgcccgtccttgcctcacaagttttggcatgggcgggggtcccctggcagcggcatcgaccctgaggtcggtgctgccgctgttcggccccccggagcagaagtcgtcgttgtcgccactgccggagcaggtgacggcgcgccgttcgccggccctccgttgctccgcagaccttccccctcggagtggggtcgttcgtgcctgcggagggggaaccggagttccgttcgtagtggcatttcgaatgccagtgttttttgttcattgcggctgtcggggcctgaacatgaatccctcggcccgttcggccttgttgtctggggctcttctagcttagttaaagagacccctcggccgtccttcggtggaccgaggccagggggtaaccggtcgagccgcctgctcgggccggattcccggaggagtccctggaccgcggcgccgcccgaggctgggtcgggttttgctgaagacgtcgtcgatgccgagggtgccacggctcccttcagcgtgaagacccgagcctgcaggatcagatcatcttgtagcgtgtgttttctgcggccgccgaggccagaagaacacaccctcaccgcgcttgcgaagccgcgtcttttttcctcttgtttcgagcatctggactctgtcggtaacagggatgtttgtgtgagcgagagttgctttttcgcggaagggacgagtgagaaggtgatgagtgaggtatccgtatcccggaggcgtaggagtccctcggctcggtcagccttggctgcttacgtgtacctcgtcgtttccaggatccgctttccgaagtag

SEQ ID NO: 11956 - DNA, 1686 bp, Zea mays
  Peptide Sequence Number=SeqID_55331
atgggtgcggctcgtccgcggcgctggaagctgccgttccaccgcaccgtcagcgccgtgggcggcgggggcggcgcgccgtgctcgccctcgtccaggtcgtcctcctcgcccgcgcggtccgaggcgtgggcggccgaggcggtgccggaggagttcctgtgcccgatctccggcgcgctcatggcggaccccgtcatactgccgtcggggaagaccttcgagcgggcctgcctccaggcctgcgcggagctcgcgtttctgcctccgggagtcgaggccggggacgcggacactgtcatccctaactccgcgctcaaggcggccatctgcacttggtgcgcgcgctccggacgggaggtgccggcgccgccgtccgccgaggcggcgcggcaggccgtgcagcgcgctatgcctccggcggctgccaagtccgtgaggacgaccaccacaaggcgcgcggtggtgatggccgcgagcacatcaaactcgtccacgtcgtcgtacgggtcggcctcggagatcaccgcggcggaggacgaggccaaggccaaggaagaggcgccgcggaggaggacggtcaaggaagcggaggtggagccggcggcggcgccgccggctgacccgctggaggacgatgtggtgggcaaggtgatggacgcggacgacgacggcgtggtcgctgcggcgatgggcgcgctgcgggaggccacgcgcgagggcgaggagcggcggcgcgcgctatgcacgccgcgccttctcggcgcgctgcgccgcgtgctgctgctcccacgccacgcggccgcccgggtggacgcggtggccgcactggtcaacctctccctagagcccgccaacaaggtgcgcatcgtgcgcgcgggggcagtgccggcgctcgtcgaggtgctccggtcgggcgcgtcggcgcccgaggcgcgggagcacgcggcgggggcgctcttcgggctggccctcaacgaggacaaccgggccgccatcggcgtgctgggcgcggtaccaccgctcctcgacctgctcacgtcgcccacccacgcgccccgcgcgcgccgcgacgccgggatggcgctctaccacctcaccctcgcggccgtcaaccagtccaaggtcgcgcgcttccccggcgcgcccaaggcgctgctcgccgtggcctcgggcgccgcggagccggggcccatccggaggctggcgctcatggtggcctgcaacgtggccgcctgcgccgagggccgcaacgcgctgatggacgcgggcggcgtggcgtccgtctccggcatcctcctctcgccttctcacgacaccaccaacggcggcggtggcaccgcggacctggaggagtggtgcctgtcggcgatgtacgcgatgagccgaggcagcctccggttccgcggcctggcgctcgcgtccggcgcggaccgggcgctccggcgcgtggtggccgacgagggcggcggcgtccggcgcgagattgctcggaagaccctccgcgccatgcggagcgacctcgacgaggacggcggcgagtacaacgacctgaccggaagcagcgcggagtgcggcgacggtgaggactgcggcgggagcatcgtgtcggacgggctcatgtcgttccggcgccggcagcgcgagctcggcgtctcgtcgtgcggcaacaccgccgagttctga

SEQ ID NO: 11957 - DNA, 246 bp, Zea mays
  Peptide Sequence Number=SeqID_55332
atggggacaatttttgtcccatacccgtaccctgatagggaaattccctacgggttggcgggtatcgggtccccattgacatctctagtcatagcctacggtgtcgaggtgaaagacatgtaccgggagacgttgtgtcagaagagaggtcgtcctcgggagttatatccggacgtatctagtaaggatgctcctgttcctcctgaacttcctgtgcctaactgtgactgtggcagactggcttag

SEQ ID NO: 11958 - DNA, 147 bp, Zea mays
  Peptide Sequence Number=SeqID_55333
atggccccttgcctcgaccttacttacagcagggctgtcagcatggcgctggcagttgaagccaaatatgcaggcccgggaaaatcaaagggctatggaggcgacaggcccaatcaggggtctgagaaaagacaaaggacaacttga

SEQ ID NO: 11959 - DNA, 309 bp, Zea mays
  Peptide Sequence Number=SeqID_55334
atgaactcaaagactcccgaaacggagcaccgtcccgggttggagaggttgctggagactgcccatctggagcttgacgggaagctgttcgtcaacacgcagcaggcccctacctggcgcgccaactatcggcgtttcgagaccgggggggtccctaagccgacgagtgaaatgtcgccgcgtgccccagcccagatgggtggacgcgaggccgagcgcgaaggggggaaacgaggcggccggagacaggcgcgtaaggagaggatccaggtgtacaatggggggtgtagcagagtgctacgtgtctag

SEQ ID NO: 11960 - DNA, 399 bp, Zea mays
  Peptide Sequence Number=SeqID_55335
atgacgctctcgacaccttggtgcattgggccttcgattgatgtcttggtctatcaagtatcgttgtgtagtctaccagcacagtcgcggggttatacccaggctagtgggaggctacctgcttgtagtaccagaggtgtgattgtctcacctgttggtgagggcaatcctagattgagcagcatggtcaacctggtcgccgtgctcaacactgagctagaccacgcccttgacgagttgggcaagactcgggcggagattgcgaaattgcgtgctaaacgcgtggagtgccgccatcacgaggatagttcccccgaccctatcaggactcaacacccttactgctcgccgccccgtggtcatcatgcttatgacacccctgctacaggaccaagatag

SEQ ID NO: 11961 - DNA, 174 bp, Zea mays
  Peptide Sequence Number=SeqID_55336
atggggctcggtgtaagcggctcgctctgccaagatgatgagaggaggatggttatgattatgctaatggtaatggttgcctttggtgcaatctatgctcaggtaaaggagaaggagaacggtgtcgaggcggatctccgggagttccaggacttcgacgagttcgaggattag

SEQ ID NO: 11962 - DNA, 375 bp, Zea mays
  Peptide Sequence Number=SeqID_55337
atggcgcctcctgttgacgtggccggctcgcgcccgaggttgggcgatgtggaggctcctccgaggtcgaggtcgagtctgtcttctgtggccgtgatcgagtccgagcctctgggtcgggcgaggcggagaccgtcggctgaggccagggctgagtccgagccctggggtcgagcgaagtggagttcatcgtcttcaggggctgagcccaagtccgagccctgggtcgggcggagcggagctcgccgtcttcaggggcttagcccaagtccgagccctgggtcgggcggagcggagttcgccgtcttccggggcttagcccgagtccgagccctgggtcgggtggagcggagttcgccgtcttccggggcttag

SEQ ID NO: 11963 - DNA, 534 bp, Zea mays
  Peptide Sequence Number=SeqID_55338
atggagcaccgtcccgggccggagaggttgctagagactgcccatctggagcttgacgggaagctgttcgtcaacacgcagcatgcccctacctggcgcgccaactgtcggcgttttgagaccggggggtccctaggccgacgagtgaaatgtcgccgcgtgccccagcccagatgggtcggcgcgaggccaagcgcgaaggggggaagtgaggtggccggagacgggcgtgagagaggtggaaatcctgcggccttcgtgttcgtcccgcgcccaagtcggcctgagtcagcttggggtagggtaatgatggtgcctcctgttgacgtggccggctcgcgcccgaggttgggcgatgtggaggctcctccgaggtcgaggccgagtctgtcttccgtggccgtggtcaagtccgagcctctgggtcgggcgaggcggagaccgtcggctgaggccagggctgagtccgagccttcgggtcgggcaaagcggagttcgtcgtcttctggggctgagcccaagtccgagccctag

SEQ ID NO: 11964 - DNA, 156 bp, Zea mays
  Peptide Sequence Number=SeqID_55339
atggtttggttacagatgatgatgaggaggatggttatgattatgcttatggtaatggttgcctttggtgcaatctatgctcaggtaaaggagaaggagaatggtgtcgaggcggatctccgggatttccaggactacgacgagttcgaggattag

SEQ ID NO: 11965 - DNA, 564 bp, Zea mays
  Peptide Sequence Number=SeqID_55340
atggcaccccgatcgtccacgatggatcatccagatccaaccgtccgcaagctgctcgatgcaatggcgttgatggagaatcgcttgactgaggcgctggcgggccgtggtggcgagcagactcctgcctcctccttcgccttgctgtttgactcgttcgagggcaccacaacttcctccaccacagcgctacaatacgtcgacgacgtgttcagctcttcggtgggcgcggcgtacgccgcaagcccctgtgcgcggtcgcgttctccatcctacgacgacgacgaaccagtcttcgatgcatggcctctcttcgacgaggaacctgtcgacagcgctaccactcaagctctcttctccgacgatgccgaccactgcttcgacgacgagctcgacaccgaccggaccatggagttccgcttccccacctccgagttcgacatcaagcaggtcgtgtttgtggtcagcaacaccaaggactcgctggagttcgccagcgcgcgaagggtcgagatccgcacgcgcgtgaccgtggcgtgcgaggactgggtggtggaccactga

SEQ ID NO: 11966 - DNA, 1605 bp, Zea mays
  Peptide Sequence Number=SeqID_55341
atgacgcggtgcctcatgttcatgccgccgctgttcctcgtgtcctccctcatctccaccgtggggctgccggtggagccgcccgcggagctcctgcagctcggaggcgacgtcagcggcgggcgcctcagcgtggacgcgtccgacatcgcggaggcgtcgcgggacttcgggggcctctcccgcgccgagcccatggcggtgttccagccgcgcgcggccggcgacgtggcgggcctggtccgcgccgcgttcgggtcggcgcgcgggttccgcgtgtcggcgcggggccacggccactccatcagcggccaggcgcaggcgcccggcggcgtggtcgtggacatgggccacggcggcgccgtggcgcgggcgcttcccgtgcactcgccggcgctgggcgggcactacgtggacgtctggggcggcgagctgtgggtggacgtgctcaactggacgctgtcgcacggcgggctcgcgccgcggtcgtggacggactacctgtacctgtccgtgggcggcaccctctccaacgccggcatcagcgggcaggcgttccaccacgggccccagatcagcaatgtctacgagctcgacgtcgtcacagggaagggagaggtggtgacctgctcggagacggagaacccggacctattcttcggcgtgctgggcgggctgggccagttcggcatcatcacaagggcgcgcatcgccctggaacgtgctccccaaagggttcggtggatccgggcgctctactccaacttcaccgagttcacggcggaccaggagcgcctcatctccctgggcagccgccggttcgactacgtggagggcttcgtcgtcgccgccgagggcctcatcaacaactggaggtcctccttcttctcgccgcagaacccggtgaagctcagctcgctcaagcaccactccggcgtcctctactgcctcgaggtcaccaagaactacgacgacgccaccgccgggtcggtcgagcaggatgtggatgcgctgttgggcgagctgaacttcatcccaggcacggtgttcacgacggacctgccgtacgtggacttcctggaccgcgtgcacaaggcggagctgaagctgcgcgccaaggggatgtgggaggtgccgcacccgtggctgaacctcttcgtgccggcgtcccgcatcgccgacttcgaccgcggcgtcttccgtggcgtgctggggggcggcaccgccggcgccggcggtcccatcctcatctaccccatgaacaagcacaggtgggacccgaggagctcggtggtgaccccggacgaggacgtgttctacctggtggcgttcctgcggtcggcgctgccgggcgcgccggagagcctggaggcgctggcgcggcagaaccggcgggtcctcgacttctgcgcggaggccggcatcggcgccaagcagtacctgcccaaccacaaggcgccgggcgagtgggcggagcacttcggcgccgcgcggtgggagcggttcgccaggctcaaggcccagttcgacccgcgggccatcctggccgccgggcagggcatcttccggccgccgggctcgccgccgctcgtcgccgactcgtga

SEQ ID NO: 11967 - DNA, 1641 bp, Zea mays
  Peptide Sequence Number=SeqID_55342
atggcacctaacttgctagagaatgatatggatctacattttgatcttcttagtctccacttcattgagctagttcgctccaaaaaattcacagaagctcttgactttggccagaaaaaattgacatcatttcagaaggttaccaagtatattgagaaactagaggactttatggccctcctggcttatgaagagccggagaagtcacctatgtttcatctactaagcccagagcacaggcagaatgttgcagagggcttgaatcgggctgtccttgcacatgctaatcttccagcatattcatcgttggagagggtggtccagcaagcgactgtggttagacaatacctacagcaggaagttggcaaggattcttacccaccattttctttgaaggcctttctgagcaacaccgggactagcatgagcatgagcataagcattccagtgaggtttggaccctggggtgggaacagtggcaccatctttgacgacgggatatacacgggtgtccggcagatcaatttgacgcgggggctagtagggatatcctccatgaaggttctctacgaccgcaacgggcaggccgtatggggcgacaagcgcggagtcagtgggggctctactagagctcaaaaggtcgtgttcgatttcccgtcggagatcttgacgcacataaccggctacttcggctcgacgacggcgacgatgaagatgaagatgggcccgacggtgatcaggtcgctgacgttccacacgacaaggaagagccacggaccgttcgggggggacgagcagcacggcaccttcttctccagctgcctggccgacgggaggatagtagggttccacggcagggcgggatggtacatcgacagcgtcggggttcacgttctggaagggaaggtgctgtcgcagcagagagacgacgagacgcgttgttcactagcactagcagcgagggaaagggaagccggagacgaggtggcgccggctactactactactacatacggcgtggtgaaagagccggtcccgataggccccggaccgtggggcggggacggcggcaagccgtgggacgacggcgtgtacaccggcgtcaggcagatgtacatcacgaggaccgacgacttcatcgggtctgtccagatggagtacgacaggagcggcaagtccgtctggtccaccaagcacggaaacggtggccagcagcagatcacaatcacacacaggatcaagctggactacccgcacgaggtcctgacctgcgtctacgggtactacaacgcgtgcgtcgaggaagggcccagggtgctgcgttcgctcaccctggtcagcagccgggggaggtacggcccgttcggcgacgaggtcggcgcctacttcacctccgccacgacggaggggaaggtggtgggcttccacggccggtgcggcctctacctggacgccatcggggtgcacatgcagcactggctcggggtcggggacgccagaaccgctcgcgcttccgctccttccaagtactacatttccaggccaggccacattgactggggactgagaccaggccgtggactctttgaccgcaggcgtggaccctttgaatttgatgaccgcgtgtggactcggtcgtga

SEQ ID NO: 11968 - DNA, 162 bp, Zea mays
  Peptide Sequence Number=SeqID_55343
atggtgggtacaagtgcggtcactgcacggcggcagccggggtcagtggagcattgtaccatgcaggatgtagttgatggtgtgacttggcctaccaccctgccaccgggttggcaggtcgagtggcatgttgctccggcaggagaggagcatgaggagtag

SEQ ID NO: 11969 - DNA, 1716 bp, Zea mays
  Peptide Sequence Number=SeqID_55344
atggcgcacctcgcacacgactacttcacgcttccacccgaggacaagcctccgcttggcccctacatcgacacggctccatctccagcttcctttatcccgcagttggtggagaccgaggaagaggatgaggttttccacacctcgcccagcacgtgttcgacgatggtccccaaccgcaatgccaccaccagcatgctcgccatggtcgaggccacctggagcgacgagtacgcgctcgtggacctgcagtccgtctgctactactccacgtccaacgccaagcccaagctcaatagcctcgacgaggtcgatccgaagctgctcaagaccttcattccgctcaccgagcagaagcacctctccgacgtcgccatcgacgccgtcatcgactccgcctccatcaccatcacccaccacgaggcgctgatggccaagggtgtcatcttctactccatccccaagtccatatgtgagtacctagaccttgtcaggcactacctgagcagcatcatactgccaggcgacaactactatgccgccctcaattcagcggtgttcagcgacgggtccttttgctttgttcccaaggacacagtctgtcccatggaaatctcgacctactttaggatcaacaacaaggagaccaaccagttcgagaggactctgattgtggccgatgagagatgcacctatgtcttgctcattgagttgtgtcttcaggttgatggtgttaaagttcggcttccgccttggccaccacctatttggacattctggctgccttatgatgtgtgcagcgacatgcattacaactgcagatactgtgcctggttcaagggtatttggcagccactatttttggtgaccccattttatattcgacagctgaagcttggttgggacgtttttctgggaaaggaaattggagagccgcagggactgaagtggttggctgttagttcggggaatatggctgagaagatgcaaaaagggggggcaagaatccattgcttgtctctgcgccttactgatgaatactcctcaaatgcccatgcacggaaccggttactgccaccagaactattatttttgctttctgatacgaaaacacattctcggatgcattcgtggattgctctcaattccatttctcctgcaatagtcgaagtaaaaggtgttcaccagtttgactggctgacaagagaaaatgtctcagtactagaggctatagaaagccaccgaggagtcagaaatcactatcatggagatcatggaacagtttctagtgcaagtgacaatcctagtattattgcttcaaagttgcaggctcgaagccccaaatacatatccctgctgaaccatcttcgcatttatttgcctgagcttttccccaacctcaacaaggtggtcttcctcgatgatgacattgttgttcagcttgacttgtcttccctttgggctatcaatcttgaagggaaggtaaatgaagctgtggaaacatgcagaagggaagacaactgggtgatgtgtaagcgtttcaggacatatttcaacttctcacatcccatgatagctcagagacttgaccctgatgtatgtgattgggcatatggtacgaatatatttgatctggcagtttggaggaagaaaaacatcagggatacataccatttatggttgaacaagaatctaaaatctggtcttacagtctag

SEQ ID NO: 11970 - DNA, 1332 bp, Zea mays
  Peptide Sequence Number=SeqID_55345
atggcggcgcatgacccagccggcggcggggattcgactcggccacaaccgtcaccacgacagcgtgtggaggtgccggatccaaccgtttttgagcgagttacaaaaaaatcagtgcgtggaatatggtcacgcagatcaaaactcaatcttgttggtgcccatataaatgtctttactggtgaatggacacagaaggcatatttattgtttggagatgaagaatacctgtacatttttcaggaggcttacaaagctgccatgcactatctccatcatgatccttggtacgtggaggttaatatgaactctggtgctactgtttggccactcttcaatagtctgcaggcattctggccagggcttcaggttttagctggagatgttgatcctgctattcgcacacatgctgccttcttcagcgtctggaaaaagtatggttttacccctgaaggttttaatcttgctacatccactgtacagaatggacaaaggagctacccgctacgaccagagttgattgaaagcacatattggttgttcaaggctaccagagattacagataccttgatgttggaagggacatattagcaagccttcaatatggtgccagatgcccttgtggttactgccacatatcagatgtggaaacccacaagcaggatgatcacatggagagttttttccttgcagaaacggtcaagtatctctggcttctttttgatttagctgctggccctgacaatattgttgaaaatggaccatataagtacatatttagtacagagggccatttgttacctgttactcctgagatagccttggaagatgaacattgttcatattttggagcattctgtaatggcggtgccgaccatggatatggtgctagtgctagttctactaagcatcgaaatggaaactatacccaattagatgatattcaaaccccttccagtcactattcaatgtccaatgtgttgtttacgccaggttacatcaagggagtttgtccaggattgactcatgcgcagaaatttgggatatcatactctgatgaagaggataactttatagagcagacttctgagagtcttgatcatcatggtgaatctgccatagaatctagcgtccaagaccaatcaagttctattatattgatctctcacccagtcgcaagccaacaggatgaggcttttgagagcgagtctggaagtcaagatcatgcaaatattgttgtaacttctgattctgattctgattccacaagccgtgataatactgttggctctcccggaatgaactcggaagaacttatggacgacatatag

SEQ ID NO: 11971 - DNA, 288 bp, Zea mays
  Peptide Sequence Number=SeqID_55346
atggacggccaagtcactccagcaaccatgtcctccagagaacctgtaaaaaattatgccacaagcaaggctgagtatactaatactcagctagacttacccggtaacaatggatcaagcagtctcattagctgcgagaagcagacgattcgaatcgagtttttatccttgcaagtgaccgcacttgtacccaccataaccggaatgggagaccacgtctcaggtcacgtgaggggtaaagtccactgccaggttcaatcaggatgtggtaaacattatgctaagtaa

SEQ ID NO: 11972 - DNA, 870 bp, Zea mays
  Peptide Sequence Number=SeqID_55347
atgacttcccacggatcctcggacaaagggaatgcactgtcccacactgacgggcttgcacgagagggctttccccgtattttgtgggaggtacttcagggggctggttacatgacgcctcctcagtacgcgatgcagcagttcgagaagcaccgagtgccccgctgtagggtgaggatgaccctagagcctcatcccctacaaccaggctggcgttcgctggactttgagtcctttggataccgggctgaggatacgatcgaggcgattgcccttcacggactgaccactttctacggattccaccccttggagatgtccactcaccccattggcttgttccccgctgagaaggaggacgacccaatgtggaaggaccgagtggagcatgccaaggacatctgggctatctacctaggtcagactgctcacttgacagtgtggtgcatgaatgccctataccgtctgcaagtgatgcgtggtgaggcaatgtcccatttgatggcattgttggaggcaactaagatcaccctggataacagagaggagcttgtggttgacttgtccacatatatggtgaaaaaggacttacaggtggaacaactgtcaaatgagatccaagagcttgaggagttagtagggaccagggagaacaccatcgaggttctcgaggatcagcttatcaacactcagcaacagcttgcggaggctaacgagcacctgaatatgcatcaccaggagatccaggacatggaggccaacgaggatgtcgacattgagggaggagaggagcctgcctctagcttggacactgctggctcagggagaccaccttcccccgagtcgagtgttgccttgttcgctcactag

SEQ ID NO: 11973 - DNA, 156 bp, Zea mays
  Peptide Sequence Number=SeqID_55348
atggtgtcgctggcggtaatggtgggggttgcgctgcaaaaggggtgtgggggcggccggtggggtgcactgcaaaggggaagtggggcggtggtggtgcgcatggaggcaggcacgcgtgcgaggggcacggcttgttctaggcttcaagggtaa

SEQ ID NO: 11974 - DNA, 864 bp, Zea mays
  Peptide Sequence Number=SeqID_55349
atgtcgggagatcacgccaagaaggagatggtgaccggcgagaagcccgccacaagccatgggaaggctccatctggggagtctggcaacaagatgggctggggctctgccgctcggcttgataaccctaaccgcccgaaccctatgtccctatcccgatcgcaacgccgaccccgagtccccaaccccgaagccctctctctctgctctcggtctggcggcggcgccgccgttttctctctgccctctctaccctccggcctccgcccctccctgctcgtcggtcgtgctcgccggcgtcgccctgctcgccagtcgatctcgtgctcgccggcctcgccctgctcgccagtcgccctgctcttctccgcgttcgtcgaggcctgcaagctcgtggtggaggagaaatcccctgctgaagcggcggcgatgcgccctgaccgcgctgcgtgcaattctgtcctttctggttgctaccgcgggctaggttcgctggcagatgcagagcgggtgctggagactatgtcggcggttggtgtctcgccagatgtagagagctttgggtgtctcgccttcctgtatgcttggagaggtgttcccagtcgggttgatgaactggatacattgtttgatgctctgggcttcagcaagaaggggtttttcaagaacctggttagtgggtacctcaaatctggtgacttcgagtcggtttcaccaatcattcttcgtgcagtgaaggagcgcagagttggggatgacaatggacttgatgaggaaacctatactgaggttgctcggtgctttgtggatcgtgcgaggattagggatgacaatgaattttgttgtcttaatatatgtaaataa

SEQ ID NO: 11975 - DNA, 432 bp, Zea mays
  Peptide Sequence Number=SeqID_55350
atggatcccaacgttgagattgaagaatgtgtcaccctgatacaattcaatgagctcaaacaaagcatagaagccaagcaagatctgttggcacaagatcttcagacacttatggctgaaatcagaggtcgtcgtcgactccccgacggtgtaagaaaccatgatgaagatggggaagaagatgaaggaaattattctagaagagcaagtgaacatgggaggagaaatcaaggtgctgcatatggtagaggaagaggccggaatcgaagaaataatgacaatgaagaatatgaatttggggatgatcagtctcaacatcgctatggtcgtcgtcatcatagaggcgtcaaccaagaagagagatttgggaaacttaagtttaccatgccaaaatttgatggtagatctgatcctgaagattatttcacatga

SEQ ID NO: 11976 - DNA, 174 bp, Zea mays
  Peptide Sequence Number=SeqID_55351
atggcggagatcgccgaacggtcggaggagtcgcggccgccgcacggggaggagagggtttcctctgataccatgaaggagagagttcgacacacaaaacctagctacaggggagctttgtcagtgggagttttgacagaatactttcagctttgggatctgatagtcgcctag

SEQ ID NO: 11977 - DNA, 504 bp, Zea mays
  Peptide Sequence Number=SeqID_55352
atggcgttcgacttcacgccccgtgcaacccctcctcaccgtgtcggcacgctgcccgtctttgtctcatctcgttggtgctcctccctccctcggggcctgcttcctccccatggtgtggatctagatcgtcgacgtctcaaaccacctcgattggcgacggcgacgccccctgccgtgtggatccgatcatggggcggccgccctgccactgcccgctccaacggcggcgcggacctcgccgtcttcgagcagttcgagcggacgattcagtctgttgcaagatatgtaagtatacacaatggtcttagtattgtctatgcatggagtcagggtgtcaatcatgctataatacgtcatgctaacaaaacttcgtacaattgttttccagctataatacgtcataaccagcctgaagtttgggcattttgcttgggaaatggctatgctggattgaaggatgctcttggttcaaatgattctagacttcaaagaatttgctaa

SEQ ID NO: 11978 - DNA, 666 bp, Zea mays
  Peptide Sequence Number=SeqID_55353
atgaaggagacgaccctctttggccatgcaggggggctgcatacccagatctcgacttctgcagggggttcaaaaagtatagatgagacctggtggttggacgcgcaggctgcgtgttggtgcagcgatgagctgatcaacaagtgtagcttccgcaccgcccgcctaacaaggaagccgcgcgctgcggcttgcaggcgcaccacggcctgctcatgtgatgacggccatggggtggccctggaggccatagcaaggcacctcatgggagaggatcttgaaacgttgaatctcaaagagcttcagcaactagagcagcagctggagagttcactgaaacatatcagaaccaggaagaaccaacttatgctcgagtcaatttcggagctccaacggaaggagaagtcgctgcaggaggagaacaaggttctgcagaaggagctcgcggagaagcagaaagcccagcggaagcaagtgcaatggggccaaacccaacagcagaccagttcgtcttcctcgtgcttcgtgataagggaagctgccccaacaacaaatatcagcatttttcctgtggcagcaggcgggaggttggtggaaggtgcagcagcgcagccacaggctcgcgttggactaccaccatggatgcttagccacctgagcagctga

SEQ ID NO: 11979 - DNA, 306 bp, Zea mays
  Peptide Sequence Number=SeqID_55354
atgttggataatcttgctgatcatctcaagggaaagattggatgtggcgtaaactatatcgcagatgaagcacatgcaagatacgttcaggaaaaactggcgacggtggagctgatggaggagaaggacgacgacacatctaggttgtgtgagcttatcgctctcgcagaggtaggattacatggggaagaggaggacgacacatcaaggttgagtgaggtcatcgcactagctgaggcagggttacatgctcaagaggaggaggacgagtgttgggggccttcttctccgccgaaggtcctctaa

SEQ ID NO: 11980 - DNA, 144 bp, Zea mays
  Peptide Sequence Number=SeqID_55355
atgcttttggtacaggtggctatgagattgatggttcttggtattgactatggtgctggttgtcagcattgcaaccactgctcaggagaagatgaagctgtggaaggagacttccaggagttccaagactacgacgagttctag

SEQ ID NO: 11981 - DNA, 400 bp, Zea mays
  Peptide Sequence Number=SeqID_55356
agcagttaaagcttcatttggacgtcacaacccccgcggatgtcatcccagcgtcttccccgagcaagagcaaggtggtggcccatgtggattccgcaacgacgacccagattcctctgcatttggaatcccgcaagtagcaggggatactcaacctgagctccgccttttccccgaggcggatgcggatcttaaagggttcttctacgaaaacctatttggatcggaagacaagtgccctgatgatctgaaagatatatgtaaagatctcatacaaatatctgctggccagatctgcaagtctacgctaggtggtggagccagaagccagttccgtgagctctccttcccccttcgcctgataagcacgacaagctcactggatccctttgatgcataa

SEQ ID NO: 11982 - DNA, 444 bp, Zea mays
  Peptide Sequence Number=SeqID_55357
atgactgacacagggttgattctaggagaaccttcttcttatcttctcttcactatcttcttttcactgaccctttctttctctttgctcttcccactagaggattctatcaaagagtattactatcacacattggaggaaaccaaagattatgaaccatgtacaacagtcttcaacccaagaatcaccaagcattgtgatcttaggggcgagggagtggaaaatgaagttgcttgcgatttggcagaggagattttatcaggtgacacgcggcagcaggtgcgacaaggggagggggcggtgttgccagcgatgatggcggcggtgggtgcactgcaaagggggcgtggggcgatggtggtgcgcatggaggcggacacgcgtgcgaggggcacggagaaaacctttcttaaaaagaaagaaaacacacaagctcagcaatga

SEQ ID NO: 11983 - DNA, 381 bp, Zea mays
  Peptide Sequence Number=SeqID_55358
atgtgcgggtcgccgttggggatggtcagagtaggtcggtccacgtgcgcaggcgggggagctcgtcagcggcgaggagtccggcctatccagggcacaattactaatcaaatgggtcagagagcttcaccggggatcaaggaaggcgggcggccgaagtccggtgagggtgatcttggctttccgttgaagttctgccgggtccgagagctgggaaagctttacaagctaatggcaaagctaaccgagcggttggcgcggcttggaagtgactggagaggggtggccacggtggccgaggctctggtggcaatggcgggcggaaagagctcaccggagctaaggaggggcgtctggccggcgaagatgggcacggggtga

SEQ ID NO: 11984 - DNA, 534 bp, Zea mays
  Peptide Sequence Number=SeqID_55359
atggccacggccgcgccggcgtccgtcgaggggttcgactgcaccgccaaccgcatgtacccatgccaggcgtacgcgctctaccgcgccagcttcgcgggtgtgtcgcttgatctcgcggccatcggtgacctcttcgccgtcagtcgctttatggtcgtgcacgccaacaacctctccacgacggccacgccggccaacgggcagccgctgctcgtgccgctccagtgtggctgcccctcccggtcccccagctcgtacgcgccgatgcagtaccagatcgacccaggggacacctactggatcgtctccaccaccaagctacagaacctcacgcagtaccaggccgtggagcgcgtgaaccccacgttggtgcccaccgacctcgacgttggcaccatggtcacgttccccgtcttctgccagtgcccggccaccgccgacaacgccacgacgctcgtcacctacgtcagcagcccagggacactcgttgatatagctgttactgctgagcgttgcgatttcagccgttga

SEQ ID NO: 11985 - DNA, 2157 bp, Zea mays
  Peptide Sequence Number=SeqID_55360
atggagaaaaaaacgccagtggatcgcaggacaagagaatatggggagctgtacacttcactcccggtctctgtttctttatccagaaggaagcccagcgcgcctgccatcctcggtgtgggcgatggcctcccttccacgacggcgcgccgcactcctcgacctcctccccacgagcacaacctcaaccgctccgccacttacgcacgcacgacctgcactacaccacgcggcgaggacggatggaagagccatggccaccagcacgatgaagctatcgccgtcgaagaaggcaagaatccttgctccgagctcgaaacccacatcgacatcggcgacaaggtgctgaccgagttcatcaccgagctcggccgcgactccacaaccgtcctcgagttcgacgccaagctcaaggagaagggcgccgacttccccgactacttcgtccgtacgctcctcaccatcatccacgccatcctccagcctactgcttccaaccctagctctgccaccatcgtcgagggccctgctggcgcggagtcggccaaattccccgggctcgcccgccccgacgaccccgaccatgcccgcaacctccgcctcgagctcgagcgggatgctgatgcggcccctcctgctccgatgagggacgaccgcgaccgccgctgggatgggagagccgagaccgggactacggccgcggcggccgtgagcatgatcaagacaggaggcaccacgattcggatcgagacgaactccatgaacgcgattggcggcagctgctttatacaattattcctacttatgctagattgtgagacattgtatatcaatgtattcatattgattccgttgcaacgcattgcaagacgtgtggcggcccagctgatcagcgggatgcattgcaagatatacagggacactgtcttaggggagctgaaccgccacgagcctgtgcctgttttcctcaaggacacaagctcaaatggcacattcatcaactggaaaaggccaagaaaaattcatccccggtcaagcttaatcatggcgacattatatcattatcatcacctcctcatgacgccttgtgttaactaccttgaggtattatggtttatttctcgcattaggtattcttctgagtactggaataaggacattcctgagcttgcttctgttgaagaggaaaatgcaccagttgaagagcctgttctggtaccacatgttactgaagttgtttcacctcccaagaccgaggtggccgatactggtgacttactgggcttaaatgatccaaatcctgctgtatcagctatagaggaaagcaatgctcttgccttggctattgttccaacagcctcacatagccataagtccttttttcatgcttttgagttggataagctggagcttaaagccgtgaaagacggttctgcaagctatgctgctctggaaaagaaagcagagttgtatgaaaagttatctagaggcaaggtacctgatgaagaagacaaggagaaatactatgtggatttcttccaaaaaggtttcgatcgtgtctatgagcctcagataccagagtgtagccatagagccactgatggtgcggaaccagtaaacgatcatgaagattctatgcctaatgccaaaccgttgggccttggccaagcaggcactacaatcgacagagatgaacacaagcgctttgtgagggaagttcacgaggaagtaactgaggcaaggcagaaggcctcaaagaggtcgagtttggtgggaggatggaagaggcaggcatcctgctttagtcctcaacaagctaggacttttgttttagaacgtcacagaagatctgtcaaagtagatagaaggggagatgacaaaaagtatcttggcaaggttctagctaggggtgttgaatgcgatcttgcgttgctatctgttgagaatgaagagttctggagaggaacagaggcacttcattttggtcgtttgccatgccttcaggacgacgatgacactgatattattggttgttgtacgctgaaggttgataatgttacatgtaaagattcaataagatactttaacatcgtagagattgaagagcttgtgtacaaggcaattaagggtttctgtgctggtatctctctcatataa

SEQ ID NO: 11986 - DNA, 2031 bp, Zea mays
  Peptide Sequence Number=SeqID_55361
atgaacaagacaccggcactcaaggtgccattacaaacggaactctggttccacccctgcagggcggatgctgctgccataaggccctcgcccacgccctcactcgagaggcaaggacaagcagaaggccgtagagttggaggtcagaccgtgggcggcaccagctatctcgtcggcggagaaacctctttcggctgccgtggcggaaggcggcgccggaagcggctccgaagccgcttgggtcagagagccgggcacgcggcagctgccagtgccacgaacggcgaacgcccttccccccgatcactgagggaaggagcgggccgccgcccgtgcagggactggccccaactcggcgcactcccctccccagcactgatgatgaacatccttgaagctgagggaggggcagaggccgcagcccggcttgcttctccccacccaggggctggtggtcaccgtcttgggaggatcaccctccttttaaaggtgactcttcccacctgtgtccccagccatcgcgggctgagccttctccaacacgctccaaggtcctctccctacgacacgggggctgggtcccacgcgtcatgcaagctggcccagggcagaagaagccaaaccgcctcgcgcggtgcatgcaactgcccagcggttacaagcattcctccactttcaccccaaccagcgggtgaaagggcggacagccatgcagtcggcatgcaaccgcgccaagtgggcgcacccctccgactccaacgcgcccagcatggaggcttaggcccacacgtcatacaaccggcgccccggttgctacgtgcgagcaactgcaccgcccactcgcgccactaccgcgcctcctcgactgtggaaccagtaccgcgactcgaggcaaccctgcgtatgacccaacagtgccagccaggcgcatcggtcacgggccagtcagccgcgggagaaggcgcgacgatcgatgcggccaaaaatgggccggcagtaatggcggtggcaggcgggcagaagcagcggtcacgtcgtcagctaagctcacgtcccctcgtgggacagcgagagaaccctctcccgctacgtgaagacgacgcgcccgtgttccgttcctcgaacggcccgcgcacgcgcaacggctgccccgcgaaccactcgccccgtcgcattaactccacggcgggacaggcgggaccgggaaagggggataccccgaaagggatccttctccgcgaaggaaacgggccccaagcccccctactgatcagaggttcgaaggctggcccctcggaggggttcaacagccgcctcagagcgcttgggctcctcgcccactactggctggcccacgaagggttcatagccgcctcagacacagagcgagggatgaccctggcggccaagtccggcttcaggcgccataggaaactccgcatcgcccgaccccagggctcggactcgggctcagccccggaagacgacgaactccgcttcgcccgaccccagggctcggactcgggctcagccccggaagacgacgaactccgcttcgcccgaccccagggctcggactcgggctcagccccggaagacgacgaactccgcttcgcccgaccccagggctcggactcgggctcagccccggaagacgacgaactccgcttcgcccaaccccagggctcggactcgggctcagccccggaagacgacgaactccacttcgcccgaccccagggctcggactcgggctcagccccggtggacgacgaactctgcttcgcccgaccccagggctcggattcagcactggcctcagccgacggtctccgcctcgcccgacccaggggctcagactcgacctcggccttggaagacagactcgacctcgacctcggaggagcctccacctcgcccaacccagggctcggaccgaccacgtcacaggaggcgccatcattaccctaccccaagctaactcaggctacggggaacaagaccggcgtcccatctgactcactccgctaa

SEQ ID NO: 11987 - DNA, 189 bp, Zea mays
  Peptide Sequence Number=SeqID_55362
atgggtgaggagtggtccctcgccgccttctctggatggatgccgcttggcaacacgcacgccatgctcggccgcatggatgactccgtcgcctgctacggcaaggggctccaaggaacccaaagtgagctatatgcacctttgaacgcggtgctcctcctggagcttcatcacaaggcgggtggtgat

SEQ ID NO: 11988 - DNA, 267 bp, Zea mays
  Peptide Sequence Number=SeqID_55363
atgtgggtgagcccacagctggcgattcctccggtgaaaatctttaggtcggaagaggaaaaaggaagagctctgaaattgaacaaggaacgtcgtctagcccagttgaatttcttaaagcggtttctggggaaaggctttctgaagcatgctcaggagaatggacttcttcaggatataattgacattaaggttgacaaaatccaaacactgtcgtccactaacaagaacaaattttatggtaccactttttgtgtcactaactga

SEQ ID NO: 11989 - DNA, 423 bp, Zea mays
  Peptide Sequence Number=SeqID_55364
atggagtcctcatgttattctgtaaatctcagctttgttattagcactaaatcatatgtttctttcgctacttggagtcatgaattggtccagcagacatgtcctctgatgcttaaggttttcacaaggatgattgttgggcaaagtctgcctgggactaccagcgaaactttgttgcaagggttgaagcttggcctctacagttatgcgaggaagggaattgttgttgaccgattagttgggtttcaagatctcaaaagtaaagaagattttctgacaagagcattggaacatattcttattctcaagatgaaagggataattgatgagaagaagaaagatgacgacgatgacgatgaagaaagcgatgctaagaataggagggttaggtcctcaactgctcaagacactgactcagactga

SEQ ID NO: 11990 - DNA, 279 bp, Zea mays
  Peptide Sequence Number=SeqID_55365
atgacgctgatcatcgtcgcgcaccgccgcgccggcggcgagggtggtggcggtggtgccgtcgtcgccggagacgggccgatccaggggttcctgcgcctcctcatcaccaaggtcgcggctggagcggcggcggcgctagtcggcctgatggtcatggctctcaccctctacggagctaagttgctggacagcaacgtcctctatattcattctctatattcgtcttttacaatcttctctaaaagatttcatcctctatatttttttcctctctaa

SEQ ID NO: 11991 - DNA, 1374 bp, Zea mays
  Peptide Sequence Number=SeqID_55366
atgtcttctcctctgagagttaaggatcacatgtatggtagcccaatattaaatatcaaatggcaccagacacttaattctactgaacctaaactgatcactgctgataagcacatagtgagaatctgggatcctaatacaggaaataacatgactagcattgaaccagatggtggtgctatcaatgatgtctgtgtcttccggaatagtggtttagtgctattagccctggacaatagccagatacctgcccacttcattcctgcgctcggcccagctccaaagtggtgttcacatcttgataacttaactgaggagatggaagagaaaccagatacaacactgtttgatgagtacaagttcttgactaaagaagagatggagcgactgaaccttactcaatacattggcagcagtgctgtaagagcatatttacatggatttattgtacgttatgaactatacaagaagcaacgggcagcagttgctcctgttgaatacgagacaattaaagatgagataaagaaaaagaaattagaagctcagagaaaatctcgtataacgcaagtcgtcaaaataccgaaggttaacaggcagattatggacagtataagggaagatgaaatagatcttgatatggagaatgttgataaatcaagtattaagaagaagaaaagaaaactagaactgaataaggccattttggatgatgatcggttcaaagaaatgtttgagaataaggattttgaaattgatgaagaatcaaaagaatacctcgcacttcatcctcaggcagccacaaaggagcctcgcctgattgaagaacattttgatagtgttagcgaggacgaccaacaatctgatggtaacacatctgacactctagcggaatctgacagtgatgatgtcatgcataattcaaagcgtataaggttatacgaggtcaaggatgaacaccatgcggaagcatttttgaacagcgtctctttatcaaacgaggatgctgctccccttgaggataggatagctgccctggaaaggaaacagaactccaaagcacttgatgcggtcaagtacgggcctggtggctcacgagagatttcgtttttctctaaaagccggagaaggcacaaggaagagtcgtctagcgacgacgaacccaagggtgtcaaaaagagagctgtgcagccgctgggcttgaagcagggaaaagctgagttctatatgtttggcggaaatcgtggcagaggtagaggcggtagtggcagaggtagaagcggccgaggaagaggtggaggtggaggtggaggaggaagaggtggaggaagaggtggaggaggaagaggtggaggtaggggcaggggcagaggatga

SEQ ID NO: 11992 - DNA, 606 bp, Zea mays
  Peptide Sequence Number=SeqID_55367
atgcgacgtcccctagccacgcagggaacgacgcctgaccccactgtatgggcagaccaaagggcgccacgtggcaaggagagacaacacatctcagtaagtctggactcccacagagtgacaccggacccctatgcatataagtccggagcccccggaggccagaaccctagtagggtcccagaacgaggagaactctggtatgagcaggggtccggtgctgacacgcagtgtcaaggtaatccagaaggcggcatgcctgctgggtctgctggcgaacagtacggtcgtgccaagcatcacactggcgggtgcactccgccacccggctggggatttcctctccgacatttggcgcgccaggtaggggctaggcttcgagtttttgctggttttctcgctcagcatgatggtgcggatcatcgagcaccgcgccgaaacttcggaggatttcgtgatggagcaagaggttgcatcctccgcgccacgagtggccgaccgcccgaactctgggactgctgccgtacacgccgtgcagcagcacacaccagcgcaggcgtcccggactccgtcgagggcagcgcctacggcgctgtctatggctag

SEQ ID NO: 11993 - DNA, 937 bp, Zea mays
  Peptide Sequence Number=SeqID_55368
atggcggcgagccacggcgcggggtcgctcaagtccacctccatcaacggggtcaagctctactcgctcaccggcggccgctatgtcgccccctgggtcgtcgcgaagaagaagcgcgccctccgcaaggacaaagagtatcagcggaggctggatttgatccacgacctgaggttcgagaccgccaccaccaagatcaagctgacgcccgatgaccagtacctgatcgcctcaggtatttaccccccgcaagttaaagtctacgagttgaaggaattgtcgatgaagttcgagcggcacatgatctcagaaattgtagatttccagatccttggtgatgactattccaaactcgcgtttttgtgtgctgatcgttctgtaaatttgcacgctaagtatggaagccactatagcttgagaattcccaagggacgattccttgcttctctttcctccgaatcaccagcaataaatgcggttacacgaagtaagatccatgggcttgttgcttgcggtggtgaggatggtgcagttgagtgttttgatatgaggaaaaaaacttctgttggcagaattaatattccagctgttagttctgaagattattctcaggaggtcacgtctttgcaatttgatgaagatcaaggatactttatggcagtggggaccagtacaggaaagccgtcgccgtcgggatctgccctgcgcgccaggcggccgccgcccggagtccctgcgcgccaggccgcgcgcccccagcgccgctgtcgggacctgcccctgcgtgcctggtcgccgccgccaggagccctgcgcgccaggccgcgccgccagccgaccaagcgccgcccaggactccgcgccgccgtccagcccctgcgcgccaggccgcgcccggagccagccgaccgggcgccgcccagggatccgcgccgcc

SEQ ID NO: 11994 - DNA, 2167 bp, Zea mays
  Peptide Sequence Number=SeqID_55369
ctcgcctgaaacggccgatggtcccgacgtgcacagcccagaagatgattttccatcccttgcccgccgcgggcgcgactgcgacaaactacccatttcgaaacagaacccgccgcgcccgcgagccgcgacgccgacgctcgtctgtctccatggcgccgcaccctgcctcatgcacggcgcggccatgacgcctccgcaccgccgcatggttcacctcgccccgcgccacggccacccgcccgcgcagcttcccgctccacaactgcccccgacagacttgccgctatcgctcctcccgccgccgtcgctggcctcgctgctgctcgcggccgtcgcgtcctcgccctcctttcctcacctccgccacctccatggcctccttgtccgcctccacctcccgccgccgttcaacccgttcctcctttcccgcctgctccgccgcctcgccgcgctccctcgcccgcccttgggcgcgccgctccgctacgcggtcgccgtattctcctccctctcgccgccggacccgttcctcgccgccgcgctgctccgcttcgcgcacctcacgcagccgcccctggagaccttccgcctcttctcccgcctacgctgcgcgcacggcagcgacctccctttcctcccgttcgccttctccccgctggccaagtctgccgcggcggcgcgctcgctgcacgccgctgccagtgcgcacgcggtgtcgctccttctcggagggttcgataagcatcggtttgttgagaactcgctgatcagtgcctatgttgcgtgcggtgatgttggtgccgcgcgtaaggtgtttgatgaaatgctggtgaaggatgtcatttcgtggacaagcattgtggtggcgtattctagaatccgtgatatgggttcagctgaggaagtgtttgcgctctgcccggttaaggatatggtggcatggacggcaatggtgacagggtatgcacaaaatgccatgccagtgaaggcactcgaggcatttgagcagatggcggtggccggcatgcccattgatgaagtttcactcaccggtgctatctcagcttgcgctcagctcggtgcggtgaagcgagccgcctgggttcaggaaattgcagaacggaatggtcttgggaggaatgtggttgtcgggtcagggttggtggacatgtatgccaagtgcggtctcattgacgaggcgcgcaaggtttttgaagggatgcacgataagaatgtgtatacctatagctcaatgattgttggcctagcatcgcatgggagggccaatgatgtaattgctttgttcaatgatatggttaggagggcagatgtggaacccaaccatgttaccttcattggagtattgacagcctgcagccatgcaggtatggtaaaagaagggcgctactactttgcgcagatgaaggacaggtatgggatattgccttctgcagaccactacgcttgtatggttgatttgcttgcacggtctgggctggtaactgaagcccttgaccttgtgaaatcaatgactgtggagcctcatggtggtgtctggggggcactgttaggggcttgccgaatccatggaaatactgaagttgctaaaattgcagctgaacatctttttaggcttgagccagagggcatagggaactacgtgttgttatcaaatacacttgcatcagcaggagaatgggatgaagtttcaaagcttaggaaactgatgagaatccgggggctgaaaaaggatcctgcagtgagctggtttgaaggccgtgatggatttgtgcatcagttctttgctggtgataatacccacccatcgatgcatgaaataaagaaaagattattggagctacgggaaaaattgaatcttgcaggttatgtgccaatccttagttcagttgtttataatgtaagcgaggaagagaaagaaaggttgttaatgggccatagtgagaagcttgctctgtcatttgggttgctcacacttgagtctagatcctcaattaggatagtaaaaaatctaaggatatgtgaggactgccatttgtttataaggttggtgtcaaaagttgagcccatcgagattctagtcagggacaatatgagatttcatcacttcagagatggagaatgctcatgcggcggattttggtga

SEQ ID NO: 11995 - DNA, 261 bp, Zea mays
  Peptide Sequence Number=SeqID_55370
atggagcaccgtcctgggttggagaggttgctggagactgcccatctggagcttgacgggaagctgttcgtcaacacgcagcaggcccctacctggcgcgccaactgtcggcgtttcgagaccggggggtccctaagccgacgagtgaatgtcgccgcgtgccccagcccagatgggtcgacgcgtaaggagaggatccaggtgtacaatgggggtgtagcagagtgctacgcgtctagcggaggagagctagcgccctaa

SEQ ID NO: 11996 - DNA, 1152 bp, Zea mays
  Peptide Sequence Number=SeqID_55371
atgggcgcaccggatagtccggtgcgcctgccacgtcacccaatagttagggttcgacagttggagctcggacagcctgggccaccggacagtctggtggtgcaccggacagtcactgttcactgtccgatctttttattggtttgtgttgaacctttagcacctgtagaacttataatctggagcaaactagttagtccaattatttgtgttgggcaattcaaccaccaaaatcatttaggaaaagggtcggatgctgggcaactggctgttgtctcggctccggtggcggccgcgccggtggccaaggcgaagggtgcttcgcaggacccatggtccaagttttgcgctagcggcgagattacttcggccgccgccgttaaagatgtggcgggttctgttgcgcagcagctgaagcattcggttgccttcgccgatcattttgcgtcaggcgctctgacctcggagttcgctgccgagaggcaacgactcgagggcaggattgagcgccttcgggcacagcatacggaagttgtgtgggacaagtcacttgcggaaaacaagagccgcaggctaatggagaagttggcggctgcggaggtcgagaaggaggaccttagccgtcagttggcggcggagaggaaagatgcaaacagggcatgcactgaggcgcaggctgcacaatccgaggccaaacttgcgcgtgcggaagctagtctcgctcgccaatgcgccgaggaggcggaaacgagccacagtagcctgcgcgaccgcctggacaaagcggaggcctctactcgcgcagaggtcgaccggacgcatgcacagctcgtggacgcgtaccaggagcttggtgcgcggaccgctccctttgatacgtcccgtaaagaggtgggcctccacttccttggatggctgcaggaggagttggaggtgctcccaacgattgtgacaggcctcatgtacttcgcctcactcatcacctacgaaggggccgtgaatgcattgtcccgcgagggatgcgagcacttcgaagtctttgaccgatcggacgaagacttcgagcgtggaatcttccaggttgaggacccggtgctgaagcggtcgatcggggcactttatgataggatgtgggaccctcacggctgttaa

SEQ ID NO: 11997 - DNA, 1125 bp, Zea mays
  Peptide Sequence Number=SeqID_55372
atggcgaagtatgtctgggcggtgacttcatacggcggtcagccgtccatggaggtcttcgccaagaactattgtctgcactggcaaaagagggaaattggaaataagattgcacaatttggatcgtgcaccttcacgccgaggaccggaaagacttcggcgggagttgtggaaatagtcccctacgctcggaacaagtggggcaactggtgggactattggttctatgtctcgggaggggaagtcaaagatctcccagggctccctacggccattatgtgctcccactgttacgtggcattcttaccatttgaggtggcagaggacgatgaggacgaaggggccctccggtatgctgcccgcatgagtagcgggcatgatctggttgaggagttcattggatatggagtgtggcccttggcgcacggctgggtacttggcgaagtgtgccctcgccagatgcctaccttgggcgagcagttggtgcgaagtcctaccttcgccttggatttgcgcggccggaacccgtccgcgtttgtgcgtgaagtagaggatgaagcagtgagaattgtggggcgatatgtgccgaggacagagactttgcagagttgggatattcgtggttctaatgttcgtttgaaccgtgttttcgagttgaaccgtctgccatatggcggttacccgggagacactgctgttgctactgtcgatcgccgggggaaaaaggcggcggctgcggttgaggaaggcccttcgcggggagcggtgccggctgtggccacaaaaaagagaaaactagatactgcagctgaggggttgagggtctccgatcgttttgttgtggatttaatgagaacttgtgcgtcccctaggggaaggatgtcttcgcccgagctccgggaatcttcggcgcgaatgctggaggttaccaggggtcgctggccgaggaatgttccgatcccccggatggccggtgaggacatgtttatgtctcgcttatcccgtgagatgaagatttttccttatggacggaatattgttgttgttgtatcgatagtgatggataaggatcgccaagatgcgacgcggaagcgccgggcgttcactagggtcgggggaccctag

SEQ ID NO: 11998 - DNA, 3123 bp, Zea mays
  Peptide Sequence Number=SeqID_55373
atgggccttcgcgttggacgaggccgcgagacggagcgacctcgtcgtaggccttcgtcttgcagcgtattggacgaagggtggacgtttggcctccgttggtttggtgagatcggtgaaggcatcgagcgaagggtggcgtcttcgccttcgccccaacatttgccctccgagggaccagttcgactaagtcatctggtgccaaaggcgtcgctagatggtggagacgctgccctcgctcgaagtggttccgcgggggtttttgatgtgaccgttgacggacgcggcactgttggactgcggcaaaaccatagcctccttttgaaaccaaccgctcgcctgccctccctgctcctgctcatcggagatctggcccgtgtgaagcagaccgcccgccgccgccgacggtacgtagccatgtcgtcctcttcctcttctgctgccgatacaccgccggtcagcgcattgtccgaggacacgctgagcaatgtggtggcggaggagttgcatcctggtgacacagtggaattcggcgtgtcgcggatgtccttgatccacgtgcacgacatgcaacagcttggatatttcgacggcggagtggcgcgtgtcccgggggcggaggaggtccccgagccagaaggcgagttggtcgtcttcgaggcatttttcgccgctggccttcgtctgcctgcgcatcgattcgtggcggaggtcctgcgtagattcgagatgccctcccgtggcgggatgctggtgcgaagtcctgccttcgcgctagatttgcatggccgagatcctgccgcattcgtgcgtgaggtggaagacggtgcggcaaggatcgtgggtcgctacgtgccgaagacagagggtctgtggagctgggatatccgtgggtccaatgacaggctgaatcgggtcttcgaattgaatcgtttaccgtacggttgttatcccggggaagacgtcgccgaccgctgcgggaagaaaccgatgggcggtaccgaggaagggccttcgcaggagactgccccggcccctaagaagagaaaattaggtactatagtggggggaaagagggtgtctgataattttgctgtggagttgatggggacatgtgcggcccccgggggaaggatgtcttcgcccgagctccgggagtcttcggcgcgaatgctggaggttaccgggggtcggtggccaaagaatcttccgatcccatgggcagagggcgaagacatgtctacgtctcgtatagctcgtggcttgaggattttcccttacggacggaacattgctgctgttgtgtcggcagtgatgaacaaggatcgccaggatgctgcgcagaagcgccgggcggtcgtcaggatcctcgatcctaaacgtgaagcaaagagagcgcgggggagtgcgaaggccgccgcccccggcggtagccagccgacgctggctgcgaaaccggccgcgctcggatccagcaaggtgccggagagcacgaagacagtcgtcgccggcggaaccaagtctacctcgggcggagctacgaaggtccgggagctgccttcgccggggagacgcgttgccgacttcgacacgaatattagtgtggacgactgtttcgttgggtcgggcgaggggcagatggttgttgtcccgcctgcggtggcaaccacggcgtcaaccgcagtggttggggtgaagggtgacgctttctgtgcgagcgacgagatttcgtcgaccgccgccgtcaaggacgaggcgggcaccatgtcctgccggctgagggaggcgtcgcagcagctattgcagcagctaagtcaacacgcggacgccgtccgggagaagtcggttgcggagagcaaaaaccgcaggctggcggagaaggcggaggccaaattggcgcgggcggagggaagcctcaccagccaacgcgccgaggaatgggaggtgaggttcaacgctctgcgcggtcgcgtggacaaggccgaggcctctacgcgctcggaggttgagcggacgcgcgcacagctcgtggactcgtaccgcgagctgggtgcgtggacggctgactttgaggtgcccgaccgagaggcgggccttcgcttcctcgagtggttgcaagaggaactgctggtactccctaccatcatggagggtttcatgtcctttgcctccctcgtcacctgcgaaggggccatgaatgcgctgtcccgcgaggggtgcaaacactatgaggtcttcgaccggtcccatgaaaactttgagcttgaaatttttaaggtcaaagaccctatggtaaaggattccgcaggggcactcttcgatcgtatgtggggtcctcatggccgagaggcggttagggagcggtctgatcgggcgagagagcagatggcgcgtgccgaggatgtcaaagaccttggggatctgaacgacgtgtgggccgaggccgaggtcaacccggtgctgcccgaggctgaggtcgacccggccctgcgctcggaagccgttgagggcgcctccgctgggcctgtgtccactgtgtccggtgaaggctccttgccagcccctgcgtcgatggtggaggaccccccgaaggcggtggcggagctggcagcggaggatcctatggcgacggtcgggccttcgcaggttcaagattttgggcctgcgcacgcaaccgctactgatactgctaattttgtggcgacttcgaccgtggttgctgaaaatgaattggatgatttcgtgtctaagttttttgagtctgatgattctgggggttcggttgtgtggactgaagagtcttcggatgaggacttggattattttgcggccttggatgtagctgtggtggaggcttctccgcgtgtgatggatgctgaagtttttcctggtccgagtgctgggcgcaggcggcgaagggcggtggcgaagcgtagagtgagtgaggtggagggtgggtgtcttcgtgtggatagggctggcaagcgggaattgttgtccttgccagttggggcgagtgtaggtgagggggagttgcgaagtctctttgagggtgaggagctgaggataatgatgtttaactatagggagatgggtatcatcctgaaggttgaaccaatgtaa

SEQ ID NO: 11999 - DNA, 927 bp, Zea mays
  Peptide Sequence Number=SeqID_55374
atgcctcacgccgccgccaccgccgctgcggcgctcccgcgtgcctctctgctcgttatctcggcgccgctccgcgactccctcgccgcggcgccgtacgagccccccgcgggcgcatccgcctccgtcaagtccctcctcgcctctctcctcccttcgccttcccctccccagccccagcttcaggagccggcgggtaaggagtctggggacctcctcctcttctgcgctgccgtactcgcggcctccccggagtaccccgcgctgcactgggtcccggcgagcctcgtgggcgcggccgccgccgcggtgaacgagctggcggcggcgggaggttggggcagcgttggggatatggtggtggccgtggcaccggaggtggtgcctcctctcaaggccgtggtgaaggactcgtgcgtcgatgctgacagcgacgagattggggctgtgaagccgcccaaggagcacgcagcagtcgccgcgcaccagttccggtggctggtgtctcaggtaagctaccctaagctcggggatttgtgttcgttagtcattccatgtgccctgacaaccttagatcattggtcaccagaagttaaggtacagggaatggtaagctttgtacacatagcgaagaatgtgaaagcaacggaattaagtttgtatgaagatgccatacttgatgcgtgctgtcagaacattcctgcagatgatgagttatggtaccaggttattgagtcagttgtgatcaagtctgttattcctagcttacatgttccaaataggagagctgcgtatctgataggaatacgatccctaccacgaattggccttaggttgtatgagtgtgaggggactgggcgagggaggaaacgcccacgggtgtgttttggcgccgtggatgctgggcgcagggaaagagggagatga

SEQ ID NO: 12000 - DNA, 1206 bp, Zea mays
  Peptide Sequence Number=SeqID_55375
atggcctcgtcctctgtatcagcagctctcctcctggctgtctccctcgccgctctgcacttgtgctgccgccatgggcacggtgccggcgacgccgccggcaacggcatcactgccatctacagcctcggcgactccatcactgacaccgggaacctcgtcaaggaggcgcctccgggcatgttcgagaccatcaagcacctcccctacggcgtcacgttcgggtacccgaccgggcggtgctccgacggcctcctcatgatcgacttcctggctcaggacctgggtctcccgttcctgaacccgtacctgggcaagaacaagagcttcgaccacggcgtcaacttcgccgtcgccggagccaccgccgtggacccggccgaccagttcaacctccccgccgtccccgtgccgttcgcctccaagtccctcaaggtgcagctccggtggttcaaggacttcctcaagtacaccttcggcaccgatgaaggcaaacactttacacttcccttcctcctctcgatcaaccaaaaccagattcgcagacggcttcaagcttctctggttttggtcggggagatcggcgggaacgactacaactacgccttcttccaggccaagcctgtggccgaggtggagaagctcatcccaggggtcgtgaagaccatcgtcggcgccgccaaggaggtgctggacatgggcgccaccagggtcatcgtcccgggcaacttccccatcggctgcgtgccgggctacctggccatgaacgccgcctcgtcggagccggcggactacgactcggcggggtgcctccgggagctcaacgacttcgccgccaagcacaactcgcggctccggcgcgccgtcgccgacctgcaggcgtcgtacccgggcgccgccgtcgcctacgccgactacttcgactccttcctcaccctcctccacaacgcctcctcgttcggtttcgacgccgcgagcacgcgcaaggcctgctgcggcgccggtgccggcgagtacaacttcgactggcggcggatgtgcggcttcccggggacggcggcgtgcgctgacccgtccacgtacctgagctgggacggcatacacatgacgcaggcggcgtacagggccatgtccaggctcatctaccacggcaagtacctgcagccacagatactgagcttcccggagaaaaacgggcagacataa

SEQ ID NO: 12001 - DNA, 114 bp, Zea mays
  Peptide Sequence Number=SeqID_55376
atggccagcccctctctggcgctcaaccacgacgagcaagctactgaggatcctgaggttcagcaggtagaagttgctgagcaggagctcgttgaaggcaagttgtgcccttga

SEQ ID NO: 12002 - DNA, 375 bp, Zea mays
  Peptide Sequence Number=SeqID_55377
atgggcaagaacaacaagcgcaagcgtgagccaactcctccatcggaggagtttggtgactcggaatactcagaggaggagttctcctctgagtctgaggggtctccggccccgtccccctgcatccgggccgtcgagcgctccgggctcgagggctcggatgagtcggagtactcctcggatgaggaggactcggacggcagcggcgaggacgaggacgacgacgacggtgacggcagcggcaggggcggcagcgcgcggcagcaaggacggcgacggcagcggcagggacggcgacgtcggcggcagcaggggcagcaaccggggtggcagcagcaggggcagcaccaggggcggcagcggcggcggcagtaa

SEQ ID NO: 12003 - DNA, 762 bp, Zea mays
  Peptide Sequence Number=SeqID_55378
atgacgacaatgatcaagggggagatgcaaatgatcaagacaaggaggatgaagaaccaaggccgccgcacccaagagtccaccaagcggtccaacgagatcaccccgtcgacaccatcctcggcgacatccataaggggggtagaggaagcactccaagattcggattgggtggtggcgatgcaagaggaactcaacaacttcactaggaacgaggatgccaaacccatcaagacacccatgggaaccaatgggcatctcgacctcgacacggaagatgaacaccttcacgtgttcgacgtgttctgcgcgcgccagagcacgcccgtgcccgaactcgcgtgccccgcgtcgtgccaaagcccagccggtgccgttgcccgcgcccgcgcctataaagcccccagggacttcgaccgtactcctccgcacacgctcgacctcaccggagcccgaaaccaccggcgtttgccccgtgcacggcgtacccgcggccacttgagcccctaccaccgtagaccagccagcagagcctctcccaaccccgtccaaccctcggagaagactgtgcccgcctcggtgaagctccccgagcaaggaatcggagtttgcttcgccggaggagccagtccacggttcccggacttcgcccgaccgccggtgaacatagaccgggtaatcctctgttctattcttcgattccttgttcacatagcctctacgccaccccgtgaagctcatcgtgccattggattgaactag

SEQ ID NO: 12004 - DNA, 243 bp, Zea mays
  Peptide Sequence Number=SeqID_55379
atggataagattttctccacgaaaatgatctctatgaataacccgccgaggcaaacgggaccatcgttggaggtggcgtctcgcctctatgttgaggacaagaagattgacaagcataagtgtttcgtcctcactatcactcgagggagaggaatgcggcttcaggtggaagctagtggcttcccacgaaagacaaacatggctttcgttggaagacaagtgcggcttgccgcatacgactag

SEQ ID NO: 12005 - DNA, 372 bp, Zea mays
  Peptide Sequence Number=SeqID_55380
atgacttctcatggatcctcggacgaagggaatgcacagtcccacacggacggacttgcacgagagggtttcccctgtatcttgtgggaggtacttcagggagctggttacacgacgcctccccactgtccactcacccccattggtttgttccccgcggagaaggaggacgaaccaatgtggaaggaccgagtggagcatgcccaaggatatatgggctatctacccaggttagactgctcgcttgacggtgcggtgcatgaatgccctgtatcgtctgcaagggatgcgaggagaggcaatgtctcatctgatggcattgttggaggctaccaagatcactttggagaacaggggaggaacttctggtag

SEQ ID NO: 12006 - DNA, 837 bp, Zea mays
  Peptide Sequence Number=SeqID_55381
atggtgttcggtcaggtggtgatcggcccgccgggctccggcaagaccacctactgcaacggcatgtcgcagttcctctccctcctcggcagatatgagtgtgccataaacatcgaggacctcataaaactcagtgatgtcatgtctgagcattcgcttggccctaatggagggcttgtgtattgcatggattacttggagaagaatattgattggcttgaagaaaaactgaagccttttattgaagatcactatctgttatttgattttcctggtcaagtggaattgttcttccttcactcaaatgccagaagtgttattaataaactcatcaaaaagatggacttgaggcttactgctgttcaccttattgatgcccatttatgctgtgatcctggaaagtatgtcagtgctttgcttctttcactatcaacgatgctacacttggaattgccacatatcaatgtcttgtcaaagattgacctcattgagaactatggaaatttagcattcaaccttgacttctacactgatgtccaagatctttcttatttgcaatatcatcttgagcaggatccccgctcagccaagtacagtgaacctgctaacaggaaactgactaaggagctctgtgatgtgattgatgattttggtttagtcaatttttcaactttggacatccaggacaaggaaagtgttggcaatcttgtgaagctgattgacaagagcaacggatatatattttcttctattgacagtagtgctgttgagttcagcaaaattgcagcggcgcctcttgattgggactactacagatatcctatacttgttctttaa

SEQ ID NO: 12007 - DNA, 177 bp, Zea mays
  Peptide Sequence Number=SeqID_55382
atgggaagaggatccgaggacatccgcgagccctccaagtcagcctccggcgtcatcttccaaagcggcaaccgccgctccgccaagggaagcaccctacggcgggaccgagaaagggggataccccgaaaaggatccttctccgtgaaggaaacaggctccgagcctccctactga

SEQ ID NO: 12008 - DNA, 477 bp, Zea mays
  Peptide Sequence Number=SeqID_55383
atgccggggaaggcgaactgctgctgcccagccagggtgcagcattccgtcctctgtctgggcgccggtggccagctgcaccaggggtctcacaacacgtcgtacgccgcgagggcgatactcgtggacgccgccgtcggtgctgaggtggtggcagctggagaaagcttctccgtcgacgagatcgtcggcgccatctgcgctccgggcctctggctctttggctttaatatctggttctcgtccctcgagtggggacgcgaacgagagccttccagtggtagcatccgccctgggaccatcactgttgctgcagaggtcgccggcgagtcatccggagttcgtcgtcccacaggccctccgatgtgggggttgaaacctcggctactctgcgatgagccagagccgaaggcagcggtgtcagcatggacagaggtggagttggctcgagaagaaacttcgtcggcccaggagtag

SEQ ID NO: 12009 - DNA, 1888 bp, Zea mays
  Peptide Sequence Number=SeqID_55384
atgcaggcggcatgcaactgcaccaaggggatgcaccttttcgacttcgacgcatccagcgtggtggcccaggcccacacatcatgtaactggcgcgacagttactacgtgcgaaaaactgcaccgccccttacgccaatgccgcgccttctcgactgcggaaccggtgccgcgattcgaggcaaccctgcgcatggaccaacggtgccagccgagcacgtcggtcacggggaccgggaaaggggatactccgaaagggatccttctctgcgaaggaagcgggccccgagccctcctactgatcaggggttcgaaggctggcccctcgaaagggttcgacagccaccccttagcactcgggctccgcgcccactactgatcagaggttcgaaggctggcccctcggaagggttcgacagccgcctcagagcactcaggctccgcgcccactacaagtcagaggttcaaaggctggcccctcggaagggttcaacagtcgcctcaggccactcgggctccgcgcccactactgatcaggggttcgaaggctggccccccgaagggtttgacagccgcctcagaacatgtagagcgagggatgactctgggtacgtccgatacatggccgaggcttgggctactttcctgaggtcaaggctccgtccactcaagggacgcgatctcgccctcgcccgagcccaacctcggacaggaacagtagacccaggtggattcacgcctcgcccgagggcctcctcaagcaacgggcgctccttcaattcgcccggggcccagctcgggcaggaaaacatcgccgcctgccctactccgacttctgtgccacctgccagggtgaggctgacagcacccaagtccagcctcgggcgccataggaagctccgcctcgcccgaccccagggctcggactcaacctcgacctcggaagacggtctccgccttgcccgaccccagggctcggactcaaccttgacctcggaagacggtctccgcatcgcccgaccccagggctcggactccacctcgacctcggaagacggtctctgcctcgcccgaccccagggctcggactcagcctcgaccttggaggagtcaccgcctcgcccgacctcgggctcggaccgaccacaccgcaggggggggctcggcccagatccgctcttgcgtgcttaccggctggcaagccgggcccatcgaccagtcgtgctaccacgagctgagaatagtagggtgggcgttgtcacgctagctggtgggaccgccgcgtcaggtcaactcctccctatccgcgcgctcgggcgaaacagaaatcgacgtcttcctcgcggacgcgggctccctggtgccagcttacgtgaccacttccccgacagcctctgcgtccttgggagcctccatgtggtcgccgccaggtgggacccccgtcaagccgccagcgccccacccagccgccgcccgccagcagcgcaggcgcacagcccgcttcccagccgccaggccaccagcgccccgcccagccctagtcgtcgcctgccagcagcacaggcgcacagcccgctggcgctgccccgctcccacggtcccgcccgccccgagctgcgcgcccggcctgcggcgtcccgcgtccccgtcggccgtccccgagctgcgccctgcgcgcctgtgccatccgtcgtccccgaggcccgagctgcgcctgcgccatccccgaggcccgagctgcgcctacgccatccccgaggcccaagctgcgcgcctgcgacatccccgagctacgcctgcccgtccccgagctgcgtcgtccatcggtcggccgcccgctgccccgctcccgcccccgagctgtgctgctgcgcctccgagctggtgg

SEQ ID NO: 12010 - DNA, 1853 bp, Zea mays
  Peptide Sequence Number=SeqID_55385
atgggctgggcggtggcggagacggccggcgcggagggacggaggcgaccggcttggggcggcgccttgccgcggcaggcgaaggcttggggaggggcggagacggccggcgcgggcaagccttgcgcggctacgcccaggaacgcctgcgacggcgcccgggaacgatggaggcggcggcggagatgggagaagagagccggcgggcgcaggagagaaggaaaagaaagaggaaagaacgtccgtatccccaccgccattctcgccggcatcgtcgcgctcccgcccccatacgagccgcccccgcgacgtcgaccccactaccgtcaagccccagcccaccataaaccgcgcacgccccagccctcatccgcgacggagccgccattctcgccggtcgcgcctcatccccgtaagagatccacccccaccgcgacagtcaaccccgtggataccgcggcggcctacatcaggcaaacgacgaagagagtggagaggctcaaggagaggaagcgcgagctggtggcgtccgcgagggcttcgtcgtcgtcccatggctcccgctcccgctcctcctctgttggggccgcggaggtggagcgcaccgccgagcgaggggcgtcgttccactgctctgtgcacgccgtggaggaggccgacggcgaggttcagaacgcgcacttctccatcgtcagcgcaagggccatctacaccatccacgcgctaacaagggcgtcctgcgtccacacccctagtgtcctcgcctgctcctgcccccgcccctgcctgcgttcgcacgcacctgctcgcccgcgtgcctcctgcctgcgccccgcacgccgagcccgcacgccccccgcgcgctcctgcctggagcgtgtccccgccgtgtcgcacgccccccagtcatgcacccgcaacaaccaggcccgcggatctccgcgctcatcgttccctcgcacacgattgcacagtgggcatccacagtggataccccacttcccctctcttgtcttgctcatcacgaatgccgtcctcgccgtggcgcacacgattgttgtagcagctgtcgaacagtctcggttcctcatccctggctgggtttcgttcggatcacgtagcatcgtgcagcagcaacatggcaactacgtcatcgcgaggcgaagcatccagttcatctccaccacgaaaaacactgagtttgagaactgccgggagatgcagttcgctgcaatgaagcggggagacctgttggagctctgtcggcagcacggcttcgccacccgcggctccaaatttgtcctcacatgcgcgctcttgaatttaaagtgcaacgtgctgattctttatataacccttccctttatgcaactcaatgctatgtcctcattctcagctggccatggacgccgacccaagaagaaggtatatcaccgtgaacctggtcttgacagggccatggatcttcaaaagaagcctgcccttctcctttgtctgtgtgacctcattttggcacaaaagacaggatcactacttgtgcgtgaccttgaaaaggaggttggttttgtccaaaaatggaactttctttcacttatcgagcgtcaccctaatatcttccatgtctctggtggaagtgcttcccaagagcccatttctgtcacacttacggagaaggccagaaagatatccagtgaagaggctgaagcgcgagagctaatggagccaatcttggtgagaaaccttaggaagttactgatgatgtcgatggactgccagattcctctggataagattgaactaatccagtctgaactgggcttacctaacaacttcaagagaaacttgattccaag

SEQ ID NO: 12011 - DNA, 135 bp, Zea mays
  Peptide Sequence Number=SeqID_55386
atggcgctggacgcccggacttcatctcggtcctctcgaggtacgttaattaatcgcgcgatgcggaagacaagccaagtcgaccccaagcgtggactacttcgcatggtgatgctgatggacgaacctgcctga

SEQ ID NO: 12012 - DNA, 459 bp, Zea mays
  Peptide Sequence Number=SeqID_55387
atggggggagagggtgagggcgagtggggctcggggcacaagtggccgagggcgaggtggggcgagtcccacgcgcgacgtgggcgcggggaaggcgggcgcgagcagctcggcggcggttacgcggggacgacggggctgacaagccgggcccgcaacacagagagagagaagaaagcgggtgcgggcgcgagagaagcagggctgacgggttgggcccacgggcagagagagagcgagggagcgggcgcgcgggggaaagcggcagcgccgacaggtggggccgggcgagcagtgagagagggaggcgggtacgcggaaggcgaccgcgccgacaggccgggcccgctgcgcagagagaggaggggagagaggcgcgcgcgcgggaatgggccggctgggccgaaaggccgagggggcggctgggttgggcctctttgcctttttcttttattctga

SEQ ID NO: 12013 - DNA, 237 bp, Zea mays
  Peptide Sequence Number=SeqID_55388
atggaccgctcccaccactacacccttgctgccgccaccgtcgacccgggtccccgtcgcgtctctgtcgccgccgaggagtccccggagcccgccttgagaccccaccaatggagtccccgtgccctccccgacctccccgaccactcggattgccccagagccccgccagtcgcccgtgcccctcgtctccggcgagccctccgccgcggggacgagcgccgccgccccagctag

SEQ ID NO: 12014 - DNA, 453 bp, Zea mays
  Peptide Sequence Number=SeqID_55389
atgtcggacgaccttgttgttcctgtccactttgaagttggccaagaactttgctttcgcctcctggatcatccgcttcttgtgctcctcgaactggagctgctcgtcagccggcaagcggagtcgccaaaaagtatgttgacgcctttttggaggcgccaattactcaagagaaccagcggcggtgctctctgcacaggggcggatggtccgcgcgcgggggccggacggtccgcggcctggtgcgaggaggcggtgctctctggtcaggggcggacggtccgtggcctggggccggacggtccgcggcctggtgcaggagcccgggttccctgcctgacggccggacggtccgcgccctggggccggacggtccgcgcgtacgcaggggcggcggaagatcgccgacggcgcctggatctcgctcccgggagggaccccgtcggggagtag

SEQ ID NO: 12015 - DNA, 756 bp, Zea mays
  Peptide Sequence Number=SeqID_55390
atggagcctggcggagggacagctgtcggagctgttgagtccttgctggacgtcctcttgcttccaggtcaccggctgatgccggggcggagtccgagccctggggtcgggcgaagcggagttcatcgtcttctggggctgagcccaagtccgagccctggatcgggcgaggcggagatcgtcgtcttctgggacttagcccgagtccgagccctgggtcgggtggagttcgccgtcttccgggacttagcccgagtccgagccttgggtcgggcggagttcgtcgtcttccggtacttagcccgagtccgagccctgggtcgggcggagttcgccgtctttcgggacttagcccaagtccgagccctgggttgggcagagttcgctgtattccgggacttagcccgagtccgagccctgggtcgggcggagttcgccgtcttccgggacttagcccgagtccgagccctgggtcgggcggagtttgtcgtcttccgggacttagcccgagtccgagccctgggtcgggcggagttcgccgtcttccgggacttagcccgagtccgagccccgggtcgggcgaagcggagcttcctatggtgccttcgaccgggcctgactgcctgtcagcctcactctgttgagtggcaccgcagtcggaacggcgcaggcggcgctgtctttctatcaggccggtcagtggagcggcgaagtgacggcggtcacttcggctctggggggcgcgcgtcaggataa

SEQ ID NO: 12016 - DNA, 666 bp, Zea mays
  Peptide Sequence Number=SeqID_55391
atgaaggagcttcgtttgtacgagaattctgaaaaggctcttcttagttctacatcagccaatggaactgcgattcttagagttgtgcaggctttgagttctcttcggaggggggcggtggttgagcagctatgcacggcatcgcacgacgacggggagcatcacgtcgacccgctcctcccttctgccttccagccgcaggagccccacttccacctgccctcgtcgtcggtggaggaccccacggccaccatgggaaagcaaatctgcgtgctcgagcagcacttcaggcgaggtggcgggcgcggcgggagcgagggaacgcggggcgccgtactcagggaagaagagggcgggttagcggcggtgtggggaggaagagggcgaggtgagggtcggggcgccatggacaggggcacagcgggcaatgttgcgggggagggaaacacatgggggcacgaaatcgcctgggcgacgccgacgatcgtgcgaggatggaggtgcggcatgcggggcgaggatggcggcgtgatagccgtggattcgcgggcgtcgcgagaagggggcggggcaggcttcagcacgggaggacgggggcggggatcacgacagggatgttgggggcggaggcttcgagggcgaaggcagcgcgtgtggataagatag

SEQ ID NO: 12017 - DNA, 420 bp, Zea mays
  Peptide Sequence Number=SeqID_55392
atgggcaaaaacaacaaacgcaagcgcgagccgactcctccgtcagaggactttggcgactcggaatactcagaggaggagttctcctctgagtccgagggatctccggctcccgtctctcccccagcgtcgtccgatgactcggacgactctcaggggattgccgcggaggtctggacttacatccgggccgtcgagcgctccgggctcgagggctcggatgagtcggagtactcctcggacgaggaggactcggacgacggcggcgaggacaaggacgacgacggcaacgacggcgacgacgacgacgatggcgatggtgacagcggcggcggcggcaggggcagcaacagcggcagcggcggcagcaggagcggcaacggcggcagtagcaggggcagcaacaaggccagtggctaa

SEQ ID NO: 12018 - DNA, 681 bp, Zea mays
  Peptide Sequence Number=SeqID_55393
atggttggcctgctcatgccgtcgtcgtggctgccccacatgatctccctcgtcctccgctctccacccgacaccctcgcccgccgacctggctctcgacggtgttctttgtccgggagcggcaacacgatatggcccccgaaaggccttgatgaggcagtctgcgagtgtgacgaagagggcgggtcaatgaaggagaaggaaaaggtcggggagagggtgaaagcggcggtgcacgtggagaggtggggcgacgatctcggcactgaacggtggtgccgaagctgggcgcgaggcggcctgccagtcggcgcgggcgaatggggcggtggtgcggcacgcctgggacgcgaagcgcgtggatctgcaccaggctgccgggcggagctggtggcgtggcgcggcggagaaggcgtcgagcacagctacgacgtccatggagacaggcacaccgtctccgcagctgttgtggagacatcgagcgcggaggcgcacaacacccacaagaacgtcaccatggcgtctgcagccgccgcgcgaaccgtcgctcacatcaccatctgcgtctgcgctggcgtcgggcttctacggttctacctgcctcgtttgcggctcgatcagaaatcaatcgatcgcgcaccccagttgacggaggctgtggtacatatcatagttctttga

SEQ ID NO: 12019 - DNA, 462 bp, Zea mays
  Peptide Sequence Number=SeqID_55394
atgcggcagaagtatccggaactttttgttgtggaagcgtcagaattcgaggtcgaattctttttaagaggggtagagtgtgatacccggtttgcaaagaagagaagttggagggtggtggacttccggatcgttcttagggatttgcccaaacttccggtgaaggcaagtaaaactgtgatgtggggtgttacaggaacaggggcagatgtgtttggcgatgctgactttgggacgaatggccggtggagttggtcgtcgttgttggcttgcactcgcgaggacctctatgttggctcgggttttgcttgcagaggcattccacctgagacgagcggaccaccgccggacccgcccgactccgactgcctaaagcccagctttgtgtccaactccgacaaagaacgtcgggaacgaaccgacgtcgcggaggagacggttgcaatggaaagggcagaataa

SEQ ID NO: 12020 - DNA, 228 bp, Zea mays
  Peptide Sequence Number=SeqID_55395
atggccatggcggcgctgcgggaaacctcccgctgtttggcgtccagggggagatctgcggcctggcgacccgtgctcctcgcgcagtcccgcggcatcacttacaagctcttcgtcggaggtttatcacagtttgcgacggaagcaagcctagcagaagcattctcacgttacggacaagtaatagaaggtctatcctcgtcgcttgccagaacacacccttactga

SEQ ID NO: 12021 - DNA, 306 bp, Zea mays
  Peptide Sequence Number=SeqID_55396
atgcagtacaatggatcaagcagtctcattagctgcgagaagcagatgattcgaatcgagtttttatccttgcaagaggccatgtgcgccaggaatttagaaatggtgcagagggttacctggtccacgcgctccggcggggttacgaactccggcgagcacgattgcactattccggtgggtctggtcctcggctcaagctcgggcaaacttcacggcctcctggggaagctatccgagggctcggatcgagtggaggtgggcggggatggtctggccacggcgggcgccctcgggcggctctag

SEQ ID NO: 12022 - DNA, 345 bp, Zea mays
  Peptide Sequence Number=SeqID_55397
atgggagaggaagctttaaagtacaggtacatgataagcatcaagatgtattttagacaaaactggcaaggtgtcaaagaagagggagcagtcaatgataaaatagatgaggcattatcctcgaacagagatggaaaagaggaggcttcaaagggtaggttcaaggtaaagatgataataatgaaaagcataacaaaggatagcgttaagataagactcgcgaagtggcaaagtggagaaaacaataaaggaggtacaaggacaaagataaattacaaatgtaccttcggcttgaaggaaagaaagtacaagtgtggcgcaaaagtgaatgccaagtccgcgtga

SEQ ID NO: 12023 - DNA, 1254 bp, Zea mays
  Peptide Sequence Number=SeqID_55398
atgcgcgatgagaaggaggtgatgcggcaatggaatgaacaacgcgacaaggaggaggcagaactgctacataaactctccgaacggcgcaaagaggcggcggaaaagtacttgtcacacttcacggtggatcaccaccagaagatcatctgtcaaggggagatcgatatggattctctcctacctccacttcagggtcctgctgtaagtgctccagatctatcccttacgactttcatggatcaacgaggagatcagttaaagcaatacgtagacgaatctattaaaatccatttacattcatacgagaaatcaactgctcctagctttccatcgcgtgagactaatacagagccacttgcgccaagcacatcagctacaaatgggtcacccttggcccagccatcatatgttctggacatagtcggatcgtccgagtgtcatctcagacagttcggttatatcatggaccgtccgacgtatttcgctggaccattcgacccaacgcaggcctgcacacagatcactcaggtcgcaccgcgcatggccggatcatccgggtacaacctcggacaattttgccccatcacagaccgtctggtacattacgccgaaccatctggatatgtcgcggaccgtccggtaccttatgccggaccgtccggatatggcatgaaccagccggcgtattacgccgaaccgtccgactctacacgagtccacacgcagaccatccaagtcatgccatatatgaccgaaccgtccggatacaaccctggaccattcggcccgatcgcggaccgtccagccctttataacggatggtccaggtatgggactacccagacatcaccatatacggctagacagtctggatatatcttcggaccgtttggcccagtcgcggaccatccgaccccttacgatggaccgtccgggcatgcgtacgtagaaccaagagctgcacaatacacacagttctcacactcatcgcaacaacattatggtgccccaccagcaacacattataaccataccataccaactcatggacacagggctgaatactgttcggccactagagagcctgagaggtatagggcaggagctggtgacattaataggaacctaacacacacctcagacatccctgggaggaaagccgacagagtgatgtcaggcaacctgagatttccacccacaaacttaatggatggtcgccaggcgtggcggagaggatcagagatgaggtag

SEQ ID NO: 12024 - DNA, 240 bp, Zea mays
  Peptide Sequence Number=SeqID_55399
atgcggactatggcgataggagatgtgcgaaaaaggaactacaggaacaagaacaaccctcttcctctacgatggtgcatcccccaactcaaggcgatgaacaggtacctcaagaagatgggcaggatcaagggggagcataggaagaacaggttatggaggaagaagcatcacaggccctccaactcaagtccgagcgacgatccaaaaaaatcacccagtggatcagattctgggtga

SEQ ID NO: 12025 - DNA, 69 bp, Zea mays
  Peptide Sequence Number=SeqID_55400
atggccaacgcaggcgcgggcgcgtgcgcgagcgcgcttctgcgcgagaataactttagaaatccctga

SEQ ID NO: 12026 - DNA, 402 bp, Zea mays
  Peptide Sequence Number=SeqID_55401
atgagtgcgacgaggcgaacctcgcagctgcgctacttcatccatggaagggatcgagtgggggaaaaacagggggagatgcagggaggggcgtcacccatggggctgtttcctgctgctgccatggggaaacaggaaaggaggaacagtgggtgtcggccatgggagatgactaaaaaatctgggcgccattgttgggcttggcagccaagggagatgagaaggcagagaggggcttcggcttccatggggaagaagtgggcgagctcacgtgctgctgcattggagagggagggagctcggcggccagggagctcctgcgctggctgctgttgccgtgggaggactcctgcgcgaggtagaagacagggggagaagaaagtggcggccagggaaaagtga

SEQ ID NO: 12027 - DNA, 111 bp, Zea mays
  Peptide Sequence Number=SeqID_55402
atgaccatgatgggttcaacatcagaaaagatgtacctctgccaggaccgtatcgatgtaggcttgatgatcgaggaccctttagctggtcacatgcctcatcatgggtaa

SEQ ID NO: 12028 - DNA, 240 bp, Zea mays
  Peptide Sequence Number=SeqID_55403
atggcgtccaccaaggtgcagcgtatcatgacccagcccatcaaagcgcgcatccagatctggctcttcgagcagaaggacctccggattgagggtcgcatcatcggattcgatgagtacatgaacttggtcctcgaagatgctgaggaaatcaacgtcaagaaaaacactaggaagacactgggccggatactcctcaaaggtgacaacataactttgatgatgaacagtggcaagtga

SEQ ID NO: 12029 - DNA, 312 bp, Zea mays
  Peptide Sequence Number=SeqID_55404
atgtcaactgagaaacgccacctagatcagatcgaactcctcagtgttaggcggctcctcctgaaccacctgatcttctcttgtggggggggggggtgtgagacagcaagggtgagctcacacatgatcatagctcaacaagttgtggggaaccagtggacattaactcacaaaggtaaagcaatagcaaactactcaagtgaatcaggggtaaacaaggggctctttagcaatttgtacacgcgaaggggtatcttctattctgggccggacgatccagatcctgcggcgcggattgaatccagtctttaa

SEQ ID NO: 12030 - DNA, 772 bp, Zea mays
  Peptide Sequence Number=SeqID_55405
tgatgccctgctgggtcaccttggtagtgatcaatggagagtcatgatctctgggcagaatgggaatcacggcttgtggggtggctatgagatcgatggtttcggttatgactatggtgctggtaagtggtattctttccgtttggataggatggctcgacttagacacactgcacgaaagtcagtcatccccttcttaccctcccgccttgctgagcgtccgcttcgccgtcccgtggccggacagtccagccacttggagagactgcaccaccgcctgcatgaggagcaggaacatcgacgacaggagcagcagggctcttccttctcgctccagcaggagatagagtccgtgaggagctgctcccctgtgcttcctctggaggcgccccctgcaccaccactgggcgcccccagcttctggagtagctgctggaggaaacccagacgactgaggtggcgacgacagctcgagcccacgacaccgacttctctgctaaccctgagccggaaggatggtttgctcgacccatcactcgcgacgctgctcgcgggtgtcacttccacgatgcgctcgacaccctgctacgtcgggcccttaacccggcgtacctggtccatcgagtatcgctgtgtggtctaccagcatagtcgcggggtctacccggaccgctgggaggcaacctgtttggtgcgctgcccggagaacagtctccagggtgcggaggcctgctcagagcactattctatctctgagcgggactcaccttag

SEQ ID NO: 12031 - DNA, 162 bp, Zea mays
  Peptide Sequence Number=SeqID_55406
atggggaagcctgtcccatcactcctcatgctcctcctcagccgagttaccgcacttgtaccctccataaacggaatggggagaccacgtctcaggtcgcgtgaggggcaaaagtctactgccaggtttaaatcagggactaggcttaccgatttaccataa

SEQ ID NO: 12032 - DNA, 408 bp, Zea mays
  Peptide Sequence Number=SeqID_55407
atggatcctggcccacatatgctatgcattcggttttgcccccagaaccagatggttcgtatgattcaaaccactcggatcaacaccaattacatccctccgccacgacaagttcttgtctacccagtggtagtcgaggaaaaccctgtggatctccctcgcattcgtgtggagaacgaagtcattctggaggacagctcggaggagtttctgcctacgcccaccccattggcagaatcactagccttcgcagctggatcgtcagcttcagcaccgccagcaccagtagtccaagcccttgctcccggaggcgacgacccgaatgattcttgtgacgatgatgaagacgaagaagaagaagaagaagaagaggaaaacatgaacgatgaagccaacgatgaacagtag

SEQ ID NO: 12033 - DNA, 282 bp, Zea mays
  Peptide Sequence Number=SeqID_55408
atggaggccaagtcacaccatcaaccaaaatcaggaggtacctgcaaaaattatgccacaagcaaggctgagtatactaatactcagctagacttacccgtgaccgcacttgtacccaccataaccggaatgggagaccacgtctcaggtcgcgtgaggggtaaagtatgctgccaggttcactcagaccaccatcattacgatatcaaaaatggatacaaccaaattcctgacctcgaacgagtgcaagaaaaatcactcgacttctaccgagatccctaa

SEQ ID NO: 12034 - DNA, 180 bp, Zea mays
  Peptide Sequence Number=SeqID_55409
atgacattgttgtccggcctcgtcgtgcaccctgctgctcatcaccgtgacaccactcgccagcatcgtgaattcgccctgcgctgtgacgccgtcgacctgcggcaacctcgtcgttgccttattgttgttgcgctcatcttcctcgcgtccgccaaagttttgaaattaagaaattaa

SEQ ID NO: 12035 - DNA, 330 bp, Zea mays
  Peptide Sequence Number=SeqID_55410
atggcgggcggtagcaggtttatcccttgtgaggaatctccacaagttagagcctctcacccttacaagattgatcacaatgaaaccacaagaggaatggagggaatagaaacacacgtggcaatgagattgatggttctggttatgattatggtattggttgtcagcattgcaaccactgctcaggagaagatgaagctgtggaaggagacttccaggagttccaagactacgacgagttctaggtgtgggttagcggcaaccccccagtcggctgcctgtgaaggccgtgttatctacgtttcgttttcgcactttgatttattgtaa

SEQ ID NO: 12036 - DNA, 651 bp, Zea mays
  Peptide Sequence Number=SeqID_55411
atggcgacgaccatctctacgcacatctacaccacctcttctagcgctccctcccaggccccagctgctgcaagtaggaacagggcaggggagatgatgctggggaagagatccgggcgcccgtcgcctacggcgcgacagcacatgcgacggaccacaagcttgacggagttcgcggcgcccgacaaagtgctggcggacgtggcggaggaggaggacgaggagctgcagttgctgccggcgcacgcggaggcggccgagctggagggcccctacggatgggccatcggcggcgctgcggcggccgggcgggcggactggctggcggcgtaccgcgcccgcgcggcgccggttctggcggggctccgccggaactccgccgacttctcggccgccgagaccgccgcgttcctccgcgcctgcgggctctgcaaccgccgcctcgggccaggccgcgacaccttcgtgtacaggggagacacggcgttctgcagcctcgagtgccggcagcagcacatcacgatcgaggagtggaaggagaagtgcgcgcttgccacgccgccggcgtccgacccggtggtgccgctaccgcccaggcccagcggcgcgggctccgacaaacccgcgacggtcctagcctccaagtcctag

SEQ ID NO: 12037 - DNA, 196 bp, Zea mays
  Peptide Sequence Number=SeqID_55412
tgatgccctgctgggtcaccttggtagtgatcaatggagagtcatgatctccgggcagaatgggaatcacggcttgtggagatactttggtacaggtggttatgagattgatggttttggttatgactatggtgctggcgaagacgaagctgtggaaggagacttccaggagttccaagattacgacgagttctag

SEQ ID NO: 12038 - DNA, 924 bp, Zea mays
  Peptide Sequence Number=SeqID_55413
atgcaagaagcatgcaactgcaccgcggtcgtgcaccctttcagcttcgttgcaaccgacggtccagcatgggggctaggtcccacatgtcatgtaaccggcgcaccggttactacatgcaaagaaaccgcaccgccacttgcgccaatacagcgtctcctcgactgcagaactagtgcagcgactcaaggcagccccacgcgtgacccaatagtgccaattaagtgcgacgatcacaggcaaagcgggcgccgtttcacctccgtcatgatgaccgcgtcaaaaaagggatcggagaaggggatattttggaaggatccttctcagcgaaggaaacgggccccgagccctcctattgatcaggggttcgaaggttgtgccctacggggttcggcaactgccccagagcacccgggctccgagccctttactgatcaggggatcgaaggctgggccctcggaagggttcgacagccgcctagagcatgtagagtcacggatgaccctaggtacgtccgttacatggccaaggctcgggctacgctcccgaggtaccctaggacatttccgagactagcgggaatgatttgtaatggaatcccaccggagggaggcaccgagccctcggaccctatcaaatgggtccgggtccagcaaatcacctgcagaaaaacagcactattcaccctgttccgactactgtgccaaccatcaagggagctccgcctcgcccgacctcaggccttggcctcgggagaaggtctccgcctcgcccgaccccaggcctcggctttagcctcggcctcgggagaagtcacaacctcgcccgacctcagcctcggcctcaagagaagtctccgcctcgcccgacctcagcctcggaccgaccacgctacaggggatacatcattaccctacccctag

SEQ ID NO: 12039 - DNA, 321 bp, Zea mays
  Peptide Sequence Number=SeqID_55414
atggtcgtagccacaagccgaccgacgctcgtcgacgtgggtacggggcgagtcggtcttgctcttagcctttctccatgtgtgccgccgaggaggacatggtggcacctgccacgctttggttatcttggcgatgaggagtccaggtcttcgtcgtgtccttcttcggcaattattgggggccttcctcttccgaaggtcctaaaaaacgtgactaatatgtttttcagtgtaacacagactgatacaggaggcttcgacttcgggatgaaagcatgcatgatatggaacaggatgaacgggcgccgaagctgtggttga

SEQ ID NO: 12040 - DNA, 699 bp, Zea mays
  Peptide Sequence Number=SeqID_55415
atggtgtactgtagaagggttcacctgccagtaggtatcaccgaccaagtgctagaaaaacaaccggctaaaaatagctatatcatctctaaagggctgggaagtaagtggagttaccaagtgagatgtgacccagctcctgcgcttcctcgcgcttgccgtcaccctgaccgcgctcctcgtcctggccagcttcacgctcacagccgcgctcgccgcgctggtcctgctcagcccgctcgtgtcgtgcccctcacagtcccgctctgggcgcccgtagcggtactagcgctgctgacgggggccgcctcgctcgtcgtctgctgcgccagcctggccgcggtcgcggacgtggccagccgagtgagggggtactacgacgcctatgcgcgagagtacgccgagcacccagccgcccctgctgttccgcgcctggctgtccagtctgcgcctccctgcgccggcctgcaccagtcgctggcctgcaccggtcgccatgagctttacctcgcccgccgctctcgtgactgtgcgtgtcctccttcacgacggccagctcatccagggcatgttcgtgtccttcgatccagtctggaaccctatccttcgggactgcgtcgagatccaccctcaggcgggccgtcacgtgcctggaccgcttgtcttcccacgtgctgcgatcgcctccctagctgttga

SEQ ID NO: 12041 - DNA, 228 bp, Zea mays
  Peptide Sequence Number=SeqID_55416
atggacagcatggtactctcgtggctcaacgacaccatcaccgtcgagatacaggacatcgtccgcgaccagagaaaggcagttgatgtgaggttttccaaaagacttaaaaggaaggatggacttgccttcgtcgaagctttcctggcacaaaaggtctacctccgggagatcgggctccggcccttcttccggggttacgggttccggatcaacggtccccgctag

SEQ ID NO: 12042 - DNA, 588 bp, Zea mays
  Peptide Sequence Number=SeqID_55417
atgatggtccttgactcaattgtcgccacctcattcgccatcctgcttcttttttctcttccctcatgccttcgccttcgcgccaccctattctcggcagagggcgtgggagcatgtgcctcctccccgtattcgtccgacaccagtcccgacaccgacctgcgcagtggctattgtacgtccacgaggacgtttcacagcatgcgtgcaccatcgttttcgtcatcgtcggacgtctcgttcgccttcccgaccttcgccctgttcttcctccctaatctgctgcgtccgcccacggtcgtagccacgagccgaccgacgctcgtcgacgtgtgtacggggcgagtcggtcttgctcttagcctttctccatgtgtgccgccgaggaggacacggtggcacctgcaacgctttggttatcttggcgatgaggagtccaggaggcttcgacttcaggatgaaagcatgcgtgatatggaacaggatgaacgggcgccgaagctgtggccgaaaaagcattggcttagcacaacgacgaaggtggaagatggaactgacctaaaggataaaagactacttaacccttga

SEQ ID NO: 12043 - DNA, 492 bp, Zea mays
  Peptide Sequence Number=SeqID_55418
atgaacaggcttgggccgaaaccagcccaggtcggcccaacagcagcagaatcgcgcccgcgcccgcgcgcgcgatggcggctttgcagaaaagccctcgaggttttatctaacaggaagcgggttcggttactatttcctggggtcactgacatttcacaaaaaggtcccctggtttctgtctattctgtgtttcacgtcctcgacggcgttcaagcgcggccgtgctccggcgagcaactacgccggccgattgaggctaagaccggtgctaatctttggctgagaccaaatccgagtccccatgaacgttttccccaacttaattgcactattggtggactagggagctccggccacggtaaccgtgcggatgaattcaagaactacgcgttcccggtgatgggtggtcacacagttcaaattgatgacttgataagcatcacgaagctatgcaagtgcttaaacaagaaagcaggggacgggggctga

SEQ ID NO: 12044 - DNA, 225 bp, Zea mays
  Peptide Sequence Number=SeqID_55419
atggccgtgatggattcaacatcggaaaaagatgtacctctgccagattatgtaattcgcttccgcatttcttcatctccgatgttctgtaatgtctacaagatgggtgagacgttcctggtgagttgtggtggttggggggtatttatagcccccaaggccccaaccaccaaggtagccgttggggaagctgctgacgatgggcgcaccggacaggtaaggtaa

SEQ ID NO: 12045 - DNA, 294 bp, Zea mays
  Peptide Sequence Number=SeqID_55420
atgggtaggactacgactggaggagctagccaattgacgctcaggcaacatatgctagcgcaggaggacaagcccatggatgcaactgacacaataagcgagcgtcccgatggcaacatatgggataccgccttcgaaccttccactactgccgccaatgttgacgcccccacccctgcacaattccctgtgatcgtcggagataagacatgccttatgtctgagggccaatggcagccatcggacataatgagtgttatcttcgatggcttgcgtggaggccgtcgaaactaa

SEQ ID NO: 12046 - DNA, 324 bp, Zea mays
  Peptide Sequence Number=SeqID_55421
atgaagtacccgagatgtccagctgatgaggacatcactaccatggatacaaacaacactcccctagttgatgttcaaggaatgaaggaaaggaccaacaaggacatggtgaaggacttggaggcgtggaaggctagcaaggatgttcggatcaaggtggaggaccaaaccgacgtccgtaatctgtctcggtgctgcgacatcattgtgttcttgcttgtgtcttcgattcttaggcaggaattagccctcgtggcgaggtcaatcgcgaagtgcacggttgataaccagaggagaagtggtcctgcgattgcggggttctag

SEQ ID NO: 12047 - DNA, 150 bp, Zea mays
  Peptide Sequence Number=SeqID_55422
atgcagggttcttggctgactgccatcgcagcaaaatcaaccaaggacctccctacactgaccactcccctactgcccttgcccctttcgggtaaagcaatagcaaactacccaagtgaatcaggggtaaacaaggaacaggaatcataa

SEQ ID NO: 12048 - DNA, 498 bp, Zea mays
  Peptide Sequence Number=SeqID_55423
atgacgaagctacaaaagtcgttcctaagggagcgcagccagcttcatcagtatacgtcaagcttcgaatcattgaccttcggcttcgtcatcctgtacataacaaagcggtataagacaaatagaaatcttgggagaaggctggggatgctagttaaatccgctggtgatatgctgaagttcggcctgtttacaatttttctgtgcgtgcaatcatccttcataaaagctatggctgtgccgcgagaagccagcagggcacagaaatcaccatgcccagctataacttcgtcaagcgcctcaacttcgccctcaatatgttccaagactggtcctagaccccaagatggagtcgcagccgagtcggacttgatctgcttcctgttgtgggcgcccttgctcctcctcctcaacaccttgggctttcccaagtccttgctgattctctccaaggttcctaatcatcaaaacatccaaggccccaagcgtaagctctga

SEQ ID NO: 12049 - DNA, 1011 bp, Zea mays
  Peptide Sequence Number=SeqID_55424
agcacagcagggggttggagggatggagcaggggccgtcgaccactacttgggagaggcagccggctgcggcttggagaaggacatggcggtggtgagctcggccacgagagaaatggcgctcgcgccttggggaagaagggctctgcgcttgggagcttccactgctagcgcccacggaagcgaggctgagcagggagatggcgtgggggagaaagggagaggggctggtgctgctatttatagagccaagctctggacatggcagactgcactagcaggtggcaggtgtgatagtgccagcattgggcggcagttttcgtccttttctgtttggaatcggacccagatcactgcaaacgatttgttccttgattacaatggatcaagcagtctcattagctgcgagaagcagacgattcgaatcgagttttatccttgcaagccaggcctcaccgccttggcatacaatgatccacttaccccgaccgccgtcgtgcagtggccgcacttaggactccaactcaaacttgccaccttcgggaatttccggaggcactccgctataattcaccagactgtccggtgtacaccggacagtgtccggtgctccaaggaagagcggcctccggaactcgccagcctcgggaaaacgcagcggctgctccgctataattcaccggactgtccggtgtacaccggactgtccgatgaaccagcagagcaacggctacttcgcgccaacggtcacctgcaggcgcattcaatgcgcgccagaagcgcgcagaagtcaggcacgcccatactggtgcaccggacattgaacagtacatgtccggtgtgcaccggacatccaggcgggcccagaagacagaagctccaacggtcgaatcccaacggcattggtgacgtggctggcgcaccggacatgtccagtgtgcaccggactgtccggtgcaccatacgacagacagcctccaccaacggtcatgtttggtggttggggctataa

SEQ ID NO: 12050 - DNA, 102 bp, Zea mays
  Peptide Sequence Number=SeqID_55425
atggccgaggctcgggtggcaatggcgggcagaaaagagctcaccggagctaaggaggggcatctggccggcgaaggttttgctgactggatcaagagatag

SEQ ID NO: 12051 - DNA, 456 bp, Zea mays
  Peptide Sequence Number=SeqID_55426
atgggcaagaacaacaaatgcaagcgcgagccgactcctccatcaaaggactttggcgactcggaatactcagaggaggagttatcctctgagtctgaggggtctccagctcccgtctctcccccagcgtcatctgatgactcggacgactctcaggggattgccgcggaggtctggacttacatccgggccgtcgagcgctccgggctcgagggctcggatgagtcggagtactcctcggacggggaggactcgcccgaggaggatggcgaaggtgacgacgacgacgacgacgacgacggaggcgacgacaacgacgatggtgacggcggcagcaggggcggcaatggcggcagcaggagcggcaacggcggtagcaggggcggcgatggcggcaacagcaggggcagcggcggcggcggcagcagcaagggcagcaacaaggccagtggctaa

SEQ ID NO: 12052 - DNA, 114 bp, Zea mays
  Peptide Sequence Number=SeqID_55427
atggccttcaaaaaatggcttgctaccattgaaacaattgccaacaagattcttggtaccttcggaatcaggttgcgggtatacaagagcatggtcaagacgaagcttgactga

SEQ ID NO: 12053 - DNA, 1032 bp, Zea mays
  Peptide Sequence Number=SeqID_55428
atggcgctccctgttgacgtggcgggtctgtgccctaggcagggtgacgtgggggctcctccgaagccgaggttgagtctgtcttctgttgccgaggccgagtccgagccatggggtcgggcgaggcggaggtcgttcggccgaggccagggcggagtccgagccctggggtcgggcgaggcggagtttcgttcggccgaggccagggcggagtccgagccctggggtcgggcgaggcggagtttcgtcgtcttgcgggtcttagcccgagtccgagccctggggtcgggcggagcggagttcgccgtcttccggcccgagtccgagccctggggtcgggcggagcggagttcgccgtcttccgggtctttagcccgagtccgagccctggggttgggcggagtggagttcgccgtcttccgggtcttagcccgagtccgagccctggggtcgggcgaagcggagttcgccgtcttccgggtcttagcccgagtccgagccctggggtcgggcggagcggagttcgccgtggcgccttcggcaaggcctgactgcctgtcagactcactctgtcgagtggcaccgcagtcggagtggcgcaggcggcgctgtccttctgtcagactgctttatgctgatgggggttacgagctgagaattaggcgtcttgaggggaaaccacacgcccaccggcccacgcccacgcccacgcccacgcccactgatacttcgagaagtagaggatcggtcacacagcttgccaacgtgttcaacattaatggctgctcgtacgcgcgcgggctggcgtccgcttctggggaagtggttttcggaggcaggcggatcgaggccgtgcagaaccaacgccgcgaggccggtagggggcccaacagcacgacgcggcccagtcattcgtcgcttttttaccgtgccgcgaccgcgaccgccagacaattgccatcagctgctggttggtttctttttaatcttgactcgatgatgacgctttcagcaaagaatttgacggcgtaa

SEQ ID NO: 12054 - DNA, 111 bp, Zea mays
  Peptide Sequence Number=SeqID_55429
atggccaaggttaccccgtaccccttcgcgtacaacgagcagctcgtggttcctgagtgtgttgctgaagatccctctaagcaacaacctggtgaaggcaagtgtccttag

SEQ ID NO: 12055 - DNA, 681 bp, Zea mays
  Peptide Sequence Number=SeqID_55430
atggctcctaaagatgtaggcaccctaggcccctcgcaccccacaacacctggcggtatacgccccaaagggcgctcgtgcctcagtgcatctaacagtgagattgtagatggggtgcctctgtttgtttcatcaaactgccttcctgtaaaagctttgaaatatgaacctgctggttattcgttccatgctgcggcaatgaagctgcttggtcttgcggagcatgaagatatagaaactgatgatcacagcgtttcatcggatgacaaaagccaagattttaatactgcttctgatacctttagcagcaaagggaagaagaagtcatctggcagtcaacagcaggaccactatgctttgcttgggttggggcacttgaggttcttggccactgaagatcaaattcggaaaagttaccgtgagatggctctcaaacatcatccagataagcaggctgccctgattcttgcagagacaacagaggaggcaaaacaagcaaaaaaggatgagatagaaagccatttcaagtccatccaagaggcctatgaagttctcatagaccctacaaagaggaggatttatgactctacagatgagtttgatgatgatgtcccaacagactgtgccccacaagacttcttcaaagtttttggcccagcctttcatgagaaatggacgctg

SEQ ID NO: 12056 - DNA, 585 bp, Zea mays
  Peptide Sequence Number=SeqID_55431
atgctagagagatcactgctcatgaaggcgcagaatgataaattatcaggtaagtcgaatggaaacagtcatgtaatttatgcaaagacagtcagtaagatgataatcacccccaccaaggtgagggtattggatccgaacgagaggggcagcatggagcaaggcttggaggtagaggaggtggaggtcgtggagcgcgtggtggcagacgagcgcctggtcgagtgggaagtctcccgcgaggacggtggcgacggtgaggtggacacggttctcgaagccgaacagaagatcgaggttgaggaggccggcgtcgactatgacggctgggaggccatggcgcgcgagggatgcggtgaggctggcggttgtggtggtctttccgatgccggccttgctggaggcactcaactacatccgagcgacgtgccctcgcgtcggccgagcagaacgcagcaggtcatcaaagaagcacgagggggtggggagagggaggggcaggcggggccagctgtggaggaggtgtgcgtaggtggaggtggaggtggaggagaatgtgacatgaccgacgttaggagagaatag

SEQ ID NO: 12057 - DNA, 237 bp, Zea mays
  Peptide Sequence Number=SeqID_55432
atgggcaagcctgtcccatcactcctcatgctcctcctcagccaagtgaccgcacttgtacccaccataaccggaatgggagaccacgtctcaggtcacgtgaggagggcaatctgcgggcaggttcactcaggatttaataacattatgctaaaagaagaaaaactaagtttaatgagtaacttagggtttcttggtcatacgtggcttttagtggtttatgcttatcacttctag

SEQ ID NO: 12058 - DNA, 267 bp, Zea mays
  Peptide Sequence Number=SeqID_55433
atggcgtctgcgtgcggagcgctgtgcaagtcaacgtccctggcatcaaaaggtttgggtgatgcggaggcggtggtggtagaacctgcacctcttgatggtgctggtaagcatggttgggtggatgctggatatgtttgttgtggtatggttgttggtgatggatataatgctcttcagacgaaggtcatgaaggacataccttcgaacatcgaagacagcaaaaggtacgagcgtgatgtaaaagcaaatgccaagtcagcgtga

SEQ ID NO: 12059 - DNA, 306 bp, Zea mays
  Peptide Sequence Number=SeqID_55434
atgacgttctgtcgggtccgagagcttggaaagctccacgggctactggtgaagctaactgagtggctggcgcggcttggaagtgactggagggagctggccacggtggccgaggctcaggtggttatggcggacggtggcgcggcgtgctcgaggcgaagtcggcacggcgcggtgcacgggtggtcgtggaccggcgagcgcacgcgggtgtgcactgcggagtgcgggtgcgcaaacgggcgtgaaccggacgtgtcagccacggtcgaacacgtggaaccgttgtttctgcccgagttctaa

SEQ ID NO: 12060 - DNA, 1083 bp, Zea mays
  Peptide Sequence Number=SeqID_55435
atggaacagctgaagaagctctgtgatggaatggatggtaaggatgcagcgggaaaggcctggttgctgagcaatgtacttcccaatgaaagttcctcaaaggaagcaaagaaaattgaagggaatggtgtggagccttctgccccaaaatccaactctacaggaggtagagcgacagaaggcagtagcagcatattgaacagctatgagaaaaaagagagaccatggggaaaggaagagattgagatgcttaggaaagcaatccaaaagtatcctaagggaacttcgaggagatgggaggttgtttctgaatttattgggactagcagatcggttgaggaaattctcaaggccaccaagactgttcttctgcagaagccagactcatcgaaagctttcgactctttccttgagaagcggaaaccgacacaatctattgcttcgcctctttcgacccgagatgaaattagttcaactgagggagctgggactgcatcgtcaaagtctgcagcacaatctgcgagtagccagacagccaatgagaaagctgctgctgatcctgtcacggatggaggaccatccgtatcagatccagatgcctggacggatgcacaggtcctggctctagtccaagctttgaaggcttttcccaaggatgcaagccaaagatgggagcgtgtggctgctgctgtcccagcacgtccagcagcatttaacagtatcgcgcatccgtcttttggctcgcctccacttctgtattttgcaaggctggagaaacgacgccgaattgccgccaccacccgcctagaacaatccaggcagagtttcctccgaagacccaatagagcaacgatgatcgccaacaccatgaagaatgttgcagggacaaccaccgccgatgccaccccaccaagcctccgcgcgttgccacctttcgatgatcgacacaccaacccagtaggtccccaacaccagagctcctacaccagccggccagctagtgcgaaaccccaagatggccgaggcgaggaggcctacatggagggtggaggatatccatggacgacacccttaatagggtag

SEQ ID NO: 12061 - DNA, 387 bp, Zea mays
  Peptide Sequence Number=SeqID_55436
atggcccgcgcccgcgcctataaggcccactcaggcgtcgaccatacccttccgcgcacactcaacctcaccggagctcaaactcaccgtcgtttgcccgtgcatggcgtatccgcggccacccgagcccctgccgcctgtagaccggccagccaagcctttcccaaccacgtccgaccctcggagaatactgagcacacctcggtgaagctccccgagcgaggaatcgaagtctgcttcgccggagaggccagtccacgatcgtcggaatccctccaaccgccggcgaatgtagaccgggtaagccactgtgccatttttcgattcaatgcacagatagcctctacatcaccccgtgaagctcaccgtgacaagggattgaactag

SEQ ID NO: 12062 - DNA, 789 bp, Zea mays
  Peptide Sequence Number=SeqID_55437
atggccatgccatcatcttctacctacggctcggctagtgatgacaccgcgccagccctagggccgcgaccagagccgaagagacaacctagacgggcgagcgcgattctgcgtatcgccgccggtgggtgccccagtaacgacgtgggcaaagcccgcggtggcgcccgaaagcggcggccgcgcacatccgatgagggcagcaagaaccccgatgactacaacccagcgcagcaaggcgaaataggaaaacaggtaaggtcgcatgggtgccttaccgcgatccatgtcgagacagtccttcgctcccgcacggtgcggcccgcggcaccagcggcaccgaagcacaaggcggccatcatattccgtccctctggatctctccctgcgcacccctctctctcctactatctcacggccatggcgaagaagaactcgagttgggggctccccagttcggcggcggcggatctcagcacgtccggcttctacgtccgcgccgcacggaccagcggtggaggcaatcgacgcgcgccaggtagagaggaatcgcgtaccaggacgcacgcacaagggaacagggagacacgagctccagcagacagcgtcgatgttggtagagagatgagggggccttggctagcttccgggtactcggctgtggctagagggcggcataatgacgagatgcggaggcggcaacagttcccagttttctttatacgctcacgctggcaaagcctgattccaagggccgtttgggtgatccgatttcagcggatgacatag

SEQ ID NO: 12063 - DNA, 789 bp, Zea mays
  Peptide Sequence Number=SeqID_55438
atggccatgccatcatcttctacctacggctcggctagtgatgacaccgcgccagccctagggccgcgaccagagccgaagagacaacctagacgggcgagcgcgattctgcgtatcgccgccggtgggtgccccagtaacgacgtgggcaaagcccgcggtggcgcccgaaagcggcggccgcgcacatccgatgagggcagcaagaaccccgatgactacaacccagcgcagcaaggcgaaataggaaaacaggtaaggtcgcatgggtgccttaccgcgatccatgtcgagacagtccttcgctcccgcacggtgcggcccgcggcaccagcggcaccgaagcacaaggcggccatcatattccgtccctctagatctctccctgcgcacccctctctctcctactatctcacggccatggcgaagaagaactcgagttgggggctccccagttcggcggcggcggatctcagcacatccggcttctacgtccgcgccgcacggaccagcggtggaggcaatcgacgcgcgccaggtagagaggaatcgcgtaccaggacgcacgcacaagggaacagggagacacgagctccagcagacaacgtcgatgttggtagagagatgagggggccttggctagcttccgggtactcggctgtggctagagggcggcataatgacgagatgcggaggcggcaacagttcccagttttctttatacgctcacgctggcaaagcctgattccaagggccgttcgggtgatccgatttcagcggatgacatag

SEQ ID NO: 12064 - DNA, 441 bp, Zea mays
  Peptide Sequence Number=SeqID_55439
atgacttctcacggatcctcggacgaagggaatgcactgtcccacactgacgggcttgcacgagagggttttccccgtattttgtgggaggtacttcaaggggccggttacatgacgcctcctcagtacgcggtgcagcagttcgagaagcaccaaatgccccgctgtaggcaattgtcaaatgtgatacaagagcttgaggaattagtggggaccagggagaacaccatcgaggttctcgaggatcagcttatcaacactcagcagcagcttgcggaggctaacgagcacctggatatgcaccaccaggagatccaggacatggaggccaacgaggatgtcgacatcgagggaggagaggagcctacctccagcttggacactgctggctctgggagaccaccttcccccgagtcgagtgttgcctcgttcgctcactag

SEQ ID NO: 12065 - DNA, 705 bp, Zea mays
  Peptide Sequence Number=SeqID_55440
atgtcttcttcctcccttatgcatcgcgtctttccaccttccaagcccccggatggggggcatccaccgtcttttcgcctcatcgttggaggaacgcgactccgcgggagttggtacctttcagccatcgttcagcttcaaggattttcatcatgcagcccggtcgctcccccccgctggtggtcacccaagacggtgaccgccagttcctgggtggggagaagcaagccgggctgcgatcttggtcccaccctcagcttcaaggatgttcatcatcctcgctggggtgggggccgggctgagccggcgctctacctcccacgcgggttcgcgggtcaccccttcccgcggcgttcgagggagagggcactcactggccctgcgggtggcccggacttcgacaacgcgaggctggtcgacggcgggcgtcatcacctccagcgtgtcgggcccgtcggcttggctcccggcgtcccctcctgtcggagggcggctgccgcgctgtgtgcacgggaggaccacccaagatgccgcgcgctgctagggcggcgttcgtgttctggggcggaggctgctcgagaagtccccgtcaccgacggggtcaccgccaccatccgcgcctctggcctccggctcttcgcacttgtcctcgcccctcgagcgtcggtgtgggcgagggcaagattgcagcagcgcccaccctga

SEQ ID NO: 12066 - DNA, 837 bp, Zea mays
  Peptide Sequence Number=SeqID_55441
atgacttctcacggatcctcggacgaagggaatgcactgtcccacaccgacgggcttgcacgagagggttttccccgtattttgtgggaggtacttcagggggcctgttacatgacgcctcctcagtacgcggtgcagcagttcgagaagcaccaagtgcctcgctgtaggccaggctggcgttcgctggactctgagtcctttggataccgggccgaggatacaatcgaggcgatcgctcttcacgaactgaccactttctgcggattccaccccttggagctgtccactcactacattggcttgttccccgctgagagggaggatgacccaatgtggaaggaccgagtggagcatgccaaggacatctgggctatctacctaggtcagactgctcacttgatagtatggtgcatgaatgccctgtactgtctgcaagtgatgcatggtgaggcaatgtcccatctgatggcattgttggaggcaactaagatcaccctggataacagagaggagcttgtggttgacttgtccactgggatggtggaaaaggacttacaggtgcagcaactgtcaaatgagatacaagagcttgaggaattagtggggaccaagaagaacaccatcgaggttctcgaggatcagcttatcaacactcagcagcagcttgcgaaggctaacgagcacctggatatgcaccaccaggagatccaggacatggaggacaacgaggatgtcaacatcgagggaggagaggagcctgcttccagcttggacactactggctcatggagaccaccttccctcgagtcgagtgttgcctcgttcgctcactag

SEQ ID NO: 12067 - DNA, 1116 bp, Zea mays
  Peptide Sequence Number=SeqID_55442
atggcgaatacggatgaccactccttaccggcgattgagcgacgcagggatctggcaacgatgtccagcggctccacggggcagaaaggggaaagaatcagctgcccagtttatagcctccgcgaggttgaggccgagcttgtagcagtcggttacgcgggctggagcgaggattctgcggattcaggtggtaatggcctgcgacgacatcggcgggaggttgtaaggaggcgctggtcgcccggccccacctggcagtggagtgagccagcacacaaagcacgcgccgggtgcggtaggtgtaggcccgcctgtcataggcgccgggtaaagcccactgctgggttggaaagagggagcacagatgggctgaagcctggtgatttcggcccaagcacagttgaattccagttccaaacttccactgaaatattttgggcaaacttctatgaagttccaaagttaggattttgggatgttacaaatacggatacctcactcatcaccttccgcgagaagaaaccctcgctcacacaaacatccctgttgccgacaaaaagtccagatgctcgaaataagaggaaaggagacgcagctttacagcgcagcgagggtgtgttttctggcctcagcggccgcagaaggcacacgctacaagacaatctgatcctgcaggctcgggtcttcacgctggaagagggctgtaacaccctcggcatcgacgacaccttcagcgaggtccgacccagcctcgggcggcgacgcggtccagggacttctccgggaatccggcccgagcaggcggctcgaccggttgcctcaggggcctcggccaaccatcttccaagggcgccagcccggcccgaggcctcggctggtcaactccggcgtcggtcccgccgacggacaacccggctaggctccggccaaccaggttcccattttcgagccaactccgcctctgttcgtgctgatatcgctacccctggcctcggctcatcgaagagcggccgaggggtctctttaactaagctagaggagcctcagacaacaaggccgatcgagccgagggactcctacgcctccgggatacggatacctcactcgtcaccttga

SEQ ID NO: 12068 - DNA, 456 bp, Zea mays
  Peptide Sequence Number=SeqID_55443
atgaccactccttaccggcgattgagcgacgcagggatctggcaacgatgtccagcggctccacggtggttctggggcgccgatgacaatccaaggtccttcacagcctcccaccatcaattgcacggatctgaggggtccgacgcacgacctagaggctcccggttgatcttcaccggccgcgagacgtcacatgcgcggagcccttgcggcagtcccagcggccccgacacaccattcctcctcccccctgggtttgagttctacgactatggcggtcctcaagaacacatcgccagatcactggtcagcacccgtgttctcctgtggtaccgtggacccccagtaatacagcccgagcgatggcgactcctctctctgcgcacggttttggctatggcggtcgaaacctacgaaggggcagaaaggggaaagaatcagctgcccagtttatag

SEQ ID NO: 12069 - DNA, 2391 bp, Zea mays
  Peptide Sequence Number=SeqID_55444
atgcaagtagtggagttggttccttgcgcccgcaacaagtggggcaactggaatgaattttggttttacgttgctgagggcaccgtcgaaggccatgagggactccccgtgtccgagatgtgctctcatttttactcagcgtacccgccctttgaagtggcggaggaggatgtggacgaaggggcccttcggtgcgccgctggtctgagcagtgggcgtgacttggttgaagaatccatggcgtacggggtgtggcccttggcgcatggctgggcgttgggcgaagtgtgccctcgccagatgcctttccatggcggtagggtggtgcggagtcccgccttcgccctgaatctgcgaaaccgcgatccggccgcctttgtgcgtgaggcggaggatggggcggtgcggcttgttggacgttacgtgccgaggacggagggccagcgcagctgggatatccgcgggtcgaatgaccgtttgaacagggtttttgaattaaatcaattgccatatgacggctaccctggtcaagacgatgtggaccgccgtgggaagaaaccggcggtggagactggagacgacgctgcgccggcggccgccccatcctccaaaaagagaaaattaggtactgctatgggaggaattggggtttctgatggttttgctagagagttgatgaggacgtgcgcggccccgggggaaaggatgtcttcgcccgagctccgggagtcttcggctcggatgatgagggttaccgggggttgttggcctaggaatgttcctatcccccgcgcggctggcagggacttttttacatctcgcatggttcgtcaatggagggtttttccttacgggcggaatattgctgctgttgtgtcagcagtgatggacaaggatcgccagggagccgcacaaaagcgcctggcggccgtcaggctcgttgaagccaggccgaagaggcagcgggggtctgcgaaggctgcggcccccggcggaggccggccgccgccggcggcgaagtcgggcgtccctgcagctagcaaggcgccggaggcaacggcgaaggcggtgccgccgtccggcggagtggcggaggtcgcgaaggcggcgcgagcgttgccgttgtcgggcaaacgtgtcgccgacttcgccactgatattagtgtggaggactatcttggtgggtcgggcgagggccaacttgctatggttgcgcctgccgcggcgaccacgacggctgccgcagtgccaaaggcgaagggcggggctcttagcgccgggggcgaggtgtcagccctcgcggttgtcatggatgaggcgggcgctgcgacccgccggctaaaggaggtgacagaggcgctgagtcaggtggctgacttcgccagccgcactgcgtcgggggccctcacggcggctgtggctgccgaagtcgagagacttcggacgcaacatgctgacgccgtccgtgagaagtcggccaccgacagcaagtgtcgcaagctggcggacaaggtggccacgctggagggagagaaggctgacctccggcgccagttggcgggggagaggagggagaccaacgaggcgcttgttaaggcgcaggctgcgcaggcggaggctaacctggcgcgggcagagggcaatcttgccagggagcgcgccgagcagctgcaggagcggctcaccgccctggagtgccgcgtggagagggccgaggccatgtcgcgcgtagaggcggagcggacgcgccagctgctcgtggatacataccgtgggctgggcgcggggaccggtgacttcgaggtgccggaccgggagcccggacttcgctgtctggagtgggtgcaggaggagctgcaagcactccccactgtcgtggagggctttatggcgtatgcctccctggtcacctgcgagggggcgatgaacgcgctctcccgcgaagggtgccgacacttcgaggtcttcgaccaagccgatgaagatttcgagcgagatatctttaaggttgaggaccccgtagtgaaggagtccgccggagccctctacgaccggatgtggggtctgcatggtcgcgaggtggtcagggagcgggccgagacggcgagggcgcaggtgttgcgtggcgagagggtggacgacttcggggcgttgaacagcatgctgtctgtcccggagccgaccccggggaccgcggaagacgcaccgggcgcccccgcatccgctgctgccggcgaaggcctgcccccggaggtcgccgaaggcgcgcctgatgccctcgcagccgctacgccgagtgctgaagatcccgcagcggtggcggcggaagcagcagcggaagcgacggcggagccaacggcggaggctcccgcaacgtcagggtcgtcgcag

SEQ ID NO: 12070 - DNA, 306 bp, Zea mays
  Peptide Sequence Number=SeqID_55445
atggctgtggcatcgaaggcggacggggtgacgatgcggatggtgtctcgcaggggtgtcgtgcagctggtgctcatgtcggccatcgcctgggtcatgctcgggctcgtcgctctcgccttccacctccgaccatgcatctccctcgtcgccttcctcttagtatactctatcacctccggctatggagcagctgtcgtcctagctaggcaggcacaagaaggcacacgatacaccacaagcatggatcccagttgcatctatctgatcaattctaggcgtgtcctacttcttcctacttattaa

SEQ ID NO: 12071 - DNA, 201 bp, Zea mays
  Peptide Sequence Number=SeqID_55446
atggctatgctggccggtctacggtggcgggtgctcgggcggccgctggcacaccattgcaacctcgctgacggagagtacgtgctcatccctaagcaaggagctgtccacgaggaagatcaggagccagctcccgagcctgccatcgaggatctccccgtagccccagcaattgaaggcaagccccggttttatgcataa

SEQ ID NO: 12072 - DNA, 150 bp, Zea mays
  Peptide Sequence Number=SeqID_55447
atggcagtcagggtcagtgaggcattgtacgccaaggcgataggttctctggaggacatggttgctggagtgacttggccgtccatcttgccaccgggttggacagtcgagtgggaccctacctcggctgaggaggagcatgaggagtga

SEQ ID NO: 12073 - DNA, 561 bp, Zea mays
  Peptide Sequence Number=SeqID_55448
atgcaagagttgatggctcaacagaacaagattctgcgacagttggctcatcgtcagccgccacctcagcactatggtggtggtgaccaccatcagcgtcccccagcagcagccacttatcaggagttcctcagcacgcagctgtcgttgttcactcaggcagaggatccgcttgatgctgatgccttcaatgacctgtgtcagtatgccagatatcatgcagacaccgatgagaagaagagggataggttcaggagggggctcagcactaagctccgcgaccgtctcaacaccgtcatggccaacagttacaatgagttagtcaacatggccatttcccaggaggactgcatcatagcccgtcaggcagaaaagaagaggaagacccctgtggcaggatcatcagctcagcctcagcgcttcagaattgtatctgacactcagaataggggacctcagctgcagcaaggacgatgggtgatccgaccacagcagcagcagcagcaggcacctaaccgctctcagcccccagttcagaggaacaatcagccacaacagtag

SEQ ID NO: 12074 - DNA, 771 bp, Zea mays
  Peptide Sequence Number=SeqID_55449
atggagcaaggaaaaccatgtaagcgtacaatctctgtaaagaatgcccttgccacagacgcagcactgtacggatgccccaaagtgatgaagtgtgcaaatttggagaagcggtctaccaccaaggaagctcaccaccgatgcactgtcttctacatcccttcatggctgctatcgtgggcgttggagagcagctgctgccacacggttgatgcatctggtacaaagactgtgccccggaacagcagcagaccatcagccattgtccagccctctgatgctgtccctgctgcaattttggaacgcagttccgtgacttgtggatccccccccagcttcagttcgcagtgtttcaaatatctcaaagatgggtgtagagatactgtgaactgcaagtgcttcctcatcgcgccgagacaaagcatcagtggctccattcaacttgcccggcctgtactccactgtcaggtcataaccaaacaatttactaacccatgtatgctgtggaattgtggacaatcgctgatccaggatgtatttaaggctgtaatggtcagtctgtacggtgaaggggcggccccaaatgtacggacgccaatgtcgaacagccttgaccagcccaatgagctcccgctcataggcagggagcttatgatgatgggctgctaccgccctgttggggcaaaggcgcaacgccccctcgctcgatcatctccacagcagaagcggaacatgtcggaggaaaaggaaaagcatgcgaagactgaatag

SEQ ID NO: 12075 - DNA, 1983 bp, Zea mays
  Peptide Sequence Number=SeqID_55450
atggcgcggttcgaggtgaacggcaagtcggtgcaaggcgtggacctgctgcggcggcgccactgggcgtcgcgtctcgacttctggcccttcctcgcgctctatgcgctttggctgctgctcgccgtcccggcgctcgacttcaccgatgctctcatagtcctggccgcgctctccgctgctcacatcctcgccttcctcttcacggcctggttcgtcgatttccgggccttcatcgggtactccaaggcgagtcgcctctcaattcttaacccatctaattttagggctgaaaagcttgagcttggcaatattacaggtgagacagcggagatttactttgattttcggaagcagaggttcatctactctgcggagaaagataactttttaaaactccggtacccaacaaaggagttgatcagtcattatgccaagggcactggttatggaactgaggccaagattagcactgctgtggataagtggggtagaaatgtatttgagtatccacagcccacatttcagaaattaatgaaagagcaaataatggaaccattttttgttttccaggttttttgtgttgttctttggtgcctggatgagtattggtactacagtttgtttacacttttcatgcttttcctgtttgagtctactatggcaaagaataggctgaagacattgactgagctaagacgtgtgaaagttgatagccagattgtgttgacctatagatgtggaaaatgggttaaaattcctgggactgaactactaccaggagatattgtgtcaataggccgctcaactagtggtgaagatagatctgtaccagcagatatgctattgttagctgggtctgcaatagtaaatgaagctattcttacaggagaatctactccacagtggaaggtctcaattgctggacgtagtcctgatgatatgctatctataaagcgggataagaaccatatcctatttggtggcactaaagtattgcaacacactgcagataagtctgtaaatcttcgagcacctgatggtggctgtctagcttttgtattgaggactggatttgagactagccaagggaaattgatgaggactatcttattttcaactgagagggttactgcaaataacaaggaaagtggcctgtttatactctttttgctcttctttgcaattattgcgtctggttatgtgcttgtgaagggactagaggacccaacaaggagtagatataaacttttattgagttgttcattgattattacttctgtgatacccccggaattgccaatggaactttccatagcagtcaacacatctttaattgcattggctcggcgtggtattttctgcacagagccattcagaataccgttcgctgggaaggttgacatatgctgctttgataagacagggactctgacatcagatgatatgggtgaacatgggatgacaaaccctgcgtttcaggagttccaaggtattgttactttggaagatgacactgagttaatatctgatgcaaataagctgcccctccgaactcaagaagtactttccagttgtcatgcattggtatttgtcgacaacaagctggttggtgatcccctcgaaaaggctgctataaagggcatagactggatctacacatctgatgagaaggccatgtctaaaaggcctggtggtcaacctgtacagattgtgcacaggtaccattttgcttctcacttgaagagaatgtctgttattgtccgtattcaggaaaggttttacgctttcattaagggtgcacctgagactatccaagagagattagttgatttacctgctgcatatgtggagacatataagaaatacacacggcaaggttctcgggtcttggctcttgcatacaaattgcttcctgagatgccttgtacttccataaaagtcctgtgtcagaacacagcaaaaagcttcttgattctttga

SEQ ID NO: 12076 - DNA, 831 bp, Zea mays
  Peptide Sequence Number=SeqID_55451
atgcccgacagagtttttgaaatctctactgttccgcagggtgtgccacatgtccttgtgctatgggcactaggagtcgaggatctcatcctgtgtccttactccaccgcggggagcgccacgggctcgagccatggctggcccggcggcgtgcacttcctcccggggcttcttttcacagcgcttgtctggttgctggtttatgtgtttctgaggtgccggaggcacgggcttcatgcctccaatgaggtcttgagcctgctcatccgcagtgatgtagatgtccgtctccctgaacagttgttcagaggtggcagcagcccgggtggcggtcgtgtagaaattcaagcagccccccgggtcttgcttgggttcgtatttgtcgacattggagactttgaagttgggaggccattggatgccccgaagccggggggcgagcgtggagaccctgcaccatccgatagaagtcagggtatagtttccgtgcgaggagtgggttctctcgtcgaagctagcatcatgttcagcttcctcgtgctcgcattcttgagcttggcaaaaatcgcggcggtgggagttgtgccgttctcgagttccctctacatccaccacataggagatggtcccaaagcagaaaactgcccctcgtctgaaggtgatcttgctcttcaaaacgacgaccatggagacgacatcgtagattgtgacccgatggttcgtgctgctgcacgagagggaaacacacaagtttgcacaggttcagaccgctttgagaagcgtaataccctacttcctgtggtggttttctgtatagagatgggtttatag

SEQ ID NO: 12077 - DNA, 552 bp, Zea mays
  Peptide Sequence Number=SeqID_55452
atggctgaaaagtaccaactcccacggagttgcgtttctccaacgatgaggcggaaagacggcgagtatcccccatccgggggcttggaaggtggaaagtcgcgatgcatgaaggggcgcgaaaacatggtctacttccaagggggtcaccctccttttaaaggcgactatccctacctgcgtccccagccgtcacgggctgagtcttctccaacacgctccaaggccctcccctgcggcgtgggggctgggtcccgcatgtcatgcaagccggctcagagcagaagaagccaaaccgccgcgctcggtgcacacgaccgcccagcgggaccgggaaagggggataccctgaaaaggatccttccccgtgaaggaaccaggctccgagcctccctactgatcagaggttcaaaggctggccccccgaagggttcgagagccgcctcagatcgcgtgggccctacacccactactggtcagaggttcgaaggccggccccccgaagggttccacggccgcctcaggctactcgggctccgcgcccattactga

SEQ ID NO: 12078 - DNA, 606 bp, Zea mays
  Peptide Sequence Number=SeqID_55453
atgaaccctctaagggtcaccatcgacaatacctcatgtccaagtgctacagttattcatgtggacaacaccaacaagtatggcatactgttggaggtagtgcaggtcctcactgacctcaagctcatagtcacgaaggcatacatatcctcagacggaggatggttcatggacgctcagtatgaaggctgcattggaaaggtttggtggttgaaagaagctggtggtagtattattggtggaaccatcaagacaaattcaggagatgagcaagaatccaaaaccacccagggatgctgtttccttgcatttgtttatggtggtgatccactgacagacctatcacttcatgctctccttgacaaattaatggaaaataaaccaaaagggagctgcatagctgaaggaagatggcacagtggaacacaaattgccctagctaaaaagcttaacctgaatcatcatattattggaggagagcttctagaattgtcagaaaatgaagtgcctcctgaagatattgttttccatcgtttctatttgaacaagactgcccagttaagcataaggcaaagtggaaggactcagttcttgatgaaggaatag

SEQ ID NO: 12079 - DNA, 888 bp, Zea mays
  Peptide Sequence Number=SeqID_55454
atgactatagaaaggatacatgacagttttacaaatgatatcttcctaaatactcctataacagttatatctttatatcttgaaaatcatggcttggagattccagatttgaatatgtccgaagctcctaaggattccatggaagttgacctggtgcagaaaacagaaaaagtaaaagttacaggacatctgaagaagttgagactgcaaggcaaacatctcaagtggaagctgcagacaattggggaagatgcagaagctgcatctgtatctaaagagtcatctcagcaagtggacgacattgagcaagcttacactcaaaaggaagagtcagtcagtgatctacctacagagatagaaaccttacattccgatgctataataaaagggttgcctcagaaggctccagataatatgcaaactggtatagccacggccccaaaacagagtcacaatcgaggagataatgatgtatttgaagccgtcactgaagtgccaagtactgcacaagatcatagtgaggatgatgttagggttgaagttccagaagagcacactgtatctcctgtgttacaaagtcaaacccctggtgagaagccggttctagtggtagatgtgcctgctgctgctggttctgccactcctgaacatgctgaagccgaatccaacaaagtcgaagaaaatcatgtaaatgtggagcctggaagaaagaataatgaaagtgatcatggtgtagtgccttctgataaggaaatacaaaacaatgtgcttggtgacatggaggaaagctccgaggaacatgaaggtgatggagcacctgcagttgaccagcccaataacatagctgaaatgctcccacaaacaggagagcagttttctgacagttga

SEQ ID NO: 12080 - DNA, 363 bp, Zea mays
  Peptide Sequence Number=SeqID_55455
atgactgagtgttctgtatctattgcatatggttctggtaataagtcatatgggcctgtgggagtcaaaacactgacaaagccaaggaaaggcatgcataacaatgatgtaacaccccaggtgttagttagggttttcactaaagaatatacaagtaagcccatcatcacatgtgacttaagttggaaaagtacaccaaagttggagctcaagatcctaaattgcaacctcgccgacggagagtacgtccttgtgccggagcaaggagttgctcaggaggtagccccggatccagcaccagagcctgccccagaggatctgcctatcccagctttggaaggcaagctccggttttatgcataa

SEQ ID NO: 12081 - DNA, 354 bp, Zea mays
  Peptide Sequence Number=SeqID_55456
atgggtatgaaaattgacccaaacccgtaccctaatggggtaaaaacccatcgggtttcgggtttcgggtacccattgccatctctaggccagcccaatatctctgaacaagacatatgttgctgcttccacacaacgtcgttcccactgcaagaagacattgttcgtgctgaaagatgttgttcctgctacatgaacaagaccgcctcttcggctgttcctgctgccaaacaatacctggttcagaccacaaggggtttgaatagcataggatatgctaaccttgttgataagttcaaagaacggactgacaaggagtatgatcaatacatacgccacttcaggactacttag

SEQ ID NO: 12082 - DNA, 1362 bp, Zea mays
  Peptide Sequence Number=SeqID_55457
atggcagcgcaacggctgccagcgccacttggtgtaggacacgtcgggtcggccattctcggcgcagcggaagccgacgtcgaggaacgggcagtcgctggagtggtagagcgggtacccgccgccggcgctggcccagacccactcctcgtcgaacaggtcgcactcctcctcctcgtggtcggcggcggcgacggcctcaccgccaccgccattccccgccgccgcagcacgaggcgcggagacaggccggctggccacatccaccgatgccgcgatggagaccccgcccgcccacaacctccccggtggaggaggtcccaactgcgcaccctagccatcgaaggtgacgcagggggcgcgtccagctccatcccgccgcccactctagaggagccggaggtggtttttgggcagcggctccggtctggcgccgagccagaagcagtgccagttcccctcccctcggtgttgtctcgtgcccatcaggctcttcatgagactgaggcggcgatcctgcaggagtgggaggcgcttgaggagcgcaccaaggtggcgtcccgccagttcgccttcgagcggtccgagctcgagcgggaccacaaggattacaaaaaggacctccagaaggtgtacgcctgggagctagaggtgagcccgaaggagaagaggttggccaagagggaggaggctttgaaccaaagggaggaggttgtcacagagctccgggccaagctgagtgccatggacaagatcctggaagagcagcggatccagcagaccgcggctgtggagaggctgcaaaagatgcagcaagagctcgagggcaaggcctgcgacgccgccctcgccgaggagaagcttaaagcgaaaggagagtccttggacaggcgagagacggaccttgccaggcgggagacggaccttgccaggcgggagacggacctcgccaggcgggagaaggatcttgccttcagggaggaaacgcttgaaaggcaggagaagttgctggccgagcatgagctcgaggtggaggagaaggagcggaaactggaggagcgggtccgccagttccatgcgatgcaggcagcaccgggcccccaggcggtggaggccaccaggaaggctcttgaagaccttcaggcggatcatcacgtcggggtccagcgcatcgccgcatgggccggcgaggcgagcacgactctggtgccgctggggatgagtcccatcccggtgtcggggttgccgacgtccatcttcgacgcgctcccggtgctggactctgccgccgaccgcctccgatgcctggaccagattcttggcgcccgcctggaggtcgagggcggcaggccatctccctag

SEQ ID NO: 12083 - DNA, 660 bp, Zea mays
  Peptide Sequence Number=SeqID_55458
atgagcacccaccaggggtttcatggtagcgtgacctgtgtcagcttaaaaatgtatataaagaaggcaagatgttctgccctagttggtgcaaatggatctggcaaatcaaatttctttcatgctattcgatttgtcctgagtgacatgtttcagaacctgcgaactgaggataggggtgcccttctccatgaaggtgctggacactcggttgtatctgcttttgttgagatagtgtttgacaatttagacaaccgtattccagagcaaatggttgcagagaaggaaagagagctagaagaaggagaagcacaaaagtcaccctccaagattgttgctgatagtctcagccagatcagccgctcatccaccttccttccaaacattggtgtccctacaacgtccaagactggtcggtccacatcgctagctgcacaagcacgcatgcaagctcagtttgaggaaaaactccaagctgaaagagaggaagctactaggaagcaggaagagttgcaagcacaactacaagctcaacaggccgcacttgaagaaaaccaaagtttgctgcgccagacccaagaggaagtgaaggggatgcataccaagtttgaagagaccaatgcactgcaacgagctgtcctaaaacttcagaaagattga

SEQ ID NO: 12084 - DNA, 408 bp, Zea mays
  Peptide Sequence Number=SeqID_55459
atgcgccggctggaggcccccagtctgccagcgtggctccaggcgcccccgccgcggccccccgccccttggacaagggcaaaggggctgcaggcagttcctccgccccaggtggcaccggggggtcggaggaagagaggcgacgccggctgcgccgcgccgacgggtcatttatttcggaccccccagaagcgtcagagaactgctggtggggccgaggaggccggctcccaggcccagggcacgcagaggcacgtcagtcctccgccaccacaaccaccaccaccatcggtcccgccgcctccaccaccacccgggcgtgatctcccccaggggcaccagcagcagcagcaacaacacactacaaaaaaatggttttgtatgacaaaagtaaagtgtcatgtttag

SEQ ID NO: 12085 - DNA, 495 bp, Zea mays
  Peptide Sequence Number=SeqID_55460
atgtggatgacggcgagcgtccacggcgacgaatccagcgcaatttcgcccactcccgcgtgcacagacccccaggggaggtccgacgagcactcccgccgcgatcacccaagtccgaacaacgccgtagtcgaattgaaggtgcggcggccaacttcttttctctgcgcacccacatcttcctcttggttcatcaatggcggctctggtgaaacagtcagggggcagcggccaggattttatgtagggcgcgaggggaaacgaggccgagctgttgctacggttgagagaaacccgggtggggatcaatgcgcatgcgagcgacgaatccgcggcgcttctgttgataccgggtccgcgcgagcgacatccacggaggccgttggggaagacgacccgggtgccgactggatgggcccacctagcagagacccacgcccagggcagcgccggtggttttgggccgccgggaggaaaaagaggcccattcggtag

SEQ ID NO: 12086 - DNA, 456 bp, Zea mays
  Peptide Sequence Number=SeqID_55461
cagtatcgaggcgccccgcgcgtggcccaacgaaacctccaagcgtgggggccgcgggctcgcattctcccctgaggtgggcccaggggccactgttagtacactaaaacagggaccatggcttgcctcggcctcgggcgactactctgggccaacgatagcacccgacccctccacgtggggtggttccagggccgccacgtggccagagaagatgatatactccaaggtatcaacagtgagtccagacccccatgggaaggtgccggaccactgtatatacagaccggccctccgggtaaggtccaggaccccaacgggcgcaaaccggacccctaggatggggtccagacccctctatgtggggtccgggccactcacagcaaggtcccgagattctgggacagagaatacccaggccttaatcaaggccaggcgggggtccagagccgacac

SEQ ID NO: 12087 - DNA, 231 bp, Zea mays
  Peptide Sequence Number=SeqID_55462
atgaatcacagcgtccggcaggcgctatttatgggcgcggagaggatcaggtcgcgcaatttaagggctaaggtgggggaaagtccgagcaggggtgcgctccggcgatctcggtcggtttgtttgcaacagtcccgtgcggcgcgcgtggagttcaggaggaagagaaccgacaacgcgaggaatacagagacagcccgacagatgggccccacacggcagtcagcgtag

SEQ ID NO: 12088 - DNA, 567 bp, Zea mays
  Peptide Sequence Number=SeqID_55463
atggccatgatgggttcaacatcggaaaagatgtacctctgccaggtgaagaagcagcaaacttttgttgcttttgttccaaggtggtaccaaaagaagaaaatcaagactaaagttgtgggaggaaaggtaaggaattcagataccgatcttgtcaagtggtcaggtgcacctacagggttgtctgaagtccattggacaaggacaactgtaggtgggcctaatgacttgggaggttctgtcacagctgatatgccaccgtgcataagaaaaaccgtgcgcaagtctaccggacccattggcgtacctcgccatcaactagctccaaggcatgaagacagtagtagtggtagcaatgatccaatcggagatctggaagctcaagtagaacagcttcgatcggagctccttcacaggaacgatgtatgggtcgaggatggtgaaagaataaacgaattaagaactgacatccaccacctgcaagaccaacttgctgaacgagatttagcgctcgattgggctgttaactcacgttcacttgcttgggccaaggaagccaaagcttga

SEQ ID NO: 12089 - DNA, 111 bp, Zea mays
  Peptide Sequence Number=SeqID_55464
atgaccatgatgggttcaacattggaaaagatgtacctctgccgggaccttctcgatgtaggcttgatgatcaaggaccctttaactggtcacatgcctcatcatgggtaa

SEQ ID NO: 12090 - DNA, 423 bp, Zea mays
  Peptide Sequence Number=SeqID_55465
atgaatccatccgaggatagcgacaatattgacattgaggaagatagcactatcattcatcctacaaagccaattcacgtgaacttcgacaaatcaaaaatcaaaggaggacacattaaggatagcattcatcagtgttctagttcgataaagttcgtccacgtaaacccgacctctggtggcatctatggtccagacaggatcaaccactggtctgatgatagcctcaaacaactgaagctaccagagctccaaaaaaggaaaaaggggaagaaactggctaccagtattggggctcttacaagcaatagtctggtaggggtctggccctgtaaacctggtatgataatgtatgacccacggtccggtaaggttgctcgcataaacgcggcctctagcaccctctatggtccagctcggtaa

SEQ ID NO: 12091 - DNA, 114 bp, Zea mays
  Peptide Sequence Number=SeqID_55466
atggtggtggccccctgggtaaggtaccttagacaagaatacgtccccatgttaacgtgggctgccagcacctaccgctccccctcttgcccatatttcaggttaatgtcataa

SEQ ID NO: 12092 - DNA, 255 bp, Zea mays
  Peptide Sequence Number=SeqID_55467
atggcccgcgcccgcgcctataaagcccccaggggcctcgacctcaccggagcccaaacccaccggcgtttgcccgtgcacggcgtgtctgcggctgcccgctccccctaccaccgtagaccggccagcagaccccttcccaaccccgtccagccctcggagaggactgagcacacctcggtgaagctccccgagcgaggaattgaagtttgcatcaccggagaggctagtccacggtcgccggactccatctga

SEQ ID NO: 12093 - DNA, 528 bp, Zea mays
  Peptide Sequence Number=SeqID_55468
atgtctacccagtctgctagttcacattggcacaagcaggaagctttaaagcaaacacaagttgtcaccaaagtgtatgagaggcagatgcctaagcagtccaagaagattgtcaagaagaagggcaagtcaacacggaagaggtctgtccgacaaccatatccacctcaagttaggaaaagtggaaggattaatgccaagaccaaggggctcaaggtttcctttgatcttggctcgtcctcaggatccctagaggtaccttctcagcatatgtctcatgagttgggagacttgcatgacctcaatgctttcctagggcccgttaaatttacatctttgcaaaagccattggattttgatggattttatcctgcaattactgtggccaccttgcagaaggtggctattgagagacatgatgtgcccccctgtggaagcatctatggaggtgctgctctgtctggaccccagagtggagggcagtgttggggggccttcaactatcgaaagtcctcaagatacacttaa

SEQ ID NO: 12094 - DNA, 612 bp, Zea mays
  Peptide Sequence Number=SeqID_55469
atggcaccaaaactgcctgcattctcagctgctgagtcatgcgagattatgtcactgaaggctatcgagtcgggtgaagtgaagattatgtcaccgaagagaacggaggaagtcgagaaaaagggagtcaatgaaactccaattcaagatgaagtatccatatatgatacagagccgaaggtgcaggagcaatcgaagggaattatcttgagtaaaattttaaaagctcagaaggacgtcgaggacgaaatcaataagctaaaggagagccaagctgaactggcaaaattttctgaacagggctcaagaatttcaaagctagaagacgagaaaaaggctgacgcaaagcgtattgctcacctcgaatctatgttgaaagcgcaagttgagtcgcataaatctgaggttgaaaaggctaaacgtgagatagccaaagctgagcgtgacagggttcgcagagatgttgaagagcttcggacatcaaaggagcaatgcttttctgttgctggacattgctgtgggaggctggataatatgtttgccaacattggtgcttttcaaatgacgaaaattttattcacggtgatgtcgaaggagctattaaatggatag

SEQ ID NO: 12095 - DNA, 225 bp, Zea mays
  Peptide Sequence Number=SeqID_55470
atggggccattaggattcgagttagggatcaaggtgaacatccctgatctttggctcaagtctgttggcaaggagtttggtgatcaattttatggctatgttaaggaggtaaatgggtatgtaatcattaatgttaatcagattgctgatcttggggatcatagtaatgaaagaggtgttaagaccttcaagattgatagaacatttgaagaagtcatgacataa

SEQ ID NO: 12096 - DNA, 159 bp, Zea mays
  Peptide Sequence Number=SeqID_55471
atggcgggcggaattgagctcgtcggagctaaggagaggtggctggccggtgaaggggtcataggattttgcctactgattgcagagatatggagccaggaaatccggtctgtctccctgcccaaacccgaggcaaacccagggttttgtcgtgtctag

SEQ ID NO: 12097 - DNA, 387 bp, Zea mays
  Peptide Sequence Number=SeqID_55472
atgacggtacgctcccgcacggcgaggctttgtcggcgcacaatgccatggctccccgactgcttcaaccccaaatcaatgcggtgcaacatgaagcagagacaaatgcaaaccggggaagtcagccttacaaggattggtggtgacgatgaacagtatccccgtactattcatgcagaattgagattgcattcttattttctacttcgagcaagccaaagatacattcttgtatttgtggatgatgaagacttgttcttcataaccttcgttcgtgaaccatcaaacccgaaaggatttgatgcttcgaatgacgaagtaatcataaacaagagaccaacattggcgcccaccgttggtggactcacttccacgaccacaacatag

SEQ ID NO: 12098 - DNA, 687 bp, Zea mays
  Peptide Sequence Number=SeqID_55473
atggcccgcgcctataaagcccccaggggccttgaccgtacccctccgcacgcgctcgacctcaccggagcccaaacccaccggcgtttgcccgtgcacggcgtgtccgcggctgcccgctccccctgtcaccgtagaccggccagcagaccccttcccaaccccgtccagccctcggagaggactgagcacagctcggtgaagctccccgatcacttcgaccttccactgaccgacctgacaggaaaacagcgacgcctgccccgctccgactattgtgccacccgccaaggtgaggctgacaacagccaagttcagcctcaggcgcaacaggaagctccgcctcgcccgaccttgggcctcggcctcggaagatggtctccgcctcacccgaccccagggctcggcctcaacctcggcctcagaaggtggtctctgcctcgcccgacctcggggctcggcctcaacctcggcctcggaaggtggtctccgcctcgcccgaccccagggctcgacctcaacctcggcctcggaaggtggtctccacctcgcccgaccctagggctcggcctcaacctcgacctcggaggaatcgcgtcctcacccgaccccggcctcggcctcaagaggagtctccgcctcgtccgacgttgggctcggaccgaccgcgccatgggggatacataa

SEQ ID NO: 12099 - DNA, 225 bp, Zea mays
  Peptide Sequence Number=SeqID_55474
atggcccacgactcgacggcgcgttgcgacagcagggagaatacgggcacagaagagggaaagcggggaagaaatagctgggagggagatttatatggctggggaaagcgtggacttggtgtcttggtctttggtgtcttcatccgggtttgggacaagaggctaagatacatctgttatgtaggtcaagttgttgggtacggccgagttgatctaggtcattag

SEQ ID NO: 12100 - DNA, 1449 bp, Zea mays
  Peptide Sequence Number=SeqID_55475
atggggcggccgccggcgcggggtcgtcttcggtcttcgccgctggttcttcccgcgacggtcgacatcgtcatgcccgggataaccgccatacgacagacggttcaactcgaagaccctgttcaagcgatcgttggacccgcaaatatcccaactacgctggccttacgtccttggcacgtaccgaccaacaatccgcaccgccccatcctctgcctcacgcacgaatgcggcgggatcgcggctatgcaaatccagtgtgaaggcgggacttcgcaccagcatcccaccacgggaaggcatctggcgagggcatacttcgcccagtgcccagccatgcgccaagggccacaccccatacgcgacaaattcctcaaccagatcccgcccgctactcaagccggccgcgcatcggagagccccttcgtcagcatcctcctccgccacttcaaactgcggggccaccacgacattcggcgtcagctggtggacctagacgttgaatctgagcaggacttctcccatgaatcgatgcgcgggcagacgaagaccagcggcgaagaatgcctcgaagacaaccaactcgccttctggctcggggacctcctccgcccccgggacacgtgccactccgccgccaaaataaccaagctgctgcatgtcttgcacgcgacccgaggacatccgcgatgcgccgaaatccaccgtgtcgccggcgcgcaactcctccactgccacggtgctcagtgtctcctcagacgacgcgtcggccggcggcgtagcggcagcagaagaagaagaggacggcatcgctacgtaccggcggcggcggcgggcggtctgcttcacacgggccagatcttcgacgagcaagagcaaggagggcagacgagcagcgagcggtttcagaaggcagttagggtttttgtggagcgcggaaagataaagttcaaaacgcgctgccccccgcccccttttatacacagggcgcggcgcttcgggaaacccgcaatcccacagtacgacgtcaatcaacggtcatgtcaaaaacccccgcggaaccacttcaaacgagggcagcatctccgccatctagcgacgtgttcggcaccagatgacttagtcgaactggtccctcggagggcaaatgttggggcgaaggcgaagacgccaccctacgctcgatgccttcgccgtcctcgctgcaccaacggagacaagacaacgggcagactaacccttcgtcccatacgtcatcggacaaagacctgtgacgaggtcgtctcatcttgcgacctcgtccatcatggaggcccacgtgtgacccggcccattgtaacaggccctgcatggccgctgcgcattacgggcctaatttgtaaaggcatcactgacgccgggcacacagatacctataaatacccccgcacagtgcccttgagaggctag

SEQ ID NO: 12101 - DNA, 1665 bp, Zea mays
  Peptide Sequence Number=SeqID_55476
atggagttgatggggacatgcgcggcccccgggggaaggatgtcttcgcccgagctccgggagtcttcggcgcggatgctgaaggttaccgggggttggtggcctaagaacgttctgatcccccgcgcggccggcgaagacttttttacatctcgcatggttcgtgacttcagagtgtttccttatggacggaatattgctgctgttgtgtcggcagtgatggataaggatcgtcaggaagctgcgcaaaagcgccgggcggtcgtcaggctgcccgaggctaggccgaagagggcgcgggggaccgcgaaggctgccgcccccggcggtagccagccgacgctggcggcgaagtcggccggccctgggtccagcaaggtgccggatgttgtgaaggcagctggcgacggcggagccaagtctacctcgcccgaagccgcgaaggcccgagaattgcctccgccgggaaagcgcattgctgatttcggcactgatattagtgtggatgattatctcactgtgcctgtggcgaagggtggcgctctcagcgctggcagtgagattttggcgctcgctgccgtcaaggacgaggcgggcgctgtgtcccgccggctgaaggaggcgtcgcagcggctaagtcaggcggctgacttcgctgaccgcgtggcgtcgggggccctcacggcagttgtgtctgccaaagtcgagagacttcgggcgcaacatgctgaggccgtccgggaaaagtcggccgccgatagcaagtgccgcaaactggcggagaaggtggccgtgctggagggcgagaggactaagctccggcgccagctggcggaggagaggagggaagctaatcaggccctcgccaaggcgcagtctgcgcaggcggaggccaatgtggcgcgggcccgcgtggagagggccgaggcttcgacgcgctcggaggttgagcggatgcgcaagcagcttatggactcataccacgagttgggcgcgcggaccgctgacttcgaagtgcctgaccgacagtcaggccttcgttgcctcgagtggctgcaagaggagttgctagcgctcccgaccattgtggagggatttatgtcctatgcctccctggtcacctgcgaaggggcgatgaacgcgctgtcccgcgaggaaaccgtcgaaggtgcccctgatgccctcgcagccattgcggccggtggtggctcgtcgccaaccgctgcgccgagggctgaggatcccccgaagacggcggcggagccggcagcggaggatcccgcggcggctgggtcttcgcaggttcaagattttgggcctgcgcacgcaaccgctactgctaattttttggcggcttcgaccgtggatgatgggaatgaatgggatgaatctgcgtctaagttttccgattttggtgactctgggagttcggttgagtggactgaagagtcgtcggatgaggacttggattactttgcagccttggatgtggcagcagcggaggcttggccacgtgctgcggatgctgaagttgtgcctggtccaagtgctgggagtaggcggcgaaaggcgattgcgaagcgtagagtgagtgaggcggtcggcttcgtgtgggcagagctggcaggcaggaactgttgtccttgccggccattgcgagtgtag

SEQ ID NO: 12102 - DNA, 627 bp, Zea mays
  Peptide Sequence Number=SeqID_55477
atggagcagaggattacccggtctacgttcaccggcggggttccgaactccggcgagcacgattgcgctattccggtggcgcgggtcctcggttcaagttcgtgcaagcttcacggtctcccaggggagctatccgagggcttggatcgagcggaggagggcgggaaaagggttggccacagtggttgccctcgggcggctctggcgggtcgcggggaggtcgtcggagctatgggcgagctcggggaagttaggcgcggtacggagaaggcaacggggaagacagtcgggctctgggacgggctttatagccgtggcgcgggtgttggggcgaaggcgaagacgccacccttcgctcgatgccttcgccgtcctcgctgcaccaatggagacaagacaacgggcagactaacccttcatcccatacgtcaccggacgaagacctgtgacgaggtcgtctcatcttgcgacctcgtccagcatggaggcccacgtgtgacccggcccgttgtaacaggccctgcgtggccgctgcgcattacgggcctaatttgtaaaggcatccctgtaattacggtctgtaaccccgctttatgggaatattccggggataacctaggtgtctga

SEQ ID NO: 12103 - DNA, 234 bp, Zea mays
  Peptide Sequence Number=SeqID_55478
atgtacaatggatcaagcagtctcattagctacgagaagcaaacgattcgaatcgagtttttaaaccttgcaaggttatgcataaaaccggggcttgccttccaaagctgtggcaggcagatcctctggtacaggctctggtgctggatccggggctacctcctgagcagctctttgctccggcacgaggacgtactctccgtcagcgaggttgcagtctatcgaatgcaatga

SEQ ID NO: 12104 - DNA, 1185 bp, Zea mays
  Peptide Sequence Number=SeqID_55479
atggtcgccgagcaggccaccaccactgtggctgtgggcgagccgccaactgccaccccgcagccggcggcggcagcggctgcggggcagaggtccgtgcccacgccgttcctcaccaagacgtaccagctggtggacgacccggcggtggacgacgtcatctcgtggaacgacgacgggtcggccttcatcgtgtggcggccggcggagttcgcgcgcgacctcctgcccaagtacttcaagcacaacaacttctctagtttcgtgcgccagctcaacacctacgggttcaggaagatcgtgccggacaggtgggagttcgcgaacgactgcttccgccgaggggagaagcggctgctctgcgacatacaccgccggaaggtgacgctgccagtcgcggcggccacgagggcggtcacggtggtggcgaccatccccatggcgctgcccgtggactcgccggtgtactccggcgaggagcaggtgctgtcgtcaagctcgtcccccgagcccccgtcgctgctgcagcagcagccgacgccgtccgcgtctggctccggtgacatgggcgaggagaacgaacggctgcggcgggagaacgcgtggctcgcgcgcgagctcgggcagatgaagaagctgtgcaacaacatcctcctcctcatgtccaagtacgccgccactaagcagccggacgccgccaaggcggcggccgccgggaactgctccggcggcgagtcgtcgggcgccgccgcggcgcctccgcttccttcgatcctggagctcctgccctcctgccgccgcgaccccgcgtccgcggccgtcgacgcagcggcagcggcagcgggaacggagcacgaggttgatgaaaaggcgggcgctaggctgttcggcgtctccatcgggcggaaacgaatgcgggacgagagcagcggtcacggcggcggcggcgaggaccccgtgggccgctcggcggaggtgaaggcggagccggtggacgcgcgtctcgaccatcagcacagcgcgacggagccgcagtcgtggcccatttaccggcccaggccagtgtaccacccgctccgggcctgcagcggcttggtcagcgctgggagcgaccacgactggtccaacaactcgagggcggtggcccaccttgccccccctagggccggccctgcacacagatag

SEQ ID NO: 12105 - DNA, 1338 bp, Zea mays
  Peptide Sequence Number=SeqID_55480
atggggggatctccacaattcacagtagttccaggtggtagtatcttgtgtgtatcagatgatgagatatccagtataatatcacgagctcttgctgtatccgaggaacgtcgacacttactgatggatgctatcactgagactgaaccagcagataccaccaggagtaaaacaatggacaagtcttacaactctttatctaaaagttcatctgcttctctgtggtcttcagattctgaggcaagcatttcgtttgacgacctctccaactatgatacctcgcttcttctatcgtcctctctccatccagaaatagatgtcaacgggacaacaactctcaaagggaggtactcagtcatctgtgtacactctaaccagttctacaacctccgaaggaaatgctgcccatcggagcttgcatacgttgcctcattgagccgttgcaagaggtgggatgctcagggcgggaagagcaaggcattctttgcaagaacaattgatggcaggctcatcataaagcaaataaagaagacagagtttgagtccttcataaaatttgcgcctgattacttcaggcatgtcaaccattctctggacacagggagccagacttgccttgccaaaatcttagggatctatcagcattatgatgagcttgctggttcagtcatggagctgctggagcacttggagggggaggcaaggtcggacacgcggaagctccaccccctcgtcgacgagttcatccccaccatcgacggcgagaacgacatctgctacacgcacccggagaggctccccggtgtgagcaaggacgggcttgtctggcacttcttccaccggccgtccagggcgtacacgacggggacgaggaagcggcggaaggtgcacagcggcgacgacggcggcgtgacgcggtggcacaagacgggcaagaccaggtcggtgctgtccaacggcaggccccgtgggtacaagaagatcctggtgctctacacaaactacagcaagcagcgcaagcccgagaacaactgggtgatgcaccagtaccacctcggctccgacgaggaggagcgcgacggcgagctcgtcgtctccaagagtggcggtggtggtagtagcgtcctcagagaagcaaacggcggagctgatcagctctacagcccaggagcaatgatggggtatgaccaggggggcctggaaacagggcacctcctgcccctgctgtgcctccccacttcatgcctaactttgctgtccatgcagcaagggctagctttgccccttgaaccgagaattcaggacaagatacaaacctatcaaaattgccagatataa

SEQ ID NO: 12106 - DNA, 351 bp, Zea mays
  Peptide Sequence Number=SeqID_55481
atgggtgcaaataatcggtcggagactcactggatagctcggtccacgcgcggcggcggaagaccgaagtccggtgaggtcgatctcgggcctccggtgaagtccggccgggtccgagggcttggcaagctttacgggctactggcggggctagccgaagcactggctcgacttgaggatggctggagtgggctggccacggtggccgaagctctggctgcgatggcgggcggaattgagctcgccggagctaaggagagggggctggccggtgaagagatatggagccaggaaatccggtctgtctccctgcccaaacccgaggcaaatccaaggttttgtcgtgtctag

SEQ ID NO: 12107 - DNA, 315 bp, Zea mays
  Peptide Sequence Number=SeqID_55482
atggcagcttcaccttctacttctacaggcaccgttgacaaagcacatccgaaatggctggcatgcaaaaggctgcctttatgccctgctcaccgtggagcgtcgcgctgccttttgaaagaacgtggtgctgaagtcccaggtccagaattgcggaaaggtcgccgagatcgatcaaacctaccaacaggagccctggatggccgagtatgcgctgaaccacctcctggatggttagatgagttctggaaagaaggtgcattatgggtcctatcagctaacaaggacatcagaaaaccacttggtggaatataa

SEQ ID NO: 12108 - DNA, 504 bp, Zea mays
  Peptide Sequence Number=SeqID_55483
atgccgctaagtgtcccaagggtgaaagttctcagggactaccgctatgagcctaaacctccatgggcgggtcctggacctccacgaatgtcgtccagacccctatgggcgggtcttggacctccttgtctggcattcaaacccccagcaggcagggcccaagtcttcaggccagcatacgcccttggtccccactctccgctgggacaggggtccggtgctgccacatggcccatgggcacgtggcacaagccttcgactggaagcaagctcaccgcccgcattcaaacaagcgactgcggtatcggcgaactacagcgtggtggggacgctgagaacccgaacgtcaccggcagcgacacgctcacggacgaagtgcaggtcgatctccacgtgcttcgtgcactaatgctacacgggattggtggagaggtagaccgcgctaacgttgtcgcagtagacgagggtggcgcgctgaagggggttgtggagttcctggagtag

SEQ ID NO: 12109 - DNA, 504 bp, Zea mays
  Peptide Sequence Number=SeqID_55484
atgaagctgtggaaggagacttccaggagttccatgattacgacgagttctaggtgtgggttagcggcaacccccagttggctgcctgtgaaggccgcggttatctacgtttcttttccgcactttgatttattatggctcgacttagacacactgcacgaaagtccgtcatccccttcttaccctcccgccttgctgagcgtccgcttcgccgtcccgtggccggacagtccagccacttggagagactacaccaccgcctgcgtgaggagcaggagcgtcgacgacaggagcagcagggctcttcctttctcgcttccccaagaaaaagagtctgtgaggagctgcttccctgtgccttcctctggaaccgcccccctgcaccacccctggggcgccccatttttcggaaatagctgcctggaagaaaacctaaggcaacggaaaatgggcgaacaacagcttccagcccccaacccccaacttcctctgcttaacccttga

SEQ ID NO: 12110 - DNA, 460 bp, Zea mays
  Peptide Sequence Number=SeqID_55485
atgtccggtggcacaccggacatgtccggtgcaccagggggactcagactcaaactcgccaccttcgggaatttccagaggcgactcggctataattcaccggactgtccggtgtacaccggacatgtccggtgctccagggaaggtcggcctcaggaactcaccagcctcgggttttctccttcgccgctccgctataattcaccggactgtccggtgtgcaccggactgtccggtgcaacctcggagcaacggctacttcgcgccaacggctacctgcaacggcatttaatgcgcgcgcagcgcgcgcaggagtcagaatcgcccatgctggcacaccggacagcaaacagtacatgtccggtgtgcaccggacacccaggcgggcccacaaggcagaagctccaacggtcagaatccaacggcagtgatgacgtggcagggggcaccggactgtccg

SEQ ID NO: 12111 - DNA, 114 bp, Zea mays
  Peptide Sequence Number=SeqID_55486
atggagcaaaagggagcccctaaatttggtgacaacaaggtgctctcatggcaattcattgaaaagggcaaagtctcaaggtggaaaagggaagatgagcaagaaatggaataa

SEQ ID NO: 12112 - DNA, 246 bp, Zea mays
  Peptide Sequence Number=SeqID_55487
atgacgatcgacagtctgcttgagctactccacgtggacctattcggcccgatagcttacataagcatcggcgggaagacaaccaatcaagccaaggatggaagcaagaagagcttcgaggtatcgagtgcatgggagaaagtcaaggagaccaggaacccaaggccaggggtgaagaagaagacttgcggaatcaaggttgatcgagttaagaagagttatggtgcatcaaggaacactacataa

SEQ ID NO: 12113 - DNA, 1482 bp, Zea mays
  Peptide Sequence Number=SeqID_55488
atggacgccgccgttggccgcccgagccgcgcgcctatccgctgcaccagcgcggagacggactcggtggatgaggtcgcgacgagctcgcacgccgcggaggccaacgcggggggcaccacggagcaagagggcaacgggagccccgtggccgccgctgccgcgtactcccccgtggtcgccggcgtcgacgggataaggatccggcggcggcccgtgacggggcccgcggtgcactacgtgggcccgttccagttccgcctcgagaacgaggggaacacgccgcggaacatcctcgagaaaatcatctggaacaaggacgtcgaggtttcgcaggcacgtctgatgaaggagaggaggcccctgtacatgctgaagggtccgcttgaggctgctccccccgctagggacttcgttggggcgctcaaggcgtcctacgatcgaactggcttgcctgctctgattgcggaggtcaagaaggcttcaccaagccggggtgttatcagggagaattttgatccggttcagatcgctcaggcatatgagaaaaacggagcagcatgccttagtgttcttacagatgaaaagtactttcagggaagtttttacaacttggaggctatacgcaatgctggagtccagtgccctcttctgtgcaaagagttcattattgatgcttggcaactttactatgcacggtccaagggtgcagatgctgttcttctaatagctgctgtattacctgaccgcgatatcaaatacatgttgaaaatttgcaaaatacttgggatggctgctttagttgaggttcatgacgaaagagaaatggaccgtgttttagggattgatggtgtacagctcatcggcatcaataaccgtaatctcgagacatttgaagttgatattacaaacacaaaaaagcttctggaaggtgaacgaggacaggttatagctcaaaaggatgtaattgttgtaggagaatctgcgctgttcactcctgatgatatctcgttcgttcaaaacgctggggtcaaagcggttctcgtcggggaatccctcatcaagcaggaggatccagggaaagcaatcgctgggcttttcggcaaagatatctcgcatgctgcagcaaggaatagggtggtcgtcggagtcttggcggcgcttgggttcctgacgtctgctgcggtcgggtccgtccggtcgtgcgggggcgaggtcctggcgcggcgcggcatcgggctggggctcggcgcgtcgcggtcctggtcgggcgcgtcgggcaggtcgctgggtggcgtcgggtgcgtgcagcaaggagatgagcagagcaggttgttgaagcgtgagcatggaggaaaggaggtgaccggagacgagctcagtgggtctcagatgccatttaaagggagagagagggagagggcagaggtcgtcggaggggagaaattcgcggccaaattaacactattaattgtcgattga

SEQ ID NO: 12114 - DNA, 570 bp, Zea mays
  Peptide Sequence Number=SeqID_55489
atgaggaagaaacacggctttacgccaaaatacatagatgttcaggcccccgacagccacaatgaacagacaccggcactcaaggtgccattacaaacggaactccggttccactcccgtgggtatgaacaacctccacatcggagagcctgcgggatgacgaactccgggcgactcgccagcgacctctacagcagcagcgatggtcccaagacggacgctgccgccggaaggctctcgttcgcgtcccctcgagggggacgagaaccagatattaaagccattggagacgccatgttcgacgccctccgagggcaacatggcgctttcccccctcctccttgcggaaaggcgacgcaggggcgtatgaaaaaagccgagtcagtccttggtcgtcctctcgctctgtgcggaggctcgggggctgctctcgcaaacccggctccggccaaaccgttgacagcgtcaacataccagcccgagaactcggaacctgactatgcacccgggctacggccagttcgcatgagggaacaaccagaccggccgaggcatcacgaaaggcattaa

SEQ ID NO: 12115 - DNA, 664 bp, Zea mays
  Peptide Sequence Number=SeqID_55490
atgaggggagggatttataggttgaaggagcatcttgcccatgttggaaagaatgtgaagaaatgcacgtctgcaacaccgcaggctctagaggctaaagagaagtgcaagaaagcaatagaggctgcaaaaaggaagagggaggagaagactgttcgtgctaaaggttcacacttagccaataaaaagaccaagaatcgggttcaacaaaggagcaaagggataaccgaagtgtgccctggtctggcgcaccggactgtccggtgcaccaggggacttcacgctaaactcttcaccttcgggaaaattcagaggcactccgctataattcaccggactgtccggtgtacacaggacagtgtccggtgctccaaggaagagcgcctcaggaactcgtcagcttcgggaattcgctccgctataattcaccggactgtccggtgtgacaccggagcaacggctatttcgcgccaacggtcacctgcagacgcattaaatgcgcgccagagcgcgcagaagtcaggcacgcgcgatgtggcgcaccggacactctacagtacatgttcggtgcgccaccggacatccaggcgggcccagaagtcagaagctccaacggtcgaatcccaacggcctggtgacgtggctggcgcaccggacatgtccg

SEQ ID NO: 12116 - DNA, 475 bp, Zea mays
  Peptide Sequence Number=SeqID_55491
atgtcaaaaattgaagaaacaatctatgcatatcttataagtacttatattggcttaattccaagtgccaaaggttcacacttagccaataaaaagaccaagatttgggttcaacaaagagagcaagggataaccgaaggcacctctggtctggcgcaccgaattgtccggtgcaccagaggactccaagtcaaactcgtcaccttcgggaaaatccagaggcgctccgctataattcaccggactgtccggtgtacaccggacagtgtccggtgctccaaggaagggcggctctggaactcgccagcctcgggaatttgctccgctataattcaccggactgtccggtgtacaccagactgtccggtgaaccagcagagcaacggctacttcgcgccaacggcccagaagacagagctccaacggtcggaacccaacggctttggtgacgtggctggcgcaccggacatgtccg

SEQ ID NO: 12117 - DNA, 459 bp, Zea mays
  Peptide Sequence Number=SeqID_55492
atgtggcgcaccggacactctatagtacatgtcccggtgtgccaccggacatccaggcaggcccagaagacagagctccaacggtcggaacccaacggctttggtgacgtggctggcgcaccggacatgtccggtgaccgttggcgcgaagtagccgttgctctgctggttcaccggacagtctggtgtacaccggacagtccggtgaattatagcggagcaaattcccgaggctggcgagttccagagccgcccttccttggagcaccggacactgtccggtgtacaccggacagtccggtgaattatagcggagcgcctctggattttcccgaaggtgacgagtttgacttggagtcctctggtgcaccggacaattcggtgcgccagaccagaggtgccttcggttatcccttgctctctttgttgaacccaaatcttggtctttttattggctaa

SEQ ID NO: 12118 - DNA, 279 bp, Zea mays
  Peptide Sequence Number=SeqID_55493
atggcgcttcctgttgacgtggcgggcctgtgccctaggtcgggcgacgtggaggctcctccgaagccgaggtcgagtctgtcttccgtggccgaggccgagcccgagcccctgggtcgggcgagatctttcctatatgtaaggcaggatggtttttaccttaatgtattccaagagtcttataaaggtgacatgttgtcctacagaacatcttctgaggaatacacctatatgagtcagactgctggtcacagtctatgggacttgggtaatccctaa

SEQ ID NO: 12119 - DNA, 669 bp, Zea mays
  Peptide Sequence Number=SeqID_55494
atggcggggatgcgctgggggcggtggctggggctggtgacggtggcgtgggtgcagtgcatctccggcaacaactacaccttgatgtccagctccagccccgaaaactgctcctcctcctcagaatggcccgaccgagcggcggcatcgcgctccaaccggtacctcttcgacgcgaatgcgcaggcccggtgcgcggggtacctggacctgatgaggctagaggtggatgcgcagctgggcaggctcaggggcggtgtcaccggcctggagagctacgccttgccgggcaacggccgtgcgatcagaggtgcgcacctgggcatgtcgcttgatgtcatgttgattgagattgatgagaggttcaacgccctgaagctgctcatgggctccgtgttccgttcgacatctgcacatggtcgtggtacagggtgtattgaaagcaattcatatcagttgtgttggttatccaacgaagaggacattaagatgagttcattgaccagtttggaatgcttgcaccggaccttgtcgacaggaaggaacaagcatcaggcgacgaccgtctcgactgcgggagaggggagtgcccctcgagtatccgcagggatccaacacttggacaccgacattcgcattcctaggaacatcgaccggggggaaaagtaa

SEQ ID NO: 12120 - DNA, 129 bp, Zea mays
  Peptide Sequence Number=SeqID_55495
atgaacgtggaggaggaggtcgggaggctcaaggaggagatccataggctcggccagcagcagcccgatggctcttacaaggtagcattttgtgtcggttgtggtgggatgaccaccataagcttatga

SEQ ID NO: 12121 - DNA, 1371 bp, Zea mays
  Peptide Sequence Number=SeqID_55496
atgtccttcggccgcggccgcgtggcggccgtcctccgcgccgccgcggccgacccgacctgcgccctcgccgccgcgcacgccgcgcaatcagtcgcccccagggaccccgcgggggccgccgccttcctcaacgccgccgcggacaacctcgggaaagcaacggagtacgagagggccgttttcgggacgctctccgtgctggtgggcgagaagagggacgaggaggtggcgatcgagcggcacttcgagcttctcgagcaattccccagggatctcctgtctctcaagagagcgcagctcatctgtttctatatgggaaagccagatttgtccctgaaattcgttcaacaagttttgccgaagaatcaagatcagaatttcatatatggcatgcttgccttccctttgcttgagcttggacggatggatgaagctgagagagctgctcgaagaggcttggctataaacaagaatgacttctggtcacagcataatttgtgccatgtttttcagcaggaatgtcgtttcagagaagctactgagttcatggaatcatgttctccgtcatgggaggcatgcacatcatttctgttaactcacaactggtggcatgtagctgtttgttacttagaagctgagtcccctttgtgtaaagttctggagatatatgatcacaacatcatgaaggaacttgagaaaagtgattgtgagacagcagaggtgtatttgaatggtctagggttgctgctgcgattattcatacgcggtcatatagattcagctaaagagaggttaacgacattgctagatgcactaaagaatgagtctatatggcatgtggaatggctccttgacttgcttatattgtgggcactatcaagtatgggtgagctaaaaagtgcacataatatgttggaatcattgaagtcaaggaacacaagaaggtttattaatagtactaaatcagaaaagcaacctgattgcagggtacgtttaatggacaggaatcggcagcaagcgatgcagaaggcaatcaagctggcggaggctgcttatgaatatgggaaaggagatcacatgaaagtctatgacactctgggtccagactttgatgcgcttggttataaaatgattggtgcatcagatgaacaagtggatgtcttcaatgaagtttggtacactgttctaataaatgctggagagacttccaaagcaattgagattcttggcaaacaaattaggaaacgagagggtgcacctttcttgtggcgcttgctggagaaatcatactcattggctggcagaagcgcagatgcttcagtagcatctaaaaaggcaaatgctctacaatcctcttacttccattag

SEQ ID NO: 12122 - DNA, 516 bp, Zea mays
  Peptide Sequence Number=SeqID_55497
atggcagctgatactgctgagtatgcagctcgggttgaggttgagcgtattgacattggtgaaccagaaaatccaggcccaaaatacaacaacaggagtacatatcaatctgttaccgtagacccatttgccctttcacctgatccaaatgagcaagagaaccttgacatacttggtgacgatgatggcaatgcttcaccaaacaacttggctgcaggacaagaggcatctgttcgtggttttgacatcaacttaccaaatcaggacgatatggatgatgaaattgctgatgtagatgtaaatgatgacacggatctgtggatcaatgcagccgatgcgctgcgagctcaagtgaacgcagaggagcatcaggagcagcaggacagctcaagctctagtgggagcagcagcagcagcagcggaagtgagagcggcagtggaagtgggagcagcagcagtggtagcgatggtagtgatgctgattcggcaagttccggaggtgatgttgatatatga

SEQ ID NO: 12123 - DNA, 831 bp, Zea mays
  Peptide Sequence Number=SeqID_55498
atgaagcggcacatcgcctgccagcggagtgaacagggctcattaaatgatgaggcggcacatgacctgccagtggaatggacaggccacgtggcagcatcggggctccgcctgagcggggagcagaagcgtacacgggaccctgctgtgagcggcacataccccacacaaaggggtccggaaaccgtcctaggggtccgactcgcgcccatggaggtcctggaccttacccggaggtccggtctgcatatacaggggtccggcactttcccatgggggtccgaacctactgttgataccttggagtatatcgtcttctctggccacgtggcggccccggagccgtccacgtgcggcgggacaggacagtgtcacgatgagcagaccgacagtggagccatacacgacgtcgtagggcggtcagatgttgctggtggagggccagttggcggtgccaggggagcagcgaggtggcgacacttggtggcgaggttcgcggcgggatggatctacaagcaggaggggttgaggcggcccacgaggcgagaggaggagttcttggggtggaagactgggacaacagaggcggacggggaggatgtgctgccccttggacatctcgaacgggatcccgccctacagccggccgccctcctccagtgcccccgtagtgtcgtggctcttcttctcgatcttgccccagccatggaggtgggttcggatttgtccctcgcgtcgcccgcctggcgcaccctccaaactgatttcccctcaaccagcgcctccgccacacatctcgtcgcctcgattagagctcaaggctctcctctc

SEQ ID NO: 12124 - DNA, 474 bp, Zea mays
  Peptide Sequence Number=SeqID_55499
atggcgttcctgccccggcccctgacctgcccccacggccggccatcctcgccactgggaccgcaagcgttctccgtcgctggcggcgcccaagaggggcagagcctcatggcgagcctatccctggttacccaggacggggaggagaacggacaggctcgttcaggcttgctagcggcgggcgccctgggggcgtcgtgcgcgtgggcgccgctgcctggctcgctcttgctgcgatggaggagcatgtccttgatgaacacccagcaccgggacccgtgggctgatgacgtgcccgacgaggacaaggaggacgtggaggaggatgaggacgagtgggacgaggcggttggcctgggctatggtgacagagacgttgccgacatggcagcgcacgaggtcgtgccaccagagcagcccgtcgcagcctttagagtcatccccagaggagaccgcggcacggggggtcgatga

SEQ ID NO: 12125 - DNA, 726 bp, Zea mays
  Peptide Sequence Number=SeqID_55500
atgcccaaggagtatgactcatgggcccaggccccccgtgtcagagactgggccgttttttcggcggagatgaagaggcgcactaccgcgggcggcggttcgctcctcgcgtggcggttcaccttctttgcactcggagacccgcacaccagccgaaagattgaattggaaatgagatggctctgtcagccaaagtcagctcggtctgggtgcaccggacagtgtccggtgtgccaggctggctcaggcgaacttgccgctctcgggaaggaattaacggcgtacggctataattcatcggactgtccggtgtgcaccggactgtccggtgagccaacggtcagccgggccaacggtcggctgcgcgatccgcgcgggacacgtggccgagccaacggtcgggaggggcaccggactgtccggtgtgcaccggacagtgtccggtgcgccaacggctccaaggctgccaacgatcggcttcgccaaataaggaaggatatccgcaccggacagtgtccggtgcgccaggcgacagaaggcaagaattgccttcccggattgctctcaatggctcctagctgccttagggctataaaagggacccctaggcgcatggaggagaacaccaagcatcctttgagcattgttgatcactcacacttcactcttgcgcacttgttcgacattcttagtgatttgagctctgttctagtgaggaacttgtga

SEQ ID NO: 12126 - DNA, 648 bp, Zea mays
  Peptide Sequence Number=SeqID_55501
atgccgcgactcaaggcgacccagcggcgccagcctggcgcgacggtcaatgcggccaaaagtgggccggcagtaatgacggtggcaggcgggcaggagcagcggtcacgtcgtcagccaggctcacgtcccatccaggggcagcaggagagcctcctttcacggcgtgaagacggcgcacccgtgatctgtccctcgaacggctcgcgcacgcgcagcggctgccccgccaactactcgccccgtcgcattaactccgcggctggacaggcggcgcttctggcaggcgcagcgggcgatgcttcgccttcgccgaaacaaccgcaccaaaaaagggaccgggaaagggggataccccgaaagggatccttccccgtgaaggaaccaggctccgagccccccctactgatcagaggttcgaaggctggccctctgtggggttcaacagtcgcctcagatcgcgtgggccctacacccactactggtcagagaggctcgggggctgctctcgcaaacccggctccggccaaaccgttgacagcgtcaacataccagcccgagaacttggaccccgaccgtgcacccgggctacggcctgctcgcatgagggaacaaccagaccagccgaagcattacgcaaggcattaa

SEQ ID NO: 12127 - DNA, 1035 bp, Zea mays
  Peptide Sequence Number=SeqID_55502
atggccgcctcaatgcgtgcgccattgcaaagaggtcctcgcccccgtcctcctacggggggcggcaacgaggccattaaagccaaagagttgcaggctcggcgcctcaccagcggcggcgaccacctcagcaccgacgacagcgaccacctctgcaccggtggcttaccggcgacgacggccgcctcagcgcgtgaagaaaggtcctcgcccccgtcctcctacggggccgcgccccgcttggcggcgggaggcggcgctgtcggcggcaccaaagccatccaagccaaggagccagacacgcggcaactgacgacgcctgcagccggccggccccgcgcagccgataagagcgccaacccccacgaagtcgcgctcctccaacagcagcaagaagaagacaatatcggcagcaccaccgtgcaggaaacgaagagcgcgagctccccggcggtgagaccactggggggtggccctgacatggatccctccaacgaacaccggcgcgccccatccagaggcccagaaggcggaagggcgcggcaaataccggcgcattccatccaagcaggcggtataccatttcgagcactcactcagtctgggcgcgctcgggatgaagtcacaaggccatggcaaactacgacaacacaaagcaggaaccttgaaggcaaaggggcgcagatagctcaaaggcggaagggcgccgcgagtgggagagaagcaaaacatggctgctactcgaagggtgaacccctttttaaaggcagattccccgctcgcaccccgaagcgtcacgggcaaggtctcccccgatgcgcaccagggttcccatcctatgacatgggggccaggccccacatgtcatacaagctggcccaaagcgcgaagaaggcgaatcgtcgcacagggagcgtgcaactgccccgcggttatacacccttccatcttcgccgcaaccagcggtcaagaagaaaagtcgcaccgttgctcgcgccaataccgcgcctcttcgaggccgtcgcagaaggctga

SEQ ID NO: 12128 - DNA, 432 bp, Zea mays
  Peptide Sequence Number=SeqID_55503
atgaacaatactgtcggtaccctgaaacaggagtaccccttactacagtatgaagacgcggtgctcgatgtgtcagtcgagctggacctccgcaagggagcaccggacccctgtatgcacaacctggacccccgcttgtggcccgggactcctgagcggagacccgatgcgcccacgtggctcattgcccgtgacataagccagcgggcggagcctgacgcgatgtgccccctcagcatttattgcgtcctgtccactccgctggtaggcggcgtcagggccaccttgcagacggcgcacctgtccaatccactatcaaacaggcgcaagaagattgctccagcagcgaacatttgtggctccaatgctacgtccgttatgttcctgggcccacatgtcggggctcagtacctttgtgcatgccccccttag

SEQ ID NO: 12129 - DNA, 774 bp, Zea mays
  Peptide Sequence Number=SeqID_55504
atgccgaccaacacaaacgtcactcctcaagcaacaccacatacggaatcttgctcgctgatatttgatgcgatgtcgcaaataaaggtttctgttgaaaccgatccagctacaaacactcctcaggttgaccaggtttcacttgattcggagatgcaaactgtgttagctctacgcgaatatttatgtggtacacaatctgacaccagcatgtatgaagtacagacaaaatcaaaatctgtttatatgctgtcactactcaactttgaggaacaggaacgacacagtcagaaccctcaaccttttgatgaatctgtactgaaaacacttctagacaatgcattgcccgagacagatcatggttcccatgattctaatccatatggggcaacacttggtggtactacatcaaaggactatcattttgccgaattggacttaggtggcagaaagttaccatgggctaaggttattatgagtagattaaacaaagccatacaacatgcatggcccaggacatgctttcccaaatttggcaacttcacaattgacttgtgcccaaattgtcctaacatggcagtaggatccaatgattgtgggttttatgttatgggatacattctcttttatgactgcgtcgaaggatctctgcggtcagacatagaagcaggcaacactagtgagatacagtctcttgcgctgcattatatcacattccatccgaagaacaaagcattatcgctgcttgaagacatcaaaagattcaaggtctaa

SEQ ID NO: 12130 - DNA, 384 bp, Zea mays
  Peptide Sequence Number=SeqID_55505
atggatcttcctctgtgtcttcgtggagaaagccaaaccaacattgttccaagtggagctggagaagatcgcctcaacaccctagttggtgtggtggcaggtcttaacaccgacctggacagtgctaccctggacctgtccagggtacatttgaagctagaggatgcacacacaaggattgcagccctagaagctcaactagaagcaagggatccccctaaagcccaagtccctgccatggctttgtcccctccccgcaagaggatccgctatggagaactaggatccatcaccaggctgctatacatttttaagttatattttgaacccttggatgccgatgactggcttaaggttatcgggaagaaattggacattgcgtag

SEQ ID NO: 12131 - DNA, 801 bp, Zea mays
  Peptide Sequence Number=SeqID_55506
atggctgaaaggtaccaactcccacggagttgcgttcccccaacgacaaggcggaaggactgcgggcatcccccatccgggggctcggaaggtggaaagacacgatgcataagggagcgcgaagacatggtcgcctttcaagggggtcaccctccttttaaaggcgactctccctacttgcgtccccagccgtcgtgggctgagtcttctccaacacgctccaaggtcctccccctatggcacgggggctgggtcccacacgtcatgcaagccggcccagagcagaagaagccaaaccgccgcgcgcggtgcatgcaaccacccaccggttacaagtggccctccacttttgcccagaccagcgggcgaaagggcgggcccacgcgtcatgcaaccggcgcgccggatgctgcgtgcgagcaactgcaccgccgcccgcgccactaccgctcctcctcgactgcggaaccaataccgcgactcgaggcgacccagtgcacgacccagcagcgccagcctggcgcgacggtcaatgcggccaaaaatggtccgacagtaatggcggtggtaggcgggcaggagcagcggtcacgtcgtcagccaagcttacgtcccatccgggggcagcgagagaaccctctctcatggcgtgaagacgacgtgcccgtgttccgttccttgaacggcccgcgcacgcgcaacgaccgccccgcgaaccactcgccccgtcgcattaactccgcggcgggacaggcgacgcctctggcaggggaagcgagcgacgcttcgccttcgccataa

SEQ ID NO: 12132 - DNA, 276 bp, Zea mays
  Peptide Sequence Number=SeqID_55507
atggagacgacgacaacagcatctcgagccacatcaccgacctctcagaggagcaggagacagagtgatgggtcactcgacccatcactcgtgacgccgcttgtcacggaacctcccaagatattaggcccacctacaactgtctttgtcctaaggacctcggacaagcccgtagatgcacataatcacttgacaagttctgtcttctgtatcctcatcatttcgcccaagagcgcttcacccatcacgcagacattacatcacatcggaggatag

SEQ ID NO: 12133 - DNA, 528 bp, Zea mays
  Peptide Sequence Number=SeqID_55508
atggaggaagatctggtagattttcagtacttcgactacaaacttgctcaaagggaaccgaagtctagccttgaagaagctttagtaaataacaacttcgttttcttcaagggcagggacgttgttgtcttcgccagccctcacaatagacatgtcccaaaagtaccttcctctcatgttctcaagatgactctgtttaatggtcgattttccgaagatagaatgccttggccgccagggcctatcctcagaatcttcatccccactttccacatcatagctatcgttgtcaccagtaccttcgaacttaaatcaaaaccaccgtgtgaagaagcacaaagaacacgaaggttgacgcagagccgaagctatgcgaaagggagcttcggcatgatagcggaaaggggaaccgacttaaaagggaaaaggctatttagacctcgatggattactatagagttattagcaaacgtaaagggcatggatgtaattttacatgggctgtgtcccgtgcctataaatagatga

SEQ ID NO: 12134 - DNA, 165 bp, Zea mays
  Peptide Sequence Number=SeqID_55509
atggccatgatgggttcaacatcggaaaagatgtacctctcccagaataagataacacgcaatgggagtggagagatggagagagtagcgtgtaccctccgtggcaagaggttggacgatggtgtatctgtgctctcggttggcgtgaacctgatctggtcttaa

SEQ ID NO: 12135 - DNA, 990 bp, Zea mays
  Peptide Sequence Number=SeqID_55510
atggcattaactaaggcagcgatggcctcagctaatgttggaggtactgggggtggattaggagttgcttccctcccacgggagcttcttgtcacttttggtagcctcgctgtcgggtgtaggagaccatttatcaaccagcttcatagagggaggaggcctgaaaagatccagttcgccaccaagtgcttctcccgctactccagaaggtccggcttccatcccgacaggatccgcaggccgaggtccacaacggtgaacagcacggggccgaactccgatgagcctacgccggccgatttactcgatgactgggaattggacgaagacgcgtggcggctggagaagaagagggttactggcgctatggattggtggcctttaccgtggcaagcaccccggcgatcaccggataggcttaacacgatcgactccgacgtggcatacgatcggcaggcagccaacgccggtgagcttatctgcgccaaccgcaaggcaagggggtacggcggacagccaccggggttattcccaagcgaagatcttttacctaggagcgttatccggtcactggtgagcacgaatcgcaacgacggcgtggatctaggcgcacggccgtcggcggggaggcttctcgtagaagggatgatgagctcagtgcgccgctcggtgtgggcacactgtttgtcaacagactggatagacgcaccgtctgctgggcggcgcgtcctctccgcaataaatgcagaggctgcacgacgttatgggccttacgtcaggcccagcccgttggcttatgtcatgggccacgggccacgtggcagcagcgagtctctgcctgagcggggagcgcagggcagggcctggacgcgtgtcagcaccagagccatactcaagccggggtcctccccgtcctgcagtggcggaggacgaaaaaaattaggtgtggctggaacctggaagcggaaggcacaacggctctgcgactga

SEQ ID NO: 12136 - DNA, 327 bp, Zea mays
  Peptide Sequence Number=SeqID_55511
atgttgttgacaaacctcttctgggagctaagtttgagatatgctcagtctcgtgcataccgtttttattggaaagatcttggcggcgaacatccagaggacaagcctaatttgtcaatatcattatttccatatggtgacaaacaacctccgggtactgtcctgtgcggttattatgtatgcgaatggtgtcgtgtcaccttccattacatggtcaatcgtgaggatgttcctaaatccaagatcaatgctgaatggttagaaagagatatggtttccgtcggcgtggctaaggttgtaaaagacttgctttactttacgccgtga

SEQ ID NO: 12137 - DNA, 966 bp, Zea mays
  Peptide Sequence Number=SeqID_55512
atgcaagcgactgctgatgaggctgaaatgaacgttgttcttagtatgctagctagcgagtcgtctgagtctgcccatactgagtcagcgagtgttgcagctgggcgtgccttcggcgaggatgaaggagcttgtagtcctggaggtgcccgtcaaaaacgattatatcaaataggttactcagtcgtgtctgccgaggggaagaaaagaaagataagacttcagcatttgtctgaattggagctaggggctgactctgctgccctagtcctcggtgctaacccggcgagtgccaacctcgaagatgatattgagagctatggtggcactagaatcggtggatgtgtgtgtgacgaggatgaagaggatgaagaggaaattccccctttagttcgcaagagtcgccgtagcaagaccaacaacgatgtccaaaattcaggctccgtcagggctgaggtgccagatgacattcccttagctagaaaatttgtcgggcaagaaataacccgaacagtttcccatacttcttcaacctttgagggcggcctaatccatgtggacaccttggttcctgatgttacatgcaagggttacctgattcctgtgggtacgattgaggatacttcagcccccgagggcgctgttgagggtgacccagcccccgagggtgcttctgaggtgttgacaaaccttcctactgctcttgttggcccggtcactttagaggtcagtgacctgagcgctgggaatccgctgcacgctgtcggagctgaggtcccactagttgttgccttgggcatgagctctaatcatcctctagggctcgagtctgctctcaatattacttctgctaaatatcctgagctatgtgtcggctcagtcaaggtcttgcggtgcccctatcctcgatcaagttttatccttgttgcagaggaatcctctcctgcttcagaaatacatagatga

SEQ ID NO: 12138 - DNA, 651 bp, Zea mays
  Peptide Sequence Number=SeqID_55513
atggaggaactggatgagcgcgctttcctatttgtcatcgaggctggaactgatgattgcggtcttgtgttcatcacagaatccaaggttgattcttttagtttcttcagtcggccgcatagaggtcgcggtcggggcttcactcgaagggattgcaaagtcttcctccaccagcttgccatcaacttgtgcgggaagggctaccgagggcccagaagtgagagccgtctgaatggcaccccgaaagcattttgcggcaccttggaagtcagcgcggacggcgatgatcccttgaggtcctggcattttgagtatcatatacatgtagtgcggggtggccatgaatttcgccaaccctggtctcccaataatggcgttgtacccgcaattgaagcacgccacctcaaacctcaggaactcagttcagttgttctctggggttccaaaggtgacagacatgtagatgtgccccagcgggtactcccattaggtcagcacaatgccaaagaaaggagtatccgactcagtgagatcatcgatggcgacccccagggcctgaagcgttcggggaaaggtgacgttgatgttgctgccaccatccaccagtaccttcttaacccggttttctcggatcacagggtcgacaagtag

SEQ ID NO: 12139 - DNA, 2295 bp, Zea mays
  Peptide Sequence Number=SeqID_55514
atgccgacatcggagcagaagggcgaggaacgatgggacaaagtgatgcgggtcctggatcgcctcgacagtaggttggaggcgatggaggtgaaagcagaagggtctgcacgatcatacgtgcaacgtggaagcagcagtgcggaacatcccagctttgcttggagtgaggaggtcattgcccttccaaggtgctttggaggttctggttattcagtgttcgatgaaacatctgctgagaaggtggtctgggatgaagaagtgttacttcgttccgattcacttgatttttggcagcgtctagctcatggaatggggaaccagatgcccaacgattgcaagcaggatgttgtgcctgatgccccatggttgtttgttggaatgtcacagcaagtaagtacatactcaatatccagtgaaatgggtcttacagtggcatgggatggggagatgcaagctgaaactcacacgcatgaaggattactgcagcagcttgctcaaggtgaagaagccttaaaagaatcagctaagaaggagggtgacgttgaagatgaggcaaccgcagtggttatgaatggaggaaacagggatgagtttattcctgctagtgtggtcagtgtgcttgaggatgaccctaagcaggatgctgaaaatgttgatgctactagtgctggcggtattctttctcaagaattggctccagaatcaatcaatgaaactaatggtgcaggcaagattgtaggcgtcgcttgggttgatgatcatgaagaagaggttgtgggtagcgacatacatgaggctatgacagatgaagtggatgaggaagaaggttgttttgaaggtttttcagctataagaatacatgatgaagacatgaacctgaaatttcttctctgtggagtaccatgcaccctggatgcatgtttattgggcacactaaaagatggcttgaatgcactcttgaatattgagatttgtgcgagtaaacttcagaaccgagccagtgctcatccaccccttcaagctgaagatctttcacatggagttgctacaatgcgcagcgaaatcacaacttgcagttctgcacatgtggcgtattttgtttctggcagtgcccaaacttgttttggtgatcaacttctagggagccgtatcaagaatgaaattattgagaagaggcagttagtttgtgttctattgaataatgaggatatcaagccatcttcatttgagccttggccatccatgggtgtggcttgtgaagcttctacttttgaagtatggataaccatgcaaaaatgggcagcacaggttttaaaacatcttgcaccagaaatctcctacagaagcttggttgcgcttggaatcgcctggataaatggtataccagtgtcctcatttggtaggcaggatgcagaccagtttattttcttttgttctaaccagtgcggagatcaagctattctaaatggctcatttgctcatgtatccaactgggcagcaccctttactaaggataatttcatgcttgttctatatgaagcatgtactgggcaagaggtgagattggaatgcaagaatgtgttgctctttgaggggaggcaaaacaaaggtagttttcgacatgggatatctgaactgacacaatggtggctaaatggttttagcccaggaaacggtgctatggcagttcagtctcagccatacactcaacaaaaattcatgaacaaattaatgggcttacagttcagaatggtgtatgatagaggcaaggagaagatagcgactgatgcttttgttcaggatttgtggccgagggtgaccatttacattccatatgggaatgtgttctcagtgcagaaggacaagactagaagacttcctcaattttgggtgggcaggagctcaacattcagcactaaattgattcgaagctttcatgattcaatggtgtgggagtgttctgtaagcgcagcggaagcatggtggatcggtctgcaaactatggtggagcagttcggagagcagtggtcagttactgagcaagagaaagaagagcagcaatacttgtttgctatccaggatcatcctcgactgtggaaaattgggggttgttttccctatacagcacgatatgggtataacaatgtggtattggttgtactggtgctcaacgggattgtggatttagtgggggctacttggatacaactgaaggctatgtgcttaaggagaaatttccacatgctcttgcttgagggcaagcaagttttgcagcagggggagatgtcatga

SEQ ID NO: 12140 - DNA, 1023 bp, Zea mays
  Peptide Sequence Number=SeqID_55515
atggcgacgcagcaaccgcttccccccgccgactgcgtcggcgataacaccgtcgaccgcgacgtctggctggcctgcgccgcaccgttttcccgcatccccaccgtcggcgacgaggtcgactacttccccgacggccacatcgagcagcacctgtccgcggcgccgcagccgctccctgcgcagcaccgcttccactgcaccgtcaccgacgtgagcctcggcgtggacgacaagacggacgaggtgttcgccaaaatctccctcagaccacggccaggccgcgccgccgctcctcctccgggccccggcggcagcagcaacagccccgcccccagccccccacagaagctcagatacttcactaaggagctctcgcaaaccgacgtctacgcaaggttccgcatcccgctggacaacgagcacgtcttacccatacccatggtcgacacggacggcgtgcagcgccaggacgtcgtcatgcgcgacaccagtggcaaatcgtggaggttctccaaaacctacagcgtcaatccgagcaagcaacactcgctcaccaccgggtggttggatttcgccaaggccaagcggctcgccgcgggggacaagatcgtcttcatgcgccgccccaacggcgacctcatcgtcggcgtgcggcgcctcgacgtgcccaggtacccgctgttcgacttccaaggcccggacccggatcagccggcccaggacgtcatggaggccgtacgcctcgccgccgcgggcaggcccttcacagtcacctacttcccgagacaggccgccgtggagttcatcgtcccgcgcagcgaggtggatgacgcgctcgccaccagctgggaaccaggtgcgctggtgcgcatggaggttatggaggacgagaacaggcagtacaccatgtgggtcgtcggccgcgtcgaggcgatccgccaaaacatctggcgaatgctcgaggttttgaaattatcgtctcgtcttccttccattggcctgatgaccttcacgccttga

SEQ ID NO: 12141 - DNA, 633 bp, Zea mays
  Peptide Sequence Number=SeqID_55516
atgacggggatggtgcagatgcctgcagaaatgcacgttcggccaggcctcgaaaaacgagagagaaatggaaaccttgcacaagaggtacaaatgcttgcacaaaaacttgagaatgagctgcagaaactaacaggaagggagaagcaatgcgccagatttagttttggagtggagaatgatgagctattccagttgaaagagcagttagaaaaatacaaggaggaagcacaagcaaataagaactacatggttcatgtgcatgtctctcaccttgttgaagtccagaagatcatgctttacctagattgtcaaggttcatcttcttaccttgaaactgagtcggagatattggaaggcacatacaaatatagttctattggaggacactttaggcttgatcataacattttaagtggaaacaaaatcatgtattgtttacgtgcatctgtaaggctgcacataaggctctatcatctattccttgtacattgtgatccgggtcgaggagatcctgaagccacttgtgcaaatcaagtgttgtatgagtgcctgcgacaggagcttggacgccagtgggttttcttccggctgattgttttgctctgtgaaggtttgaattctcgaacatag

SEQ ID NO: 12142 - DNA, 717 bp, Zea mays
  Peptide Sequence Number=SeqID_55517
atggcccttgcttgttccccctctgctgtcccatctaatgttgcgtcagtcacaacttcagcttctgcgtacctttgctatgcagaaaggaccaacgatagcaaccttcaacatttagaggtagtgtcgggtaccgtaattaggggtacccccaatactcctaagcatggctggaaaacatcttcaaaacagaccgtaaagactggtcgaaatgaccgcagtcacttcgcccctttactaatcgttctgatagaaaaacaacacgattcaccccgttttgactattgtgccaaccaccagggtaagactaacaacagcctcggcttcagccttggcctcgggagaaggtctccgcatcgcccgatcccaggcctcagcctcagcctcagcctcggcctcgggagaaggtctccgcctcgcccgaccccaggcctcggcctcgggaggagtcacgacctcacccgacctcagcctcagcctcaggagaagtcaccacctcgcccgacctcggcctcggaccaaccacgctacagggaatacatcttttccctacctctagctagccgcctcaggctacgaaggaacaagaccggtgtcacatctagattacttcggcaacagctctctacgaaggcaaagaaacgtcaacaggacccagggccgcaccgccagctacgcttctacagggctcaagcacttctccgtcggccacgttag

SEQ ID NO: 12143 - DNA, 518 bp, Zea mays
  Peptide Sequence Number=SeqID_55518
atggcaattgctctgttaatccagcctctcaagggcactactgtcattacagaaaagccattacaaatcgggcccgtaacacacttctccgtgcggggcctgttacaatgggttgaatcccacgtgggcctccaggtcagcgagattgacgaaggctggagcgaagggcgagacggcgggtcgctggcgagacgatggggcacgggcgagacgacgggtcgcgggcgagacggcgggtcgcaggcgaagcggcgggcgggcaagggcgcggcgggggcacggctggggcacggcgcgggcacggcttgggcacgacaggggcatggcttgggcgcggcgggggcacgtcttgggcgcggcacggggcacagcttgggcgtgggcacggcttgggtgcgagcacagctacggcggcgtggggcacggctcgggcgtggctgcggcggcgcggcggcggagcagcgagggcttgggcacggcggctcgacggtggcgcggcgagggcgtggcaacgacga

SEQ ID NO: 12144 - DNA, 1620 bp, Zea mays
  Peptide Sequence Number=SeqID_55519
atgtgttcccattattatgtggcgtacccacaatttgaggtggcagaggatgatgaagacgaaggagccctttggtgcgctacccgcatgagtagcgggcgcgatttagttgaggaatttatcgggtatggggtatggcccttggcacatgcctgggcgttgggcaaagtatgccctcgcgagatgccctccctgggcgggcagcggtggagagggaccgtcaagacgctgcgcagaaacgtcgggcggtcgtcaggatcgcggatcctatgcgcgaggcgaaaaaggcgcgggggagcgcgaaggctgctgcctctggcggtagcaaaccggtgccggctgcgaaaccggcccgcccccgggcatggcaaggcgtcggcgagtgcgaaggctgccgcctctggtgggagcaagccacccccgggcggcctcgtgaaaggacgagggccgcttttgccagcgcaacgtattgccgacttcggcacggacatcagtgtcgacgattatctttttggttcgggtgaggggcaactggttgttgtcccgcctccggtggtgactacttcgccaacggcggtggtgggggcaaagggtgccacgcgggacccgtgggccactttctgcgcgagcggcgagattctgtcggccgctgccgctaaggacgtggcgggctccatgtctcagcgactaagggaggcgtcgcagcagctgtcacaacagctgaagcaagcggccgacttcgccgacctcgtcgcgtcgggtgccttgactgcggacgttgctgccgaggtcgagcgtctccgggcacagcatgcggatgctgtgcgggagaagtcggctgcggaaagaaaaaaccgcaggctgtcggagaaggtggccgccatggaggccgagaagacggatctctggcgccagctagcggaggagaggagggaggcgaacaaggccatcgctgatgcgcaggccgaagccaaagcggtgcgggcggagggcagtctcgcccgccaacgcgtcgaggagctggaggcgaggttcaacgccctgcgcagccgcgtggacaaggctgagtcctcgacgcgcgcagaggtcgagcggatgcacgcgcaattcgtggacgcataccgtcagctgggtgcgtggactgctgacttcgaagtgcccggccaagaagcgggccttcgcttccttgaatggttacaggaggagctgctggtgctcccgaccattgtgacaggtttcatgtccttcgcctccctcgtcacctgcgagggggccatgaatgttttgtcacgcgagtggtgcaggcattacgaggtcttcgaccaagcagacgacaattttgaacgtgaaatcttcaagatggcgcatgccgaagacatcgaggaccttgttagtctggacggcgcgctgcccgaggccacggaggtcgatccggtgccgccctcttatgccggtgaaggcccctcggtgacccctgcgctccctgcgaccggcgaagaccccgcaccagctcctgcgccgacgagcgaaggcgccctcaaggtggtggccgagccggctgctgagccggtagccgaggaccccacagccgcggtcgggccttcgcatgtggctgaataa

SEQ ID NO: 12145 - DNA, 177 bp, Zea mays
  Peptide Sequence Number=SeqID_55520
atggacgtggccgacctacgcacggcgcgaccgtcgcccgtgcggtggacggacaaccacactccgaccaggcagcaggtggcagtttgcctcctccgcaaggctgggatcgggaaaggggacatttcgaaggagcccttcgcagcgaaagaaacgggccccgagccctcctactga

SEQ ID NO: 12146 - DNA, 144 bp, Zea mays
  Peptide Sequence Number=SeqID_55521
atgtgggaggacctcgacgacttccgcgcccactttctcaactttcagctcgaggacgagcaggccttcgaggccggcagagatgtcatgtacggttctttcgattgtgagtacattgcagacttattgccaatttacccctaa

SEQ ID NO: 12147 - DNA, 534 bp, Zea mays
  Peptide Sequence Number=SeqID_55522
atggccgcctcaatgcgtgcaccattaagaagaggtcctcgcctccgtcctcctacggggggcgacaacgaggccattaaagccaaagagtcggaggctcgacgacaggtggcactgatggtctcgccagcgaaggcagccacctctgcagtgggtagcctcaccagcggcggcgaccatctcagcactgacaacagtggccacctctgcaccggtgacttaccgacgacggcgaccgcctcagcgcgcgcgaagaggtccttgctcccgtcctcctacgggagtgaggacaagaccatccaagaacgcggccgccacccccgcggcgtacgacatcttgtacgaccccccggacggcgtcggaacagtgtgaccggcggcgcgggagacgctgtggatgtggcaaacctgcgcacggtgcgaccgtcgcacgtgcggtggacggacatccacgccccgaccaagctgcaggaggcagcgccggaggtggcaccaaagccatctaggccaaggagccaggcacgcggcagctga

SEQ ID NO: 12148 - DNA, 285 bp, Zea mays
  Peptide Sequence Number=SeqID_55523
atggacacctccacccccttatccgtctatgccatatccatacacatacttacctccaccgttggcgccaccagtacaagaccgattgagcaccgctcaatccggtcaccaggcatagacccaacaggatcgctggactactcggcctccaaggccgaccaatccggtatggcagatagcctggccaacaaggccggacaaactgcaccaggcgcggaccgtccgcccccggagtccggaccgtccgcaccacaccaggaagcctccaacgacatgccaacataa

SEQ ID NO: 12149 - DNA, 465 bp, Zea mays
  Peptide Sequence Number=SeqID_55524
atgacaccacacactagggtccctcgctcagaacagtcacccgagaaaagaagggaaatagtaggcccacggaagaatgaccttacgatttattgggcccttgggcctttcgtgaggtcttttactcttttagtggacccgggggatatctatcccccacaagcccccgatctttgggttaatttagaggattctgaaattcattgggtgcaccggaggtgcacccgaatgggtgtagctcccgagtttcgagtagattttagaaaaacaatctacccaaaggtcctcctcagaaattatttccatttgtgcttctgcattttggttgagaactggccctttaatcttgttccatgctctttagaagtcggcactgtcttggcttggaatgataatccatggggtgcaccggaggtgcacccaatgggtgtagcccccgaccttcaaatggattttcgaggataa

SEQ ID NO: 12150 - DNA, 885 bp, Zea mays
  Peptide Sequence Number=SeqID_55525
atggctgaaaggtaccaactcccacggagttgcgttcctccaacgacgaggcggaaagacggcgggtatcccccatccgggggcttggaaggtggaaagacacgatgcataagagagcgtgaaggcatgatcgccttccaagggggtcaccctccttttaaaggcggctctccctacttgcgtccccagtcgtcgtgggctgagtcttctccaacacaccccaaggatctcccctacggcgcgggggctgggtcccacacgtcatgcaagccagctcagagcagaagaagccaaaccgccgtgcgcggtgcgtacaaccgcccagcggttacaagcggccctccacttttgcccagaccagcaggcgaaagggcgggcagccatgcaggcggcatgcaaccgcgccaactgcaccgccacttgcgccaccaccgcgcctcctcgactgcggaaccaataccgcggctcgaggcgacccaacgcacgacccagcagcgccagtctggcgcgacgggaccgggaaagggggataccccgaaaaggatcctttcccgtgaaggaaccaggctccgagcctccctactaatcagaggttcgaaggctggcccctcgggagggttcaacagccgcctcagagcgcgtgggctccacacccactactggtcagaggttcgaaggtcggcccctcggaagggttcaacggccgcctcaggctgctcgggctccgcgcccactactgatcaggggtttgaaggctggcccccgaaggaggctcggggctgctctcgcaaacccggctccggccacaccgttgacagcgtcaacattccagcccgagaacttgggacccgaccgtacaccccgggctacggccagctcgcatga

SEQ ID NO: 12151 - DNA, 546 bp, Zea mays
  Peptide Sequence Number=SeqID_55526
atggggagtggagagggagattggagtggcgcaaggtgtatggaagaagagggcgctgatcacccagatctcctgcgccgggcgtcgtgcctggccaggatgatcccagacagtttaaggcctcaagtgacaattgctactgctatagtgttctgtcatcggttttttcttcgtcaatctcatgcgaaaaatgacagacggacaattgcaacagtatgtatgttcttggcgggaaaagttgaagaaacacccagacctctgaaggatgtcatacttctttcatacgagatcatccacaaaaaggatcctgctgcagttcaacgaataaaacataaggaagtatatgaacaacagaaggaacttattttacttggggaacgtgttgttcttgtaacacttggttttgattttaatgtgaaccatccttacaagcccttggttgaagcaataaaaaaatttgaggttgctcaaaatgcacttgcgcaagttgcctggaattttgtcaatgatgggtatgctaaaattactcttcatcactgcaaatag

SEQ ID NO: 12152 - DNA, 144 bp, Zea mays
  Peptide Sequence Number=SeqID_55527
atggcctcgaccgttactttctctttctcgcttagtcgtaggtgtggtgatgaggatgatggttttggttatgactatggtactggttgtccgcgttgcaaccactgctcaggtgaagatgaagccgtggaggaggacttctag

SEQ ID NO: 12153 - DNA, 851 bp, Zea mays
  Peptide Sequence Number=SeqID_55528
ttgccgccacctcgttcgtcatcatgcttcttttctctctcccctcatgcctctgcctccgtgccaccccattctcggcagagaacgtcggagcaggtgcctcctccccgtattcgtccaacaccagccccgacactgacccgcgtagtggctattgcacgtccacaaggacgtttcatagtatgcgtgcaccatcgttttcgcagtcgtcggatgtctcgttcgtcttcccgtccttcgccttgttcttcctccccaacctactgccccccgctcacggtcgcagccgcgtgccgaccgatgatcttcgacgcgggtacggggtctttgtcgtgtccttctccgacaacgaacagggcggatgcgcttgcagtagggggttacaagcgttcgcgagggagagcctgttcgtcggcccgtcctcccgcgcgaccacccccctgtatgagggccctggcccttccttttatagatgtaaggagagggtccagggtaatgatgtaccccttgtggtgtggtcggtcctagcccaaggtcgggtgaggcggagactcctcctgaggccgaggccggggtcgggcgaggacacgattccttccgaggtcgaggttgaggtcgagccctggggtcgggcgaggcggagaccaccttccgaggccgaggttgaggccgagccctcgggtcgggcaaggtggggaccaccttccgaggctgaggcgggggccgagctcagaggtcgggcgaggcggagtttcctgttgcgcctgaggctggacttagctgttgtcagccttatcctggtgggtggcgcagtagtcggagcgaggcaggcgacgctgttttcctgttag

SEQ ID NO: 12154 - DNA, 1125 bp, Zea mays
  Peptide Sequence Number=SeqID_55529
atggggagcgctcgcgttgcctttgtcttgtcgttggaggagcgcaacctaacggaggtcggcacccttcagccatcgctaggcttcaaggattttcatcaggagcgcgccggagcgcaacctcacggaggttggcacccttcagccatcgctcgacttcaaggattttcatcaggcagcccggctgcattccctcaccaatggtcacacaggacggtgaccatcagttcgacggtggggagaagcaagccgggctgcggcctctgccccgccctcatcttcaaggatcttcatcatccttgttggggaggagggcgaggcgagccggagcctgccttcgcgtgggctggcgtcccgcttcttcctccagcatctgggggtggaaaccatcctccagctttgcggaggaggcgtcctccagccatgcgggggaaggtgaactgttgctgcctggccagggtgcagcattccgtcctctgtccgggcgactgtggccggctgcaccggggggtcgcacaacacgtcgtacgccgcgagggaggtactcgtgttctgggacggtcccgttctcgtgttcgtggcgaggacgggagtgaggacctgtcggtgcgctttggggcggccagcgctcgccggtgcggtgttggcgggcaggtggatgccgccgtcggtgctgaggtggtggcagccggagaaggtttctccgccgacgacaccgtcaacgccacccacgctccgggcctccagctcttgggctttaatggctggttcttgtcccccgtgagggacgtgaacgagggccttccagcggtaacattcgccctggggccattgctgctgctgcagaggttgccggcgagccacccggagtttgtcgtcccgcaggccctccggtgtggaggttgttcatacccgcgggagtggaaccggagttccgtttgtaatggcaccttgagtgccgctcagttaaagaaccctcagctgctctacgatgagccggagccggaggcagcggtgtcagcatggacagaggcggagtcggttcgagaagaagcttcgtcggcccgggagcacgtggcctccctggtcgaggaggtgcagcagcggcagctggagcttgactag

SEQ ID NO: 12155 - DNA, 189 bp, Zea mays
  Peptide Sequence Number=SeqID_55530
atgggcatgggcggaggcagcgagccagcgagtggggaactgggggtggcgtctgacttcgacggttcgaccattgaagtggtccgcagtcaacttcaatttcgtgcgtatattttaccacttcaaagcggctaccgagaacaaagtttgagcgttgatccgctcaagcgtgtggccttaggagcatga

SEQ ID NO: 12156 - DNA, 393 bp, Zea mays
  Peptide Sequence Number=SeqID_55531
atgccttttttggtcgtcatgcaactgtcgtcctctctctcgcccccatcccaacgaataccacctccgcgatgcctgatatgcgacgaccacggcatcgaccacaccggaaagtacgccggcgactccgacctccagctcgagcgtgcgctcgtctactacaacgaggccagcggtggccgcttcgtcccacgcgccgtcctcatggacctcgagcccgacaccatggactccatgcgctcgggccccttcggccagatcttccgccccttcggcccgaccgccccatccgcagcgcccccacccccgtccgtccgagatctggatcccgcccccatcatcagcgcctcctccctgcccgcccgagacccggatcccgccgctccaccgtga

SEQ ID NO: 12157 - DNA, 414 bp, Zea mays
  Peptide Sequence Number=SeqID_55532
atgggtaagagtaagaagggtagcggttcttctcctcgctctggcgacaaacacaaacatgagccgactcctccttcggaggactttggcgactcggagtactcggagaaggagttctcctccgagtctgaggggtccctggctcccgtctctcccccggcgtcgtctgatgattcagacgactcccaggggattgccgcggaggtctggacctacatccaggccgtcgagcgctcctcggatgaggaggactcctcggactcgtccgaggaggacaacagcggcgatggtggtgatggcggagacgacgggggcgacggtgatggcggcaacgacggcggcaggggcgacgacagcggcggcaaaggcgaccacgacagcggcagcaagggcagcaacaagaccagtggctag

SEQ ID NO: 12158 - DNA, 651 bp, Zea mays
  Peptide Sequence Number=SeqID_55533
atggacctgccgttcatcatcaggagtctccccgagcgaggcaaccaaggcactaacttcttcagcagagggtcgcactctaaggcccaaactgccatcacaggaggattcgacacaaaaagggtgaaggctttgggaggaggcaagttccaggccgagtatgccactggggcaccaacatttgacaccttgcctctaaggatcatctcaagtcggttcaccaagtctgcagagggaattcttctgttggatagaattgggattcagatgggtcaaattaagatggtagaaatcaaggaggccgcagaaaaagggagaaatgggaaggccaaggccgcggagaaggaaaggagcataaatcacagactcatgggtatcctcagttgggacagtaaccccatggcaaatccgccaagagcagagttccctcggaggaagaaccccgatggacacgaggtggagaagttcgggctcagagatgacagacatgtggttacctgcgaaaggcaactggctattggggtcgattggaggaatcaccacggcagacgaactcgaggctttcctcttgggtgccatctcgattctaccggcgagcagagtaggaggcgaattgcggagaggattcggaagcaagaaagcaagaactag

SEQ ID NO: 12159 - DNA, 369 bp, Zea mays
  Peptide Sequence Number=SeqID_55534
atggatgttacaaacagtagatctactaggaaggtaaacaagatagtgatacctaataagataaatgcacctcaccacatcctccatctcgaccatgcgctcgaccccctcacctggcaggcgctccgtagcaacgggctagatgagtccgacatgggcgatggcgggggcgttggcccggtggcgaggttgggaggaggaggcagggcgtggcggatctggaacaagagagagcagaccccctcgcctggtgcacgcttcacagcagtacgttggacgagtctggcacaggcgatggtcgtgacccaggccaagtggcgaggtcgagaggaggaggctgtcacacctgattttgggggcaaaacctaa

SEQ ID NO: 12160 - DNA, 339 bp, Zea mays
  Peptide Sequence Number=SeqID_55535
atgccatccacattatgctttggaggtattcactgcgtgccctgcacagatgtgaccgttttgaaaaatatactgataattcctgggcgtcccccccaatgggtgtgggcaagggatggcttgcgctccgagctcgagggctcggatgagtcggagtactcctcggatgaggaggactcggacggcgccggtgaggacgaggacggcgacgacgacgacaacgaaggcggtggcgacggtgacggcggcgacggcaggggcggcagcggcggtggtggcagcagcaggggcagcaacaagggcggcagcggcggcggtagcaacagggccagtggctag

SEQ ID NO: 12161 - DNA, 195 bp, Zea mays
  Peptide Sequence Number=SeqID_55536
atggagcaaagaaaaccgaagaccaccctggtctggcgcaccggagtgtccggtgtgccaccggacagtgtccgcaccggactgtccggtgtgccaagcggagcaacggtcgccagcgcaacggtcgagttcaacggtcggctgacaacgctacagtgtgcggactgcgcgcgcagaagtcagagcaggcgctag

SEQ ID NO: 12162 - DNA, 348 bp, Zea mays
  Peptide Sequence Number=SeqID_55537
atggacgagggttgcactcaatccctttcaagcgatccaatgatctacttgaataccacaattttctttcttatagcagatgtttacctttgtgaggaatctccacaagttagagcctctcacctttacaatattgatcacaatgaaaaccacaatacgaagccgaccgttgcacacgcggtccccttggcgcaccggacagtctggtgcggtcttgtgaccgttggctctagccacacgtcgcccgttgattgcgcgctgatcgcgctaccgaccattggcgcggacgatgttggctcaccggacagtccggtgaattttagccgcagtgtcctcggcgattcctga

SEQ ID NO: 12163 - DNA, 692 bp, Zea mays
  Peptide Sequence Number=SeqID_55538
atggctgaaggctgcgatccaggccagtgcggcctcgcggcgagcagtgaagaagcttctgttgcgccaccagtagccgcacttgactcgattctgaagaaactaatcgtttcattatatcgaggaaaagcacaaccaaggatggcaatggtagctcctagtgcattgacagggcggacatggtacatcggggccgaccaggacgttgagctgttgaaactcgaagccaataaaatcagttatcctgttttaatcaaacccacccatggtggagggggcaaggggatgagaatagtcgaaaagcctgatgaatttgtggattctgtactgagcgctcaacgggaagctgcatcattgtttggtgtaaacacactattgattgagaagtatattactcaaccaagacatgtggaagtcgaggtatttggtgaccaacatggaaatgcgatatacctttatgagagagactgcagtctacaaagaaggcatcagaagatcatcgaggaagctccagctctcgggcacgcgcatcttgtgacggagactcacaggcgactacttgagcttaatccagaacacggtcgccgcctcggcgcctcccccatccgctgcctctgcctcctcctggccgcccctgctgctgctgcggcagcagcgaaggcggaggccgcggctgatccttcggtgatgag

SEQ ID NO: 12164 - DNA, 285 bp, Zea mays
  Peptide Sequence Number=SeqID_55539
atgacaaatattaccattttgccagtagaggggaactttggtgaagtggtgaatgcagagctatcattggaccgaatggttaaccttcctcgtggccatggatatattgcgttcaagaagagagctgatgctgagaaggctcttctctacatggatggtcgatcaacgggcgccacgtgtgcccagccaacggtcaccaggctgccccagactgtccggtgcgccaccggactgtccggtgtgccgtgggaccagaggatggcaatggtcggcttcgccaaataa

SEQ ID NO: 12165 - DNA, 585 bp, Zea mays
  Peptide Sequence Number=SeqID_55540
atgcaagatgtcgcacggcgtgcgctttcttactactgctcagttctcggcggggtagccgacggtctcaacctgaagtattacccccgccgtccatctggcagcataggaggcatgattgtttcacctgttggtgaggacaatcctaggttgagcagcacaatcaacctagctgtcgtgctaaacacagagctggaccatgcattagacgagttgagtagggctcgtgctgagatcgccctgttgcgagctgagcgtgtggagcgtcgtcacctggacgatggttcccccgctcccgtcgggactcagcacccgtaccgctcacctcggcgtggacatcagtcttatggcaatcccgactatgtcagaaaacaggcgcagaggaggaaggcgtgctcagcaggagcaagctgctcagcaggaggaagtaccccagcaacagcagctgccgcccccgcccccgatgtctatcgagcagatgttcctgatgcagacccaggcagttcaagccatcggtcagactctggccgccattcagcagcagcagcagccaccacctcagcctcagatgccttagatgcctag

SEQ ID NO: 12166 - DNA, 381 bp, Zea mays
  Peptide Sequence Number=SeqID_55541
atggtgttggtaaagcctggtgcggtggatgcggggcgggggcgtggatatatggtggagggggttgctgtcttcgccatggaaagaggcagtagaatcggcgcggcggctgcgcccgcccccgacccctaccgcgagttccatttccgcggccctggggggatactcctggcgacgaggggcgtcagcagcggggtgctggggtggcccatgctgcaggccgaggtggccttcgcgcgtgtcttccagttgtgcgcgctgctggaggggtggcccttgttgcaggccaaggtggccttcgcgctgcatcagcgtgatctcccgctcgaggtcttgggccttctgctcttcgtcgcgtatcatttgccgcactttggctag

SEQ ID NO: 12167 - DNA, 579 bp, Zea mays
  Peptide Sequence Number=SeqID_55542
atgcttcccctctcgctcctcaagaccgcccaggggcaccccatgctcgtggagctgaagaatggtgagacatacaacgggcatctggtcaattgcgacacgtggatgaacatccatcttagggaggttatttgcacctcaaaggacggtgacaagttttggaggatgccagagtgttacattcgcgggaacaccattaagtatcttcgagttcctgatgaggtgattgacaaggttcaggaggaaacttctaaaagccgatcagataggaagccaccaggtgttggccgtggaagaggaaggggggacgtcggtgctaaacctggaggcagaggcattggacgtggccaagatgatggaggtagaggcagtggtggccgtggaaggggtggagttggtgccaaaggtggtaacaaagttggctggttgtattggggcacaaaccagaatggttcctgtgatctagacaccgaggatgcggcggcaaccaggcttgttgctattccccaaaactgtttggttgatatcttgagtatgatccaatttgttcatttgcttagagttatcccggttagatga

SEQ ID NO: 12168 - DNA, 348 bp, Zea mays
  Peptide Sequence Number=SeqID_55543
atggcaggaatgtactgcaacgcccgcgactgtctcaacaagagaatgcagccgccggcccgcaccgctgcacggatcctcctctcccccgtcgacaaggcgaaaggctcgacgaggaagaaggaccgggaaagggggataccccgaaagggatccttctccgcgaaggaaccgggctccgagccccccattactgatcaggggttcgaaggctggccccccgagggttcaacagtcgcctcacatcgcgtgggcccgacacccactactggtcaggggttcgaaggccagccccccgaagggctccatggccgcctcaggctactcgggctccgcgcccattactga

SEQ ID NO: 12169 - DNA, 384 bp, Zea mays
  Peptide Sequence Number=SeqID_55544
atgtccggtggtgcaccggacagtctggtgcgccagaccagggagcactattccatctctgagcgggactcagctgaggcggccatgcaagatgttgcacggcgaggcgtgattgtctcacctgttggtgaggacaatcctaggttgagcagcacagtcaacctagccgtcgtgctaaacacggagctagaccatgcattagacgagctgagtagggctcgtgctgagatcgcccagctacgggctgagcgcgcggagcgtcgtcgcctggatgatggttcccccgctcccgtcgggactcagcacccgtaccgctcacctcggcgtggacaccagtcttatggcaaccccgactgcaagaccaagataaatttagagccatag

SEQ ID NO: 12170 - DNA, 144 bp, Zea mays
  Peptide Sequence Number=SeqID_55545
atgttcggattgcaggtggcaatgagactgatggttcttggttttgactctggtaatggttgtccgcattgcaaccactgctcaggagaagatgaagccgtggaaggagacttccaggagttccaagactacgacgatttctag

SEQ ID NO: 12171 - DNA, 705 bp, Zea mays
  Peptide Sequence Number=SeqID_55546
atggccggtcagtccagtcacttggaggggctgcaccaccgcctgcatgaggagcaggaacatcgacgacaggagcagcagggctcttctttctcgctccagcaggagatagagtctgtgaggagctgctcccccgtgcttcctctggaggcgccccctgcaccaccactgggcgccctagcctctggagtagctgctggaggagacccagacgacggaggtggcgacgacagctcgagccacacaccgacttttctgctgaccaggagccggaaggatgggttgctcgacccatcactcgcgatgctgctcgtgggtgtcacttccacgatgcgctcgacaccctgctacgtcgggcacttaaccggcgtacttggtctatcgaagcactattctatctctgagcgggactcagctgaggcggccatgcaagatgccacacggcgtgcgctttcgcactactgctcagtgctcggcgtcaacctagctgccgtgctaaacacggagctggaccatgcactagatgagctgagtagggctcgtgctgagatcgcccagctgtgggctgagcgcgcggagcgttgtcacctggatgatggttcccccgctcccgtcgggactcagtacccgtaccgctcacctcggcgtggacaccagccttatggcaatcccgactgcaagaccaagatagatttagaaccatag

SEQ ID NO: 12172 - DNA, 384 bp, Zea mays
  Peptide Sequence Number=SeqID_55547
atgaatgaatgcgttgctctagtatcaaataacacttctgcaatatgggagtcgactgggaacatacctactatcatgccaggggctgagacacattctgctttgctggggcattggggcttgactgctgctaggctgccttcttcggacattgcattacccaatggccttgctctccacagtggaaacatgctctgtttccaacctgagctggtgctgcctgactgttctgttggtttgctggggcaggaagacgaagtgcctgctgattctgcctctgaaactgacctcctcctgactgattgttctgacgattctgatactggtgctgaggatactgcctttggaactgctgatgctgaggtggacgctagttctgcctga

SEQ ID NO: 12173 - DNA, 603 bp, Zea mays
  Peptide Sequence Number=SeqID_55548
atggttgcgatcaatacatttttatcaagggttgtcaagtttgaccacaaagacaaacagctggctccatgtccattcgaggtcactattcttgcaggtgaagcatggcagaacaagaagaggcagagaattggagacactttagactttgaaattaagaggtggtctactggaaaacagggcaacttgcgctttgttatcaactttacaatatgtgagttgatgatacttttgattcatccgagtgacaagaagcttcgtgctgggacctcactgccaggattagtagctgcaaaggttggggtagatgtaacactaacagacattgcgcagaatgcagaagtgcccaaaaacttgctcgcatccgcgagaatagtaatttcttcaggtcagagctcaagaagatgggtttttgaggttcttggtgacaatgactctcctgtcatgcccataatgctctacaatccggctaagattcctgcattctctagggagtgccttagacaaaaggttatcagcagagttggtgaccttgtgggcatcaaatacttccctgcagaaacaccaaagattgctggagctgatcatgataagctggagtag

SEQ ID NO: 12174 - DNA, 120 bp, Zea mays
  Peptide Sequence Number=SeqID_55549
atggctaatatagcatcatctgggcccaagcacttaagtaggacgtcattgactgttcggcgagatatgccgaatactgaattcgtcaaaagaatggattatgctccaacatttctcaag

SEQ ID NO: 12175 - DNA, 717 bp, Zea mays
  Peptide Sequence Number=SeqID_55550
atggccggttcaagggatagttctgaagtctctccaagcaacatcatagagccgacttgggacacattgccggctgacgaacagctccagttcgaggagcacaaggagcagatgatccaggaggcaaaagcaaggttcttggccaacttcaaagtggacaggaacaacaaggtcgtccgacttcgggcgacggatccggcttcactgcgacccacgccagatatccccaatccgcgcgggctcatttcttctctgttcgcatccctgcccgaccgccgccctgctcaaccgccgccctgccggaccgccgcccgagcctgcccctgccccgagcgccgccagcgaggccgcccccgcccgagccgccccgtccgagcccgccggccgcccccgcccgagccgccccgcttgagccccgccgccctgcccgaggtcgccctgcccgaccggcgccgtgtccgagcaccgccgccgcttgagcgcctccgccctgcccgaggtcgccctgcccccgaggccaccttgcccgaggccgccccgccccagcgccgccgccgccccgcccgagcgccgtcggcccgccccggagcaccgccgctgccgcccgagtgccaccacaagctcccgagctcctcgtaccccgagcatcgtcgtccccagcccgtcgtcatccaccgttcgctcgtgccccgacgggaatcagtaactgaggtataa

SEQ ID NO: 12176 - DNA, 525 bp, Zea mays
  Peptide Sequence Number=SeqID_55551
atgctcggggtacgaggagctcgggagcttgtggtggcactcgggcggcagcggcggtgctccggggcgggccgacggcgctcgggcggggcggcggcggcgctggggcggggcggcctcgggcaaggtggcctcgggggcagggcgacctcgggcagggcggaggcgctcaagcggcggcggtgctcggacacggcgccggtcgggcagggcgacctcgggcagggcggcggggctcaagcggggcggctcgggcgggggcggccggcgggctcggacggggcggctcgggcgggggcggcctcgctggcggcgctcggggcaggggcaggctcgggcggcggtccggcagggcggcggttgagcagggcggcggtcgggcagggatgcgaacagagaagaaatgagcccgcgcggctgcggcctggctctaaaaagattaatccccgtcggctaatatacagggccgacgggaattaccttattcccgtcggccagagcacagggccgacggggattagttaa

SEQ ID NO: 12177 - DNA, 438 bp, Zea mays
  Peptide Sequence Number=SeqID_55552
atgggcaagagcaagaaaggtgggagttcctcgcaccatttcggcgataagcggaaacgtgagccgactcctccctcggaggacttcggcgactcggagtactcggaggaggagttctcctctgagtcagagggttcaccgatccctgcctcttccctggcaccgtctgatgattcagacgactcccaggggatcgccgcagaggtatggacatacatacgggccgtcgagcgtgccgggctcgagggctcagatgagtcggaggtctccttagacgaggagaactcctcagacttgttcaaggagggcggcggtgatggcgacggcggcgacggaggcggcggcgatggcgatggcggcggcagcagtgatggcggcaagggcggcagcggtgatggcggggacggcagcaagggcagcaacaaggccagtggctag

SEQ ID NO: 12178 - DNA, 555 bp, Zea mays
  Peptide Sequence Number=SeqID_55553
atggattcaacatcggaaaaagatgtacctctgtcaggatccactttattatgtaatcgcttccgcatttctttatctccgatgttctgtaatgtctgcaagacgggtgaaacgttcctgacaaggacaactgtaggtgggcctaattacttgggaggtttcgtcacaacacccacctcggaaagagaaaaacaaaacttggtccctttgaaagcaaatgaaaaagggtcaaatttcatgatgaggaagactttgagactgaagaaagcacaactgaccctgatgaaggtgatggtggcaacaatgatgatggtagccatggggacgatggagacgatgatgatggtagccacagggatggtggaggtgatgatggagcatatggtgctcgaagtggagcatatggtcctagagctagagcatatggtggtgggggcagccatggctctcaagattcaggttatggagcacctcattcgcaacgacgtcattcagtttgcggacctcttgatgatggtacccacagttcactcaacttcagttacaactgcatga

SEQ ID NO: 12179 - DNA, 126 bp, Zea mays
  Peptide Sequence Number=SeqID_55554
atgggggcgggcggggccgagggcgaggacggccgggcgcggcggaagtcctacttccggaagttcgggctctggtccctcttccggggctacgggttctggatcaacgatccccgcttcttctag

SEQ ID NO: 12180 - DNA, 294 bp, Zea mays
  Peptide Sequence Number=SeqID_55555
atggggagcgcccgcgttgctttcgtcttgctgctgttggaggagcgcaacttcgtggaggggagaaggcgctcatcggccctagcggagggggcggacttcgacaacgtgggaggccgatcggctgcaagcgtcgtcagctccagcatgcctggttcgctggctcagctggccctggcgcagcttccggtggcacctcccaccggtgggcggagtgtggctatctgcccaccgtacgggtggctgttgtgccgcgtgcaccgggggaccgcccaagacatcacacgctgctag

SEQ ID NO: 12181 - DNA, 648 bp, Zea mays
  Peptide Sequence Number=SeqID_55556
atgcaggcggcatgcaactgcaccacggggatgcaccctttcgatttcgacgcatccagcatggaggcccaggcccacacgtcatgtaaccggcgcgccggttactacgtgcgaaaaactgtaccgccacttacgccaatgccgcgccttctcgactgcggaaccggtgccgcgactcgaggcaaccctacgcatggcccaatagtgccaaccaagtgcatcggtcacgggtcagtcagccgcgggagaaggcgcgacggtcaatatggccaaaaatgggccggcagtaatggcggcagcaggcgggcggaagcaacagtcaaagcatctggaggctcacgtcccctcctggagcagcgggggagccctctcccacggcgtgaagacgacgcgcccgtgttccgtccctcgaacgactcacgcacgcacaacggctgccccccgaaccacccgtcccgtcgcattaactccgtggcagggcaggcgacacctttgggagggaccgagaaaggggatactccgaaagggatccttctccgcgaaggaagcgggccccgagccctcctactgatcagaggtttgaaggctggcccctcggaagggttcgacagccgcctcagagcactcgggctccgcgcccactactga

SEQ ID NO: 12182 - DNA, 312 bp, Zea mays
  Peptide Sequence Number=SeqID_55557
atggttccagacggcgaacaaacggggtggggaaaaggacccaccgctcctccctcagtatgcgcctgtcgtccattgctcctagacgcatcgcggcgtggatcggctttctctgtgctccgcctcgccagcctcgtaccccgtagccccgactccccatccgccacctccacctcatgggccaccgggtccaccctcgctttccagcttggcaacatctttgaccgtggtgtcgacgagctccgcctcctgcaccccctccgcctcctcgtcccttctgctgaggcccgcgtcggcgcattcctgccgtag

SEQ ID NO: 12183 - DNA, 624 bp, Zea mays
  Peptide Sequence Number=SeqID_55558
atggatatggataaagatttgcagaacatactgtctaagttgcgtgatcagtaccagtattgcctttattgtggatgcaaagtgatgtttcatctttcatccatctcatgtacatatgttcaagatggcgccattggttcctcggcagaatgggatgcaaaggttcgaggcattagtgataacccctctgctgttatgttactgtccaatgtcctttggaaaataccagatcgcgccatttcccatgacacatcacctttgactatatatgctaccagttcaataaggattctgggctttggtggctccactgtgtcattgtttgcccaggtggaaatcatgatgtcctgcttagaaatccacaatgctctactgtccattgactatggtgcagtaatctcttccaatagacgagatttttttgtttccatcgatggaatcatcgtcaccgtgctgcaagcaccacttgcgcagatagcgaagaacgtgttacatgtgctcgagcttgaagtcggtttcgtcgagcatgtcgcgaaagcactcctttacagctttgaggagcgtaacatcatttgctctgctcggacgaactgtatacaaccggttgtagatgccattgaatag

SEQ ID NO: 12184 - DNA, 997 bp, Zea mays
  Peptide Sequence Number=SeqID_55559
atggcattacgtgcctccgttgcgttgcccgatgtttgctgtgaaatactagtctgttgcctaagcttcggcggccgcatcctgccgcgcccgggggaccgccagctgcgctacgtcggcggggagacccgcatcgtgtccttcccgcgcgccgcggcctccttcgccgccctcgtcgccgcgctcgccaaggccgcgcccgcgctcttcgcccccggggcgcccaggccgtccctcaagtaccagctgccccaggacgacctcgactccctcatctccgtcacctccgacgacgacgtcgaccacctcgtcgacgagctcgaccgcatccacgacctctccgccaacgtcgcccggccgccccgcctccgcgtcttcctcttcgcgcccgcgcccgcgcccgacgccgccttcggctccgtcctctccggcaccgccggcgacgccgcccccagcgaccagtggttcgtcgacgcgctcaacgcccccgcgccgcaccccatcgagcgcgtccgatccgagtcctcctcgatcgtctccgacgtccccgactacctcttcagcctcgacagcccgtccgacgaccccagccccggcccctcggcggctcgcgccaagtccgacgccacggagactccgcaccaccacggcgacgacgtgccgccttccgctcgacagataccgcacgtcgcaggaggagcgtcatcgtggcccgccccgccgccgccgtacatggcgcagcctatgtactacttccccgtgccgccaccggtccactatctcgaccagtctgcgcagagtggctacatgcctcgcccgatctaccacattgtcggtggcggaggaagcgaggcgcctggcggagatcttcacgcggccggcggagtctacggcgtctcgcaccacatgcaggggttcccgccgatgatgtacgcgccgccgcgcgcggtcatctacaactacaagtcggaggggatgccatcgctgcctccggaag

SEQ ID NO: 12185 - DNA, 1062 bp, Zea mays
  Peptide Sequence Number=SeqID_55560
atgcacctaacgctccaccaaagttgctgcccgtggcggaaacgggcgagcggaaccaccttccgggcgcacgtacactgcccctgcctcccccatgcccgcccgacgcaatccccaaccgccctccgcaatcccctaccgcccgccgtgatccccgccgccgcggcagtcgccctccgcaacctctgcctagataaggatagggggcgccctcctccctcgatcatccgcacttgtgtagccatcgcgccatctacaccggccaccgccacacggaggttcgcctctggccttgcggcttacgacctcgaggtgaccgagcccgcgggctccatgacgacaacggtgacgccggaggcaaagatggcggcgcagcagcaggcccccgcgtcgcgctcctcctcccgacctcgtcgtcgagtccctattcccgccggacctcgatatcttcgcaggccgctggaccccgccggggcgggtggttggatggccttcgtgcagtccgtcgtctccaacagtgacgacgaggaggacttcatcatcgactcccgccacggacaggctagctggctaggcggccgacggcgaacccctcccctgcccccgcagttcttccgcctgctggctggactcagttcggcccttaacaagagaacgaagaccatgccgatgcgtggcgtcgatttcaagtgcataagctccggggcgcacatccgcagccacaatctctccctgcagcataagctcgtcaaggctatcaaggatgctgggaacatcaaggatgtttttactcgggagatctggaggttggcgaacgcccggggagaaactattcaaggagaaactataatgtataaggagaaccggtgggacgcaaagcagctggtgggctccggcgggatgtcgtcctcgcactcggccaccgtcacagcactcgccgtcgccgttggcctgcaggaggggttcgccagctcgctatttgccaccgtcgccgtcttcgcctccgtgcttcctattgttatccagaccatcatcgtaaaccttcggctttgccaactctag

SEQ ID NO: 12186 - DNA, 249 bp, Zea mays
  Peptide Sequence Number=SeqID_55561
atgaagcagcataaggcgatgattgtcgccctgatcgtcatctgtatcaccgccgtagtggcggcgctggtaacgagaaaagacctctgtgaggttcacatccgaactggccagacggaggttgctgttttcacggcttacgaatccgagctgtcagggatactgtcccacgaatggccacctcgtttccgcctgaactactcgtccttttcgacgattctcgctgagcagtcgggttttactgattaa

SEQ ID NO: 12187 - DNA, 444 bp, Zea mays
  Peptide Sequence Number=SeqID_55562
atggcgcaccgccgtgtatttctggggttggcctcaccgtcggcgttggggacggagaagacgtccctgccgtttgatttgaacggacggatgcaatacatggatgataagaagaaacaacttaagacaaggtttcttgacccgttgatgatatcccaagctcgctacaaagaagttgctcgaagacatggagaagaatacaaagacttggacgatgctgaatttgagaaagccgtcaaacagaatcagagaaagaaaatgaaggatggtaaattcgtggtcttcgactcactgagaatggaaaaggctacgtataatgacttcttgaagattttagagaatgcataccgtttttattggaaagatcttggcggcgaacaaccagaggacaagcctaatttgtcaatatcattattcctctttcctatcgaagcaacctccagg

SEQ ID NO: 12188 - DNA, 174 bp, Zea mays
  Peptide Sequence Number=SeqID_55563
atgcccgcgttcccgaccatccagctcgctggagatcgcgccaggcctcctcgaggtccgccccgagacaacgagcaatccgagattcctgagtgtgttgttggagacctccctgagcaacaacctggtgaaggcaagagtcctctgacctattatgtcctacatactttatga

SEQ ID NO: 12189 - DNA, 348 bp, Zea mays
  Peptide Sequence Number=SeqID_55564
atgtaccccccttcatatcaggtaaaactcgtcgggtattcgagtttcgggtacccattgccatctctagatggggctgtcagtggcagagcgggcctacatccgatccatcgagcggaccgggctcgagggatcagacgactcggaggaggagaactccttgaggactccgaggaggagggcgacggcggcggcgacgatgggagcggctacgagggcagcgatgagggtggcggcggcggcaatggaggaaacacggacgacagcggtgtgggcggcgacgacgagagcggcgtcgacaaaggtggcggcgacgacaatgttggtggtggggcgccaccggcataa

SEQ ID NO: 12190 - DNA, 1098 bp, Zea mays
  Peptide Sequence Number=SeqID_55565
atgaaaatccttgaagccgaatggtggtggaaggatgccaacccccatcgggttgcacccctccaacggcagcaggaagaagacaagatcagcgacaccaccacgagcgcacgctctgcgccggtgaagtcaccggaagagacgaccttgacacggatccctccagagaacaccggcgcaccccatctggaggcccagaagatccccccactcgcgcccctgaagcgtcacgggggaagtctcccccagcgtacaccaaggatcccaccttatgacacgggggccaggccccacatgtcatacagaccaaccctaagaaggagcgtgcaactgccctacggttacgtgctcctccattttcggggcaaccagcggtcaggaaggagaaccgccgcgcaaggggcatgcaactgccccacggttaggtaccccttcgtcttcgccgcacccagcggtcaaagaggcgaaccgccgcgcaagaagcgtacaaccgtcctacagctgtgcgccccctcagctccgccgcaactggcggtccaacgcgggggcccaggcccacatgacatgccagtcagccgtggaataggcgctgcagttggcatggccataggcgggccgacagtgattgcagcaacaggcgtgcaggaggagcggtccaaccgccaatcagactctggtcccacctgcaggctcacatcctcccctgaggcaggaccgggggccactgtcggtaccctaaatcaggggggtccggtgctgacacgtgtctgggccatgccctccacgtcctgctcaggcggagacccgctgcttgtggcccatgacataagctatcgggccgaacctgacgcggtgtcaaggtcatccagcaggcggcgcgcctgctgggtctgctggcgaacagtaccactgtgccaggcagcacaatgtaatcaacatccctcctacaagaagcttcctctgtacgccaaggatacgcagatctcgagcgtcagggacgagaagattgtctcgacaacaggcattagtagctccaaggcgggtgcactccgccactcggccggagatttcctctccgacagtgacccaattgattaa

SEQ ID NO: 12191 - DNA, 669 bp, Zea mays
  Peptide Sequence Number=SeqID_55566
atgactaccggccttatggtggagagaagcgagccgggctgcggcctccccctgccttcagcttcaaggatgttcaccatccgcgctggggaggaggcattcgggggagaagggcgttcgtcgtcctcgcggaggaggcgaactctgggtacgctgggccggccgtctgtggcaccgtcagctgccgcgtgtctggctccccggcctgggctgctctggtgccgcctccggcgctgcctcctgccactggggcggagcgtggctgcctgtccaccgcatgggcgacggtcgcatcgtgcgcaggttggccacatccacggcttctcccgcgccaccagtcgcaccgggaggtcgtacaagacgtcgtacgccgtgcgggtggaggcggtgttcttggatggtcttgtcctcactcctgtagtgaggacgggagcgaagacctcttcgtgcgcgctggtgcagccgctgcccatcggtgcagaggtggtcgctgccactggtggggctgacgtggccgcttccgctggtgaggctgcccattgcagatgtggttgcctctgctggcgagaccgtcagtgccacctgccgctggacccctggctctttggctttaatggcctcgctgttaccccctgtaggaggacgggggcgaggacctattcgcagtag

SEQ ID NO: 12192 - DNA, 327 bp, Zea mays
  Peptide Sequence Number=SeqID_55567
atggaacccactcgtcagcctgttcgcccgttcggccgttcgctctcgctggcacgtgggccctacccattagacccctcctcctcctctggaactaccacgcccatggtgtgcgccctgtccgccagacccacgcccacgtctgcacgccctgcccacgtcgcccgaacactaggtaaagccgcgcacaccccttcacctcgcccctacctcactttcgtgtttcccccaccctcgcactcacctagctgcgaagctgtttccccctcgtcgttgcttcactattccaccgtcaccgctggacttatgccagcgctttggccatag

SEQ ID NO: 12193 - DNA, 909 bp, Zea mays
  Peptide Sequence Number=SeqID_55568
atggcgagggaaagcaaaccgggctacggcctctgcccctccctcagcctcaaggattttcatcatcagtgctggggaggggactgccgcgtgcctggctctcggacccgagtggcttcggagccgctcccggcgccaccttccgccacggcagctggaagaggttcttccgccgacgagatagccggggccacccacggaccgacctccaactctacggccttctgcccatccttgccacacgagtttgggcacgggcgagggcctcatggcagcagcatccgccctgaggtcatcgctgctgttgttcggccctccggagcagaagtcgtcgtcgtcgccgctgctggagcgggcgacggcgagccgttcgtcggtcttctgttgctccgcaggccccccaatcgagtggggttgttcgtacctggggaggagtccctcagctcggtcgaccttactgtccgaggcttctcttgcttagttaaaggaacccctcggccgctcttcgatgagccgaagccaggggtagcggtgtcagcacggacagaggcagaattggctcgaaaagaagacttggtcggtcggagcctggccggatcgtccgttagcgggaccgacgccggagttgacctgccgaggcctcgggccgggctgatgtcttcgggggatagctggccgaggcctcggggcgaccagccgagccgcctgctcgagccggattcttggagaagaccctggcggcgatggcccgggcatgatgatgatgttgtccttcagagtggagatcctcggactgcgtcgccgtccgaggctaggccggacctcgccgaaggtgtagttgacgccgtgggtgctgctgctcccttcaaccgtcaagatccgagcctgcaggatcggattatcttgtag

SEQ ID NO: 12194 - DNA, 2046 bp, Zea mays
  Peptide Sequence Number=SeqID_55569
atggacaaggatcgccagggagctgcacagaagcgccaggcggttgtcaggcttcatgaagccaggccgaagaggcagcgaggggctgcgaaggctgctgcccccggcggaggcaagccgccgctggcggcaaagtcggccgtccctgcgtctagcaaggcggcggaggctgcggctggcgccggtggttccaagtctgtgaagactgtgccgccgtccagcagggcgccggaggtcgcgaaggcggcccgagggttgccgtcgctgggcaagcgcgtcgccgacttcgccaccgatattagtgtggacgactatcttggtgggttggacgaaggccaacttgttattgttgcgcctgccgcggcgaccacggcggctgccgtagtgccgaaggcgaagggcggtgctcttagtgccggaggcgagatgccggcactcgctgctgtcagggacgaggcgggcgctgtgtcccgccggctgaaggagatgaaggaggcgctaagtcagagacttcggacgcaacatgctgacaccgtccgggaaaaatcggccgccgacagtaagtgccgcaagctggcggacaaggtggccgtgctggagggggaaaagactgacctccggcgccaattggtggaggagaggagggatgccaatgaggccctcgccaaggcgcaggctgcgctggcggaggccaatttggcacgggcggagggcagtcttgccaaggagcgcgccgcgcagttggaggagcggctcaacgccctacagagccgtgtggagaggactgaggccacggtgcgcgcggaggctgagcggacgcgcaaacagcttatggattcataccatgagctgggcgcgtggaccggtgacttcgaagtgccggaccgagagcccggacttcgctgcctggagtgggtacaggaggagttgcaggcactccccactattgtggaggggtttatgtcgtatgcctccctggtcacctgcgagggggcgatgaacgcgctctctcgcgaagggtgccggcactttgaggtcttcgaccaagctgatgaggattttgagcgagatatctacaaggttgaagaccctatagtgaaggagtccgccggagccatctacgaccggatgtggggcccgcacggtcgagaggtggtcagggagcgggccgagacggcgagggctcaggcggcgcgtggcgagagggtggatgatttcggggcgttgaacagcgtgctgcctgacccggagtcgaacccggcggaggccgtgtccgaggtcgccctggagccgcccccggagactgccgaaggcgctcctgatgcccccgcagccgctgcggccggcggaggcccgcccccagagaccgccggaggcgctcctgatgcccccgcagccgctgcgctgagggctgaagatcctgcgacggtggcggcggaggcgccagcggaggctcccgcgacggctgggtcttcgcaggttcaagattttgggcctgtgcacgcaaccgccactactaattttttggcggcttcgaccgtggatggtggtaataaatatgatgggtctgcatctgagttttctgattttgctgactctgggagctcggttgagtggactgaggagtcgtcggaggaggacttggactattttgcggccttggatgtggcagcggcggaggcttcaccgcacgctacggacacagaagatgtgcctggtccgagtactgggcgcaggcggcgaagggcggttgcgaagcgtagagtgagcggggcggagggcggtcggcttcgtgcttgtatgatgaagttgtgtgccctcgcacatttggctatgctcgcggaggcgttacgtgcttggtcaggtgtatttgttacgctggactggtgtgtatatagtcggtcttggcgcggaaagtttggtgtggtcgtttttgcttttgttacgcctcgtccggctgtgccctcgggcaacttctgcgcggacagtttttgcagtggacttcggtttttcgcacttgctgtgctagtccggctgcacccttag

SEQ ID NO: 12195 - DNA, 354 bp, Zea mays
  Peptide Sequence Number=SeqID_55570
atggctcgtattagatgcactgcacgtaagttagtgatcccctttttgccctctcgcctggcggagcgcccactgcgccgcacggtgataggtcagtccagccacctggagagactgcatcgtcgcctgcatgaggagcaggagcgccgacgccaggagcaggagcagcaggactcttccccctcgcctcagcaggaggtggagtctgggaggcagccttcccctgcacctcagccagagatgccccctgcatcaccacagggcatccccgctgctggaggagaccctgacgacgacgacgacgatgacgccagtggcagtttgagccacaacacggagcttttggaggagtag

SEQ ID NO: 12196 - DNA, 717 bp, Zea mays
  Peptide Sequence Number=SeqID_55571
cagagcagagtgccagtgagtgcgcagtgcatgttcgccatgtcaagcgccggctgcaaggcggagcctggattgttggcgaagcaggggagcaagctccacgccaagatgctctccaaggaggcggcggcgcagctcgccgtgccgtcgttccgggtgtactactccatggcgtcggccggcgcggtgccgttcctgtgggagtcgcagccgggcacgcccaagaacgactcgccctccgcggccgtgcttccgccgctcaccccgccgccgtcctactatgccgcaggcaggggaagcgccggcggccgctccaggaaccgtcggcatggcggcctccttggcgtcgtgctcccccgcatcaccctcctccggaggcccggcggcagccaggcgacgccgccgtgctcctcctcctcctcctcctggtcttcctcgagttccaacacgtcgtccaccatgtcgcccgtgttcaccgtacagtcgtcgcccgccgtgcacgtgggggcttcctgccgccaccacaggcctgcgttctcggccggcggcgccgacgacgtcgcggaggccacgccgcggtgcttctggaccgagcgtgagtgctgcgagaggcgggtggtcagggggtgtggcgtcgcggtggccgtcaggaacgcgcttgccacggtcgtcggcggcaagaccagcaggcgagctgccaccagcgccgcagtatag

SEQ ID NO: 12197 - DNA, 423 bp, Zea mays
  Peptide Sequence Number=SeqID_55572
atggcgcttgggattggccgctgggcgcctgcctgggcggctgggcgtgcgcggtgcatggccgctagcatgcatggccgctggccgctgggaccgctggagtcgctggacgccgtgcctgggagtgggcgcgtggccgcaggaccgctggacgccacgcctgggagtgggcgtgcgcggtgcatggccgctggtggcggctggcggagaagacgagcggcggccgacgccttgggagtcgaggcgagaattggagacgggctgacgcgtgggaaaacgagaatcttgagcgtgcacatgaagaacattggtagggctgagaagaccgaacattggcctcttggagttgatgtctggttaattgatgatccagttgtttcttcaggctcttggagaatcagttctgatgggtgcagtttataa

SEQ ID NO: 12198 - DNA, 495 bp, Zea mays
  Peptide Sequence Number=SeqID_55573
atgggggtttggagaatgcttgaggactcaatatcttcaaagataagtacatatgcaagattggagatgccagaagatcacgccaccctgacactgatacgcggtagctgtgttacttcaggcatcgccgtctatcgcggacggaactgcgtgcagtgcaagctatccgaggcaggcatcaggagccgttatgctccgcgcccgcctctctgtctatcggcggttgtgataacgcggagcagagcagttacgctcatcattgccgtgtggtggtggtcaatcggtcccatgatgatgatctcagcgcaggaactaggcagcgttggggcggcagcacatgggcctggctcagagtcacagctgctgctgctccacggccagctgccgatgcatcagcgtccacgtctcagcgggggtcagctggccagaaggcatatgattaaggttaaatggcctttcttgcagcaagttctaagaatgaagggggttcggtaa

SEQ ID NO: 12199 - DNA, 816 bp, Zea mays
  Peptide Sequence Number=SeqID_55574
atggcatctgggctctggcctcgtggggttgggaggagagaggacagcagcagcagcagccagcagcacccgcatgacagcatgccaactcgtggatttgagtatagcagtggtgtctggttggtgtcccttcaccggtttaaagggagatgtttggggaggaaaaagagcatcccaatagggagcctgtttctctgcctgcccatagtggacatgcttggttttgttcccctctcgctatgcagtgatccaagcgcagaagatgtccttgggatcgagggcgtccaccggcttcaccgtggctccgccctcgccctcccccgcgccaatctcgcccccggcatcctcgcctccgcctcgctcttcgtgaatggaaggcgccattcagggatcctccgtgtccgcctccgcggctccaccatcttcaagctcgctacgctcaaactcgatggaaagcgcaattccatgccctcgccaccttgccggaaatccagggctgccatgcccccatcctcgcctcgccccgcccgtcataggcgtctcttccccgcccgcaagatgcccgtcgtagtccccgtcctactcccttcctacgagagacaaatggaggaaaggcacgcgcggaattccctactccctctctgccatttgtggcatcgtcgtgctcctcagcgtcatcgccttctcctactccctcgccgcggaattctgcaaggtcaagctgctgcaaggtccgctggacggcagcctctgctcgctccccaggagcttcgcgtagctgctggaaggtccaggggaagctggaccgagcgatag

SEQ ID NO: 12200 - DNA, 180 bp, Zea mays
  Peptide Sequence Number=SeqID_55575
atggtgtacttcatgaagacattcatgggaatggtgacatcaaaagatgatatcgttgggtttgaggctcctcagctggaggacacaacacgagtggtccccggccagatttcgacaacagtatcagcatgtgagctcagatcgtgtgactacgcgtgcagcttggaccgatactcctag

SEQ ID NO: 12201 - DNA, 279 bp, Zea mays
  Peptide Sequence Number=SeqID_55576
atggcctggcactggcaggctcggctcggctcgcgcggcgcgccaggtgcgccgttgctcccagcagctcgccgccacctggagagcgccgccgtcggcgtcgggtgcgtaaatgcggctgaacgccctggcgagaacgtcgaacatcccgagccgtctacattacggcagctgcaggcgcaggggccatgtgtacggcggcagcaccagcacaagcacgctcaccggggttcaggcggccgcccaccttacccctcggagccggctcttaggctctag

SEQ ID NO: 12202 - DNA, 582 bp, Zea mays
  Peptide Sequence Number=SeqID_55577
atgacatgtggaccattccgagtacggtgcgacgaggcaaggcaaaaagaaaagaagaagaaaagcagatgctcgaggtcgattgatataattcttgaggatcccttggacctgtggttagcggctaacccccttaacaggagcgtcgatatgcacttggtgaagatgatgttgactctgatcttgactgatttggaggagttggaggttgccaaatggacaggtgcaagaggaaagggtagcgaaaaaagaggaaaagggaatgaccaagagcgggtaggtaagacaacactcttgaactggaacgagggaggggctttaaaatgcagtgacgggataagcatcaaggagcgaaaagatatcaagggagagataggtaactcgcagctctcaaactgggttgaaagaaaggggaggcttttaaaggataagttcaaggtaagcataaaaaaagatgagagtatgaaagatttcaaggaggtgagcataccaataccaagagacaagaaattgccgaaagatagcgacttaacaacagaagaggaaagggtctcaaaagacaggaagatcatggacatataa

SEQ ID NO: 12203 - DNA, 2171 bp, Zea mays
  Peptide Sequence Number=SeqID_55578
atgagggggttgctggcctcagtgatctccttggactttttcctgctgtcgagcaagctaaaatctgtgtgcgcggctatgacttcccagaggcatagccgatcacaggagaggtcaaaatcaaaggggttgacctgcaggagagttgcagtccatctgctgttctttttcatggttggcattttcattgggttcatgcctttgttctctgtcgatgtttacaagaaaatagtatccgaaaacgagaggcttccgttccatgatggtgtgattgaggtggaaatgatgggcaccaaagttaaggagttggagacagttgtagtagagaaagaggtcgaactgattgacgagcctcaggttcaagagagccctccagttcctgcaatgttggatgatgaggcagattttgctgaatcttcacctgcattacctgctattgaagaatctgacattcctgtgaagaagctgctgataatcgtgacgatcacttctgttcggccacaacaggcatattacttgaatcggctagcccatgttttgaaagctgtacaggcacctcttttatggttggtggtggaatggcctgaacagtcctatgaaacagcagaaattctgaggtcttctggggttatgtacaggcatcttatatgtagaaagaataccacgagtgtacgaaagattgctgtatgtcaaaggaataatgcaatctatcatgtcaaaaggcatcaccttgatggtataatgcattttgctgatgaagagcggtcatactcagctgatgtatttgaagaaatgcagaagatcagccaatctacaccgtccatctatatgcgtcaaatcatcaccgtccgtccgtcgcctccgcttcaagcctccgacaccgtcgtcgcgcctggctccccctcctcctcgccccactccccctggacgcacgccacggtgtccctgccccgctcgcgatgcatcccccgaaaccctaggccttccgcgatgaggagtcgcctcctcctccctccgtcgtggcgttctcgggcgccgcctccgcgtcaacgccatcgccgagatcgacctctaccgcctcgagccccacatgcgcagccgccgccgcgggagaggtgccccacgcctcggccttcaacgacgaggagctcgtctcctcctatctccgtcaccgcattctcggctgtcgcctccgcgtcgacgccatcgccgagatcgacctctaccatctcgagccctaggacctcccctccctcttccacatccgcagtcacaacgccaatgggtagttcttcgcccgtgcggtcgaggcggtcccagcaacaggaccaaccacgcacactcgcatctcgctccttgatgttaccagggaaggaccacgacgtccacgccgacgcgcacctctacaacgcgctaatgaaggcgaacgtcgcggcggacgaccccggtgccgtcctcagggtgttccggcaggtttcagttactggtacattcttggtgaataaagaacatgtggaaagtcacaggtggtcatgtatgtttggggatgttgaagtaccagctgaggttttgaccgatggcacgctacgctgctatgcaccagcacaccaatcaggaagagttccattttatgtgacctgttcaaacatggtggcttgtagtgaagtgcgagaatttgagtatcgtgattctgaagctcattacatggagacttctcgttcccaagccaatggtgtaaatgaaatgcatctacacattcgtcttgagaagctactcactttggggccagatgaccatcaaatgcttgctataaattccttaatgcttgatgggaaatggtcaaatcaagaatcttctgtcaaggaagtagtttccactgctagggtccaaagtttaaagaaactggtgaaagagaagctgcatcaatggctcatctgcaaacactggggttatgattgggctataagaccgataataattgctggtgtcaatgtgaacttccgggatgctcatggatggactacactccactgggttgcgtctttgggaagagtcgaaggacttccccaacaccctttcctccatcggcgcgacatcggccagctcatctgcgacgatgaggcatcttcgaccgacttcccaacaccccatcctccatcaatgcggctcca

SEQ ID NO: 12204 - DNA, 255 bp, Zea mays
  Peptide Sequence Number=SeqID_55579
atgacgctgaagcagatccgcgggcgcttctcctggttggtaggaggaatggaccaagtcaacaaattgtcgttcaagattgagttcagccgagatttattcatgcccggttgtgcgccattggcaaaaatctcctccaagctagtgtccaactgcctgttccgaatgggcggcgccgtggtgctgctctcgaaccggtggtccgaccggcggcgggccaagtacgagctggtgcacacggtgtcactacattaa

SEQ ID NO: 12205 - DNA, 612 bp, Zea mays
  Peptide Sequence Number=SeqID_55580
atggcagagcggcgacggaaggtcgacggcggcaagatgggcgtggcggtcttcggggcgcggtgcaccctgcggtatgagatggacctgcagttcttcaacatccctggcaacagcaagatgctgtccctacgtggcagaaggaccagtgttgatattggtaaatcatgcgcaaatgggtgtgctggaatgatggagaacaatagggaacataaaattgctcttgttgctactggattagctactggaatcgcttcagcctgctggattggaccccgttgtgttcttccgatgatcaatcagtcaatcacaaattcaaaccatacaaatcaactcaatatccagcatgcttctggaagtgtgttcaaggggtggagtgaggagaagatatattttgctcccacttacaactactcttgcaactcagattcttatgctggagagactgccacatcaaagaaaaagaggagaaccccagcctggtgtgatagaatactatggcatggagatggtattgcacagttgtcctacttccggggggaatctcaattctctgaccatcgtcctgtttgtgggacatttactgttgaggttaaaaggctagatggctaa

SEQ ID NO: 12206 - DNA, 639 bp, Zea mays
  Peptide Sequence Number=SeqID_55581
atgggaggaattttgtttgagcttgtgggcccaattcatatcagtcgcgaccctgggactatcccacgtcctgcggcgagcttgcagcgctgctgcgcctcggatacgcggacaagtcactacttgggactatttacacccctaaaagggaaacacacagatgaagttgctaaatccaagcaatcaattgtctccacaaaaacaaagaagaaacttcagagattgccagatgggtgccatcctgattttgataatgatcatctgtgttctgtaaataatcatgacctgcttcctgaaataagtactccaagtgttgaccttcatctacttcctgagacaggagtggaaaacatgaggacacctaaaagtcttcacgccgaacttaagcatgagctgttaaagctaaatacggtgttaaagctaccagataatgtactctttctggccaaccagttccttgaatatcttttaaataatcatttagttgtgcgggagccacggagcatactgcatgcgttcaacatagccttgtgttggcgtgctgcttcttttctgaaatacactgagttgaatcgtcgagaatcacttgcccttgcttcagatggattgaattatgaatgcaatgaggctccatcatag

SEQ ID NO: 12207 - DNA, 870 bp, Zea mays
  Peptide Sequence Number=SeqID_55582
atgcagttcttaccctttcgttgtgttactcaggtggagcatcttcaaacaagaacaaccgggtacggttcctcaaatcctctgtttggtggagcatcttcaaacaagaacaaccggatctttttcttccttcatgccattccagggatgcttctagctctggtactcttttttgataacaggaagttcaaggatgtgaattttccaccagctatgtctcccccaaaacggtgggatcatgtgtgctgcactagatgctgggatcttgtcttagtctcctcaacagccttactgtacctggtgatgtccatgtcaactgggctagccaacatgagtttgaaacataacagcattctcactgggcttctgtccttcatgatggacgatgcactgacaactggaagcatcaagacatcagatgcagaaaagaggcgtttagcaaaagcttcccttgcctacaattgtgagagcaaaaactgtccgcacttcaggaaacttttcccagagtatgttgagaagtacaatcaacagctacaattggagaacactgctgcagagccggtgcctcaggagaatcctgcacctgctccatcccctgctgcccagcaagccccgaccgtggccaatagggcacaaccactggcggaggcgcgccgtgacaagaaccagaagaaggcggtgcccttctggatggtgctgagtgcaaagacaaacctgaacgtcgagcaggttttcttttctatagcaagggatatcaaacagagactttcagagactgattccaagcctgaggatcgaactatcaagatcaaggctgaaggggaagctgatgcagcagaggcgcagaaatcagcttgctgcgactcttga

SEQ ID NO: 12208 - DNA, 297 bp, Zea mays
  Peptide Sequence Number=SeqID_55583
atggcgcttcctgttgacatggctggcctacgccctaggtcgggcggcgtggaggctcctccgaagctgaggtcgagtctgtcttccatggccgaggccgagtccgagcccctgggttgggcgaggcggaggtcgttcggcaaaggccagggcagagtccgagccctggggtcgggcgaagcggacccaagtccgagccctgggtcgggcggagcggagttcgccgtcttccgggacctagcccgagtccgagccctgggtcgggcggagcggagttcgccgtcttccgggacttag

SEQ ID NO: 12209 - DNA, 687 bp, Zea mays
  Peptide Sequence Number=SeqID_55584
atgcaggcggcatgcaaccgcgccaagtggacgcgcttccccgactcccaacgtgcccagcctggaggcccaggcccacgcgtcacgcaaccggcgcgccggatgctgcatgcaagcaactgcaccgccacttgcgccaccaccgcgcctcttcggttgcggaaccaataccgcgactcgaggcgacccagcgcacgacccagcagcgccagtctggcgcgacggtcaatgcagccgaaaggactgggaaagggggataccccgaaaaggatccttccccgtgaaggaaccgggctccgagcctccctactgatcagaggttcgaaggctggccccccgaggggttcaacagccgcctcagatcgcgtgggccctacacccactactggtcagagccgcctcagacgccgagcgagggatgaccaggggtacgttcgatacataaccaaggctcgggctgcgctcccgagctcaccggagacaccatgttcggcgcccatcgagggtaacatggcgctttcccccctcctccttgcggaaaggcgacgcaggggcaaggacagcgccgcctgcgccactccgactgcagtgccccttgacagagtgagactgacaggcagtcaggccctgccaaaggcaccacaggaaactccgctccgcccgacccagggctcggactcgggctaa

SEQ ID NO: 12210 - DNA, 382 bp, Zea mays
  Peptide Sequence Number=SeqID_55585
atggcaacacctggggtgttacatatgaaggccagggcgaaaccgtttccagcacaccgcccggaccggacgcgggattcaaaaagcgcgaagcggaacagccgttcctcgaacggctcgcgcacgcgtaacggccgccccgccaaccactcgccccgtcgcattaactccacggcgggacaggcggcgcctctggcaggagaagcggacgacgcttcgccttcgccggaccgggaaagggggataccccgaaaaggatccttctccgcgaaggaaccgggctccgagccccccccccctctactgatcaggggttcgaagactggccctccgaagggttcaacagtcccctcagatcgcgtgggcccgacacccactactg

SEQ ID NO: 12211 - DNA, 193 bp, Zea mays
  Peptide Sequence Number=SeqID_55586
aaaagcgctagtgcttttggcaaccaaaccccacagccaaacagctgcatgtctagaggtagaggggtatagactcctcacaccgggttctctggaggagatggttgctgggataacttggccgaccaccctgccaccgggttggactgtcgagtgggaccctgcctcggctgaggaggagcatgaggagtga

SEQ ID NO: 12212 - DNA, 171 bp, Zea mays
  Peptide Sequence Number=SeqID_55587
atgccgtcaatggggctcggtgtatgcggctcgctctgccaaggtgacaatgagattgatggttctgattacgattatggtattggttgtcagcattgcaaccactgctcaggcgaagatgaagctgtggaaggagacttccaggagttccaagactacgacgagttctag

SEQ ID NO: 12213 - DNA, 261 bp, Zea mays
  Peptide Sequence Number=SeqID_55588
atggcgttgcaatcgttttgcgtctgcactgttgtccaggttgccgcggaagatcgtgctccgttcaatttgacagtggtgaccgatggggagctcggacttcgatgggcgctttctgtcaatgccgccgccgtggcctgcttggtcacctggtccgcgccgccgtctgagggttatgagggagaagacgataccaggcagtgtgggccatcagatcgtgaatgggtggtcacgattaaatcgcgatacctcttcacttga

SEQ ID NO: 12214 - DNA, 132 bp, Zea mays
  Peptide Sequence Number=SeqID_55589
atggaggcaagaagagctttgaggtaccaagtgcacgggagaaggtcaaagaggctgaggaacccaaagccaagggtgaagaagaagacttgcaaagtcaagggatgttggagctcagaaatgtcagtctag

SEQ ID NO: 12215 - DNA, 168 bp, Zea mays
  Peptide Sequence Number=SeqID_55590
atggcgtgggggaacgacggcgagaaaagggtggtaggagtgggcgaggctgaggggttcgctatttatggacgagttggtgcggtgtcgtggcccgctagtcccggcgaggatcacggcgaggccggaccgccaaccagtgacgctaacccgaacgcgcgtgcgtga

SEQ ID NO: 12216 - DNA, 57 bp, Zea mays
  Peptide Sequence Number=SeqID_55591
atgccgcagaactatggagcgtgtgggcagagccctgtgtcgagccgcagccggtga

SEQ ID NO: 12217 - DNA, 303 bp, Zea mays
  Peptide Sequence Number=SeqID_55592
atgcgccaggaaaagagggtgcaacagcatcaagcaccactgccaccaccaccaccacttccaccccgggacaagaactgggagttcatgagccacaagccgcctaccttcgccagctcaccagatccactgcatgctgacgattggctgaacgagactcaggtgcgtagctcggagacaactgatcaggccaaggatggaggcaagaagagcttcgaggtaccaagtgcacgggagaaggtcaaagaggctgaggaacccaaagccaagggtgaagaagaagacttgcaaagtcaagggtga

SEQ ID NO: 12218 - DNA, 174 bp, Zea mays
  Peptide Sequence Number=SeqID_55593
atggagcccctagactgcagatggcatgtcttgggtctcgggtatgatgtagacatagatgatcgtatgattgagagtgctgctgttgtgcactataatggaaacatgaaaccctggctgaagttggctattcgccgttacaagtatatatgggagcggaaatgcaaattgtga

SEQ ID NO: 12219 - DNA, 321 bp, Zea mays
  Peptide Sequence Number=SeqID_55594
atgacgcttgtaccgttcccaagcagggccgccgccgccccagatgttgacctccaccagaggctgtgctcttcgtctgcagcgtcgagcacgagcctgtcgatatggtggcggaagaaggagatgggcaaggagggcctcatggcggtggcgctgctcaagcggctcgcagctctgcccccggtggggtgtcacccgcgcctggagcagttcatgcgttcgcacgtgtcgcagctcctccgtaccgacctcctcgccgagctcctccgccagggaccatgccagcctctcaatgaaggtttaacactcctatcccaataa

SEQ ID NO: 12220 - DNA, 1239 bp, Zea mays
  Peptide Sequence Number=SeqID_55595
atgtcttcgcgctcccttatgcatcgtgtctttccaccttccgagcccccggatggggaacacccgcaatccttccgccttgtcgttggaggaacgcaacttcgtggaagttggtacctttcagccatcgttcggcttcaaggattttcatcacgcggcccggctgcaccccctcgccggcggtcacccaagacggtgaccaccagcccctgggtggggagaagcaagccgggctgcgatcttggtcccgccctcagcttcaaggatgttcatcatcctcgctggggcggaggccgggctgagccggagctctacctcccgctcgggttcgtgggtcagcctctccttcagcattcaagggagagggcgctcactggccctgcgagaggggcggacttcgacaacgcggggctggtcgacggcgggcgtcgtcagcttcagcgtgttgggctcgacggcttggctctcggtgccccctcctgccgcaagggtggttgttgcgccgcgcgcacgggaggaccgcccaagacatcgcacgctgctagggcggcgttcgtgttctggggcggtcctgcctttgcaccggtacggcgcctccgcgcggagttaaaaggaacccctcggccgctcttcgatgagccgaagccaggggtagcggtgtcagctcgaacagaggcagagttggctcgaaaagaagactcggtcggccggagcccggccgggtcgtccactggcgggaccgacgccggaattgagttgccgaggccccgggccgggctgatgtcttcgggggacagccggccgaggcctcggggtgaccgaccgagccgtctgctcgagctggattcctggagaagaccctggcggcgaaggcctgggcgtggtgatgatgtcgtccttcggagtggagattctccgactgcttcgccgtccgaggctaggtcggacctcgccgaaggtgtagttgacgccgagggtgctgctgctcccttcaactgtcaagacccaagcctgcaggatcggattattcttgtagcagttgtctgtgcgagcgagagttgcttttcacggaaggtgatgagtgagggttctatcatcgacgtagtcgagaaggcccgaagaatcgcttcggcagaggagctttcgagcgtgaagacttgtccggtccgcggaatcacttatccgaacgcgagttacttatcgcagaaggtgatgagtgaggatccactttcgaagtag

SEQ ID NO: 12221 - DNA, 567 bp, Zea mays
  Peptide Sequence Number=SeqID_55596
atggcgcacgcattgaggcggccatcaccgctgtcacgccgtcttggaggattccgcaaggacagcggccgcgaacttccaacgcaactccgctggcgtctagtagtttatacctgcagagtagagatggaactaggattccgcttgaaagcggatgtaatactcttgctttttgtaaggcttacggtacgggaccaggctaagcggctacactgcttcggaccactccatggaacgagctcctgttctttggaactggcccccaggctgtcggacctcccagctttcgtaaaggaggtcctaaactgcaagcctggctgctcaattcggatgtcgtcatgtcaggacagatgggaactgcgcgggtggaccaacaggccgggtttatggggacagacctcactgggttggcgtacacgactaggtcccgaccctgggttcccatctacgtttgacgagggagccctcgtcttcggctgtggccatttccgcatgaacctgtcggaagtctggacccgtggggagtccagaagggtttccgggggaaggcaggctttggccccgtag

SEQ ID NO: 12222 - DNA, 522 bp, Zea mays
  Peptide Sequence Number=SeqID_55597
atgggcgagtctcccccaatgcacaccaaggcacccagcctatggcatgggggcccgaccttgcgtgactcgcacaaggagcgtgcaaccgccctgcggttatacgcccttccatcttcaccgcaaccagcggtcaagaaggcgaaccgccacacaaggaacgtgcaaccgccctgcggttatacgccctttcatctccgccgcaaccagcggtcaaggaggcgaaccgccatacaaggagcatgcaaccgccccgcggttgcgcgcccccttagcttcgctgcaaccgatggaaagttgcaccgccgctcgcgccaataccgcgcctcctcgaggccgtcgcagaagacaaagaagataaattttcaaaaccaatgcagcgacttgaggcaccccgcgcatggcccaacaaagacattaagtacggaggtcacgggccagtcagccgcaggggcaggcgtggcagtcagcaagaccaaaggcgggccggcagtaactacatcaacgggcgtgcaggagtag

SEQ ID NO: 12223 - DNA, 552 bp, Zea mays
  Peptide Sequence Number=SeqID_55598
atggggccgaagcctgccttcccccgaaaacccttctggactccctacgggtccagacttccgacaggttcatgcagaaatggccacagccgaagacgagggctccctcgtcaaatgcagatgggaacccagggtcgggacctagtcctacgacaagtaccaaaccaaaaagggctccgcaactctcccccagctgggaaggacccttcaagtactcaaaagtaccttacaaaaagcaaaagtattacatccgccttcaagtggaatcctagttccatctctactctgcagatgaccactggcgggagagtgcagctgggctgcatgatgaaaatccttgaagccgagcgatggcagaagagcgccaacccccatgtggtcgcgctcctccaacagcagcaagaagaagacaagatcgatagcaccaccgcacaggaaacgaagagcacaagctccccggcggtgagaccgctgggggatggccctgacgcggatccctccagcgaacaccggagcacaaggagcgtggtgaaagcaagaggagcgtggtga

SEQ ID NO: 12224 - DNA, 1042 bp, Zea mays
  Peptide Sequence Number=SeqID_55599
actaacccttactgatttgattccttgttcttgcatcgacgcatcctatcagcaaatagctgtccgcgagactaagccaatggtcgagactgctgtcaaacaggtgtacgcagctctcctccccagaaccatggtcgtggccgacctcggatgctctgcagggccgaacacgctgctcttcatctctagcgtcctgagcagcatcgctgctgcggctgctgctgaacggtgcaagccgccgagcggcggcggagacgatgacgaccatcacgtggagcttcagttcgtcctgaacgacctccccggcaacgacttcaaccacctgtttcggtcagtcgaggaggagttcagaagggcagcaggttgtgaaaggggtcctcctcctcctccctactatgtcatggggctaccggagtcctattacaacaggctgtttcctcgtcagagtgtgcatctgttccactcctcctactgcctccactggcgctcccaggaacctgagggactagaggcgtggagaaaaccttgtctaaacgaggacaacatctacatcgcaaggacgacggcaccttcggtggcgaaactgttccaggagcagttccagaaggacttctccctcttcctcaagctgcgccatgaagaactcgtgcatggagggcggatggtccttatatttctcggcaggaagaacgaggatgtgtacagtggcgacctcaaccagctcttcgcactggtcgcaacagcgttgcagtctcttgtttcgaagagcggtctgttcagcatggatctgatcaaacagttcgagacgaactgggaccctctcgacgactcggagggtggcgacgtcgtcgaggacagtgctcgcagtagcatgaatgtcgccaagttcatcagacccgcgctgaagtcttcaattgtctaccattttggagaagccataattgacgcatggtttgccgagttcaggcgccttgtcgctgagcaccttgagaaggagaagaccaagttcaccaccttcgccatgtgcttgaagaaagaataa

SEQ ID NO: 12225 - DNA, 2169 bp, Zea mays
  Peptide Sequence Number=SeqID_55600
atgcagaaactcaatgttagatgcaaccctcaggatgttattataaccattaagatattgaatgagagacaacgacaagccgttgctagaaaaggattttccaatattcttgacatgacacttgatgcactaggtagccgttctcatcttcgttggttgatggataagttggaccacaaggatatgactattcgccccggtcaaggcaaggaactaaagattacgaaagaaactgtccaccttatactaggccttccgaatgatggcggtggtaagccactaggaatcgatgaagcagtggcgggcaataacttgagggctgaacttggattgtctaagaatgagttcgttgttgcatctcttcatgaccgattgagaaaaggaaacgatgatgacctctctatcagatgcttctttttgatattgttcaatagattgttgttccccacttccagctggggcatatctaaccatgaagtgttattgacggaagaaatggaccgtttccatgagacagactggtgccacttaatttttaacgacctatgcgaagctgcacaaaagtggcatacaagaagcacttctaatgtgtccacgacgatatatggatgctcagttgtcatactaccccccaataaacgtggcacaccccgcataaaattctttgataaaaacattatccaagctctgacaaaagctgataagaggaagccacgccaaagcggtgaaccttttggctattgtgagttccgaagcacttctgaaacttgttattctgctgtccctagtgtccagtttcaatcagagcatagggacaggacaaacatttttgatgtccctcgtcctgatccttgtggtcatcatactattcatatccagctcccattggtcaaggatatgctttcaagtaagatcaagcagctccaaccacgtgaccggccaaaattcattgaaaagtttgttgagtatgattctgaagttggcaaagcgtgttccatcataaaaagtactcttaccaagatggttgcgaagcagtatgaactagcggacacatttgctgagttaattgatgatgtccttcgcgcggagtctggcgacccagacaatgttgcggaagcgcctcaaacagctaaacctccagatatatctcaacatatgtcgtcagaggcacacatccataagggtacccagaatactcaggacctgattatgccatattcacaaccgaatacggagttgacaggtacccagtttgaggaaatacacgaaaagcaacaacaaatgcgtcgtgcatttgagggctgccctgacgatttggagacgaacacaaactcaaacgcgaaaaagcagggaggtgacattgatgcatctcatgacactccaacttacatgggccctttttttgatcaggcacctagtggtcatgttgcatatggtgaggaaacacatagcttgcacactacacatgaccactctctgccacgtttaacagaattggactgtgctcggtcgctccgtgattttttgtgctcctcaaaacccaacccaaacaggaagatcatagaactcggtgaatgtattggaaattgtctcgatattcaacaatcatttgcagacgggatgtgtctggataatgtgttcatgcagtgtttcatcctgtgttttcgcgatgaagaaataaataattgctcgtccatcaacaaaaacagacttgtactggatgtcaatgttggtactctcctcaattttgaggagcatgaacgctacaacaagtctcctcagatttttgatcaaactgtccttgatgcttatctggacaagacactgccccagctggacaactttgttgactgcaaaacgatcatggtccctatacttcatatgggacattggacattgtatgtcatcaatatccagtttcgatgcattcacattttagattcaaatccatatggtctggagttgggtgctggatctaatgactgtggcttctttgtcatgagatacatccagtactatgactatatggatggttctatcaagcaatatatacaacgagaaaactctggcgacctacgatctctggctctatattacctcaccttccatagcaagaacaagtgcctctcgttgcctccagaaattcaaagattcatgtttgcacgctag

SEQ ID NO: 12226 - DNA, 330 bp, Zea mays
  Peptide Sequence Number=SeqID_55601
atggctttgttcagccaaagacagctcggtctgggtgcaccggactgtccggtggtgcactggacagtgtccggtggtgtaccggacagtgtccgatggtgcaccgaacagtgtccggtgcgccaggccggtgactgtcaactggctgctctcgggaagcaattaacggcgtacgactataactcaccggactgtccgtgcttcattgtgattcttattgtaagggcgagagactccaactgtggagattcctcgcaaacgggaaagagaaaagtaaagaagaacaccgtggtattcaagttgatcattggatcgcttgagaggagttga

SEQ ID NO: 12227 - DNA, 693 bp, Zea mays
  Peptide Sequence Number=SeqID_55602
atgcctcataatatctgcaaagaagggctacgctccgataccagctgtgacggaacctcccaagtaattaggcccacctacagttgtccttgtccaacggacctcagacaaccctggccggacgagggccagcttgctatagctgcgcctggcgcggcgatcgcgacggccgtcatagtgccgaaggcgaggggcgaggcgcttggcgccggaggcgaggtgtcggccctcgcgttggtcagggacgaggcgggcgtggcgacccgccggctgaagggagtgacggaggcgctgagtcaggcgacggaggcgctgagtcaggtggctgacttcgccagccgtactgcatcgggggccctcacggcagctgtgtccgccgaagtcgagagacttcggacacaacatgctgacgctgtccgtgagaaatcggcctccgacagcaagtgccgtaagctgacggacagggtggccgccctggagagggagaaggccgacctccggcgccaactggcggcggagaggagggaggcaaacgaggccatcgctaaagagcaggctgcgcaggcggaggccaaactggcgcgggcggagggcaatcttgccaaggagctcgccgaacatctgcaagagcggattaccgccctggagagccgcacgaaggggaccgaggcccgcgatgcgtgcggaggctga

SEQ ID NO: 12228 - DNA, 1008 bp, Zea mays
  Peptide Sequence Number=SeqID_55603
atgaacgcactctcccgcgaagggtgccggcacttcgaggtcttcgaccaggcagatgaagattttgagcgagatgtctataaggtcgaagaccccgttgtgaaggaatctgccggggccctctacgaccggatgtggggtctgcatggttgtgaggtggtcagggagcgggccgagactgcgagggctcaggcggagcgcggcgagcgggtggacgacttcggggctctgaacagcgcgctgccagacccggagccgacccttgcggaggctgtgactggggtcgccctggagccaaccccggagaccgcagcgatcgcgacggctgcctccacatccgctgcggccggcgaagacctgcccccgaaggtggccgaaggcgcccctgatgcccccgcagctgctgtgccgagtgctgaagatcccgcggcggtggcggcggaaacaaaggcggaggcagcggcggaaccaacggcggagccaacggcggaggctcccgcagcgtcagggccttcgcaggttcaagattttgggcctgcgcacgcaaccgctactactgagtttttggcggcttcgaccgcggaaggtgggaatgaatatggtgggtttacatctgagttttttgattttaccgactccgggagctcggttgagtggactgaggagtcgtcggaggaggacttggattattttgcggccttggacgtggctgcggcggaggcttcgccacacgccgcggacgcgccagacgtgccaggccctagcaccgggcgccgccgacgaagggcggttgcaaaacgtagggttagcgcggaggagggggctcggcttcgtttcggctgcgcccttaggcggcttctgcgcggagtctttgcgatagacttcgggttttttcgcacttgttgtgctagtccggctgcacccttaggcgacttctgcgcggatagtcttcgcgatagacatcggattttttcgcacttgttgtgcttagtccggctgcacccttag

SEQ ID NO: 12229 - DNA, 1092 bp, Zea mays
  Peptide Sequence Number=SeqID_55604
atggtcatccgtagggatgatcatcagccttgcggtggggagaagcaagccgggctgcggcctctgccccgccctcagcttcaaggatcttcatcatctgggctgggacggagggcggggcgagttggggcctacctccgcgtgggccggcaacccgcttcttcctccggcattcgggagagaaaggcatcctccagctctgcggaggaggcgtcctccagccatgcaggggaaggcgaactgctgctgccgggccagggtgcagctgtccgtcctccacccgggcgacggctgtgccgcgcacgggccggctacgtccaggtcctccctgcgccgtcggctgcacaacacgtcatacgtcgcgagggtggtactcgtgttctgggacggtcccgttctcgttctcatggcgagaacgggagcgaggacctgccggtgcgctttggggcggtcgccgcttgctggtgcggtgttggtgggcaggtggctgctgtcgtcggtgctgaggtggtggtcgccagaggagcagtcgccggcgagccacctggagtttgttgtcccgcaggccctctggtggcttcccaggctgaggaggtgcagcagcggcggctagagcttggccaggtcatccgcgagcgggaccaaccccggagtcacgctgccgaggccgtgagccgggctgaggtcctcgggggacagctggctgaggctacggagcggccagccgaggtgtccgctcgggccgggaccctggcggagaccctagctgcgatggcccaagcgcggtgctggcgtcctccttcgaggtggagatccttccgcccgtgtcgccgtccgaggctgggccaggtttcgccgagggtggaaacgacgccgagggtgctgctgctccctctgccgatgtctgaacctgcaggaacagtttgtctgtatatcaggacttgttcgtcggtagcagaattgcttatccgagcgagagttacttttcgcggaaggatctcgctatcgaagcagccgaaaggcgcgaaagacgttctggcaaaagacttttccgaggaaaattttgacgcagagggggttccccccttctag

SEQ ID NO: 12230 - DNA, 1239 bp, Zea mays
  Peptide Sequence Number=SeqID_55605
atggacgacagcgcccctatggaggtggaggcaaatgcgcgggcggacggagtggagttggcggagcacgaggaggttgtgctggagccacgcgacacggtgggcgtccgtcatcagatccatctccctcctgtcgtccatgggcatcacgaggatgtgcagggcaggcatcttatgggggttacggtcggtgtgggcatcggttgggggcagggatcacggatgtctaggcgcggtaaatatgctaaacaaaggaagggtcctttgaccggaactgccttcgacccactgccattgccaactgtgttccggtgcctatgtgtttttgtggtgatccttgcaaggttgacaaaggacaaagagaggatagagaaaagaggagaggagcttgcgaccgagcaacaacgggtagacgagcaggaaatgaggcgtcttgctgaatgcaaggaggagaaggagaaaaagtttgagcgtgcacgtcgtgcaaaggatgcaatggaggagaacccagatgcatttctgtcgggcacattcaatgcgaaaggtcgcctgacaccttatcctgacacgcgtgcctcagtcggcaaggtcgaagtgacccgcagtcacttcgcccttttcactgaccgacctgacaggaataacaacgccgctcgccccgctccgactgctgtgccacccaccaggcctcggcctcaggaggaatcgcgtcctcgcaccgaccccagcctcggcctcaggagaaggctcagacacttctccaacggccatgttatcgcgtacacaaggctcaagcacctctccgacatccacgttggcatggccttcctggagggggtcatgcgggggaacgagctaacgaacaggctcgctcactctctctctctcgcgaacgcttgtaacccctactacgagcaccccctgggaccccccgggtccgaaacaccgacagttggcgcgccaggtaggggcctgctgcgtgttaatgaacaccttcccgttaagttccagatgggtagtcttcagcaacctcttcagcccaggacagtgctccgcttcgggagtctcgagttcatcgacggcgaactcaacgacgtcttccccccgtggcggaagagcagcatccgggtttgtcccaccaccctcctcgccgcaggaggaggagacggggcaaccgtggccaggcaggaggcggcacctcgtcggctgtcgagcgagtcaacgacgccggcaccctag

SEQ ID NO: 12231 - DNA, 348 bp, Zea mays
  Peptide Sequence Number=SeqID_55606
atgggcaagaacaacaagcgcaagcgtgagccgactcctccatcagaggacttcgacgactcccaggggcttgcggtggaggtctggacttatatccgggccgtcgagcgctccgggctcgagggctcggatgagtcggagtactcctcggacgaggacgactcgtccgagggcggtggcggcgatggagatgacgacgacgacgaaggcggtgacggcaatgacggtgacgacggcgatgacggtgacggcggcggcaggggcggcagcaaggatggcgacggcggcagcagcaggggcagcaacaggggcggcagcggcagaggcagcaacagggccaatggctaa

SEQ ID NO: 12232 - DNA, 459 bp, Zea mays
  Peptide Sequence Number=SeqID_55607
atgtgccatgggccacatgccagcaccggatctctgcatgagtacagagcaggggctagaaacgcatgcagacatggtgatgccggacctcccctggccgggaattcggcgggcacttgtggaaacctgagcctcacccgtaatggcccgtacatgtggcagcaccggacctcccctgctggaggtccagatggcacatgtagaggtccaggactgttccacaggacgaagaaggaactctacatcgcatcgcggatccaccggagagaaagccttcctcaacaatctccaggaaagtcggagcaaagcaggaaaaagcgcaacctccagcgctccgagcgaagactacctcctgctagccgggagcagaggatccgactacccggagaactccgctgtccacctcttctacggaaaaatgggcatggatcacaaggaaaaaggaagcaaacgaggtaa

SEQ ID NO: 12233 - DNA, 792 bp, Zea mays
  Peptide Sequence Number=SeqID_55608
atgcctatgagtccgggtgatgcagagataagcgctatgctggacatgttggctggggattcttctaactcagtccctgctgaaacaatggttgttgcaactatcccagagcctgagaaaatcgtggatactcgaagacctgaaggtgctcgcccaaaacgtcttcaccaagtcagtcatccagctgatcctgtcgaggggaagaaaaagaaaagagacggcttcagcgagtgttgtgcttggatcatgatgtcggcccttctattcctgttgccgaagaagtatcagtggaactctttactggagctgatcccaatgggtgtgttcctgctgatgttgatcccaatgggtgtggccctgctgatgctgaactcaatgggtgtggccctgctgatgctgatcccaatgggtgtgtccctactgatgttgatgccaatagctttgtctgctcttgttggtctgcaagaattatccatagcaaattttgatcaggctctcaaagatgtcgttcctgaagatatgctgtccgagccagctgatggtgatatgatggacgtttattctgacatcccaaaggtgactgagagtccttcagccttagaggtggctgttgtggagaacccagtcctcaaggatggtgccagcggttgcctagccctcaagggtgttgccggtaatgatccggctcaggtgggtagcgcgagctgcgacccagccccgagggtgttgccagtggtgatctggctccgatgggcagtgcgggctgcaacccagcccccgagggtgtcctag

SEQ ID NO: 12234 - DNA, 282 bp, Zea mays
  Peptide Sequence Number=SeqID_55609
atggaaatcttcataccagtcgtcctcattgtagaaaccttcctgatgaagctctctgcgcggaggccttcggttctggtcatcttgaacaagatgacgaacctcttcggaagcttcatctatctatctctggaggatcgccaggttttggatctcctgatccaagtcatcttccggaggcgttggactaacagccttcctcttctagcttcgggcctccctaagagaaaagacgtcctgattggggtccaatggctgcagagtagcagcccctgtcgctga

SEQ ID NO: 12235 - DNA, 741 bp, Zea mays
  Peptide Sequence Number=SeqID_55610
atggctgaaaggtaccgactcccacggagttgcgttcctccaacaatgaggcgaaaagacggcgggacaggcggcgcttctggcaggagcagcgggcgacgcttcgccttcgccgtaataaccgtgccaaaaaaggctccgagcctccttactgatcagaggttcgaaggctggccccccgaagggttcgacagccgcctcagatcgcgtgggccctacacccactactggtcagagcgggagcgatcctgtaatggaatcccatcaaagggaggcatcgagccctcggaccccgtcgccaggggaccgggtccggcagatcacccgcagctcactggagacaccatgttcggcgcccatcgagggcaacatggcgctttccccccctcctccttgcggaaaggcgacgcaggggcggctcggactcgggctaagtcccggaagacggtgaacttcgctccgcccgacccagggctcggactccgcccaggcctctaccgacgacctccgcctcgcccgacccaggggctcggactcagcctcggccatgaaagacagactcgaccacggcttcggaggagcctccacatcgcccaacctagggcgcgggccagctacatcaacaaggaggtgccatcatcaccctaccccgagctgactcgggccgcagggtacaagaccggcgtcccatctggccagcaccgccagataggcaatgatggcgccccgcatactctgtga

SEQ ID NO: 12236 - DNA, 420 bp, Zea mays
  Peptide Sequence Number=SeqID_55611
atgaaggaagagaaggaaaggaggagcaatggattacttgcactactagcccctagcctcccctatgcaagaggaggatcggaagtgctggaaagcgcgcttatcattacgcagcagcaatcagaaagaggtggtatggcgccgcgcgacgcggtggacatgcactggcagagccccgccggccgaggtcaatgctttgtctcgtgcttacgccttggagaacaacattctgctctctggggttcaggatttattgggtgcaccgaagaaatcagcattgtcttgtcttcatctcaggctttagaaatcagcattttatcattagttcatgctttagagatcagcattctatcttttggggttgatgattcattaggtgcaccagaggtgcacccaatgggtgtagcccccgagctttga

SEQ ID NO: 12237 - DNA, 1461 bp, Zea mays
  Peptide Sequence Number=SeqID_55612
atggacagcagtgccgctctggttgaagttgaagccaaggatccaccgactcctaagaaaaggacaatgggtcagatagatgtcaatggagacccgatacccgtcaacccgtggggaattcccctattagggtacgggtatgagacaaaaattgtacccatgagtatggatatgggacaaaatctccacccattgggtaaacggccgtacctcggcgccataacctatggcgccgagctgtgttacctcggcgccataggctatggcgccgagcaaaggcttatgatcatcgtcgacgacgctggaggcttcctcccggcgctgaaccactctccctgggacggcgtcacagtagctgatttcatcatgccgttcttccttttcatagtcggagtctcactaacactagcgtacaagcgggtgccggatagagtggaggcaactaggaaggcagtgcttcgtgccctcaagctgttctgccttggtcttgttctccaaggtggatttttccatggcgtccacagtctcacgtttggtgttgacctaacgaagattcggttgatgggcatacttcagaggattgcaatagcctatctcctagctgcagtatgtgaaatctggctcaagggagacgacgatgtagattctgggtatggattggtcctctctatagcgtactctattcttctctacggcatgtacgttccagactgggagtaccagatagcaggccctggttccagttccacagagaagtcgttctctgtaagtgcaaattgccactgcattcttctttacgtatctcctcacaagttcagtacacaagacggaagaagcgctgacgttcacgctgcattcggaatccgtcaggtgaaatgcggagtgagaggagacaccggaccagcttgcaacgcagtcggaatggtcgaccgtacggtcctagggatcgaccacctctacagacggccagtttatgcgcgcacgaaggaatgcagtatagattatccagagaatgggcctctcccacctgacgctccgtcgtggtgccaggcgccatttgatcctgaaggcctcctcagctccgttatggcgattgtcacttgcttgatcggactccagtttgggcatgtaattatacatttcgagaagcacaggggaagaatcgccagttggttggtcccttccttcagcatgctagctctagccttcgtaatggacttcgtcggaatgcgaatgaataaaccactatacacgatgagctacactctggctactgctggcgctgcgggtcttctcttcgctggaatctatgctcttgtggatctgtacgggttcagaagacctaccatcgccatggagtggatggggaagcacgccctgatgatatacgtgctggtggcgtgcaacatccttcccatgttcatccgtggcttctattggagggaccccaacaacagcctt

SEQ ID NO: 12238 - DNA, 161 bp, Zea mays
  Peptide Sequence Number=SeqID_55613
atgagtcaaggaatcataagaatcaagcccaaaggaaaagccggccttcagaaatgcagcagcggtaccccgagaagctacccaggcacagaagtcgccgtgcccggctataacttcgtcaagctcttcgatttcagcttcaatatgatcgaaggcctggg

SEQ ID NO: 12239 - DNA, 654 bp, Zea mays
  Peptide Sequence Number=SeqID_55614
atgagcatcatcctgcagtacctggtcttgacctgtggtgtatgtgagacagcaagagtgagctcacatacgttcatcgctcaacaagttgtggggaataatgtgcatgaactcgccaaagaggtggtaccctttacccacaagtcatgttacccatctgccaagggatcacgacttcccatacacctctaccgaggaggcgaggcagggaccgccatcgcagcaaaatcctcccgagggcctccctacactgaccactcccctactgcccttgcccctttcggggggctcggggataaaattcctaagactcagtgtacaccgtcagaggacggcgggttgattacacaaaaccccgagggctctttagcaactcggctggctgaaggggccgacggcggcgccagagtgtatgtcgcggcggcggacatcgctggagcaaccgcagttcccaccagacagtctagttcgatccccgcgcggtgcacaacgaagaggaggaggtggcccaaatctgaggcctcgtcgatggagcacccgtggttctacgtcggcggcattctcatctccttggagtctgggtggctgacaggtggccccggcctgtcggcgcgaagtggagatggtattgggctgcgcggtctgggaaactag

SEQ ID NO: 12240 - DNA, 429 bp, Zea mays
  Peptide Sequence Number=SeqID_55615
atgaaggttttgtgtgtcagcgccaattttttagcgtgcatatgtcagattgagggccacggtggaactaacgtggagcatacctcagtgccgaggaagggtcctttgaccggaactgccttcgacccgctgcctttgacaactggtgttctagtgcatatgtgtttttgtggtgatccttgcaagaaagacaagaagtggttggagaatcttaaaaagtgggatgcagaggacaaaaagaggatgaagaaaagacgagaggagcttgctgccgagcaacaacgggaagacgagcaggaaatgaggcatgttgttgaatgctgggaagagaaggagaagaagcttgagcgtgcacgtcgtgcaaaggaagcaatggaggagatccctgatgcatttcgcaagggcaaatggcctcgtttcactcagtag

SEQ ID NO: 12241 - DNA, 636 bp, Zea mays
  Peptide Sequence Number=SeqID_55616
atgaagaagattccagcaccatcccttgaaatcaaggaagaagctgcaagcaccccgccagcaccgccgccctctgaggagctacaagagccagtcgcgcttgaagaagagttcaaccccgtgttgccatctcagtcgccgccagaagaaaaaaaggagatcggaagtcagatggaggttcgctgccaaaccagcttgtgccagaatgaagatggtttccccaagttgctgagagcatggacagtccgcctcggaatcaggagccaaccagagtatgatggtcgtgaattcgtcgagcatggcacagagaagtgtgtcgtgactgtatacattagatccagtccgcaccatgtggaatggagtgtcactgctgctgggcacagattcaaagacacctgccaagtcgtcgctcgcaaggcattgaggaccctgtgtcagatctatgaagaagaagtggccaacaccccgctcagattctttccgccctttcagagagaccgtcccgtttggatggccaggatgcgtgcattggaagtgcagcagctgcttgaagatgacctcacagtcgtgtacctcactgcatacctgctcaccctggatgcacagtatgatttcttggctcgacaccaccgttag

SEQ ID NO: 12242 - DNA, 789 bp, Zea mays
  Peptide Sequence Number=SeqID_55617
atggcggcgatattcgcgccctccgttgcgatggagaagaacgcgctgacgtgcgggcccgagttccagggagctgagctacaacagctgagaggaggaaggcaccgaccagtgggtcccacgggcagagaaggagcaggagggcgagcgcgttcaaggaaaaagggttgggccgcgcgggtgtcattcccagatgaggcacatgaaattgaggatatctctctattattcttggtatacaactttgagtattacaagctccatgtggatctcaccatagctcaagactgtgtagctgccttggaaagtcgtgaagtcattgctgttgaagccttgaagcaagccaaggatgagcacgtccagaagttgatggaggcctacttggtcacccataaccaacgtagagccctgcggatccaagagcccgcttcatccaacctagttcaacccttgagagctgaagacccccagattcttgaaggtcacccggtctctatcagaggagagaagaaggcttgggaactcccggaaggatccatagtctttgaaggaattccagtcttccctcaggctatgaataagcaagagcaccccgaatccgcccaagatcccccgccagagttgtttgagcccctcaccatgaagaaaattccagcaccattccgtgagatcaaggaagaagctgcaagcaccccgccagcactgccgccctctgaggagctacaagagccagtccagcttgaagaagagttcgaccccgtcttgccatctcaatcaccgccagaataa

SEQ ID NO: 12243 - DNA, 219 bp, Zea mays
  Peptide Sequence Number=SeqID_55618
atgtacacgctgcccaacctgaggaggctgagcttacataaaaatcagctcactggcaaacttggtagtgaccttggtaacctctctttccctgatgtctttggagagatgaggaggccagagtccgtaaaccttgccaccaataggctggatggttacgacgttacgcttcaacaggagtcttccaaggaaaatagcttaacaaccatagcaccctaa

SEQ ID NO: 12244 - DNA, 720 bp, Zea mays
  Peptide Sequence Number=SeqID_55619
atgcggcttcatacccttagaggtaatattgcaaactatttgagcctggcagaggttgattccatatatcttctgatccctgtgaacttcatctttattagatttgatggaaatggacggcatgagtttaagttggggcctaaagaactggagcgctggtttacaaaaatagatcacatatttgatcacacaagaatccctccagttggtgaagttcttaccccgttctataagactactgttaagaaacttcagcattatgatcttcctttagtcagccatgtgaaccacaatttctctatgcatgccatacacatgggagaagatgtcttatctgtttttgagcatgctataaaagctctatcctataaagatgatctcatggattccagtgtctctcgctatgctggatcactgctggcgcgcgcagatgtaccagggcgagaagatctgcctcaacatgcacttctagctattgtggatcaagaactgtacgaggtgcagcctcacgcacatgttgtgccttggcctcacgcagtggctggcgtaggaggcccgattctggtggacttgggcatggagaaacacaactgcacaatgatgacgaggtggctccgaccgaggcttctggctctactgctcctgatttgtatggtaaaccaagaacctgcgatttttacaaccacaatcctcgattatactacatggaaagctagatga

SEQ ID NO: 12245 - DNA, 672 bp, Zea mays
  Peptide Sequence Number=SeqID_55620
atggagcaccgtcccgggttggaaaggttgccggagactgcccatctggagcttgacgggaagctgttcgtcaacacgcaacaggcccctacctggcgcgccaactgtcggcgtttcgaacccggggggtccctggaccgacgagtaaattatcgtcgcgtgccccagcccagatgggtcggcgtgagacggagcgcgaaggggggaggcagccggagggagacgggcgtgagaggtggaatcccgcggccttcgtgtttgtcccgcgcccaggtcggggctgagcccgagtccgagccctggggtcgggcgaagtggagttcgtcgtctttcagggctgagcccgagtctgagccctggggtcgggcgaagcggagttcgtcgtcttccggggttgagcccgagtccgagccctgggtcgggcggaacggagttcgtcgtcttccggggctgagcccgactccgagccctagggtcgggcgaagcggagttcgtcgtcttccggggctgagtccgagccctggggtcgggcggagcggagttcgtcgtcttccggggctgagcccgagtccgagccctagggtcgggcgaagtggagttcgtcgtcttccggggctgagccccagtccgagccctggggtcgggcgaagcggagtttcccatggcacctag

SEQ ID NO: 12246 - DNA, 336 bp, Zea mays
  Peptide Sequence Number=SeqID_55621
atggcccaagggcacatttccctttcaatttggcacccaccattcgtgctccaaatagctcccatgatggctcctaagaaagtgaccactagaacaacctcctctctggacgccgccgccaaggaagccctcgctgtcggtgttttgggtccgatcgcacacccggggttgcccctcaagttctgccgacctatcctcgcatggctccgttgcatgggggctccagcgcgggaaagtcggatctctgttgtggtcgctcgctcgacgttgtgggccgtccgggctggcatcaatccggcctcatgtcgatctgctttgctgattgtccctccctag

SEQ ID NO: 12247 - DNA, 444 bp, Zea mays
  Peptide Sequence Number=SeqID_55622
atgggcaagaacaacaagcgcaagcgtgagccaactcctccatcagaggattttggtgactcggagtactcagaggaggagttctcctctgagtctgaggggtctccggctcccatccccctgcgtgagtcgtctgacgactcagacgactcccaggggctcgcggcggaggtctggacgtacatccgggccatcgagcgctttgggctcgagggctcggatgagtcggagtactcctcggatgaggaggactcggacggtggcggcgaggacgaggacggcggcgacaacgacgacgacgatgaaggcggtggcggcggtgacggtgacggtgacggcagtggtaggggcggcagcagcggcagcaaggacggtgacggcggcagcagcaggggcatcaacaggggcggcagcggcggtggcagcaacagggccagtggctag

SEQ ID NO: 12248 - DNA, 1025 bp, Zea mays
  Peptide Sequence Number=SeqID_55623
gtgctctccgcgccggaggcgaggtgtcggccctcgcggctgtcagggatggggcgggcgctgcgtcccgccggctggaggaggtgacggaggcgctgagtcaggcgtcccgccggctgaaggaggtggccgacttcgccaaccgtacagcgtcgggggccctcacggcggctgtgtctgccgaggtcgagagacttcggacacaacatgctgacgccgtccatgagaaattggctgccgacagcaagtgccgtaagctgacggacagggtggccgtgctggagagggagaaggctaacctccggtgccaactggcgggggagaagagggagaccaacgaggccctcgccaaggagcgggccgcgcaggcggaggccaaattggcgcgtgcggagggcaatattgccagggagcgcgccgagcagctgcaggagcggctcaccgccctggaaagtcgcgtggagagtgctgaggccgtgtcgcgcgcggaggcagagcggacgcgcaaacagctcatggatacataccgtgagctaggcacgaggaccggtgaattcgaagtgccggaccgagagcccgggcttcgctgcctggagtgggtgcaggaggaattgcaagcactccccactatcgtggaggggtttatgtcgtatgcctccctggtcacctgcgagggggcgatgaatgcgctctcccgcgaagggtgccggcacttcgaggtcttcgaccaagccgatgaagatttcgatcgagatatctttaaggttgaggaccccgtagtgaaggaatccgccggagccatctacgaccggatgtggggtgcgcacggtcgcgaggtggtcagggagcgggccgagacggcgagggctcaggtggcgcgtggcgagagggtggacgacttcggggcgttgaacagcgcgccgcccgacccggagccaaccccggcggaggccgtgcctagggtcgccctggagccgaccccggtgtggcagaaccgcccgaattattccagtttaagtgcctaa

SEQ ID NO: 12249 - DNA, 517 bp, Zea mays
  Peptide Sequence Number=SeqID_55624
tagccgcggcgaagaaaagggcggaggggcttaccggcggcgagactgttccggtgaagtggtcgagggtgaaggggaggtcgcggggatcacaacggtgtgcggaacaccgtcggagggaggtccacgggatgccagagaagacatgagcgaaaggaatcgggcggagactcactggatagctcggtccacgcgcggcggcggaagaccgaagtccggtgaggttgatctcgggcctccggtgaagtccggtcgggtccgagggcttggcaagcttcacgggctactggcggagctagccgaagcactggttgggctggagggtggctggagtgggctggccacggcggccgtagctctggcggcaatggcgggcagaaatgagctcgccggagctaaggaacggtggctggccggtgagggtgagtgcggggcgaagagagagatatggagccaggaaatctggtctgtctccctgcccaaacccgaggcaaatcccaagttttgtcgtgtctag

SEQ ID NO: 12250 - DNA, 984 bp, Zea mays
  Peptide Sequence Number=SeqID_55625
atggtgcgaagtcctgccttcgtactgaatctgcaaaaccgcgaccctgccgcctttgtgcgtgaggcggaggatggggcggtgcggctcgttggacgttacgtgccaaggacagagggccagcgcagctggaatatccgcgggtcgaatgaccgtttgaacagggttttcgaattaaatcaattgccatatgacggctaccctggtcaagacgatgtggaccgccgtgggaagaaaccggcggtggagactggagacgaccctgcgccggcggccgccccatcctctaaaaagagaaaattaggtactgttatgggaggtcttggggtttctgatggttttgctagagagctgatgaggacgtgcgcggcccccgggggaaggatgtcttcgcccgagctccgggagtcttcggctcagatgctgagggttaccgggggttgttggcctaggaatgttcctatcccctgcgcggccggtgaagactcttttacatctcgcatggttcttaaatggagagtttttccttacgagcggaatattgctgctgttgtgtcggcagtgatggacaaggatcgccagggagctgcacaaaagcggcaggcggccgtcaggctcgttgaagccaggccgaagaggcagcggggggctgcgaaggctgcggcccccggcggaggcaagccgccgctggcggcaaagtcgggcgcccctgcatctagcaaggcgccggaggcaacggcaggcgccggaggcaacggcaggcgccggaggcaacggcaggcgccggaggctccaaatcgacaaaggtggtgtcgcctgccggcggagtggcggaggtcgcgaaggcggcccgagcgttgccgttgtcaagcaaacgcgtcgccgacttcgccaccaatattagtgtggacgactatcttggtggtaagtcgttggcttcgttttttttataatttattcgtcgtgattcgagctccgttctag

SEQ ID NO: 12251 - DNA, 1881 bp, Zea mays
  Peptide Sequence Number=SeqID_55626
atggaaagtcctgagtactgtgagataaactcaaatatgactcttgactacataaaccgactgttaatggaggagggcactgatgagaaggccagcatataccaacaacttgatgcacttcaggccatggagaagccattttatgatattattggacagacatatccatcttcacctatggagacaatgatcagtagagataaccaagtagattgtcctcaagacaattatagtaaacaggcacgccgtggttgttttgtcagtgatattctagagccacaaggtgtgcacctggtagccaatgattggacttatgaatgtgatcatttttctttgcaatttgagagaggtgctgaagaagcaaataagttagttcccaatattgcaaaattggctgatctggatagtaatggcctttctgattccaatcgaatgatagaggcaacaattggacaaaagggcaagcatggaagcaaaatacggagtcatcctcatgtggacttggagtttttggaagcgaggaacagtaagcatttggccatctcagctagtgaaacaacccgggatgaaatgtttgacagtgttctgctctgtgattgtcgatttaattgtgatgctgctcatattagagaaatcaaggcaaaagaagcaaacaacagttcacagaatgttcggagaaaaggatatggtcaacggcaagtgaaatcacgaggtaagaagaaagaggaggaggttgacctcagggctcatctcatgcagtgtgcacaagcaatagtagtaaacaaccttccatttgccagtgagctactggagaagataaggcgtcacgcttcaccatatggagatggctctcagaggctggcactttacttggcaaatggtcttgaggcacgcttggctgggacagggagccaaatgtataaagaactgatggagaaacaaacaagggccacagacatgttgaaggcctaccgccttttcaatgcagtgtgtcctttcgctagggtagcatactacttctccaaccaaacaattgctgacctatcgaacggacaaccaaaggtgcatatcattgattttggcatcacacttggctttcagtggccatcattaatccagcgctttgcgaagcgagaaggcgggccccctaagcttcgtatcacaggcatagatgtacctcagccaggttttcgcccccgtgcaataattgaggcgacaggaaaacggttgactgagtatgcagaaatgttcaatgtaccttttgagtaccaagatatcgcctcaccatgggaagatatctgcatcgagaatctcaatattgacaatgatgaggcgcttatagtcaactgcatgttccgaacacaatatcttggtgatgagacagaagacatagatagcgcaagggatagggtactgcgtaccatgaagaggatcaacccagaggttctcattcttggcattgtaaatgggatgtacagctccccattcttcctgacacgattcagagaggttgtgttccattattctgcgctgtttgacatgctcgatgcaactgctccccagagtcatgaagataggatacagatagaaagggatctgcttggggcaagtgcacttaatgttgtggcgtgtgagggtgcagaaaggattgtgaggccagagacttacaaaccatggcaagtgagatgtctcaaggctgggttcaagcaacttcctgttgataaagcaatcatgaagagatcaatagatgaaaaagacaagcattatcatgaagactttgtcatcgacgaagatagcagatggctgatacaaggatggaaggggaggataatgcatgcagtgtcctcatggaaaccaaaggaatcatatactaatcagtaa

SEQ ID NO: 12252 - DNA, 836 bp, Zea mays
  Peptide Sequence Number=SeqID_55627
atgggggaaaagggccggtgtctcggccacatacgtcgcatctacccgtcagatagccacaccaaatgtcacggtggaagtaaccaggttcccggatcgatgggatcgaggaacgggaatatggggaaatctacgcttgtgagtgcactttctgaagctgatttatacagtgatgacaggctgtttgcaacagtagatccccggttacgaagtgtgattcttccatcagggagaaaagcacttcttagtgataccgttggcttcatctcagatttaccagtacagcttgtggaagcatttcatgcgaccctagaagaagttgttgaagcagacatgttagtgcatgtgttggattcaagtgcatctaatcttgaagagcatcgatctactgtattgcaagtactgcagcagataggggtttctcaggagaagatcaacaatatgattgaagtttggaacaagattgatcttgtggacgagaatgttaaatctgatgggattgacgatgaagtcttcctgaccgaaggtgaacaggaggatgacatattctctgaagatgatgctccatcagaacaaacatcttttgattctgtagatgtagatgacggagcagattcagaatatttatcagaagaaaattctgaagatagcaatgaactgccatctaaaaagtcatttgctgagccaactgagatgggagcaatgaaagagttgtcatcaaaagaatgttttggagaacttcgtgtcctagatacaaatggacacactttcccacaaccagcttccacttgtcatgtaaaaacttctgctgtgacggggacaggattgcaagagtt

SEQ ID NO: 12253 - DNA, 480 bp, Zea mays
  Peptide Sequence Number=SeqID_55628
atggtggagcggttgaaccggtctctgcccggtctgaccgcgcaggcctgttcacgcagtttcaccaccttttcaatcatggtgcgtcgtcgcaacccctctgtggttgagtttagcagcgactccgacgagattcaggaggaatctcccgtcccctctcctccgcctcgtcgctccctctctaagagaggacgtggctctggtcggaaggatggcgagggttcttctatgccttcacagccgactcgcgggagacgccaaaaggttggcgcctctcgtcctcgtcgtagcacgtcttcctctgggtatgctccctgccaggaggaggatggggcgttcgacgacttcgtcgaccttccggcgcctgatgctctcttcgtcaccggactgcacatgcatccggcgaacgtcagccgcggtccgcatgaatctcccgtcgactttactcagaagggaatagacaccccttcagcgttctga

SEQ ID NO: 12254 - DNA, 1566 bp, Zea mays
  Peptide Sequence Number=SeqID_55629
atggtgtcctcctgcatcgtccgccgcaagcgctcccggtcgccgacacactgtttcgactccgggagccgcacgcgcccacgcccctcgccgtcctcccccgacgtcggccgcaagcgttcccggtcgccgccgcactgttctgaccgcgagggccgcaagtgcacgcgcccctcagcgtccccctacggcggccccaaccgctccctgtctacatcgtgcggtttcgactccgcgcggtttgagcgcgcgcgcctgacgacgggagatggcaaagtcgcggcggtggcatcgctctccgacgatatgctcctggaggtcttcaagcggctgccgcccccgcgcgacgtcatccgctgcgccgcggtgtgccgccgctggcgccgcgtcatctccggcgctggagcggcatgtcttcccaggccgcctagccatttcggtttcttccgcaactacggtccatcgccgctgcccccgttcgtgcgcaccgcgggcctctcccttgacatcagtttcctcccggtgccgcccgcgtgcggcgcggtcctcgtcgactcccgcaacggccgactactcttgcgggaactcggccctggctaccctcgcgaactcaggctcctcgtctgcagcccgctggagaaggcgtacgttcgggtgccgcctctgtgcatagcggagcacatggtggcgtgtagcgtgctcgtcccgggggaaggcgatgcattccgcgtggtggttgtcctcttcggcaacgacccgaaacacttcagtgttctcgtctacttttcgatatcttccgcttgggagtctgccactgggccggttcatcggaatctggtccctcgtcaaggcccatcagtcgtcgtcggagatgtcatgtacaagctgcagagcgaagagaagtacatcatggttgtcgacgcggtccagatgactctgtcggcggtgccccttcctgatgccagaacgctcctctacgctggtaaccactggattggcaggacaccggacggccggctttgtttcttcgtgatcagggagcagcttactctcgccacctgggttctccaagcacctgggaagtgggtggagcagcaacccgtggacctgcgcacgctgatgcacccggcgtttatgggtgatctcgcccacatgaagctctcggcgaagatgtcggaccagctccgtggcttcaaacttgtgagcttcgcagcgttctgtgagggtacatgcacgctgttctttgtcatggcagattgggttgtgatgctcgaccctaggacgaggagactgctgaggctgtggcgcaacagtgatgagtcgcggccattgggtgatgtatacccgtgtgagatgctgcagtggccgccagtgcttaagaactttggcgggtctgaatcagatgaggcgggcaagtgctgctggtatcttttctactgcggcaaaattaggacaattcagttggagtatactgatgctaaagaaagcgtcttgcaagctgcccagaaggcactcgagactttaaactatcttgcacagcctcatgttgtcagcatttttgcagag

SEQ ID NO: 12255 - DNA, 267 bp, Zea mays
  Peptide Sequence Number=SeqID_55630
atggctcccctccctctattcctattccttatttgcttccttactgttcttattatgcttcagggattaaacagtttacttgatgaggaggctgtcatgaggaaacgactccgtgagacgaaagaacagctggtgagacaaaggaacaatgagtttcgagtcatctcgacaaacatgaaaagtagtctgaatgactttaatctagtcgcagcgaacaagaagggttttgacttgcagcgaagtgtgcatgcaactatcgtggcatag

SEQ ID NO: 12256 - DNA, 84 bp, Zea mays
  Peptide Sequence Number=SeqID_55631
atgggttcacagatgagaaaagaagagaatgatgcaagtgatcccgatggcatgaatgatgaagaagagttgtttgggacatag

SEQ ID NO: 12257 - DNA, 87 bp, Zea mays
  Peptide Sequence Number=SeqID_55632
atggcgacgggactaaggaacgaatcattcattccgcgtgggcgtatgacagggaccacgatgacggtggaacccatgaaaccatga

SEQ ID NO: 12258 - DNA, 570 bp, Zea mays
  Peptide Sequence Number=SeqID_55633
atggggggaggagcgggtattgcccgtggcgctggcagctgcagcgtgcccggtcttcagacgcgagtggcttcggagccgctcgcggcgccggcgtccgccacggcagctggaagaggttcttccgccggcgcgatagccggggccggccacgggctgacctccaacttctcggccttctgcccgtccttgcctcacaagttttggcgtgggcgggggcctcctggcagcggcatccggcctgaggtcagcgttgccgctgttcggccccccggagcagaagtcgtcgtcgtcgccgctgctggagcgggtgacggcgtgccgttcgtcggccttccgttgctccgcaggccttccccctcggagtggggtcgttcgtacctgcggagggggaaccggagttccgtttgtaatggcacttcgaatgccagtgttttttgttcattgtggctgtcgaggcctaaacatgatccgcttttcgaagtagtcaaaaagcacgaaagaaattctgctaaaaagaggtcctttttcgaggaaaacttcgacgcagagggggtctccctcctttaa

SEQ ID NO: 12259 - DNA, 777 bp, Zea mays
  Peptide Sequence Number=SeqID_55634
atgaagcgttttgtctacataaatgatgagtcttatcagaacgactactgtgataaccgggtttctaatacaaagtataccttattgaacttcgtgccaaaaaacctatgggaacagttcaggcgcttcatgaatcaatatttcttgttgatagcttgtctgcaactatggtcacttatcactcctgtaaatcctgcaagtacctggggcccacttatatttatctttgctgtttctgcaaccaaagaggcatgggatgactacaacaggtatatttcagataaacaagcgaatgataaggaagtgtggattgttaagaatggtgcccggaaacacattcaagctcaagatatccgtgtcggtaacatagtttggattcgagagaatgaagaagtaccatgtgatcttgttttgttgggaacttctgaaccacaaggcatctgtcatgttgagacagctgctcttgatggggaaattgatttgaagacaagagcaagcccaccaccatgcgtagggctggagtttgaacagctgcacaaaataaagggtgtgatcgagtgcccaataccagataaagacatacgaagatttgatgcaaacatccgcctgtttcctccattcattgataatgacatttgcccattgactattaataacacattgctgcagtcatgctacttgagaaatacagaatgggcttgtggtgtagcagtttatacagcaagaacggggtcatcctacaataatcatggaatgaccacatttcaggaatggtag

SEQ ID NO: 12260 - DNA, 501 bp, Zea mays
  Peptide Sequence Number=SeqID_55635
atggacgcggacatccccgacaacaacacgctcacgaacaaagtgaagatcgatcttgacatgcttcatccgttgatgttggacggggttggcagagaagtagacgatgctgacgttgtcgcagtaaaccatggtattcctggtgaggggactatgaagctcttggagaagttggcatatccagctcgtcttagccaccccattagcaacaccccggtactcagcctaagcactagagagggagaccacataatgacgtttgggggacaaagagatgaggttggtcctaagaaatatcatatagacggaggaggtgagatactgaagagcactagtgaggctgcgataagtggtcgggtcactgacatgagtgctatcaccaaagagcttgcttgcctgtccaccagcgtcacaaagggcttgcatgccagcccactcgaggatgtactgccgctgttggaggaagaggcccttggagcgacgctcgacaacaatccctag

SEQ ID NO: 12261 - DNA, 1176 bp, Zea mays
  Peptide Sequence Number=SeqID_55636
atggcaaccaaaactactatggaaaacctcaatcacacgcaggtgatagatcctggtctactaagggaaggagagatacacaatcagcctagtatgaaaacatggattctcattctaacacacaccccctcgcagatgaaacctctagccatgacagatgttgaggctggacttgaactccaaaaataccaacgagggaagaacctttgtgaagatatcagcgaaatgggaagtcgtcgggacgtgaagaacacggacatcaccaatggcaactcgctcacgcacaaagtggagatctatctcaacatgctttgtgcgttggtgttgaacaggattggtggagagataaactgcactgatgttatcacaataaaccaaagtactcttggtcagagggctattgagttcatgcaacagttggcgcagccagcaagcgtcaacaactccattttccattgcatggtattcagctcctgcactggaccaagaaactacattctggcgcttggaggaccaggaaacgagattgccaccaatgaagaccccataagaaaagtatcggagaatgcgtttgatagctataaggtacggctctcgcggatcatgcatgtggagacatatctgctgaactgcgtaagctatgtcaggacgagtaaaggtgcggtattggagagcgccagccaaactgcgaaaaccagcctgctcaatgatgtcaaggaggtatcagagaatgtgtttgatagctgtaaggtacgactctcgcggatcatgcatgtggagacatatttggtgaactgcgtaagctatgtcaggatgagtgaaggtgaggtattggagagcgccaaccaaactgcaaaaaccagcccgctcaatgatgtcaaggagaaactcaagactggaggcagtgagaaaaacatcaacatacagaagaaggctaaatgtctcatcatagtcaatgcctggtcgctgggtgaatccacgacatacccagctagccttgtatcgcccaagagatccatctgcgttgaacttgtgtttgaagtcccacttgccagtaatgatgttgacaccgggaggccgcggtaccaaatcccaagtatggttggacatgagtgtcgagtactcatcctccatagcacgacgccaatgtggatcaggaagaccctggtggaatga

SEQ ID NO: 12262 - DNA, 171 bp, Zea mays
  Peptide Sequence Number=SeqID_55637
atggagagtcatgatctccgggcagaaagggaatcacggcttgtgggtaaagtgcgcaacctctacagagtggcaatgagattgatggtttttggtattgactctggtaatggagaggatgaagccgtggaaggagacccccaggagttccaagattacgatgagttctag

SEQ ID NO: 12263 - DNA, 1326 bp, Zea mays
  Peptide Sequence Number=SeqID_55638
atgccagagagcccgtgggggttatctcctttcaaagtacgtgagaggtctaccgcgagagctggcaagtctgcaattgtcaagtattcaaataaaaagaaaggtgctggtaaaacagctattattgagggattggctcttataattgctaatggagacgttcatatcttccttgtgggaggttctgatccactgcaatttatgctacaggttagagctctttgtgagaaggcaaaggagattctgatggaggaaagcaatgttcagagtcctgttactatatgcggtgatattcatggacaatttcatgatcttgctgaactcttccgaatcggtggaaagtgtccagatacgaactacttgtttatgggagattatgttgaccgtggttactactctatcgaaactgtcacacttttggtggctttaaaagttcgatatcctcagaggatcaccattctcagaggaaaccatgaaagccgactactcacctgtcatatagtttcatcgatcaacctaccggccggtctcatcgatccaggtgaaatatgcgccgcagctgcccttcgttctgaccatgaggctgtcatcacaagaattcaagtatcattcataaatcaagggagtgctacactattgcctattgaaggaaactattctcgcggaaatttgatgcttcagagaataaagacatacattgcatttctggagcaaaagcttgtggaatttgataggacggagaggctgaatcattttgttttaactgattccgatatagcagtggttgatgatcttggacatatatttgaaaaatatccccattttcatctggctgttactttttgtaataacaaagggcaaccattgaattctgggtttgttgctgtaagaggaaccagggatggcatcactaaagctgtggaattcttgaaacaggtccttggaacttacagcttaagatatattaaggcttcccgtatgcttggtgaccaattagcacttgcatgggtcgtcaagtttcatctaccatcggctttgggaaaattttctaagcatgaagcatttactggtgaagttaatggaacatctgttctcttcttgccttgtgttgtttataattggaccccgcctgagggtgctggacagtttcatggtatacccttggatgttaagcctcatggtcagtatagtacaaaaaatgctgaccatgaggctgtcatcacaagaattcaagtatcattcagtatgacaatgatcctattagatttggaggtggtcctccttcagttggagatggccctaatgcttttcctttcaagcccttag

SEQ ID NO: 12264 - DNA, 267 bp, Zea mays
  Peptide Sequence Number=SeqID_55639
atggtcggctcaaagggcaagaatgaagactcctttttagacttcttcgacgagtccaaagaggccttctctgacagcagcgacgacaaagggttgttggaggagctctccccaactaagggttataataccgaggagtgggccattatgaggggcctcaagtgccatgggctcgagggattctctgatgaggaggagaaggaggatggagatggagatgaggccaccaccactccatatccactacaccgtgtagatgtagggtag

SEQ ID NO: 12265 - DNA, 1422 bp, Zea mays
  Peptide Sequence Number=SeqID_55640
atgggatccaaggaccaggacggaggggctgcatcctcgggaggcggcttcttctcgtcgttcgccgccggcatgcgcagctggggcaccgccgtgcataaatccgtcaacgggctgcttggttatgaaggccttgaagttattaaccccgatggaggcacagatgatgctgaagaagaagctttgaaggggagatggaagcaggaggaccgtgatagctactggaagatgatgcacaaatacataggatcagatgttacatcacttgtgacacttccagtcataatttttgagccaatgacaatgcttcagaaaatggccgagttgatggaatactgtgaattgttagacaaagcagatgaatgtgaggatccatacatgtgtatggtttatgcttctacatgggctgtttctgtgtactttgcatatcaacgcacatggaagccttttaatccgatccttggagagacttatgagatggttaaccaccagggcattacatttcttgctgagcaggtaagccatcatcccccaatgggtgttgctcactgcgagaatgaacattttacttacgatatcacgtctaagttgaagaccaagtttttgggaaattcagtggaaatttacccagttggaaggactcgagtgacactaaaaaaatctggtgtcgtgttggatttggtgccaccactaacaaaggttaacaacctgatatttgggcgcacttgggttgattctcctggagagatggtcatgacgaacctgacaactggagacaaagttgtgctatatttccagccatgcggctggtttggggctggccgttacgaggtggatgggtatgtgtacagtgcagcggaagaacccaaaatcatgattacagggaagtggaacaagtccctgagttgccaaccatgtgaccaagaaggcgatcctcttccaggcacggagctgaaggagatctggagagttgctcctgccccacagggcgacaagtatcagtacacacacttcgcacacaaaataaacagcttcgacacggcacctaagaagctgttggcatctgattcacggctgaggcctgatagatatgccctcgagaagggtgacatgtctaagtccggggcagagaagagcagttttgacaccacccccgagtttctgcaaactttcaggctcgaggaacaacagagagctgagaaacgaactcgagaggccaagggcgagcaatttactcctagatggttcaacctgacagatgtggtctcccctacaccgtggggtgacctggaaatttatgaatacaacggcaaatacacagagcaccgggctgccatagaccgctccgatgtcaccgacgagacagatgtcacttcagtcaagttcagcccatggcaatatggtagctcatcttcccaatga

SEQ ID NO: 12266 - DNA, 915 bp, Zea mays
  Peptide Sequence Number=SeqID_55641
atggtgaccaccagcccctgggtggggagaagcaagccgggctgcgatcttggccccaccctcagcttcaaggatgttcatcatcctcgctggggtggaggccgggctgagccggagctctacctcccgcgcgggttcgtgggtcaccctctcctgcggtgttcgagggagagggcgctcgctggccctgcgggcgggtcggacttcgacaacacggggctggtcgacagcgggcgtcgtcagccccagcgcgttgagctcgtcggcttggcccccggtggcccctcctgccagaaggcggctgccgcgccgtgtcggtgccccactcttccgggaggatctgagtggggatctgccggagggctgacggcccctgtcgtcggtgccggggtggaggcgactcgagaagtccccgtcgccgacgggatcaccgccaccatccgcgcctcgggcctccggctctttgtacttgtcctcacccctcagcgggcggcggcgagccgcccgtcagtcttctgttgctccgcaggccctcccccatcgagtggggttgactcgcctgttggttgtctgaaccgcttcaccaagcgtgagtcgccccgtgtcaaggtgacgagtgaggccaggggtagcgatatcagcatgaacaggggcggagttggctcaaaaaggaaacctggttggccggagcccagccgggtgtccgttagcgggaccgacgccggagtttaccagccgaggcctcgggtcgggctggcgcccttggaagatggttggccgaggccccagaatccttggaccgcgtcgccgtccgaggctaggtcagacctcgccgaaggtgtcgtcgatgccgagggtgctgctgcccccttccagcgtcaagacccgagcctgcaggatcagatcgtcttgtag

SEQ ID NO: 12267 - DNA, 1005 bp, Zea mays
  Peptide Sequence Number=SeqID_55642
atggtgaccaccggcccctgggtggggagaagcaagccgggctgcgatcttggtcccaccctcagcttcaaggatgttcatcatcctcgctggggtggaggccgggctgagccggagctctacctccgcgcgggttcgtgggtcagcctctccctcagcgttcgagggagagggcgctcactggccctgcaggaggggcagacttcgacaacgcggggctggtcgacggcgggcgtcgtcagcttcagcgcgttgggctcgccggcttggctcccggcgccccctcctgcctcaagggcggttatcgtgccgagcgcacgggaggaccgtccaagacgtcgcgcgctgccagggccgcgttcgtgttctggggcggccctgcctttgcaccggtacggcgcctccgcgcggaggtcggtgccccgctcgtctgggaggatccgagtggggatctgccggtgcgctgacggcccctgtcgtcggtgccgaggcggagatggctcgagaagtccccgtcgccgacggggtcaccgccaccatctgcgcttcgggcctccggctctttgtacttgtcctcgccgctcgagcgttggcgtgggcgagggcagggttgcagcagcgttcgccctgaggccatcgctgctgcagttcggccacccggagagggggtcgttgtcgctgctgctggagcgggcgacggagtccctcggctcggtcgaccttgctgtccgaggcttctcttgcttagttaaaggaacccctcggccgctcttcgatgagccgaagccaggggtagcggcctcgggccgggctgatgtctttgggggacagctggccgaggcctcggggcgtgatgatgaagtcgtccttcagagtggagaccctcggaccgtgtcaccgtcggagggtaggtcggacctcgccgaaggtgtagttcacgccgagggtgctgctgctcccttcaaccgccaagatccgagcctgcaggatcggattatcttgtag

SEQ ID NO: 12268 - DNA, 174 bp, Zea mays
  Peptide Sequence Number=SeqID_55643
atggagagtcatgatctccgggcagagtgggaatcacggcttgtgggtggttatgagattgatggttttggttatgactatggtgctggttgtcagcattgcaaccactgctcaggcgaagatgaagctgtggaaggagacttccaggagttccaagactacgacgagttctag

SEQ ID NO: 12269 - DNA, 141 bp, Zea mays
  Peptide Sequence Number=SeqID_55644
atgggtttcaacatcggaaaagatgtacctctgacaggaagtcttggtgtagtgtctccgtccgagtcgcttaaggaccgtgtcgatgtgggcctgctgactgaggaccctttaactggacacatgcctcgtcatgggtaa

SEQ ID NO: 12270 - DNA, 249 bp, Zea mays
  Peptide Sequence Number=SeqID_55645
atggcggaaaaaggaaccgacttaaaggggaaaaggctatctagtcctcgttgggttgtccataagtcaatagtaaatataaagggcatgaatcatttgagaacaagtccccaacagacagctttgttggcaaagagggttgagttcaagtggaccctagcatgccaaaagtcctttgagacattgaaggagaagttgacaacggcaccagtactgattctgctagatgttcataagccatactcatga

SEQ ID NO: 12271 - DNA, 693 bp, Zea mays
  Peptide Sequence Number=SeqID_55646
atgtatggttttacaggtggtgatgaggatgatgattttggtatgactatggtaatgcaggaggtggagtatgagaggccgccttcccctgcaccccagccagagatgcccactgcaccaccacagggcatctcagctgttggaggagaccctgacggagacagagacgacgacgaagccagtggcagctcgagccatggcacggagctctcggaggagccggagccagagggatggatcgctagacccatcactcgtgacgtcgctcgcgggtgtcacttccacgatgctctcgacaccctgctgcgttgggcctttgaccgacacacttggtccatcgagtaccgttgtgtagtctatcagcatcgtcacgggctatacccagaccagtgggaggctacttgcttggtgcgtcgtccggacgatgatctccagggtgcagaggccttctcagagcactattctattactgaggcagccattatagatgcagcacgacgggcactttctcagtattgctcgttgttcagcagggtagctgatagcctcgacctgaagtactaccctcgtcattcgactggcagtgctggaggtgtgattgtcttgctagttggtgagggcaatcccaggttgaacatcatggtcaacctggctgtcgtgctcaacacagagttggaccacgcccttgactag

SEQ ID NO: 12272 - DNA, 552 bp, Zea mays
  Peptide Sequence Number=SeqID_55647
atggtcccaacagggaccgagaaaggggatatttcgaaagggatccttccccatgaaggaagcgggccccgagccctcctactgatcaggggttcgaaggctggcccctcagaagggttcgatagccgccccagggcactcgggcttcaagctcattactgctcaggggttcgaaggctagcccctcggaagggttcgacagccgccccagagcactcgggctccgtgcccactactgatcaggggttcgaaggctggcccctcggaagggttcgacagccgcccagagcacgcagagcgagggatgactctgggtacgtccgttacatggccgaggctcgggctacgctcccgagtgggcgcaccctcgacacgcccgaggcccagctcgggcaggcttcgtcgagaagcaaccttggccaaatcgcctctccaaccgaccgtatcgaaaatagctccgctccgactgctgtgccacccacccgggcaaggctgacaacagccaagttcagcctcaggcgcaacaggaagctccgcctcgcccgaccttag

SEQ ID NO: 12273 - DNA, 735 bp, Zea mays
  Peptide Sequence Number=SeqID_55648
atgggatccgcgcgggctcaacaacccagctgcagcctgcacgtgcctataaaccctgggttccgccattatcgtagcagcaccacccctgtggctccacacagagagagagaaaataggggaggccgccgccgcgggcaattccttcgtaggtcgccggctttgcctctgtcggaggaaatagcgcagcggatctgcggattgctttactccggcgggcacgccaccgtgcaccgtgggcggcggcgccgtctgctcgaccgggagatcctgcgtaccctttcacgtgatgggttctggatcgtagatttgcgatcgtgcggctctggggagtctctgaataaacccgccgtccgcaaggactggctctgtgtctggggatttattgcaccagggcccctggactttctggcgagggattcctgcactggagctttgttggggaccttcggcatccgaaggtcctcaaaaacaggatttaacagtatttctggagtacaatgtgtgaacaggtatcctcggactaaagtcggcattgcagtagaccagaataatacgaaggttgatacagagccgaaggtgcgagcaggaaagcttcggcgtgacagcaaagagtggaaccgacttaaagatgaaaaggctattcagacctcgatagactactataagattattatcaaatgtaaagggcatgagtgtaattttacatgggctgcgtcccgtgcctataaatag

SEQ ID NO: 12274 - DNA, 78 bp, Zea mays
  Peptide Sequence Number=SeqID_55649
atgggaactactgggcatctcaacctcgacacgggagattccaagccgaacctaaggaagttcaccttagggccgtga

SEQ ID NO: 12275 - DNA, 1074 bp, Zea mays
  Peptide Sequence Number=SeqID_55650
atgcaggcggcatgcgaccgcgccaagtgggcgcaccccttcgactccaacgcgcccagcatggaggcccaggcccacacgtcatgcaaccggcgcgccggttgctacgtgcgagcaactgcaccgccactcgcgccactaccgcgcctcctcgactgcggaaccagtaccgcgactcgaggcaaccctgcgtatgacccaacagtgccagccaggcgcatcggtcatgggtcagtcagctgcgggagaaggcgcgacggtcaatacggccaaaaatgggccagcagtaatggcggtggcaggcgggcggaagcagcgggaccgggaaagggggataccccgaaagggatccttctccgcgaaggaaacgggtcccgagcccccctactgatcagaggttcaaaggctggcccctcggaggggttcaacagccgcctcagagcgctcgggctccgcgcccattactggtcagaggctggccctcgaagggttcacagccgcctcagacgcagagcaagggatgaccctgggtacgttcgatacataaccaaggctcaggctacgctcccgaggggctcgggggatgctctcgcaaactcggctccggccaaaccgttgacagcgtcaacataccagcccgagaacggctcggactcgggctcagccccagaagacgacggactccgccccgcccgacccagggctcggactcgggctcagccccggaagacgatgaactccgcctcgcccgacccagggctcggactcgggctcagccccggaagacgacgaactccgcctcgcccgacccagggctcaaactcgggctcagccccggaagacgacgaactccgccttgcccgacccagggctcggactcgggctcagccccggaagacgacaaactacgcctcgtccgacccagggctcggacttgacctcgacctcggaagacagactcaacctcgaactcggaggagcctccgcctcgccctacccagggctcaaaccgaccacgtcataggaggggccatcattaccctacccctagctaactctggctacggggaatga

SEQ ID NO: 12276 - DNA, 987 bp, Zea mays
  Peptide Sequence Number=SeqID_55651
atgtctttgcgctcccttatgcatcgcgtctttccaccttccgagcccccggatggagaacgcccacgattcttccgccttgtcgttggggggacgcaacttcgtggaagttggtacctttcagccatcgttcgacttcaaggattttcatcaggcagcctggccgcaccccctcgccggtggtcacccaagacggtgaccaccagcccctgggtggggagaagcaagccgggctgcgatcttggtcccgccctcagcttcaaggatgttcatcatcctggctggggcgggggccgggctgagccggagctctacctcccgcgcgggttcgtgggtcagcctctccctcagtgttcaagggagagggcgctcagcggcccagcgggaggatcggacttcgacaacgcggggctagtcgacggcgggcgtcgtcagcttcagcgcgctgggctcgctggctcggcccgtggtgccccctctcgccgcaagggcgattgtcgcgctgcgcgcaccggagaaccgcccaagacgtcgtgcgccgctagggcggcgttcgtgttcgggggctgtcctgcctttgccccggtacgacacctctgcacggagatcggtgctccgctcatccgggaggacccgagtggggatctgccagagggcagacgactcctgtcgtcggtgcggaggtggcggcggctggagaagtcctcgtcgccggcgagatcaccgccaccatccgcgctcggggcctctggctctttgtacttgtcctcgcccctcgagcgtagacgtgggcgagggcaaggttgcagcagcgtccgccctgaggccatcactgctgcagttcggttacccggagcgggggtcgttgtcgctgctgctggagcgggcgacggcgagccacccgtcggccttctgttgctccgtaggcccccctatcatgtggggttgttcgtacctgcggaggtggaaccagagttccgtttgtaa

SEQ ID NO: 12277 - DNA, 657 bp, Zea mays
  Peptide Sequence Number=SeqID_55652
atgcatgcaactgcccagcggttacaagcattcctccactttcgcccagaccagcgggtgaaagggcggacagccatgcaggcggcaagctaccgcgccaagtgggcgcacccctccgactccaacgcgcccagcatggaggcccaggcccacacgtcatgcaaccggcgcgccggttgctacgtgcgagcaactgcaccgccactcacgccactaccgcgcctcctcgactgcggaaccagtaccgcgactcgaggcaaccctgcgtatgacccaacagtgccagccaggcgcgacggtcaatacggccaaaaatgggccggcagtaatggcggtggcagacgagccgaagcagcggacaggcggcacctttggcaggagaagcgggcgacgcttcgccttcgccataatgaccgcgtcaaaaaagggaccgggaaaggggataccccgaaagggatccttctccgcgaaggaaacgggccccgagcccccctactgatcagaggttcgaaggctggcccctcggaggggttcaacagccgcctcagagcgctcgggctctgcgcccactactggtcagaggttcgaaggctggcccctcggaagggttcaacggccgcctcaggccactcgggctccgcgcccactactgattag

SEQ ID NO: 12278 - DNA, 135 bp, Zea mays
  Peptide Sequence Number=SeqID_55653
atggcgcaccggacagtccggtgcgccatcggtaaaaacactgccgaggaccagcctggccccacctggcagagggtgcaccggacagtccggtgcacaccggacagtccggtgcccctaagccagaaacactag

SEQ ID NO: 12279 - DNA, 330 bp, Zea mays
  Peptide Sequence Number=SeqID_55654
atgggtgtgggcaagggacggcttgcgttgtccgatgactcggacgactctcaggggattgccgcggaggtctggacgtacatccgggccgtcgagcgctccgggctcgagggctcggatgagtccgagtactcctcggatgaggaggactcgggcggcggcggcgaggacgaggacgacgacgacggcggcggcggcgacgacggtgacagtgacggcgacggcagcggcaggggcagcaacggcggtagcaggagcggcaacggcggcagcagcaggggcagcggcggcggcggcagcagcaagggtagcaacaaggccagtggctaa

SEQ ID NO: 12280 - DNA, 179 bp, Zea mays
  Peptide Sequence Number=SeqID_55655
tcggagtggcgcaggcggcgctgtccttctgtcagactggccagtggagcggtggagtgacggcggtcacctcggctctgccgggggcgcgtgtcaggatagagctttatgctgatgggggttaccagctgagaattaggcgccttgagggtacccctaattatggtccccgacagtag

SEQ ID NO: 12281 - DNA, 1878 bp, Zea mays
  Peptide Sequence Number=SeqID_55656
atggggattagtcaggacactcatgagtcgatggcaacagatgcagccaattacctttgccaccagcttcagcatcttcttgggcctatctcttctgcgacgagccaaagtggcccctgggaggagaggtcggcgatggttaggttgactcagaagctgcagaaatctaagagaaataagcggtggcggcagaggagaaggaagcatgttgaagagctttttcagaaggagcgtgcggattatgatagagttgaccaggaagctgatgaatggagggctaagcaaatagccaaggacattgcaaaacagagggtggaaagcatgcagcagattgctagaaagaaaacaaatgtggaaagaaagcgcctagaatctgagctggagcttgccctaatggtcgagaaacttcaggagcttcggtctataagagttcaaaaaatgaagaaacaagatccatacttgaacacagatgcaagtacaatgtccccctttgagcatggtgagacacattcagtgaagatttgttctcaggttgatctgtgcaattttgatggcactcatggtgtcaatgtcccagtgggtcaaggctatgatttgactgaaacttgtgctggagcagctttcactgaatgggatgacaccacttccttgctgctatgtgaagtcctcgcagacccacgcaggacacataagttcgacggccacagggccccgtcgaacttaaccgtaagaacgtgggtacccacgaacttatggaaaaaaattcgacggcccccgtcgaacttaaaaacgcacgttcttattgttaagttcgacggtacctacgttcttaatgttaagttcgacgcattcatccaccacgcggacgtctacaccgctgcccctgaggagctggtcgccggcctggagccggtgccgggcaccaacgtgacggaggacgggtacaacagacagtggtacatatactgtccaaagcgatacaagaacggcgagggaaggaccagcgggcacaggctgcgcgcggtggagaccgccgggacgtgctggcactcggagactggcccgaagtccatgcagggcttgcccggcgccacggtctgcagcctatcctacggccacaaggagaaggaggacgggacgtcaggtcggcatcgcttccaccgaatgggatggaggatgttcgagtacgacgacacccagggcggcggcggcgaccacgtgctgtgcaaggtgcaccgttcgtcctcgtctctggccaagaacaagtcgaaggccaagaggacggcgacaggcgatcaccccgaggcgccgccaaccaaggtgatccacgacgtgcaggtccagatgcaggaccccgccggcgccatcttcaccggtgcttacccgacgatggatgatcccctgttgatggtcagaggcgaggaggcatcagaggcggagcacggtggtgacttgggcaagttcaacatcggtggcttattgctcaacatcgacaatgtcgattggaaaactttgctagacaatgtcgatggggagcagcagcaacaacaaccatgcgctgagccggccaagcagagcagcgtgcaggtgcaggtggaccccgccgccactttgatgccctccaatgttcatggtcatgaacaaggcggggattccatgatggtcggaggcgaggaagaacagcgtcgacgcattgaggagcaggtcagcgtcgacgacttgctcgacgtcaacaatgtcgattggaaagctttgctagatatgctagaagacgatgaggagcaggggctgccgctgcagcagcagccatgcgctgagccggcggccgagcagagccagagcagcaggatcgaggacccggccgtgccacccgtttga

SEQ ID NO: 12282 - DNA, 579 bp, Zea mays
  Peptide Sequence Number=SeqID_55657
gcgatagaatcagccattcatgaatacgtcgcccttgcccctggcacaaccatcgaggtggccgagggatgggtggtgactagggaggggaggggaggagaggtggcgatggggtgtaggggcgacacgcagattcgcgtcatgattgggctagccgataaaccatcacctgcatcgtccccggcgacgagagaacgtacgctagccggccgtcaccacctggagatcggagatcggtggcatatggccgccaacgaccacgtcttccgggccaccaacgaggcatccgtcgccctcctgcgcagcctccgcgccggaaccgtcgaccagagattcaaagccttcatccaccacgcggacgtctacaccgctgcccctgaggagctggtcgccggcctggagccggtgccgggcaccaacgtgacggaggacgggtacaacagacagtggtacatatactgtccaaagcgatacaagaacggcgagggaaggaccagcgggcacaggctgcgcgcggtggagaccgccgggacgtgctggcacacggagactggcccgaagctgccttcggccaagtaa

SEQ ID NO: 12283 - DNA, 738 bp, Zea mays
  Peptide Sequence Number=SeqID_55658
atggcggactgcttcccgcccgagtcggacgacttccaccgccgctggctgccgcgggagatcctcgccgacattggcatcgccgaccccgaggccgtcggcgccgagaccccgcccgaggccgccgccgccgccgccgtggaggagctcgcggctcagctcgccggcatcctcggcggcggcgccaaggcgtggccgctcggcccgccgccgacgccgcctacgcccgcggctccgcccgccgccgcggcggccgttgccccgtgctacggcgcgaaggtctgcgggctgcaaggtagcgtcgtcgtgtcctgcggcgagaccaatggcggcggcgccgtgtcttggccgttcgtgccgtacccgccgcagctccactggcaggtcgggagcggcctggtgaaccacggcggcgtgctggactacccggtgctgccccctgctgctctaccctgccacgtcccgccgcccgccaacctgcgcggcggcaccggcgtgttcctgccgcgcatcgaggcgtaccgctacgcggccgctcccccggccaccgccaaaggtggggcagcgacaaagccgtgggctgggactgggagcaggccggcaacggggaagaagcaggagcggcagcaggccgagcaggcggcgccggcagcaaagcacccccagaagcagcggcagcagcagcagcaggctaccggcgcagcgctggctctgccccaggactggtgctaccgctga

SEQ ID NO: 12284 - DNA, 625 bp, Zea mays
  Peptide Sequence Number=SeqID_55659
atggcgccgagaggaccaggtggtcgataggttggtggacaccagcggcccgtcgggcgacggggtcgtgctcgtcgtgggcgagggtgacgggaccgcgcgtggcccgagtgacaacacaggtaaaggtaaagaccgcgaggccacgggtagtgcaagcgatgacacgggtaaagtcggcatcgaggagggaatcaaggtcgggagatggggaagaatgagcaagggggaaaacatcctcatcaaaaacaacatgatgagaagattgaggcactggcacacccaaagacccgaagatgctcatagaaggggggtggtgctgaagaaggcgaagaacaaagaggcaaaaggtccaccagtagttagagaagtcatccaaaatgacgagattgtacctcataccagagatgctgaggatgggagatgtccaaaggtcacaatgaatgaggtcgaaggggcgagtagcgcaggacaaggaagaagaaaaggagaatctagagaggacatcgtggccggggtggccgagacgacggtgctaggtggaggcagaggcattagaggcgagggcgtagggcgtggcaacatgggagcaagaaggtgggtcggggaatcgaatggaatataa

SEQ ID NO: 12285 - DNA, 267 bp, Zea mays
  Peptide Sequence Number=SeqID_55660
atgcccgttcttgcagtgtttaaatactacgtcgtctcctggcttcgcgtctctcatcaccattggtgtgaagttctttcacaagtatcagatctggtgataaaccatgaccgggaaaaagaccatgaccgggaaaaagaccacggcttctctatggaggatgaggaagaggcgggcttctctacggcggcactccaaagaaagccaaggtggtggtggaggatgaggaagaggcagggttggaggatgaggaagaggcgactgtga

SEQ ID NO: 12286 - DNA, 474 bp, Zea mays
  Peptide Sequence Number=SeqID_55661
atggtgggggggattagggggagggatgagaggattagtgggaggatgagaggattagtgggaggctgcggagaaatgactgacacagggtttattctgggacaaccttcttctcatcttctcttcactatcttcttttctcttctcacttttcacttttcactgcctctttctttctctttgctcttcccactcgaggattctatcaaagagtattaccatcatacagaggaggaaaccgaagatgttgaaccatatacaacagtcttcaacccaagaatcaccaagcattgtgatctcaggggcgaggggtggaaaaatggagttgctagcgatttggcagaggggatttatctggagtgtgcttttgctttgagcgagatgggagttgagggagatggtggggcgtgtactccgtcgttttcaggatccgctttccgaagtagtcaagaagcacgaaagacattctgctaa

SEQ ID NO: 12287 - DNA, 84 bp, Zea mays
  Peptide Sequence Number=SeqID_55662
atggcaactggcggcgcctactcacttgatctgcttcctatccgtcctgccgataagagatgcatgcgggtggtcagcggttag

SEQ ID NO: 12288 - DNA, 372 bp, Zea mays
  Peptide Sequence Number=SeqID_55663
atgcaggcggcatgcaaccgcaccaagggagcgcaccctttcgacttcgacgcgtccagcatggaggcccaggcccacacgtcatgtaaccggctcgccagttactacgtgcgagaaactgcaccgccactcgcgccagtaccgcacctcctcgactgcggaaccggtgctgcgactcgaggcgaccctgcgcatgacccaacagtgccaaccgagcacatcggtcacgggacaggcggcacctttggcaggcaaagcagacaacgcttcaccttcgccatgatgaccgcgtcaaaaaagggaccggtaaaggggatactccgaaagggatccttctccgcaaaggaagcgggccccgagcccccctactga

SEQ ID NO: 12289 - DNA, 465 bp, Zea mays
  Peptide Sequence Number=SeqID_55664
atggggatccgcaagaagcccgaatatgtctggaaggagtaccgtgaaaatggaatagaaaacaacaaaaacacccccacctggaggaaaagactccaggctctgtcagaaggagatcccacagaagatgaccccactatcgtctacatggccggatacctccacaccctcgacaaccactacgatgagctctcctcccactgcacccacctaaactctcgagtggaaagcctagagcagcaagtcaaagagcttaagcaagagaaggcatctctccaggagagtctcgacatagcagaaggcgaggaagccaacacccgtgaggcctatcgaaccttgaagatggactatgacaagaagctaaagaagctcgcccccaaaaagaaaatccagaagaagaccaccaaccaaggatgccaaacagagaagaagaagaaggcccctctagccctacctcccccctag

SEQ ID NO: 12290 - DNA, 186 bp, Zea mays
  Peptide Sequence Number=SeqID_55665
atggggtccaggcacagtgcttgctctgccgaggctgagtgccgagagatacagatggttcgagatgcaatgattatgatatggttttggttcgactatgatgatgatgttcctcgaggaggaaatggagaaggtgaagccgtggaaggagacttccaggagttccaggactacgacgagttctag

SEQ ID NO: 12291 - DNA, 2727 bp, Zea mays
  Peptide Sequence Number=SeqID_55666
atgtcaacccccattcaaattgactcaaccggtggtagaattcgagccgatagcatttgtttgaatgtatgtgtggaaataagggggatagcgtttcccgccaacctcatagtaatgggtactcagggaatagatgtcatcctggggatgaattggctagataagtatcaggcagttatcagttgtgataagaggacaatcaagttggtgtctccactaggagaggaagtggtgaccgagttagtcccgcctgagccaaagaaaggaagttgttaccagatggttgtcgatagcagtgaagcagacccgatcgagagtatcaaggttgtgtccgagttcccagatgtgtttccaaaggacttaccaggtatgccaccagagcggaaagttgagtttgctatagagcttcttcctggaaccgcccccatctttaagagagcttacagaatatctgggccagagttggttgaacttaaggagcagattgatgagctgtcagagaaaggttacatccggccaagcacctcgccttgggccgctcctgtcttgtttgtggagaagaaagatggcaccaaaaggatgtgtatcgattatcgagctttgaatgaggtcacgatcaagaacaagtatcccttgcccagaatagaagatctgttcgaccagttgagaggagccagtgtgttctccaagattgatctgagtgtattcatggactatctcgataagtttgtggtggtattcattgatgacattctgattgattctcaaagcgaagaagagcatgccagtcatttgaggatggtattgcagagactgcgagagcaccaattgtatgcaaaattgagcaagtgtgaattttggatcaatgaagtcctattcttgggtcacataatcaacaaagaaggattggctgtggatccgaagaaagtggcagacattctgaactggaaagcgcccacagatgcccgaggaatcaagagtttcattggaatggccggatattatcggcgattcattgaagggttttcgaagattgcgaaaccaatgacagcgttgctaggcaacaaagttgagttcaagtggacccagagatgtcaagaggcctttgaagcgctgaaagagaagttgaccacaacgcctgtcttagtcttacctgatgtgcacaagcccttctcggtgtattgtgatgcttgttacacaggtttgggagagttggcagcagtggttcatgcactaaagacatggaggcactacctgtatggacagaaatgcgatgtttacacagaccacaagagtctgaagtacatattcactcagtcagagttgaatatgaggcagcgaagatggttagagttgatcaaagattatgagttggagattcattaccatccgggcaaagcgaatgtagtggcagatgctttgagcaggaagagtcagatcaatctgatggtcgttcgtccgatgccttatgagttggccaaggagttcgacaggttgagtctcgggtttctgaacaacatgcgaggagtcacagttgagttggaacctaccctggagcaggaaatcaaagaagcacagaagaatgatgagaagatcagtgagatctggcgactgattctagaaggcaaaggcaaagattttcgagaagatgcagaaggcgtgatatggttcaaagaccgcttgtgtgttcccaatgtccaatctattcgggagttgatcctcaaggaagctcatgagacagcctattcgattcaccctggcagtgagaagatgtaccaggatctgaagaagaaattctggtggtacggaatgaagagagaaatcgcagagtatgtggctatgtgtgatagttgtcgaagaattaaggcagagcaccagagaccagctggattgttgcaaccgttgcaaattcctcagtggaaatgggatgaaatcggtatggacttcatagtcggattgcctcgcactcgagccggctacgattccatttgggtagtagtggaccgcttgaccaagtcagcccacttcatacctgtcaagaccaactacagcagtgcagtattggaagagttgtatatgtctcggatcgtttgtcttcatggtgtgccaaagaagatagtgtcagacagaggaacgcagttcacctctcatttctggcagcagttgcatgaagccttgggcacacatctgaatttcagttcagcttaccacccgcagacagatggtcagaccgaaaggaccaatcaaatccttgaagatatgttgagagcctgtgcgttgcaagatcagtctggatgggataagagattgccttattcagagttctcctataacaacagttaccaggccagtttgaagatgtcaccatttcaggcgctctatggaaggagttgtagaactccgttgcaatgggatcaacctggagaaaagcaagtgtttgggccagacattttgcttgaagctgaagagaacatcaagatggtccgagagaatctgaagatggcgcagtcaagacagcgaagttatgcagacacaagaagaagagagttgagtttcgaagtcggagactttgtctatctgaaagtgtcaccgatcagaggagtcagaaggttcagagtcaaaggcaagctagcaccccgctacattggttcgtaccaaattctctcaaggcgtggagaagtggcctatcagctcagtctgccagagaattttgtctgctgtgcatga

SEQ ID NO: 12292 - DNA, 453 bp, Zea mays
  Peptide Sequence Number=SeqID_55667
atgggcaagggtaccaagcgcaagcgcgagccgactcctccgtcggaggatttcggtgactcggaatactcggaggaggagttcttctccgagtccgagggatctccggctcccgtctctcccccggcgtcgtctgatgattcagacgactcccaggggattgccgcggaggtctggacgtacatccgggccgtcgagcgctccgggctcgagggctcggatgagtctgagttctcctcggacgaggaggactcggacggcggtgaggacgaagatgacgacgacgacgacggcgacgacgacgacggtggcgacggcgacggtgacggcagcggcggcaagggcagcaccagaggcggcagcagtacgggaagcaccagaggcggcagcagcaagggcatgttacacccggattttaggggtccaaaacccgggcgcgaacataatcaccag

SEQ ID NO: 12293 - DNA, 1125 bp, Zea mays
  Peptide Sequence Number=SeqID_55668
atggctgaaaggtaccgactcccacggagttgcgttcctccaacgacaaggcgaaaggactgcgggcatcccccatccgggggcttggaaggtggaaagacacgatgcataagggagcgcggagacatggtcgcctttcaagggggtcaccctccttttaaaggcgactctccctacttgcgtccccaactgtcgtgggctgagtcttctccaacacgttccaatgtcctccccctacggcgtgggggctgggtcccacacgtcatacaagccgtcccagggcagaagaagccaagggggcgtttggttacttgtatgggtgagcctggctcgtatctagtgagcctggctcagactggactggctgagtgcatgcagtatagcgtgtttggttatgcagctgcaccaccggagaaggcaaccaaacgccccccaaaccgccgcgcgcggtgcatgcaaccgcccagcggttacaagcagttctccacttttgcccagaccagcgggcgaaagggcgggcagccatgcaggcggcatgcaaccgcgccaagtgggcacacctctacgacttccaacgcgcccagcatggaagcccacgcccacacgtcatgcaaccggcgcgccggtcgctacgtgcaagcaactgcaccgccactcgcaccactgccacgcctcctcgactgcggaaccagtaccgcgactcgaggctaccctgcgtacgacccagcagtgccagctaggcgcgacggtcaatgcggccaaaaacgggccggcagtgatggcggtggcaggcaggcgggagcggcggtcacgtcgtcagccaagcttacgtcccatcctggggcaggaccgggaaagggggataccccgaaaaggacccttctccgtgaaggaaacaggctccgagcctccctactgatcagaggttcgaaggctggcccctcggaggggttcaacagccgcctcagagcacgtgggctccacacccactactggtcagaggttcgaaggccggcccctcggaagggttcaacggttgcctcaggccactcgggctccgcgcccactactgatcaggggttcgtaggctggccctcgaagggttcacagccgcctcagacatag

SEQ ID NO: 12294 - DNA, 936 bp, Zea mays
  Peptide Sequence Number=SeqID_55669
atggccagctcgcatgagggaacgaccagaccagccgaagcattacgcgaggcattaagacctcggaggagtcaaaccactcctccgaggcctcgggggctacacccggcgggtgcgctcgcgcgcacccaccggaacaaaacgcaaccgagaaaggctggtccccttgcaaaaaagtgcgacgaaagcctccaagcgagtgctaacactcccttcgaggctcgggggctactgtcggggaccataattaggggtaccctcaagtctcctaattctcagctggtaacccccatcagcataaagttgcaaaggcctgatggtcgacagagccgaagtgaccgcagtcacttcgccgctccactgaccggccggacagaaggacagcgccgcctgcgccgctccgactgctgtgccgctcgacagagtgaggctgacaggcagtcaggcccgacctcaggcaccataggaagctccgctccgcccgacccagggctcggacttgggctcagccccagaagacggcgaactccgcttcgctcgacccagggctcggacttgggctcagccccagaagacggcgaactccgctccgcccgacccagggctcggacttgggctcagccccagaagacggcgaactccgctccgcccgacccagggctcggacttgggctcagccccagaagacgacgaactccgcttcgcccgacccgagggctcggactcagccctggcctcagccgacggtctccgcctcgcccgacccaggggctcggactcgacctcaacctcggaggagcctccacatcgcccaacctagggcgcggaccggccacgtcgacaggaggcgccatcattaccctaccccaagctgactcaggctacggggaacaagaccagcgtcccatctggctcgctccgccagataggcaatga

SEQ ID NO: 12295 - DNA, 381 bp, Zea mays
  Peptide Sequence Number=SeqID_55670
atgaagcggctcctgcggcggctgtcccgcacggtggtggcggcggcggcgtccagcgaggacggcggtgcggcggcgcggcccagcagcaaggacgacgggagcaggaggcgcaggaggaagaaggcggggtccgtgccggagggccacgtgcccgtgtgcgtgggcgaggagggcggccccgtggagcgcttcgccgtgcgcgccgagctgctgggcgagccgcccttcgccgcgctcctccgccgcgccgcgcaggagtacggctacgcgcaccccggcgcgctccgcatcccctgccccgtcgccgacttccgccgcctcctgctccgcctctcccgcgaccccgcgcccgccgccggacgctacgcctacgcctag

SEQ ID NO: 12296 - DNA, 708 bp, Zea mays
  Peptide Sequence Number=SeqID_55671
atggggagaagcaagtcgggctttgatctcggtcccgccctcagcttcaaggatgttcatcatccttgctggggcagagagcgaggcgagccagggctctacctcccgcgcgggtcggctggccacctcctcttccagcttctggtggtggaaaccatcctccagctctgcggaggaggcgtcctccagccatgccggggaaggcgaactgttgctgcccagctaggatgcaacattccgccctcttcctcgctttcgtggcgaggacaggagcgaggacctgccggaacccctcggccgctctttgatgagtcgaagccaggggtagcggtgtcagcacggacagaggcagagttggctcgaaaagaagacttggtcggccggagcctggccgggtcgtccgttagcgggaccgacgccggagttgatctgccgaggcctcgggccgggctgatgtcttcgggggacagctggccgaggcctcagggtgaccagccgagccgcctgctcgagccggattcttggaggagacccgggcggcgatggcccgggcgtgatgatgaagtcgtccttcagagtggagaccctcggaccgtgtcgccgtcggtggctaggtcggacctcgccgaaggtgtagttgacgccgagggtgctgctgctcccttcaaccatcaagatccgagcctgcaggatcgaattatcttgtag

SEQ ID NO: 12297 - DNA, 882 bp, Zea mays
  Peptide Sequence Number=SeqID_55672
atggccttgctagaccctcctgagtgcttccagtccgaggtggctctcaactcggtgcgcaacctgctcaaaaggggtgcgccgacgttcgccgaaaggatctgtgccagcgccactccccccagcgatctcaccgccgaggagttcatgctcttcgtctccaacttctcctgtgggttggcgctgccgatctcgcctttcttcctgctgctgttggaggagctcggcctccaacttcagcacctcacgccccgctccatccttcgggcggccatctttgctcacctgtgggagatgttcgtgggggtggtgcttcttccgccagcgcccgggcaaaagggtgtcgtgcagcgaccttctggaggtggaaagcgaggcgagctgcggctccatctttcgcgtggacttcaccagcatcccatggaggccgctgccgctggcaagctgtatcaccgggttgctgccagtgccgctgttcccagtggccaccaccgtgttcaggtatttgctcttgctgtgtgtgactttaccaactcctctcctggtgcatggccccttgggatgcttagggtacagaaccaggctaagcggctacacggctccggaccaccccaggagacgagcgtccattctctaggaccggaccccaggttcccggacccatcgggctatagttccaaatactcagatacctgtcgcagagtggtggagcgtgcaggcttatggtacgaaaccaagctaagcgactacacagctccggaccaccccaaggaacggtccacgtcctcacgccacaaccattcctgcatagactcatcagaagattgggcccgtggggagcccataagggtttccaggggaagacaggcttcggacccgtag

SEQ ID NO: 12298 - DNA, 183 bp, Zea mays
  Peptide Sequence Number=SeqID_55673
atggcacatttccctttcagtttggtgatggagatgtctggctattccgaggaggcactgattgttgcctacaccctccttctggacaacaaggcccaaggccagggctttgttaacatgaatgagggacataggaacctttggcttaggaccttcctagccaagaactactactacatgtag

SEQ ID NO: 12299 - DNA, 780 bp, Zea mays
  Peptide Sequence Number=SeqID_55674
atgaccgcgtcaaaaaaggccctgagcctccctactgatcagaggttcaaaggctggcccctcgaagggttcaacagccgccttagagcgcttgggtttcgcgcccactactggtcagaggttcgaaggccggcccctcggaagggttcaacggccgcctcaggccactcgggctccgcgcccactactgatcaggggttcgtaggctggccctcgaagggttcacagtcgcctcagacacagagcgagggatggccctgggtatgttcaatacataaccaaggctcgggctacgctcccgagaggctcgggggctgctctcgcaaacccggctccggccaaaccgttgacagcgtcaacataccagcccaagaacttgggacccgaccagccgcctgcgtcgctccgactgctgtgccactcgacggagtgaggctgacagcagccaagtccggcctcaggcaccataggaaactccgcttcgcccgaccccagggctcggactcgggctcagccccggaagacgacgaactccgcttcgcccgaccccagggctcggactcgagctcagccccggaagatgacgaactccgtttcgcccgaccccagggctcggacttgggctcagccccgaaagacgacgaactccgcctcgcccgaccccagggctcggactcgggcttagccccggaagacgacgaactccgcttcgcccgaccccagggctcggactcgggctcagccccgaaagatgacgaactacgcttcgcccgaccctag

SEQ ID NO: 12300 - DNA, 511 bp, Zea mays
  Peptide Sequence Number=SeqID_55675
caagaggactgcgagggccgacgattcaatgcaaaatgcaagcacgcgcggcatagaagacgcgcacatttcctatgcacaaaagcgaggggccctaattagcattcacatgcttctatgtatggaactcgctgaaggttgggtgaaaattaactcggatgctgcttttgttgctaagacgggcaaaggggctgggggtgtggtgatgaggaactcacagggagaggttttggcggcagcagcacagttatatgaacacatccctgatgcgctaacgagcgaagctttggctgctcgtgatggcgtggtgttggcccagatgcttagcatggaaaaagttattttagaagttgacaactctgtcctggtggctcttctccggtcagatgagggaagaaggagtgctatcgcaggtatcttcggactcgaatcggtaccacagtgggagaagcccaaggaatacgaaggtctacacagcaccaaagctgtgagcaggaaagcttcgacgtaa

SEQ ID NO: 12301 - DNA, 1503 bp, Zea mays
  Peptide Sequence Number=SeqID_55676
atgtttcattttcgagccaactccgcctctgttcatgctgatatcgctacccctggcctcggctcgtcgaagagcggccaaggggtacgaacaaccccactccatgggggaaggcctgcggagcaacagaagactgacgagcggctcgccgtcgcccgctctgactacgacaacaacgacccccgctccggatggtcgagctgcagcagcgcaggcctcagggtgggcgctgctgcaatcttgccctccatccgggggcttggaaggcccacgcgtcgcgcaaccggcgcgccggatgctgcatgcaagcaactgcaccgccacttgcgccaccaccgcgcctccttgattgcggaaccaataccgcgactcgaggcgacccagcgcgcgacccagcagcgccagcctgacgcggcagtcaacgcggccaaaagtgggccggcagtaatgacggtggcaggcgcgcgggagcagtggtcacgtcgtcagccaagctcacgtccaatccgggggcagcaagagaaccccctctcacggcgtgaagacaacgcgcccgtgacccgttcctcgaacggctcgcgcacgcgcaacggccaccccgccaactactcgccccgtcgctttaactccgcggctggacaggcggcgcttctggcaggagcagcgggcgacgcttcgccttcgccgaaacaaccgcgccaaaaaaggctggccccccgaagggttcaacagccgcctcagatcgcgtgggccctacacccactactggtcagaggttcgaaggccggccccccgaagggttccacggccgcctcaggctactcgggctcccgcccattactgatcaggggttcgaaggctgacccccgaagggttcacagtcgcctcagacaccgagcgagggatgaccaggggtacgttcgatacataaccaaggctcgggctgcgctcccgaggctcgagggctgctctcgcaaacccggctccggccgaaccgttgacagcgtcaacataccagcccgagaacttgggccccgaccgtgcacccgggctacggccagttcgcatgagggaaccaccagaccaaccgaagcattacgcaaggcattaagacctcgggggagtgaaaccactcctccgaggcctcaggggctacacccggcgggtgcgctcgcgcgcacccaccggaacaaaatgcaaccgagaaaggctggtccccttgcaaaaaagtgcgacgaaagcctccaagcgagtgctaacactcccttcgaggctcgggggctactgtcggggaccataattaggggtaccctcaagacgcctaattctcagctggtaacccccatcagcataaagctgcagaggcctgatggggctcggactcgggctaagccccggaagacggcgaactccgctccgcccgacccagggctcggactcgggctaggccccggaagacggcgaactccgctccgcccgacccagggctcggactcgggctaa

SEQ ID NO: 12302 - DNA, 597 bp, Zea mays
  Peptide Sequence Number=SeqID_55677
atgcaggcggcatgcaaccgcgccaagtggacacgcttctccgactcccaacgcgccagcatggaggcccaggcccacgcgtcacgcaaccggcgtgccggatgctgcatgcaggcaactgcaccgccacttgcgccaccgtcgcgcctcttcggttgcggaaccaatgccgcgactcgaggcgacccagcgcacgacccagcggcgccagcctggcgcgacggtcaatgcggccgaaagtgggccggcggcggcgggagaagcggtcgacgcttcgccttcgccgtaataaccgcgccaaaaaaggtacgccacgtcgttcgatttcgtatccttttccttttttcctctttctctatctcttgcaacagggaccgggaaagggggataccccgaaaaggatccttccctgtgaaggaaccaggctccgagcccccccctactgatcagaggttcgaagactggccctccgaggggttaacagtcccctcagatcgcgtgggccctacacccactactggtcagaggttcgaaggccggccccccgaagggctccacggccacctcaggctactcgggctccgcgcccattactga

SEQ ID NO: 12303 - DNA, 600 bp, Zea mays
  Peptide Sequence Number=SeqID_55678
atgaaacgtggtcgctggcgaagaattgtggcatgcatggttgatccctgccctcctgaggtggttgcacacgagcggtacaaccaggcgagctcccagcgcgatattcctaggccacagccactgcgtggcacgcggtcaacggcgacgtccttggacccggtgcagacgacggcgattttgtcacggtggacgcgcagggaggaagtggaggtaagggagggaaagagggggtatccctacttatcccccgaagactcggctcgggataggggtaacgacgcgctcgattttcggcaatggtttcgagcttcgctcgcgggttgttgttgtcgccgcaaccgggataacatgcggggcccgaccggcagcgactcaagcgcgcgcgcgatgagcagatgccagtgggcccccgatgtcagaatgaccatgtgcggggaaaggcagagacttgggccgcgccagagggattcacaaggtgggccaaatggatatagtcggcccaggtcactaagacctagcaaggaccaccacacacctggaggaaatgctggcaacatggaggactttgaggagtttcaggactacgatgagttctag

SEQ ID NO: 12304 - DNA, 168 bp, Zea mays
  Peptide Sequence Number=SeqID_55679
atggcaggtgatatggacatttttgacccaaacgaacgttatattggaggcatcattcaacacttgccttcatatgctggtaaattcgatcctcatgcatacattgattgggagctcaaggcacaacaaagttccacaatcttgggcagaattcaaatttcattttag

SEQ ID NO: 12305 - DNA, 249 bp, Zea mays
  Peptide Sequence Number=SeqID_55680
atggagagtcatgatcgccgggcagaaagggaatcacagcttgtgggtggcaatgagaatgatggtttgtcattgactatggtaatggttgtctgcattgcaaccacttctcaggagaagatgaagtcgtggaaggagacttccaggagttccaagattacgacgagttctaggcgtgggttagcggcaacccccagtcggctgcctatgaaggccgcgtgtatctacgtttcatttttcgcactttga

SEQ ID NO: 12306 - DNA, 195 bp, Zea mays
  Peptide Sequence Number=SeqID_55681
atgtggaaggatcgagtggagcatgccaaggatgtgtgggctctctacccgggacagaccgctcacctgacggccttgcgaggtgaggcgatgtaccagctgatgggactggtggagtctaccaagatcaccctggataatagggaggaccttgtcgtagacttgtccaccgagttggtggaaaaggacctctag

SEQ ID NO: 12307 - DNA, 744 bp, Zea mays
  Peptide Sequence Number=SeqID_55682
atggcttgtatcaggtgcactacatgtaagtctgtgatcccctttttgccttctcgcctggcggagcgtccactacgtcgcacggtgccaggtcagtttaaccacctggagagactgcattgtcgcttgcacgaggagcaggagcgccgatgccagaagcaggagcaggactcttccccctcgcctcagcgagaggtggagtttgagaggccaccttcccctgcacctccgccagagatgccccctgcaccaccccagggcatcccggctgctggaggagaccctgacggagacggagatgacgacgacgccggtgaggccttctcagagcactattctattactgagagggatactgtcgaggcaacacgatgggcactttctcagtattgctcgttgttcagcggggtagctgatggccttgacttgaagtactaccctcgccgttcgactggcagtgctggaggtgtgattgctttgccagttagtgagggcaatcccaggctgaacagcatggtcaacttggccgttgtgctcaacacagagttggaccacgcccttgatgagttgggcaaggttcgggcggaggttgcggaattgtgtgctgaatgcgcggcacgccactatctggatggtggttctcccgcccctgtcgggattcagcacccttaccgttcaccgccccgtggtcgcttcgactatggtaccccagactgcaggacccggatagatttggatccctag

SEQ ID NO: 12308 - DNA, 141 bp, Zea mays
  Peptide Sequence Number=SeqID_55683
atggccgtgatgggttcaacatcggaaaagatgtacctctgccaggtgaggaagcaaccaacttttgttgcttctgttctaaggtggtaccgaaggaagaacaccaggagtaaagctgcgggaggaagggttcctccataa

SEQ ID NO: 12309 - DNA, 675 bp, Zea mays
  Peptide Sequence Number=SeqID_55684
atggacttcgtgcaggatctggacgccttcggtctcagtgacacatttaagcatgggttgactgagcccctccttgtaaagttgtccctcaatgagtgcgaagtcctggcttcagtgtttgaggcgcttggcctcgttgatatcgcttggatggtaatatccctgcaggaactgggttattggtgcccgcaagtcttcggtcatgatgaggttgactatgcggtggccctcagcgtcgttggttatttggaggccctctgggcagtggacggctggcgtgccgatgacgtggtagaatacgtcggagggcaaggcctcgcctctggctgctgctttggccaacgcatcagcctcctcgttcttggcacggtctacatgttgcaagctacgcctgcccccgcatggcaccatgcatcgtcgcaatggatggtccacaccttctctgcaagctcgtccggctgcgttattggccttgtccagtcaatgatgaagtctgccaggacttgtgacttgatggctatcctaggctcgaagctccgtcatgttgcatttggaagtcgtgaggacttcggagatgtaataaactggacactgccgagttgtgccctctctggcctgctcttggaccaacgctgcgctgactgcgtgtggcgaagctgcgacgtagagcaatag

SEQ ID NO: 12310 - DNA, 115 bp, Zea mays
  Peptide Sequence Number=SeqID_55685
acattgtggtacaggtggttatgagattgatggttctggttatgattatggtattggcgaagatgaagctgtggaaggagacttccaggagttccaagattacgacgagttctag

SEQ ID NO: 12311 - DNA, 672 bp, Zea mays
  Peptide Sequence Number=SeqID_55686
atgggcagtgccgcagatgtggagcagtcgaatgagaggctagacgggctggagcaccacagcaggctggtgtcgctgttggccgaaggaaattcctgcttgagccaattacagaaggccctgatatttgtcaaattgatggttgtagtgttaaattggaatacaagaggaggcaagtcaaatatgattttatttaattatgacagcaaacgtgacatgccattacaatttcgtttatgcaaaaaaaattatactggcagagctcctgacggagcacctgacggagctcgccacaggtaccaaacggcgcagcagcagttgatgtgcaacccgagtgtactgccgctcgaggaggccagaagcattcgaatcttggtcgtattgtgcttgaagttgctaaggactcgcaaatcccccgccaagcaaactgctagaaatcttttcagaggtggagatgatgaagatgatagtgctgatgccgacacaaatgatcctgttgtaccttggtcattaggtagagtaggagttgggcatatggtgtacatctccggtttgacttgtgccttgagttcaacaaatatccttgaagtctcatggcgtgaaaaggagccagggtctctgtttgttaacttaagcttgctgccatatgctgatgctgaaaagttactgtaa

SEQ ID NO: 12312 - DNA, 738 bp, Zea mays
  Peptide Sequence Number=SeqID_55687
atggagacctttggattgcataaccccatggcctatgggtccttggagtggttgagcctgagatcatcgacgagcgcaaacaccacatcccccgggaacagatccttgggtcacaagtccctctcggtgccggtgggggaggagcggctaccggccaacagcgacaccagcctgctgtggtgctccagcccgtctagcctctcattcgactgctccacatctgcggcactgcccatgacagctactgctgctccgacctcctcctcatcgacgctgtgggcgccggcgtaccacaccggtctagggacgtggcgtgggcgttgtgccacggtcttcctgacacggatgaaggggaagacggtgatgttcgtgggcgactcgctggggcgcaaccagtgggagtcgctcgtctgcctgctgcacgccgccgcgctgcagtcgccgacgcagctcgtctccgtggaccctttgtacacgtacaagttcctggagtaccaggtgacggtatccttctaccgcgcgccgtacctggtggacatcgacgtggtccaggggaagcaggtgctgatgctggacgacatctacgagaacgccgagtcatggcgcgacgccgacgtgctctccttcaactccggcctctggtgggactacatgggcgagtctgggcgatactacgaggacatggaccgcacggtggcgttccagcgcggcgcatggagcacggagcactggcagtag

SEQ ID NO: 12313 - DNA, 399 bp, Zea mays
  Peptide Sequence Number=SeqID_55688
atgtctatggaggaagaagcctacaagggtaacttcgagggggagctgcgtcagcagtggggagcggtggagctggggcgggaggagttggaggcgcacgcgcacctcacggacaagggtgtgcacgccgacggggacgtcgtccagcggctcgtgatcgaggaggcgtggcccggctgctgccagctcttcgagtggcgcgagaagggcgctgtcactggcgtcaagatgcagggccgagggcgcgtgcggggcgttcagcacggcgggcgcagtggggtggagggcgccaacttcctcgcctcggggaagctcctcgacctcagcgagcagcagctggtcgactgcgagagacggggagagcagagagcccgtgccgtgatacgtcgtccatcatga

SEQ ID NO: 12314 - DNA, 1554 bp, Zea mays
  Peptide Sequence Number=SeqID_55689
atgagcatcgcagcagacgccaccgtcacgccaccgcgccgagagagaaaagccgagcggtggcaggcgaggggacgcctgccgcggtgggttggtgggtgccgcctccgcatccggtgccgctgctctgttcctcagtccgcccccatttacctcgcatggattcctgcttgcttctccccaactccacgcgccgatcctccaacctccaggagagcgcgacgcgatccaattgaggtccaggaggtggagggtgcctgcgctgtccgtgtgttcccctttgtttccatcccaagcctggccgcgccgccgctggacgccatcgcgcgcctgcacagcgtcttggtgaggtggtcgaagcagcggcggcggccgcagctcgggagacccggcgcgaggaagcggtggccgagccggcggagcgcgatgctgtgggtggcgcgcctgtccggcttgttatccgccgccatggtggtggtggtgctgtcgccgtcgctccagtccttcccgcccgccgaggccatccggtcgtcgcagttcgacggcagcgtccgcttcccgggacagatcgcagggggcgccaggggggtcgccttccgccgcgccccgccgttccgcaatgccgccgactgcggcgccggcgcggacaacggcaccggcgccaatgtctgcgacccatggctcgtccacatcgcgattacgctcgacaacgaatacctgaggggctccgtcgccgcggtccactcggtggtgcagcacgccaggtgccccgagagcgtcttcttccacttcctcgtctccgacccggggctcggggacctcgtccgcgcggtgttcccgcagctccggttcaaggtctactacctggaccccgggcgcgtccgcgggctcatctccacgtcggtgcggcaggcgctggagcagccgctgaactacgcgcgcaactacctggccgagctcctggagccgtgcgtgcgccgcgccatctacctggactccgacctcgtcgtcgtggacgacgtcgccaagctgtggcgcaccgacctcggcgggcgcaccgtgggcgcgcccgagtactgccacgccaacttcaccaagtacttcacggggcggttctggtcggaccagcggttcgccgggacgttcgcggggcggcggccgtgctacttcaacacgggcgtcatggtggtcgacctggagcggtggcggcaggcgggctacacgcagcgcatcgagcggtggatggaggtacagaagtcggcggcggggcgcatctacgagctggggtcgctgccgcccttcctgctggtgttcgcggggcacgtggcgccgatcgagcaccggtggaaccagcacggcctcggcggcgacaatgtcctgggcagctgccgcgacctgcacccggggcccgtgagcctgctgcattggtccgggtccggcaagccgtgggcgcggctgggcgccgggcggccgtgcccgctcgatgcgctctgggcacccttcgacctgtacgaccccggcggcggcgccgaggagtccccgtacaaattctga

SEQ ID NO: 12315 - DNA, 54 bp, Zea mays
  Peptide Sequence Number=SeqID_55690
atgggtggcgacgccccaagccatcctacaggcggcgtgtctgactattcctga

SEQ ID NO: 12316 - DNA, 294 bp, Zea mays
  Peptide Sequence Number=SeqID_55691
atggcttctacggcggagacgaccgagctcccctacgatccttgcccgtatggtgatcaatgtgagttcatctccttcgtgagcggtcaagagcacatcccaatcttaattggcgctaatgaaccccagaagtttgttatactcctctctagtcaagaggcgaggagaagtgttgattcagagagtgaagggaggatagagccacctcatcctcatcatagtctttatcccctgaggatggcacctgtgcaccaaattcgactacctcccatatacttttgcggagcgaggtaa

SEQ ID NO: 12317 - DNA, 432 bp, Zea mays
  Peptide Sequence Number=SeqID_55692
atgggcgtgcctgacctctgcgcgcactggcgcgcaataaatgcgctgcaggtttgcctctccgccgcgcgccgcctcccgtccgcgactgtgctggtgctggacggcgctgttgtgctgccgctcgcgcagaggctcttcgctgccacgcttggggaggccgaagctgagctcgaggctgttgtcctgggccgcctcttcgtctccacgctcggctgcggcagccgccagctccgtacccggcacgctgcaacccaacagccctgcgtgagcactcagctcctgtccatcggctgccccgagcttgcctggtggacccggagggcgaggacgtcaggcgggttctccctggtgcagccctggagtgtgcgttcaggtagcgctagaagaggaagtgttgctgcagggagagggtgctgctgctacgtctag

SEQ ID NO: 12318 - DNA, 567 bp, Zea mays
  Peptide Sequence Number=SeqID_55693
atggtcttcatctcattcaattcatggtctactccagttgaaaaaatgcagattgctgagaattcagcagctgaccgtgttgaggtaccaacagatggtgctagtgaatgggaaattgatgtaaagcttctcaagtttgggaataaagtagcatcaggatcatatggtgacctttaccggggtacatattgcagtcaagatgttgctattaaagtgctgaaacctgagagaataaatgcagacatgcaacgtgaatttgctcagcaagctctctgtcgtggatatcctaccaaatttgcttcttacttccattactgtcgctcactgcgtttcgaagatgcaccggactatcagtacctgaagagattgttcagagacctttttattcgggaaggtcgtctagctactgtagttgcccatcgtcaaagttttgtagagtgggttaagaacgtgggtacccacgttcttaatgttaagaacgtgggtaccgtcgaacttattgtgcagtcctcgcagacccacgcaggacacataaggtcgacggccacgtggccccgtcgaacttaa

SEQ ID NO: 12319 - DNA, 168 bp, Zea mays
  Peptide Sequence Number=SeqID_55694
atggctcccaagagagctaacccccaaggaagcagtagtcacggagggggaaacgcgggttctccggctgcgcccggtgtgtcaggggtgggccagctgcaggccgaggtggccttcgcgcgtgtcttccggttgtgcgcgccgctggagggaaggctcctgaggtag

SEQ ID NO: 12320 - DNA, 288 bp, Zea mays
  Peptide Sequence Number=SeqID_55695
atggagctcatccgaccttcttcatggtgccctggatcccctcccgtgccacgcctgagccctgggcatcgccgtttccgacccaaccgtctgagattcaccgcgccgctaccctgttccggctcaacgcagcgactgccctgctccagcgccggtggagccctgcgttcttccccgccgtcaatcgagctccgtcgatggttcaccatacaccatggtcgaatctgctgccattttctcccaccgggaaatggggtgattgggcgcgtgggtggaggtgtccggtga

SEQ ID NO: 12321 - DNA, 174 bp, Zea mays
  Peptide Sequence Number=SeqID_55696
atggagagtcatgatctccgggcagaatgggaatcacggcttgtgggtggcaatgagattgatggttctggttatgattatggtattggttgtcagcattgcaaccactgctcaggcgaagatgaagctgtggaaggagacttccaggagttccaagattacgacgagttctag

SEQ ID NO: 12322 - DNA, 561 bp, Zea mays
  Peptide Sequence Number=SeqID_55697
tcggagtggcgcaggcggcgctgtccttctgtcagactggccagtggagcggtggagtgacggcggtcacctcggctctgccgggggcgcgtgtcaggatagaggtgtcaggccacctttgcgttaaatgcccctgcaatttggtcagtcggtgtggtgatttagtcaaggttgcttctgagcgaagccaaggccttgggcaagccggtgatgtgtccgccataaaaagggggcctcgggcgagacggaagtctctcgaggtcggctgccttcggccgaggctaggctcgggtgaagcgcgatcgagtcactcgtgtggactgatccctgacttaatcgtgcccatcaggcctttgcagctttatgctgatgggggttaccagctgagaattaggcgtcttgaggcccccgagcctctgcacagggcgagaggacgatcagggacagactcggctttttacatacgccccttcgtcgcctttccgcaaggaggagggggggagtgcgccatgttaccctcgatgggcaccgaacatggtgtctccggtgagctgcaagcgg

SEQ ID NO: 12323 - DNA, 996 bp, Zea mays
  Peptide Sequence Number=SeqID_55698
atggcgagagcgcggaccgaagggttttcaattcaaattcaaaccaattcaaacatgtgcatcaattcaaaggttaatgaacttgctcctatgcagactgatggcaaaaatctaaatcaaagctttggtcacattgtggtgattccttatccaaaacaatatatttaccggtcaaacacctcaaccttgatgaggcacccaaaatacactcgactgtctaaaaccaatgaagtagaagggaatgagtctgataggttgggcttggggatgaggaaactaccatacatcgatgtcactatagagagacagaatttgatgccaacacatatgttggaaaatagctctgaatctaatagcattgcgcatcaaacttgtgctttggagaccctagccaacaaaggtgagcaagtgggtaagataggaacgagtgaggaactaaagctagatatgtctcctcattctgcccagaacaaaagtaatcctaaagatgcacttcgtcgtagcctacggtgcaatgtaccaatgactaatggatcctccatagcatatatggattcacttgagaaggcaatgaatcttgctactgctcgcaatttttatgtgaatggaggatctagttttgttgttgggcacaagcagtattatacatctccatgcctaagacctcaagcaacagataggttatcaagtcataacatcattacgatcctatctaagatagggattaaaataggtggaaataggctaggggttgaagagcacaagatcatgagcaattgtatagagatatctttgggtgtaaaaaatagagattcctctaaggcgatttctaattggtctaagcttgttgcttggaatgagttatgccaaaagcttgttaacatagctttacatgagatccggatatttttcgctgggatttgcattcaaatgaggccaagagatgatttgtatcgaactttaaatgcgatgaaattcttatcgaaaaaaatctga

SEQ ID NO: 12324 - DNA, 1932 bp, Zea mays
  Peptide Sequence Number=SeqID_55699
atgccgtcgcttcgagcggtgatggtgcacggcggcggcgaaaaggacggcggcggctccacggacggcgtgccgcccccgtgcgcgcataccctggtgagcctcctccgggcgcggtcgcagcgcagcgccaaggccgacgagaaggtggagtgggtgcggtcgcagctcgtcggcagcgacgcggagttcgagacgccgttcggccgccgcgcgctcctctacgccgaccacaccgcgtccggccgtagcctccgctacatcgaggactacatcgtcaagcacgtcctgcccttctacgggaacacgcacacggaggacagctacgtgggcagcaagacgacgcggatggcgaggaaggcggcgagctacatcaagcggtgcatgggcgcgggccccgacgacgcgctgctcttctgcgggtcgggcgccacggcggcggcgaagcggctgcaggaggcgatcggggtggcgtgcccgccggcgctgcgggcgcgcgccgcctcgcagctgcgcgcggaggagcgctgggtcgtgttcgtggggccctacgagcaccactccaacctgctgtcgtggcggcagagcctggccgacgtcgtgcaggtcggcgcgggcgccgacgacggcctcgtcgacctggccgcgctgcgccgcgcgctggggtcgccggagtacgctagccggcccatgctgggatccttctcggcgtgcagcaacgtcaccggcgtgctcaccgacacccgcgccatcgctcgcctcctgcaccagcacggcgccttcgcctgcttcgacttcgccgccagcgggccctacgtggacatcgacatgcggtccggggagatggacggctacgacgcggtgttcctcagcccgcacaagttcgtcggcgggccgggcacgccggggatcctgctcatgaaccgggcgctctaccgcctcgccggcatgccgccgtccacctgcggcggcggcaccgtcgcctacgtcaacgggttcagcgaggaggacacggtgtactacgacgacatcgaggagcgggaggacgcgggcacgccgcccatcgtgcagaaggtgcgcgcgtcgctcgcgttctgggtcaaggagcacgtcggccgcgacgccgtggcgatgcgggagcgcgcctacgccgaggcggccatggcgcggctgctcgccaacccgagcgtcgaggtgctcggcaacgtggccgcgcgccgcctgcccatcttctccttcctcgtctacccgccggacgacgacgacggagccgctgtcgctgccgctgtcgcccacgacgacgccgacgacgacgcctcctcggcatcgccggcgccacggcggcggctgcccctgcacggccggttcgtcgccaagctcctcaacgacctgttcgggatccaggccaggggcggctgcgcgtgcgcggggccgtacgggcacgcgctcctcggcgtcggcgaggacctctcgctccgcatccgcgacgccatcgtcaggggataccacggcgtgaagcccggctggacgcgggtcagcttcgcctactacctctcccgcgacgagttccgcttcgtcctcgccgccatcgacttcgtggccaagcacggccaccgcttcctcccgctctacagcttcgactgggccaccggcaactgggccttccgccggcgcacgttcaagcaccacgtcatgagggaggagctgctgcgcgagcgcgacacctccaccgacgactcggacgacgacgacgaccagcagcacttcacgaagaagaagaccgccgccgcggaatatcagcagcaggacaagtttcagagctacctggacactgccaccaagatcgcgctctcgctgccggacacgtaccgtgaactcgttgccagcgtgcccaatggactggacccggacattattctctttcgagtgtga

SEQ ID NO: 12325 - DNA, 582 bp, Zea mays
  Peptide Sequence Number=SeqID_55700
atggggcgccgccacgatcgccgagtcttcggccgctgcaatcgcgtgctctcatccgtaattaaccagccgaaccatcataaccgtctccctcctcgtcctcgctcgcgagcgccgcgtttgccaaacccctccgtaccactagacaccgaaatccatcgccattggcggcactccgccaataccactggtgagatccgccatggagctcatccgaccttcttcatggtgccctggatcccctcccgtgccacgcctgagccctgggcatcgccatttccgacccaaccgtctgagattcaccgcgccgctaccctgttccggctcaacgcagcgactgccctgctccagcgccggtggagccctgcgttcttccccgccgtcaatcgagctccgtcgatggttcaccatacaccatggtcgaatctgctgccattttctcccaccgggaaatggggtgattgggcgcgtgggtggaggtgtccgatgagctacgccgacgagcaagccactgtggaatctgaggttcagcaagtagagatagctgagcaggagctcgtggaaggcaagttgtgcccttga

SEQ ID NO: 12326 - DNA, 417 bp, Zea mays
  Peptide Sequence Number=SeqID_55701
atggcgccggcttggctttggcgcgacgcggggcacgcgaggtcgggcgcgggcgtgctctggcgcgcagaacacgtcgaacacgtggagcttccaagtggttcagtctcccatgattatagcgtggctgagagcggttgcctgctccaggctgagacacattctgctttgctggggcattggggcctgattgctgctgggctgccttcttcggacattgcatcacccaatggccctgctccccacagtggaaacatgctctgtttccaacctgagctggaagacgaggtgcctgctgattctgcctctggaactgacctcctcctgactgattgttttgacgattctgatactggtgctgaggatactgcctttggaactgctgctactgctgaggtggatgctggttctacctga

SEQ ID NO: 12327 - DNA, 343 bp, Zea mays
  Peptide Sequence Number=SeqID_55702
atggccacctgcctcgacctctcctacagcagggctgtcagcacagaaaaggcagttgaagctaagtatgcaggccctgggaagtcaaagggctttggaggtgacaggtccaaccaagggcctgaaaagcgacaaagggtggctctatttgtggaaagtctaaacttttcatcaaaaactgcccatatcgaaggggaaacaactccaatattcagcgaaacccgggaagtcccagccaaggcaatggaaacccggaaaaaaatgagcgggcaaaaatatgagaaaatgggcgaatctattatacacaagtggcaccatgccggaggagagccggttatgatgg

SEQ ID NO: 12328 - DNA, 420 bp, Zea mays
  Peptide Sequence Number=SeqID_55703
atggactcaaacctcggcgccatcattattggcgtcgaggtaacgcatagtggcgccaatggtactggcgtcgttgtgcgttacctcggcgccaatgatgatgacgccgagctgaagggggcatgcacaaaggggaagcttcttgcagaagggataaaacagtgtgctgcctggcacgggcgcattgtttaccagcagacccagcaggcgcgccgtctgctggatgaccttgacgccgcctgccagcggatgggacgggacacattaaatgctgagagggcacgtcacccgtcagcgcagtggcaggcgacgcgtcctctcctcaataaatgcaggcgctgcacggctttacgtcaggctcggcccgatggcttatgtcatgggccacaagcagcaggtctctatctgagcgggaagtga

SEQ ID NO: 12329 - DNA, 795 bp, Zea mays
  Peptide Sequence Number=SeqID_55704
atgcaccaccagtggggcagctggggacgccgggagcaaccggcagcgccctataaatctgccggcccggccgttgcattgtctgcgtcagggcctcttgatcatcagtcgccagaggagctgttgatcgaggtgagtgaggttgaaaagcaggcggcgaacaaaggcaccatcgtcatggacggcggatactacggcggccgcgatcagcgctacagcggcgggtactacggcggcggtggcatcgcgacgccggggtacgctccggcggtcccgtacgggatgtcgcaggtgaacatcgagggcaacgggtgcgggcgggcgctgccgccgcagccgaccgtgaaggtgtactgccgcgccaaccccaactacgccatgagcgtccgcgacgggaaggtggtgctggcgccggcgaaccccaaggacgagtaccagcactggatcaaggacatgcggtggagcacgagcatcaaggacgaggaaggttacccggcgttcgcgctggtgaacaaggcgaccggggaggccatcaagcactcgctggggcagtcccacccggtgcgcctggtgccctacaacccggacttcctggacgagtcggtgctgtggacggagagccgcgacgtcggcaacggcttccgctgcgtccgcatggtcaacaacatctacctcaacttcgatgccctccacggcgacaagtggcacggcggcgtccgtgacggcaccaacgtcgtgctctggaagtggtgcgagggcgacaaccagcgctggaagatccagccctactactga

SEQ ID NO: 12330 - DNA, 1098 bp, Zea mays
  Peptide Sequence Number=SeqID_55705
atggcatcgtcgtcgcggctggatctcccgccggggttccgcttccaccccaccgacgaggaggtggtgtcgcactacctgacccacaaggcgctggacagccgcttctcctgcgtcgtcatcgccgacgccgacctcaacaagatcgagccgtgggatctcccaagcaaggctaagatgggcgagaaggagtggttcttcttctgccacaaggaccgcaagtacccgacggggatgcgcaccaaccgcgccaccgccagcgggtactggaaggccacggggaaggacaaggagatcttccgcggcagtagcagtagtccccgccgcgtgctcgtcggcatgaagaagacgctcgtcttctacacgggccgcgcgccgcgcggaggcaagacgccgtgggtcatgcacgagtaccgcctcgagggcagcctgccgcacaacctccaccgcggggccaaggacgaatgggctgtgtgtaaggtgatcaacaaagacttggcgggcaaggctgggcaacaacaaatggcgccgccgccgcacgccgtgtccgtgggcatggagcgcagcgactcgctggccttcctcgacgacctggtgctcgacaacgccgacgacctgcccccgctcgtcgactcgacaacgtacgccgccggctccctcttcgccgcggcggggacgaccacgacgacgaacgacgacagcggcgggtaccaacaagccaccaaggcggagccgcagccgcagctgcccgcgccgagcaacagcccgtaccagcaccagcagcaggccatacggaggcactgcaaggcggaggcgccggcgccggcgatggtgctgagcccgtcgcgcgagacgccgggcgcggacatgttccagctccagcatgtggacgagctgctccagctggacggcggcttcatggaggactactacaacatgaacatgtggaagacgcagaagagtggaaggaaaggccggccgcgccgattggcatggacgagacggattgattatctgaccacccatcagctagtgtttggccgttacgacacggtgtttctttgctgtcgtcacgccaaacggagccgtactcgctag

SEQ ID NO: 12331 - DNA, 519 bp, Zea mays
  Peptide Sequence Number=SeqID_55706
atggagagagaggcactcaagagaactggactggaagcttgcagaaacggacagcagcaacctttgctgggcctcggttcccatttgggcaggccgaaagcgggcgggctagcctgctggcagttcgttacccgtcttttcgaggggcatgcacgcatctcggacccgatgccatctcttttacagttcaccgccgtcgccgcatcgcaggcggcggtggtggtggtggtggccggactgctgctagtgcgtgtttggtactatctagtgctctactgctacaaggaggtggcgacaacgcggagcggagcggaggaggtggggccacggccagggcggtggggaggagggaggcgtcctgatccggccgcgccggagaattgggagtcaaaagggctatcgatgacgacgatgatggatggatggatggatggatcgcagtcgcaggtgtacattctgcgtgccgccgccgtggttttgccgttcgtcagctgtatacgaagggaatcccacgtctag

SEQ ID NO: 12332 - DNA, 525 bp, Zea mays
  Peptide Sequence Number=SeqID_55707
atgacgtggcagggggcaccggactgtccggcaaaaaccccatgggatgtacaatgcgtggatctccgttgcgatggcgtctcactgaaaagttcgactgggaatcagcaacaacaagatctatcagaggcctccctatggcttccattacaggtcttgaaaccagctacaaagcagaagttgcgttttgagggagattcgtacaagaaggcattggcggagttcctgcaggctgtgccagcgtttctgggcggtaaatgcagctgcctgcgatgtgagagtcctcgtgatgattcagtgatacaggcaggggaagggagcaagaagcagccccgcttggtcagcgttgatgacgggtcacctgtcacagacttggacttcgacttggatgaagaagagatcccatcaccttatagctgcgataacgccatcagggctgtgataatcgacctgctgatggtgtgcatcttcgtcgcgtttctggctgggatgatcgaccctgcatccgttccagccaatgcctga

SEQ ID NO: 12333 - DNA, 903 bp, Zea mays
  Peptide Sequence Number=SeqID_55708
atgccggtaacagccggagatatgcacagccgatacattcctcagcaagattacttctcagagggactctacacgttcgatattgggcagaatgaccttgctggtgagttctattcaagaacagaggaccaggtcatcgtttccattccaactattttgttggaatttgagaatggtctcaagaaactgtatgaccaaggtgctagcaagttctggattcacaacacaggccccctcggctgcttgcctcaaaacatcgccctgttcggcaaagactcatcccaactggacgagctccactgcgagaagccagatgctcttcagaaagggattagcccaagtgatgatgcattcacactgggaattgctccagctttagcaaaggagcatcttctaaatgcagaaaacaaaggtaaactgtatgaccaaggtgctagcaagttctggattcacaacacaggccccctcggctgcttgcctcaaaacatcgccctgttcgatgcatgtttgtatcttagtctcttgtggtgcagggatactcctctgtatttggagtgtgcacctgaaaacatattgtctcctacctcagcaccggtggatgaggaagtaaaaaacgaagatggcaagcatattcttactaaagctaatatagatcaaactgtagaaggagtaagcgctgaagatattgatccagatagagtggaggtagcaagtgatgctcttcagaaagggattagcccaagtgatgctgcattcacactgggaattgctccagctttagcaaaggagcatcttctaaatgcagaaaacaaaggcctgttgtgcagagatgttagtccagatggattccgcttttttagcaatttatttaatgacattgatccccaaaatattcactcgtaa

SEQ ID NO: 12334 - DNA, 246 bp, Zea mays
  Peptide Sequence Number=SeqID_55709
atgcacaacaggaggtcttcacctcgcccgaccccgggggctcggctcccgcctcggcctcagaatacggtctccgcctcgcccgaccccaagctcggcgtccgcctcggcctcggaaggtgggctccgccccgcccaaccccagggctcggcctcgacctcgacctcggaaggtggtctccgcatcgcccgaccccagggcccagcctctacctcaacctcgggcggaatcgcgtcctcgcctga

SEQ ID NO: 12335 - DNA, 297 bp, Zea mays
  Peptide Sequence Number=SeqID_55710
atggggaagtctgtcccatcactcctcatgctcctcctcagccgagtgaccgcacttgtacccaccataaccggaatgagagaccacgtctcaggtcgtgtgaggggcaaagtctgcgggcaggttcacttaggtatccgcacgttaattcttattccaatttcatctcgtagaccacgcgtccccatggacccgtgtccacagaccatcatcattccgttatcaaaatggatacagccaattcctgacctcgcgcgagtgctagaaaaatcactcaacttctaccgagatccctaa

SEQ ID NO: 12336 - DNA, 766 bp, Zea mays
  Peptide Sequence Number=SeqID_55711
atgtggatccaacggtgcaaacatggttagcgaaaacaaatcgtggccgctcaaacttgaatcgacggccaacaatgccccttccacctcccgatggacaagcaaggaggcggcgctcccagccaccatggctgtgacccatgacatcgcctccgcgatctggacggcgccccgagattggtccgcggtgatgggcgtgaacgtcgccgagtggacgaacaagcaattgaatgcgtggatgtgggcatggaggggatccagcggtcgaagacggcaacaccccggcgagggaggcatagacggaaatggcatcgggcttgaacccacccctggtgttctgcaaactgccgaggctcataccgcacgcgacggtggacaggtcatcgatcacaaattctgtggcaaggagaacagagggcgagttcgcagtggccgaagaagctccaaggtggtgaggagaggaagtaggggcgcggtggagggagcacgccatgggaatccgggagggccggccaagccgcccaggccgggagcacccaccacggatgaacggcgccgcccagccatgggagaggttgttgggggtaggatcgaatcatatatcatgggcgcaccgaaatcccacgaacccagccgatcccggcggctatggattcggcacgaaggagatggagccgccaggtgggtcccccgcgacaaggacacaaggcccaggcacgctggatgcaggccaagcgactgcccagtagggcccatgtgcaagtga

SEQ ID NO: 12337 - DNA, 213 bp, Zea mays
  Peptide Sequence Number=SeqID_55712
atgtcgggagatcacgccaagagggagatcgtgaccggcgacaagcccgccacaagccacgagaaggctccattgaaggagtccggcaacaagctaaaaaagggatcacctcctcacaagtcgcatcagagtggcgacaagaataagaagatgaagaaggcaaaccactggtttttgacggtgaagattattgtatgtggagtgataaaatga

SEQ ID NO: 12338 - DNA, 675 bp, Zea mays
  Peptide Sequence Number=SeqID_55713
atggcggcttcccgctcgacgacgcacgggtgttccagtagctcggcccctgacgcgcgctgtctgaccttctcgaggcaccgcagatctcgagcccatgcgtcggctgtcggtgatgtacaattgcagcacctaggtacaggtggaaaaaagtgggtcaaaaaggtacaacaggaatggagcatacttgagaagaacctaccagactatatttatgtcagggtatttgaggatcgcatggatctcttgagagccgtgattgttggagcaagtggaacaccctaccaagatggccttttcttctttgatttccaccttccacttgagtatccgctagtccctccgtcagcatactatcattctggtggtttgcgtgtaaatccaaacctgtatgtggacgggaagcattttgaggattttgtgaagagccacttccgcaagcgtggtcactacatccttaaagcttgccacgcctatttgcaaggaaatgttgttggcactctcaccgacgacgcgtgcaccaccgacagaagcaaagagcactcgagctctgttggcttcaagcttgtactagcaaagattttaccacggttgattacagccctgaaggacactggagctgactgcgaccaatacgagcacctcgggagaacagaaaccgttacagaaagctga

SEQ ID NO: 12339 - DNA, 327 bp, Zea mays
  Peptide Sequence Number=SeqID_55714
atgccgcgcccgcgccgaggggctgctcctgccctcatgcgccgggccgccggcctgtgccagagccgggcacccactacttcgccggggctggggccggccgccatgcccgcatacgcgccggggctggcgccaccagagccgccacggctgcgctcttgccgccggggctgtgctcgtgctttgggggctcgcccgcactcgccggggaggccgcacccgcgcgccgccggggaggccgctcccatgcgtgcagggatccgcgcgctcgcggccgggccgcctcgccaccggggccgcgactgggagccgtcgccgcgcctgtga

SEQ ID NO: 12340 - DNA, 585 bp, Zea mays
  Peptide Sequence Number=SeqID_55715
atggcctgcgcgagcgcctcccagcggctcggcctaggcgtgcgcagcagccacagagagcgagtgcgcggccctggcagcacgcgggcaagcgcacagatttggcagcacgcgggcaagcgcacagatttagcgcgaggacgcgcggcctcggccagggcacctccggtgcgggctattccgcagcgcgggcacggaggtccccagcgcgcacatgggcgcgaccccaggaagcgctcaggcagcggcgctggcggcgcgcgcggacaggctcccggcggctcggcgtgcgactcaggcacggccgtcctggcccctgcgcaggcgcggcggcccggtttgaagtggaagatcgtacgcccaacttcattgcaacatcagttgctacaacaacaacaacaacaacaacaacaaagccttttgtcccaagcacgttggggtaggctagagatgaaaccccgtatgaaaacctcagagctcaacccccaaagaaaacaggggagacaaaggcaaaggagaaccgaaaatgacgaaacgggggaacacataaaagagataaaacccacaataaccagcaaggtctaa

SEQ ID NO: 12341 - DNA, 321 bp, Zea mays
  Peptide Sequence Number=SeqID_55716
atggtgcccatcgggattgacacgatcacaaaagcgaaaattacagcgcctcagagcaaaggagaatcaggaaaaggaggcggaaaaagtcggcttgccgagcctagacaacacctaggatctctcctccccgacggggtcccttccgggagcgaggtccaggcgccgccggcgaccttcgctgcccctgcgcacgtgcggaccgtccggcccgtcaggcaggaaaccctagccctgctccaggtcgtggaccatctggcccctggccgcggacagtctgtgtctatgcagagagcaccaccgccggttctcgtgcagtga

SEQ ID NO: 12342 - DNA, 564 bp, Zea mays
  Peptide Sequence Number=SeqID_55717
atgaatccaaatgatgtgtttgcgttagcaatagttcccatggggacagaggaaccaaccaatgagaattctagagaagaagaacatgttgatatcaacgccgatgataacaatgtaagtggccatgagaatatgtctaattcatccgatgatatcaacaccgatgataacatttatgatccaagaaattgggataatcttgataataaagcaagagacatattaattgagaaaggacctataagagaggaaggcgacggcggcggtgctcaggtttgggctctcagcgacggtgtcagcggcttcccttcccgcctctcgctggtcgcctcgcgccctcgcctccggtcctccgcgcaccggccggtgaccctacgtgcgtgcctctctctctttctcctctcgcctctggtggatcgtcaatggctcccggccgcggcggctgcgccacacgccgcgcgcggcctgagggcagcgggagccagcagccgctactccaccaaggcggtcgcgccgctttgggggcgcttatgccccaaagcgaagcgttacccgtccgcttag

SEQ ID NO: 12343 - DNA, 324 bp, Zea mays
  Peptide Sequence Number=SeqID_55718
atggaaactctaccaaatggctcagtaaataatgctgagcttaaccaggaaaatgagaagtccatgtatgctagtgagtctgaagaagcacgggatatttttgtttacagagaagatgttgtgagcttgaagtccaaggaggatgtccgtggtgtagtattggaggtagctggggaatatgattatgatggtagcatcactgatgatgacattgatactgaggaacatgaagataaaactgcttatggagctgaaaatggtgttgccgatggtggtaatgttagtaatggagctgaagttgaaagtcagagttcttttgcctga

SEQ ID NO: 12344 - DNA, 1389 bp, Zea mays
  Peptide Sequence Number=SeqID_55719
atgattgattctgataagcatacatggcagatatgtacatgctcagaaaactcagttccactgtctggtattccagaatctcaagctgatgctcagattgatacagatacaggtcacaggcagacagatgttgattctactgcagatgtattgagtatgtcggatggagataattcatgcatagccaaagaatcagaaacaggaactagtgcatcaagcatctcaaatgagggtccacaggacaatgcaacatctagaaaaaagtttaggaaagatgggacaaaggaatgtggagtagccgcaacagcattgatccctatccacagtccaaatgaacatgaattcttcccggagcagtatgttgtggataaagtcacaaatgatgttggtgttgatgattcttctgaaccaaggcgtgtgggtcttgttagaggtgttaatgctaaggaccgaacagcaactgtgtcatggtttaagcctcctctacatccagaggagccaaaggagatcgcatgtaacgaaattgtgagtgtatatgaactggatgtccatccagattatgattattgctatggagatattgttgtccgcttgccgcctgttaaaccggtaattgagtcaaccaatagcaaggaacaaatggaactggataagacgttagattcctcggaaggatttgctgcttcatattctgcaccccctgatactagtgcagacgaacagctttcacagaaggaatcctgcttgcagtttacaagcctctcttgggctggaaatatagttggctttcaagacggtgagattgaagtcatttggggtgatggatcgatttctaaggttggtcctcatgaaatatatgttgttggtcgtgaagatgatggtgcctcactagatgatggaacagcctctgatggttctagctgggagactgttgatgacaacgaaatggatgtacttcatgattctgcaaagggtgattcgcaaaatgtacctgagaatagcattggaagggaaaatggttcattcagctcccaggatggaagttctgttgcaactggtcccctttcagttgcttttgagtttgtgacccgactggcgagtgatctctttgctcgaggtagaaggcatttagatggatcatcagatgctatggatgaagttgagtctcactggtctaatgagatttcagaaattggtgatgacattgataagtgtaataagaatcatgtggaatcaccagagcatgctgcagtcatagaaaatgattcttctgtcgagaagtctgtagatgtggttatggctgataatcctgtacattctgaatgtttcaaacactttgatgttctgcaatgtcctctagaccaccactaccttgaaaacacaacccag

SEQ ID NO: 12345 - DNA, 72 bp, Zea mays
  Peptide Sequence Number=SeqID_55720
atgggggtacccctaattatggtccccgacaatattgcgccaggaaaaactcgagttcctataattttgtaa

SEQ ID NO: 12346 - DNA, 768 bp, Zea mays
  Peptide Sequence Number=SeqID_55721
atggcactgtggttgccaagtccggagaaatcccaacagaagctgggctcgtcgtcttcctcggacccagagggcccgtacgagggtgacacccagcaagccttccatgagcgtgctggcgtcgtccgtttgctcgggattggcgtgtcgcagggagacagcgctcgtcttcgtctcaagcgcgaggtcgatgcccggcgcgccccccgttggggtgctggcgctgtcgactcgctcgacagccgacgaggcgctgcctcctgcttggccttggttgccctgcctcctcctccgtcggcggggaagaggacggggcaagctcgaaggttgttcttccaccacgcggggaagacgttgtcgattccgccgccggcgggcgggctgtcggccgccattgtcgctgtcgcccggcggtggaaggagtatcatgtcgtagctgctgtcgagggacatgaactcaaggctcccaaaatggagcaccgtcccgggtcggagaggttgctggagactgcccatctggagcttgacgggaagctgttcgtcaacacgcagcaggcccctacctggcgcaccaactgtcggcgtttcgagaccggggggtccctaagccgacgagtaaaatgtcgccgcgtgccccagcccagatgggtcggcgcgaggccgagcacgaaggggggaagtgaggttgccggagatgggcgtgagagaggtggaaatcccgcggccttcgtgttcgtcccgtgcccaggtcgggtgcgcttgcagtag

SEQ ID NO: 12347 - DNA, 60 bp, Zea mays
  Peptide Sequence Number=SeqID_55722
atgccgttcactatcgttggcaacatgcagcagcggaacaccgaggaaagggtattttaa

SEQ ID NO: 12348 - DNA, 1164 bp, Zea mays
  Peptide Sequence Number=SeqID_55723
atgaaaatccttgaagccgaacgatggctgaaaggtaccaactcccgcggagttgcgttcctccaacggcaaggcggaaagactgcgggcgactctccctacttgcgtccccagccgtcgggggctgagtcttctccaacacgctccaaggtcctccccctacggcgcggggactgggtcccacacgtcatgcaagccggcccagagcagaagaagccaaaccgccgcgcgcggtgcatgcaaccgcccagcggttacaagcggctctccacttttgcccagaccagcgggcgaaagggcgggcagccatgcaggcggcatgcaaccgcgccatgtgggcgcacttctccgacttccaacacgcccagcatggaggcccaggcccacgcgtcatgcaaccagcgcgccggatgcttcgtgcaagcaactgcaccgccactcgcgccactaccgcgcctcctcgactgcggaaccaataccgcgactcgaggcgacccagcgcacgacccagcagcgccagcctggcacgacggtcaatgcggccaaaaatgggccggcagtaatggcggtggcaggcgggcaggagcagcgttcatgtcgctccgagcctccctactgatcagaggttcaaaggctggccccttggaagggttcgacagccgcctcagatcgcgtgggctctacacccactactggtcagaggttcgaaggccggcccctcggaagggttcaacgaccgcctcaggctactcgggctccgcgcccactactgatcagggcgggaacgatcttgtaacggaatcccatcggagggaggcatcgagccctcggaccccgtcgacaggggaccaggtccggcagatcacccgcagctcaccggagacaccatgttcggtgcccaccgagggcaacatggcgcttccccccctcctccttgcggaaaggcgacgcaggggcgtatgtaaaaaagtcgagtctgtccctaatcgccctctcgccctgtgcagaggctcgggggctgctctcgcaaacccggctccggccaaaccgttgaaagcgtcaacataccagcccgagaacttgggacccgaccgtacacccgggctacggccagctcgcatgagggaacgaccagaccagtcgaagcattacgcgaggcattaa

SEQ ID NO: 12349 - DNA, 270 bp, Zea mays
  Peptide Sequence Number=SeqID_55724
atggcccaagggcacatttccctttcagtgatccatatggagttggagcataaggaggtgctccatactgcagtggatcatatggaggaggggtgtacggaggtaccgcgaaagaagctttgcttccatccacatcaggtggaggaggggcatacatgcgtatcaggaaagaagcttaaattccggcttgggaagttggaggttgaccatatgaaggcgagtatggatacaaatgatagggagaatggtatggtggtggacgcagtctga

SEQ ID NO: 12350 - DNA, 420 bp, Zea mays
  Peptide Sequence Number=SeqID_55725
atgggcaagggcaagaaaggcggaagttcaccgcaccactccggcgacaagcggaagcgcgagccgagtcccccctccgaggacttcggtgactccgagtactcagaggaggagttctcctccgagtccgagtggtcgccaacctacacctctccaccggtgtcgtccgatgactcagacgattcccaggggatcaccgccgaggtatggacgtacatccaggccgtcgagcactccgggctcgagggctcggatgagtcggagatctcctcggatgaggagaactcctccgactcatccgaggaggggagcggtggcgacggcgatgacgaggccgacggcggcgataagggcgacggcggcagcggcaaggacgacagcggcagcgacagggccagtggcaaagcgccgctggcttaa

SEQ ID NO: 12351 - DNA, 276 bp, Zea mays
  Peptide Sequence Number=SeqID_55726
atgaaccaaccgtgcctggggaagaaccacctcagcgggaagctcgtcggcgaaggaaccgacgccgtaacgcccggcgacatcatgaggccggagaacgagatccgacgcagcctgtgtcacgagatgagatctcggaggtgggagaaactccagatgaacgagtcttcagggagaggaggaattcccgccgacgtgatcgtcggcaagctcaagagcaggccgagcaggaggcgagacaacgtcgacagaaccctctcctcggacgaaatttga

SEQ ID NO: 12352 - DNA, 159 bp, Zea mays
  Peptide Sequence Number=SeqID_55727
atggaggtgactgagggtccttcagccgtagaggtggctgttgcagaaaacccagcccccaagggtggtgctggcgattacctagcccccgagggtgttgccggaagagaaacgattacttgcggcttcgcgcgacaatctagatcggttatatcatga

SEQ ID NO: 12353 - DNA, 540 bp, Zea mays
  Peptide Sequence Number=SeqID_55728
atgcaggcggcatgcagccgcaccgagggggcgcaccctttcgacttcgacgcatccagcatggaggcccaggcccacacgtcatggaccgggaaaggggatactccaaaagggatccttctccgcgaaggaagtgggccccgagcccccctactgatcagaggttcgaaggctggcccctcggaagggttcaacagccgcctcagagcactcgggctccgcgcccactactggtccgaggttcgaaggctggcccctcggaagggttcaacggctgcctcaggccactcgggctccgtgcccactactgatcaggggttcgtaggctggcccccgaagggttcgacagccgcctcagagcacgcagagcgagggatgaccctgggcgaactcgtcgctctctggaattcatcgtcgacgtacggctataattcaccggactgtccggtgtgcatcggactgtccggtgagccaacggtcggcagggccaacggtcggccgcgcgatctgcgcgggacacgtggccgggccaacggctag

SEQ ID NO: 12354 - DNA, 489 bp, Zea mays
  Peptide Sequence Number=SeqID_55729
atggggagagtcgcctttaaaaagagggtgacccccttggatggcaaccatgtcttcgcactcccttcatgcatcgcgcccttccaccttccgagccccccagatggggagcgcccgcggtccttccgtcttgtcgtcgttggaggaacacaacttcacggaagttggtaccttttagccatcgctcggcttcaaggattttcatcaggcagcccggccgcatcccctcgccggtggtcacccaaggcggtgaccaccagctcgatggtggggagaagcgaaccgggctgcgacctctgcccctccctcagcttcaaggatgttcatcatcctggctggggcagaggccggactgagccaaagctctacctcctgcgcgggttcgtgggtcaccttctccctcagcattcaggggagagggcgctcaccggcctagcgggagggtcggacttcgacaacgcggggctggtcggcggcgagcgtcgttag

SEQ ID NO: 12355 - DNA, 900 bp, Zea mays
  Peptide Sequence Number=SeqID_55730
atgccccacaatctcggccagccctgctgtacccccgcctgcctgtgcaccctcccacgcgcgatggaagcagtccgccatacccctcccaccacaaccgcgcagcaccgtcctgggcacggcgccccgcgcggggcgctcctcggcccgcatctgcttgcggagattggcctcgacgaagaggggctcggcggaggccgcggaggggagcggcgagaaggagatgagcagcgcgcgggaggagaagaagatcgacgcggagatgaggagcaggagaagcagcaggcgaagacgagcaccacgagctcgctcccctccagcagcgagcgctcctccagctccgcttgcaacaacctcacgaaaggaggggcggagagcgacgaggagatacgacgggtgccggagatgggcggcgcgtcggcgtcagcctcgtcgggcgccggcgcggacgagcgtcccaagggggaggacggcaagcaggggcaggtggccgcgcccaacccgttgctggttatagatgttagtggtaaagaattcaaattcacctgggcatctgaacgaggcgaattgtgtgacatttatgaagaacgtcggagtggagaggatggaaatgggttgcttctggagtgtggctctgcttggcgcaagcctccagccagattgcggagtggagcggcacgggaggacaggacgggtgacgggcggaaacctggcccatatgcgaccgtccccaccgcgtcagtgacagcgcagtcgctgggctggcgtcgcgtcgccttggtcgctttgttgtgtcttggtccgagcccggtccgcagcggtcggccgaaagcgaccaccgacgcgccagagccggtaggtcccccgtcggaatggtgggagttgtttcttagcggttag

SEQ ID NO: 12356 - DNA, 99 bp, Zea mays
  Peptide Sequence Number=SeqID_55731
atggacatcaccaacccatttcagcaagtagttgagtggaaggctgcgtcttcactcatccggaatgcgcccaacaacgaccgctatttcatccactaa

SEQ ID NO: 12357 - DNA, 555 bp, Zea mays
  Peptide Sequence Number=SeqID_55732
atggcctcagggcaaacgctactactgaaaggccctcgttcacgtcccctcacgggggacaagaaccagccattaaagccaaagagccgaaggtccggggcgcaggtgtcactgacggtctcgtcggcggaggcaaccgcttcggcaagggggagcctcacctatggcgaccaccccctcaacaccgacgatagcggccacctgcccaccaacaccgcaccgccaaacagcgaccgcccaaagctcaccgacaggtcctcactcctgtcctcgccgaggctgtcccagaacacgagtaccgccctcgcggcgtacgacgtgttgtgcgacccccccccggtgcagccgacggcgcaaggaggacccggacgtggccggcccgcgcacggcgcgaccgacacccgtgcggcagaggagcagccacgctccgccccggcggcagatctcctcactcgcacccccaagcgtcacgggcaaagtctccaccgacgtgctccagagttcccaccctacgacatgagggctgggtcccacacgtcatgcgatatgacctga

SEQ ID NO: 12358 - DNA, 438 bp, Zea mays
  Peptide Sequence Number=SeqID_55733
atgccgaggcggcacattacctgccagtggaatagacaggcggcgcgccttatccgcaataaatgcagcggccacgtggcccagaggccttacgtcaggctccgcccactggcttacgtcacgggcagttggccacgtggtagcattgggtctccgcctgagcggggagcagaaacaatcaatggaagtgccaataaggactcgtacttgcgcgcatcacctgttaagatatcaaacaagtctaaaaatgtgtcttcatctaacccatctatctcctccaatgtgctaaaaatttattttgatgttgggccttttggtgcttcatccctaatagctttagtgaacttgtctaatttctccaccattattgaggtgaaggaatcactggaccgttgcctcttcaagcttcctgaggttgtttatgaaaaaacaatttga

SEQ ID NO: 12359 - DNA, 858 bp, Zea mays
  Peptide Sequence Number=SeqID_55734
atgcttgcaatgattctttggtgctatttgatggctgttttcactgatcctggtgctgtacctgaaaactggagacatgatgctgaagatagcgggaacccttcattttcctcttcagatgagcaagaaagtgctcctagatattgttctcgctgtcaaaatggcaaacctccccgatgtcatcattgttctgtttgtaacagatgtgtgcttaaaatggaccatcactgcatttgggtagttaattgtgttggagcaaggaactacaagtattttctcctttttctggtgtatacatttattgagactgtgctggataccttggtactacttccaaacttcattgaattttttcaagatgaacataggcgttcaagctctcctggggatattgctattctatttcttgcttttgttctcaatttagcatttgcgctgagcctcctctgtttcattggcatgcacgcgtctcttgttacacgtaacacgacttctatagaggtctacgaacggaagaagtcggtttcatggaaatacgacctaggatggaaacgaaacttggagcaggttcaagggttaaaacaagactatctcaatgttgtctccggttattcttcaaaattggagagacaagagaaaacgctaggagatgtttctatcctagctgttccgcaacccaacacgcccttaatttccagaccaaagacaaaactgaggattgatctgaagaagcaggtgtggggtgctgcagattgccggttccgcggtttgccatccgtgatcctcagctcaccggcgctctcttctgcgcagccaactcaatgccgcacgccgtctcaagtaggagcggtcggataa

SEQ ID NO: 12360 - DNA, 339 bp, Zea mays
  Peptide Sequence Number=SeqID_55735
atggatagagaaattgacccaaacccataccctaatagagcaaaaacccaccgggtttcgggtagcgggtacccattgccatgtctattttcgggggacagctggccgaggcctcggggtgtccagccgagccgcctgctcgagccggactcttggaggagacccgggcggcgatggcccgggcgtgatgatgaagtcgtccttcagagtggagatcctcggaccgtgtcgccgtcggaggctaggtcggacctcgccgaaggtgtagttgacgccgagggtgctgctgctcccttcaaccgtcaagatccgagcctgcaggatcggattatcttgtag

SEQ ID NO: 12361 - DNA, 519 bp, Zea mays
  Peptide Sequence Number=SeqID_55736
atgcccaacctgaagaagcaatgcgggaggttcgtctccaccacgccctgccccaggtgcttcgacctccttgccatgggggagcacaacggacacgtcccggtcccggtcatcggaccacagaggaacgacgaggagctcgacaacccggtccctaaggagcccatcatgttcctaaagccgacctcgtcgttcctccatgctggcgtggccaccatcacagtcgagatcccagagacgctcgagtctctacaccacaaggtcgagctcgttgtagtcatctcccggcgtgggcgtgacgttcctgaggcgtccgccatggacttcgtcagagtcggagtggcgcaggcggcgctgtccttctgtcagactggccagtggagcggtggagtgacggcggtcacctcggctctgccgggggcgcgtgtcaggatagaggtgtcaggccacctttgcgttaaatgcccctgcaatttggtcagtcggtgcggtgatttagtcaaggttgcttctgagtga

SEQ ID NO: 12362 - DNA, 687 bp, Zea mays
  Peptide Sequence Number=SeqID_55737
ccgccacctctctgctttcaccccacaaccgctactcctacctgtgccgccgccgcccccgggaggctcctccctcccggggcggcacctgcacctggcgcgccgtggccctcacgtccaccgtctccctcgcagccggccgccagcctctgcaacgtcgtccgcgaccagaaccagacccactccttcccgccgccgccagacgccatcgacgccttccagcgccgcgccgcccaactcctagccgacctcccggcatccgacaacgtcctctccctcgcctggacgcgccgcctcctcgaatccttcctcctctgcctcgaggagtttcgcgccctgctcttcggctctggggactcgcccaccgcgcgacccccgctcgaccgccttgtcgccggcttctccgaccgcgccgtcaaggcgctcgacctctgcaacgccgtccgcaacggcctgtggccctcgtccgccctccagcgccgttgcgctcaatcgccgaggcaggccgagctcttcccagccacgaccactccctctactcccggtcgcgcccgatggcccctccgtggcgtttgcgcccctcctcggtgtcaacgccccccacgcgtagagccgcccgggccttcctgcgcgtgccgccctcctcatcgcgctggccacctaactgcccgcgtcgacaacaagtag

SEQ ID NO: 12363 - DNA, 294 bp, Zea mays
  Peptide Sequence Number=SeqID_55738
atgacgatgcggtcccacaatttggtactacatggtccaaagggaccgtttttccctcttcgttgctttggatgggcttggcctccttgcctggctttggtgagagaaggtgaggggaattgtggtcttcgccccctttgctatgtagtgaacattacattggttgaggatgaagtctctccttatattatgagccacctattggtcctcatagattgttactatgtcgaggggactaaggaccttcttgtagagatagagttcgtggatggcaaccacaaactcgttaaatga

SEQ ID NO: 12364 - DNA, 438 bp, Zea mays
  Peptide Sequence Number=SeqID_55739
atgacggtacgaagggggccacttactggcgaagatgccgtgatgaacaccttccacggcgaggtatggcccgtggcgaatccactgggtcaggtgagggctcccggtgtcctccctgttcccccgcggccaccagtacgcgctcggtacggtcttgcgcgcgcaccggtctgcgtccaggataccgagatgaagcacacgcccccaaatccattggcgcccgtgattccttctcatctccacgaactcgtcaatggcgaccactcatcaccccggtttgcgcgactgtgcacaacgcagcatggctatatgagaatagctgcgagatgggatagcggcacccgatacttaaacctgcgagggcaccgcaacggcccgagaagagggggaaatctggtcagcagagcgcgcgatgcgcacggcgtctattacgggtaa

SEQ ID NO: 12365 - DNA, 495 bp, Zea mays
  Peptide Sequence Number=SeqID_55740
atggggactcacatacaagagacaaccctaggtgctaggaggaggcctgcgccggatttttgccaagattcgcaagcttgcgatctcggcgagctgttgaacgagggcagaagaacacttccacgtgttcgacgtgctctaagctcaccagagcacgcccagcgcccgaccccgcgcgccccgcgccgcgccgtgccgcgcccgtgtctcctgcttgagcccgcgcctataaagcccaccgaagcttcaaccgtactcccccgcgtgctctccacctcaccggagccagagatcaccggcgtttgccctgcagacagcgtgcccgtggccaaccgatcccccgccaccgtagaccgaccaatagagcctttcccagccgcgcccgaccctcggagtgaacgtgcatgcctcggtgaagctccccgagcaagcaatcggacttgcctcgtcggagaagcagtccacggtcgccagactcacccggatcgccggtga

SEQ ID NO: 12366 - DNA, 870 bp, Zea mays
  Peptide Sequence Number=SeqID_55741
atgacttctcacagatcctcggacgaagggaatgcacagtcccacactgacggacttgcacgagagggtttcccccgtattttgtgggaggtacttcagggagctggttacacgacgcctccccagtacgcggtgcagttgttcaagaagcaccgagtgccctgctgtagggtgaggatgaccctggagcctcatcccctacagccgggctggcgttcactggactctgagtcttttggatacagggctgaggatactatcgaggcgattgctcttcacggtctgaccaccttctgcggattccaccccttggagctgtccactcaccccattggcttgttccccgcggagaaggaggacgccccaatgtggaaggaccgagtggagcatggcaaggatatctgggctatctacccaggtcagactgctcacttgacggtgcgatgcatgaatgccctgtatcgtctgcaagtgatgcgtggagaggcaatgtcccatctatggcattgttggaggcaacccaagatcactttggataacagagaggaacttgtggttgacttgtccaataagatggtggaaaaatacctacaggtggaacaattgtcaaatgagatccaagagcttgaggagctagtgggaacgagggagaacaccatcgaggttctcgaggatcagcttatcaacactcagcagcaacttgcggaggctaaccagcatctggatatgcatcaccaggagatccagaacatggaggccaacgaggatgtcgatatcgagggaggagaggagcctgcctccagcttggacactgctggctcagggagaccaccttcccccgagtcgagcgttgcctcgtttgctcactag

SEQ ID NO: 12367 - DNA, 213 bp, Zea mays
  Peptide Sequence Number=SeqID_55742
atgtctagcttctctccctctcgcggtgccttttcgccttcgagctctctgtacccctttgccttcaagctgttggaggggcttggcccccagcctctacccgtggtgtcctgcttcaaccttcaggcgaccatcgtcgcctacctccacaggatgtccgtggaggcgacgctccttcccgcttcttcctccagcattcagggggaaggatga

SEQ ID NO: 12368 - DNA, 558 bp, Zea mays
  Peptide Sequence Number=SeqID_55743
atgggccatgacctccgccttctcaagattcacgatggagtggcgatcggagtcgttgtcgtcgatgaaccgccacatcggcctctacgagccgcgatcggctggagacgccgctacatgaaggtgccaaaggttcaacacaaaccaataaaaagtccaagaaagggttcaaataaaaagagcaaaagacaaccgaaggctgccctggtctggcgcactggactgtccggtgtgccaccggacagtgtccggtgcaccagggagatcaacactgaacttgccaccttcgggaatttgggaagccactccgctataattcaccggactgaccggtgtagcaccggactgtccggtgtgccagcggagcaacggctaactacaccaacggtcgtctacaaaagcaacagtgaacatatgaacagtgctcgactgcgcgcgcagagtcagagcaggcgccagaaggcgcaccagacagtgaacagtgactgttcggtgcaccaccgtccaccggactgtccggtggtcccacatgtcagagctccaacggtcgaactctag

SEQ ID NO: 12369 - DNA, 357 bp, Zea mays
  Peptide Sequence Number=SeqID_55744
atgaacgtatgtgagctcactcttgctgtctcacacccccccacaggtcaagagcagcggaagaagcgtcgcccccacgaacatcttgcagaggtagacgaagatggccgcctgaaggatggagtggggcgtaaggtgctgatgttggaagccgagctcctccagcggcagcaggaagaaaggctagatcggcagcaccaacccacaggagcgacaggaaatgaagagcacaaactccccggtggcgaggccgtcgaggagaggagcgccggcgcggatccttccggcgaacgccggcgcaccccattcgagcaggttgagtgccacctcagactggaagcgctcgggatggactag

SEQ ID NO: 12370 - DNA, 312 bp, Zea mays
  Peptide Sequence Number=SeqID_55745
atgcaggaatcccttgcaggaccgccatcgcagcaaaatcctcccgagggcctccctacactgaccactcccctattgcccttgcccctttcggataacaaaggtgtgatcatgaataatgtatcttcatacccaaaaccacataaagcactagcaagtactacccaaaaagttcagtgtttaaataagctctggactgggcctcatttaaacaggaacatagggggctcggggggctctttaacaaaagtgcccgcgaaagggtatcgagggtgctcagccgtccgatcagagcctgatggcgaggattag

SEQ ID NO: 12371 - DNA, 927 bp, Zea mays
  Peptide Sequence Number=SeqID_55746
atgctccacgacccttgcttgaacctcgagaaatggcgcagggcgagatccatggcggcggctagcacagaggtggtcgaggagcattgcccacacacgtcaccaggcgatgacgacgggtccgcggcggcgagcagaaccactcaaaatttctgggcgcacggcgtgtacaggcggctgagcaagaggcctctgggaagggggcagtggcacgcggcgcaagctccacacggtcatggcggatgcggatccgcggcggagatgatcttcggcgagaaatcagtggcagcgaggatctcggctggggagtttggagatcggatcacggacgccggtggccaaacctgcgcgatctccgcgcggacactgatcctggactcgttcttttcgtgggggatgaagcgtctgaccacgtgggtcccacgtttcagggtcggcaagtgggcgagggcgacgcagaaattgcctcaggtgcgacttgggctgcgcggcagcgacctttcggaaatggaaagcgggctgagctgcggctccatcttccacatgaacttcattgcctcctgcaacgacctcatcagcttctcccggagctttaccagcacctcatggccgctggcgggtgggtccgcctatgtcagctccttcccctcgggcactccatacggtggtaaagggaatgtggccgtcggagaatccatcactagagcactgatgaacgccgtcgccgccttgaactcagatgatgccgcggcttgggatcttggtgatcgggtgagggtgctctctagcgaatacccggatgtggggtcgtcgcacgctggcgcgaaagggccatggcggcgtggcaattgctcgtcggagcaacaccaccgcgccggacccgctgggttccatgggcaggaagtcctgctatccaaatcatggtaa

SEQ ID NO: 12372 - DNA, 453 bp, Zea mays
  Peptide Sequence Number=SeqID_55747
atggtggcctgggcgcggtgcgattcgagggagctagggagacgacccgagctttatacccaggtgttacactcctacacctccgggatacggatacctcactcgtcacctaccgcgaaaaataactcttacatggaattaggcgtcgcccggagaaggagccgcgccctcggcttcgtttccaccctcggcgagatccgccccggcctcggacgacggcgcaagcggaaggatctctgcttcgaaggtggtcgccagcaccgcgcttgggcccacggcggccgcgtcaagcctctggactttggccagggcagcttcatcttcgtcgggaaggcaatacccctcgctgacccgctccagatccacgtcgtagtgggaagcgagcacggcgaaggcccgcctgacgccgtgatgcagcgcctcccggagtctgccgtgcgcatggtcacctaa

SEQ ID NO: 12373 - DNA, 300 bp, Zea mays
  Peptide Sequence Number=SeqID_55748
atggtgcgaatcatcgagcaccacgttgaaactttggaagatttggcgatggagcaagaagttgcgtcctctgcgccgcgagtacccgaccgccctgagtctggggctgctgctgtacacgccgtgcaacagcacacgcctacgcaagtgtcctggactccatcgagggctacacctacggcattatctgccgccaaggagttgctacgctacccccctagcaccacggcttcaccagaggccatgaagcagtggcgtgacgacattgaccggctactcgttatggcgcattctacctag

SEQ ID NO: 12374 - DNA, 936 bp, Zea mays
  Peptide Sequence Number=SeqID_55749
atggccgggtctcccgcgccttggccggggccggagacgtcggggtcgcgctcacacgcgccgaggggccgcgccgtcgtgctgcacccgcgcggtggggtcgcgcgcccgcgcgtgcgccgaggctgcgtgctcgtgcgccatccgggctctcgccggatctgcgccggagtcgcgcaccgggaacggagccgccaaggctgtcgccgccgcgccaccgggagccgccggggccgcgccagaccgggcacccgcgcaccgcccaggccgtggaaggccgcacccgcgtgcctagccgggctgcaacgccggggatgccgcgcccgtgctcgccggtgggcctcgcccgcgccgctgggggagctcacccacgcgcaccaggggggctgcgcccgcgccgccggggggcgcacccacgagcagtcggggaggccgcgctcgtgtgcacatggcagccgcgcccgcgccttggccaaggccgcgtgccagggaggccacgagacagacgactgggggctcggcgaggccctacgaggcgcgcaggctcggcggcctcaagccaggtgcgaagcacaccggcctggcgaggcgcccagacctggcggcctcaagccaggcccgcgggtcacacatcgccaagtggcgcggctccctggtcgagcgagcgcacggcttggccgtctctcgcactggcggctgctcccgaggacgcgcagagaggccctgttgcttcatggcgcggtttcctggacgacgcctggctccctggcgtcggatggagcagactggcggtggctcgaccacgtggtggtctgggcgcaatgctcggcgcttggccacgaggtggtcctggcgctcggcgcaacaaggggctgggcgcggcaaaggccgacgcatgccggcggctggggctttgcccctagcggcggtggctga

SEQ ID NO: 12375 - DNA, 222 bp, Zea mays
  Peptide Sequence Number=SeqID_55750
atgggggccactgtcggtaccctaaatcaggggtaccctcttctacagcatgaagacgtcgcgcccatgcaacgtctccaggccacgcggaggacggtgcctgaccccaccacatgggcgggtggcaatgagattgatggttctggttatgattatggtattggcgaagatgaagctgtggaaggagacttccaggagttccaagactacgacgagttctag

SEQ ID NO: 12376 - DNA, 2687 bp, Zea mays
  Peptide Sequence Number=SeqID_55751
atggaggtagttgagttggttccttgcgcccgcaataaatggggcaactggcatgagttttggttctacgttgcggagggcacaatcgaagaccatccggggctccccgtggccgagatgtgctcgcattattactcagcatacccgcagtttgaagtggcggaggaggatgcaaacgaaggggcccttcggtgcgcggccggcctgagcagcgggcgcgatttggttgaggagtttgtggcgtatggggatggggcggtgcggattgttggtcggtacgtgccgaagacagagggccagcgtagctgggatatacgcgggtctaatgaccgcttgaacagggtcttcgagttgaactgtctgtcgtatggcggttatcccgggcaagacgatgtggatcatcgcgggaagaagccggcggcagagactggagacgaccccgcgccggcggccgccccatcctctaagaagaggaagctaggtattgctacgggaggactgggggtttccgatggttttgctagggaattgatgaggacatgcgcggccccacggggaaggatgtcttcgcccgagctccgggagtcttcggtgcggatgctgagggttaccgggggttggtggcctaagaatgttcctatcccccgcgcggccggcgaagacttttttacatctcgcatggttcgttattggagagtgtttccttacgggcggaatattgctgctgttgtgtcggcagtgatgcacaaggatcgtcagggagctgcgcagaagcgccaggcggtcgtcaggctgcatgaggctaggccgaagaggtcgcgggggactgtgaaggctgctgcccccagcggaagccagccgacgctggcggcaaagtcggccgcccctgggtccagcagggtgccggaggctgtgaaggcggccgccgccggcggcaccaagtctgtcccggccggagccgtgaaggcccgagagttgcctccgccgggcaagcgcgttgccgacttcgccaccgatattagcgtggatgattatcttgggtcgggcgaaggccaacttgttgtcgttccgcccgccgtggcaaccgcggcggctgccgtggtgcctagggcgaagggtagtgctgttagtgccggtggtgagattccggcactcactgccgtcagggacgaggcgggcgctgtgtcccgtcggctgaaggaggcattaagtcaggtggctgacttcgcagaccgcgcgacgtcgggggcccttacggcagttgtgtctgccgaagtcgagagacttcgggtgcaacatgctgacgccgtccgggaaaaattggccaccgacagcaagtgccgcaagttggcggataaggtggccgcgctggagggtgagaggactgacctccggcgccaactggcggaggagaggaaggaggctaatgaggccctcgccaaggcgcagtctgcgcaggcggaggccaatttggcgcgggcggagggcagtcttgccagacagcgcgccgaggaattggaggagcggttcaacgctctgcagacccatgtggagagggccgaggcttcgacgagctcggaggctgagcggacacgcaaacagcttatggactcataccacgagctgggcgcgcggaccactgacttcgaagtgccagaccgagagtccggtcttcgctgcctcgagtggctgcaggaggagttgctggcgctccccaccatcgtggaggggtttatgacctatgcctccctggtcacctgcgaaggggcgatgaacgcgctgtcccgcgaagggtgccagcactatgaggtcttcgaccaagctgatgaggatttcgagcgcgatatttacaaggttgaggaccctgtggtgaaggaatccgcgggagccctcttcgaccagatgtggggccctcacggtcgggaggtggtcagggagcggtccgagacggcgaggggtcaggcggcgcgtaacgagaaggtggaggacttcggggcgttgaacagcgcgcagcctgattcggagtcgaacccggtggcggctgtgtccgagaccgccccggcgctgcccccagaaaccgtcgaaggcgcccctgatgcccccgcagccactgcggccggcggtggctcgtcgccaactgctgctccgagggctgaggatcctgtgaagatggcggcggagccggcagcggaggatcccgcgacggctgggtcttcgcaggttcaagattttgggcctgcgcacgcaaccgctactgctaattttttggcggcttcgaccgtggatggtgggaatgaatcggatgaatctgcgtctaagttttctgattttggtgactctgggacttcggttgagtggattgaagagtcgtcggatgaggacttggattactttgcggtcttgggtgtggcggcggtggaggcttcgccgcgtgttgtggatgctgaggttgtgcctggtccaagtgttgggcgcaggcggcgaagggcggttgcgaagcgtagagtgagtgagtcggacggcagtcggcttcgtgtgggcagggttggcaggcaggagctgttgtccctgccggccgctgcgagtgaaggtgagggggagctgcgaagtctttttgcgggtgaggagctgaggataatgctatttaactatagggagatgggaattattccgaaggttgagccgat

SEQ ID NO: 12377 - DNA, 903 bp, Zea mays
  Peptide Sequence Number=SeqID_55752
atggtcgcctttcaagggggtcaccctccttttaaaggcgactctccctacttgcgtccccagccgtcgtgggctgagtcttctccaacacgctccaaggtcctccccctacggcgcggggctgggtcccacgcgtcatgcaagccggcccagagcagaagaagccaaaccgcctcgcgcggtgcatacaaccacccagcggttacaagtggccctccacttttgcccagaccagcgggcgaaagggcgggtagccatgcaggcggcatgcaaccacaccaagtgggcgcacttctccgacttccaacacgcccaacatggaggcccaagcccacgcgtcatacaactggcgcgccggatgctgcgtgcgagcaactgcaccgccgcccgcgccactaccgcgcctcctcgactgcggaaccaataccgcgactcgaggcgacccagcgcacgacccagcagcgccagcctggcgcgacggtcaatgcggccaaaaatgggccggcagtaatggcggtggcaggcgggcaggagcaacgcgggacaggcggcgcctctggcaggagaagcgagcgacgcttcgccttcgccataatgaccgcgtcaaaaaagggaccgggaaagggggataccccgaaaaggatccttccccgtgaaggaaccaagctccgagcctccctactgatcagaggtttaaaggctggcccctcggaggggttcaacagccgcctcagagcgtgtgggctccacacccactactggtcagaggttcaaaggccggcccctcggaagggttcaacgaccgcctcaggctactcgggctccgcgcccactactgatcaggggttcgaaggctggcccccaaagggttcacagccgcctcagacacagagcgagggatga

SEQ ID NO: 12378 - DNA, 450 bp, Zea mays
  Peptide Sequence Number=SeqID_55753
atgcccataacgggcatgccaacgccaagacacctcttctgcttttgccgccagggacatgggatgctccaccctaatctccagaatgtacagacgactggacgaatgtcgtaccttcgtcagaagctgtccacgatcgctgtagatgcgcatgagtcccctcttgatgacaatgtcacagccgtcctcatccaattggccaagacttattatgttaaccttgagccgagtggctcccgagtcgagaatccaccgatgaggctgtcagcagcccctctccccgatctcggcgtgcaccttcgcttcctttatctagacaggactggatccaggtgtggtgactacgcccagactcagctcctcttgtcactggacttcctccaggtggttgctggacatcacagagtataccacgggatcagcttcatcatgcgcgcttaccaggaatag

SEQ ID NO: 12379 - DNA, 414 bp, Zea mays
  Peptide Sequence Number=SeqID_55754
atggcgccttacacttcacatgaactcccacctttgatggtcaataccaggaagggtggtggaattgatctacctcccaatcaacacactcagaggatatttagacaaccacaacagcaacaacctaagatggatcctctacagcctccaccagccggagttgacccaacagttgcagctcagatgaggatgatgcaacagatggcagacacctggcagatatgcacgcgcagatgcggcaggaacgccaagagatgcgccaggagagagaggacatacactaggagctgcgtcaggagagagaggagttacgacaggaaaggagggtgcaacagcaacaataacagcagcaagtaccactgccaccaccaccacctccacttccaccctgggacaagcaccgggaatttatga

SEQ ID NO: 12380 - DNA, 510 bp, Zea mays
  Peptide Sequence Number=SeqID_55755
atggctccaccgcgtcccgacgacctcgtgatgcagattctggcgaatctcgaagaagggaacagggagacgcatcggaggatggagaacatgcagaaaacgatggcgaacatggaaaccaccgtgaagagtgtgatggctgaacaaggggagttccaaaagtcgaagccagaagtggaggccaaggtccaagagatcgccgatgtgttgataacgatccaaggcaaggttgattggttcgtcgagaagcaaccggtggacgtgtcaggcaacgacgcgttgaaggaagatggtgtaccggctcctacccaactgggagcgtcctccggcgaggcggtacatgggcaagttcgccaccgcactattgatccttaccagagatcgggtactgggtcggaaatgacccggacaccccctccggtcgaaggaggacgtgctgctgcatatgggaaggcgcgatggaagaaagatggagcatggtgcagtcctgaagccaagtctgaagcctag

SEQ ID NO: 12381 - DNA, 396 bp, Zea mays
  Peptide Sequence Number=SeqID_55756
atgggccatgcgcggggtgcctcgagtcgctgcatcggccctgaaagcttatctttttcagtcttctacgacggccccgagggggcgcatcattggcgcaagcggcgaggagcgcaaccccgtgagggtcggtgctcttccgtcatcacttggcttcaaggattttcatcatgcagcctggctgcaatcccccgccagtggccatccagaaggatgaccaccagcctcacggtggggagaagcaagccgggctacggcttccaccccagcctcagcttcaaggatgttcatcatcctcaccggggcggggggcgagccaagtcagggccctgccctccgcgtgggctggcgacccgcttcttcctccagcattcagaggagaagggtgtttgctag

SEQ ID NO: 12382 - DNA, 324 bp, Zea mays
  Peptide Sequence Number=SeqID_55757
atggccataggcgggccggcagtaattgcgctagcagacccgcaagagcagcaggcagattgccaatcaggctctggctccacatgcaggctcgcctcctcccctgaggcgggcccaggggccactgtcagtaccctcaatcaggggtaccttctgctactgcataaaggcgccgcactcgtgcaacgcctcaaaaccacgtggagaatggcgcccaatgggcaggtccaggcgcgccgcgtggcaaggaaagggggtacatcccggtgttcgtcgctagaaccggacccctgcaggaagacaccggacccctatacatactag

SEQ ID NO: 12383 - DNA, 279 bp, Zea mays
  Peptide Sequence Number=SeqID_55758
atgcaccccctcctcctctccctctctcatttggatttcccgtgcagcaacctctctctcccacctctctctccccatggtgccctaggttttggagacggtgatcgccggagttggatccccggtgaaaacgaagaagagattgaagtgaccgaagagaagacaccaccacctttggaatctcaggcagggacttatctctactttgacatctgtgggcctgagcctgactcacctactaacgaaggcaagccctggtgcatttgccaccttccttga

SEQ ID NO: 12384 - DNA, 879 bp, Zea mays
  Peptide Sequence Number=SeqID_55759
atggagttctacaactcctcccataaagcgcctgaaatggtgacatcttcaagctggcctggctctcaacatgtcttcaaggatttgattggtcctttcagtctgaccatctgtctgcggatggtaggcgaaactgaaattcagatgtgtgcctgtcggtgttttgggtccgaccgcacacccggggttacccctcaaggtgcttttagaagtaggacggtgttatcgactatcgctcaatggttcgtgtcggttgcacgagaaacagtggacaatggtttacaggctcgggccgctttgaaatgcgtaacaccctacgtcctggcgagaatgctttatgtggtgggttacaagggctccagcgcgggaaggtcgggtctctgttgtgattacttgctcgaagtcgttgggccgtctgggcttgcaccgatccggccttatgtcgatccgcttcactggtcatctctcccaggcccaccaggagatgacctcacgaattatggagcccttgggcccttcgtgaggtcttttatccttctggtgaacccgggggatatctgtcccccacaagcccccgatctttgggtcgattttgaaataaacggcccaatgatcctaggtccagcttccagtcttttgattttaactagaaaacgctttggggataagcttgccgggtcgacgcttctgaattctgagtggtccggtaaaaacaatttttcactgccttcttctgcttttattgctcgaaacttggtgttctgtctcagactcttgcttcagaggtcagcatttcgttctgcaggacttcgaacttcattgggcgcaccaaaggtgcacccaatgggtgtagcccccgagcttcgagtggatttttga

SEQ ID NO: 12385 - DNA, 483 bp, Zea mays
  Peptide Sequence Number=SeqID_55760
atgggcaagagtaagaaaggtagcggttcttcgcctcgctctggtgacaagcgcaaacgtgagccgactcctccctcagaggacttcggcaactcggagtactcggaggaggagttctcctccgagtccgagggatctccggccctcgtctcccccccggcgtcgtctgatgattcaaacgactccctggggattgccgtggaggtctggacctacatccggtccatcgagagcgccgggctcgagggctcggatgagtcggagtattcctcggacgaggaagactcctcggactcgttcgaggagggcagcggcggcgatggcggagacggcgacgacgacggaggcgacggtgacggcggcgacgacagcggcaagggcggtgacggcagcggtaagggcggcggcggcgacggtggcagcggcagcaagggcagcaacaacaagggcagcagcaggggcagcaaccaggccagtggctag

SEQ ID NO: 12386 - DNA, 141 bp, Zea mays
  Peptide Sequence Number=SeqID_55761
atggccgttggggaggctatctgtcgatgggcgcaccggacagtctggtgcgccaccggacactgtccgacgaccgttggcgctgtagccgttactccgcatggcacaccagacagtccggcacaccagacagtccggtga

SEQ ID NO: 12387 - DNA, 1151 bp, Zea mays
  Peptide Sequence Number=SeqID_55762
atgaagacactacgctccaggaactccttggaaggttcgagcgacggggagactatcttcgcctcaagtgttgctcgaataccattcgttcagctaaagaagtggtggggacacctcgtggtaaccgctgaagactgcttgctatcaactgttcacgagcgcacgccgcctcctcctgttctctcctacgctgcctcagaagcttctggagagatcgagcgcggagatggaggtggcattgcccgcgacatctccaagcatgacgatgtcgacctccatcacgcgacgcaaccacatccggtgaataatgttgagcttgatggaggtcaggaaagggcccaacggccatgtgcggaggaggacatggtcgaagactggggctgccttctatttcgtgagaagaaatatgctgtcgcgcagtctaagcctagtgttactccaaaggagcagtttgttactgctcggcggcaagatttgcctgtaagttcaaagcagggagcagacactaagtccgagaaggataattccacaatattatataaggctggcaatggtcctattatcaaagaacaatcagttgatgcctatgcaagcaaaagtaaagctcaaaatggaaaggccatgcctagtaatggtggatcactggttaacatgtggggtcgtgcatcagcaaaacctatgcctccaagcaccactaattctacagctgtagcaagtgttgcagctactgctgatgcacaaatttgtgcgaaggaagaagcagatggaaatagcagcgatgatgaacatgggataaagtacaagaggggatccactaatgcaaataatagaaagagaagagtggtatttgattattcggatgatgaggaagatgacaatattgtaagcattgcatctcctgagctaccaaaacagcataccccagaccttgttgttggaactgctgacgacactgaagtaaatcaaaagagcttggaaaatgaatacaatctaccaaacaatgggaaaggttccacaacgttggtggattctgacttcacttctgaatcggatggggacgggaggatgaggccggtggagggggctgtgaggaggcaccggagggaggccgccattgtggaggtagaggtggtggtggcgcgacgagagag

SEQ ID NO: 12388 - DNA, 381 bp, Zea mays
  Peptide Sequence Number=SeqID_55763
atggccagcgtcaaaggaggcaagggcaagcgcggctcgttggaggactttggaggctcgaagttttccaaggaggactccccatggtgtcatccgatgactctgacgattccgtgggactgttggcgatcgagtaggcctacatttgatccgtcaagcgggcagggctcacgaggtcggatgactcggagggggaggactccttggatagcggcggcgagggaggctcacgatggcagtggcggcgagggaggcagcggcggcggcgatgaaggcagcgccaacgacggcttgggtggcagcgattgtggcgacgacagcggcaacaagagcgtcggtagcggtggcggcaatgtcagtggcggggtgccaccgacataa

SEQ ID NO: 12389 - DNA, 276 bp, Zea mays
  Peptide Sequence Number=SeqID_55764
atgcaaaccatcggcaacaagggcctccagatcgtccgtcgtgacggtggagaaaggccacgggtcgcacggcgaaacaacggtcacccggtcggccatcaccaagcagaagaggtggcggcggagcggacaaggacaggcgacacctttggcaggcgaagcaggcgacgcttcacctccgccatgatgaccgcgtcaaaaagggaccgggaaagggggatactccgaaagggatccttctctgcgaaggaagcgggccccgagcccccctactga

SEQ ID NO: 12390 - DNA, 333 bp, Zea mays
  Peptide Sequence Number=SeqID_55765
atggacatcacaaacattgaaaagctcatggataaagtggaggacaacctgcccaatcagcattggccagagagggcaaaggagaaggccatgatcgagggtgtcatggaggtaacgaaacatccactatgcaagggtaaggtgtggctcctatggtgtgtgcatatggaggcacacctattggacggtgtacgcaatgtcatgcctagtaaacatggggtattggagggcctctgtgaggctcttgatgtcaagggtgttctgatgcttgtggacaaagagaccttgccagcggtgctccatggtgcccctaggaagcggttaagagggtga

SEQ ID NO: 12391 - DNA, 1212 bp, Zea mays
  Peptide Sequence Number=SeqID_55766
atgctcgcacttggagatagcggcccggtgccactgctgatggccgtccgacagggcgaggtcgcgcccctgtgtgccgaggtcaaccatcaccaaggctgcctcgagcatctgctggcgcatctcccgcactctccgtcatgcaaggaagccacgagcagcagcttagacgccgtcaacgaagatgatgtgatgaaatttggtgttgtctctggggatgggcacgtcggcgtccaggatgtggtgacaaaattggcaggcgatgctgcccatggagatagggacgccgattgccaggatggcgtgacgaaggtggcatgcggcgtagcccatggagatggggacgtcgattgccagggcggcgtgatgaagatatgctatttcttctacaagaatgttacttttggtgtaactatctttctgtacgaagcatttgcatctttctccgggaagccagcttataatgattggttcttgtcactatataatgttttcttcacctcccttcctgtcattgctctgggggtatttgaccaggatgtgtctgctaggctgtgcatacagtatccacagctataccaagaaggagtgcaaaatatattattcagttggcgtcggatacttggctggatgtttaatggtgttatgaatgctgtcttaatctttttcttctgcatcactgccttcgaggaccaggcattccgtcgcgacggtcaagttgcgggcttggatgctcttggtgtcgtcatgtacacttgtattgtatgggttgttaactgtcaaatggcgctctctgtgaactacttcaccataatccagcacatattcatatggggcagcattgcagtatggtacctcttcctcttggtttatggtgccataaacccgaggttctcaactacagcctacatggtcttcatcgaacagctggccccagccctctcattttggctggtgacactttttgttgtggtggcaacacttgtcccctactttagctatgccgccatccagatccgctttttcccgatgttccacaacaagattcagtggaaacggtacttggggaaggctgaagatccagaggtggcaaggcagttgtcatcaaaacaccgcacatcattgcagcacaggatggttggtatctctgctcgtcgtgacggcaaggctgtgcaaataacaaaggagacagagctacaagttcaggagtag

SEQ ID NO: 12392 - DNA, 315 bp, Zea mays
  Peptide Sequence Number=SeqID_55767
atggcgcttgatgccaatgaggacggcgagccagtggaccagaaaaagtacaggagcatgattggctccctcgtgtacttgacaccgatgaggctagatatacactttgcagtgatgtcgctaggagcgcaagtctacttctgggacttgtgtggagcacagggatggtgttcgatggtcgaggtgaaggtcatgcgggctcgtgctgatggaccaggagtggtgaaggcggcggaggtttcggagggaactgttggtggcatgtggcgtcatagcaaagggtgcgtcaaggcgaagcaacttcgtgtggagcac

SEQ ID NO: 12393 - DNA, 2814 bp, Zea mays
  Peptide Sequence Number=SeqID_55768
atggcgccgacgaagaggctggagaaacttaagctcagcacattgttgactttcatgcgttgtcacgggggctctagtgatgaccacttacggattgggacagtggggttctccagagtcgtgtacgtcaatgagcctgataggcttgaagaggagggattcagttacctgctgaatgaggtgtcgacgacaaagtacaatctggccaccttcctgcccaagtccctcttcgagcagttcaggagggtggccaatttctacttccttgtctctggtatccttgccttgactccacttgcaccatacacggcagtgagcgcgcttgcgccgctgtgtgtcgtgattgtagccaccatggcaaaagaaggggttgaggactggcggaggaaacaacaggatcacgagcttaacaatcggatagtcaaagtgcatagggggaatggtcattttgaagagtcaaaatggaagaatatcaaagttggagatgtaataaaggtggagaaggataatttcttccccgctgatatgattctgctttcatctaactatccggatggaatctgttatgtagagaccatgaacctcgatggtgaaacaaatttgaaaattaaacaagctctcaaggtgacattggatttacatgaggacataaagttcagggaagtcagacaaacaataaaatgcgaagacccaaatgcgaacctctactcctttgtcggttcaatggaatggagaggccagcagtatcccctgtcatccctacagcttcttcttcgagactcaaaactacggaacactgactacatatatggggctgtcatcttcacaggccatgatacaaaagtgatgcaaaatgcaactgatccaccatctaaaagaagtaaggttgagaagaaaatggatcaaattatttatcttctaatgtcttctctactcatgattgcattacttggttctgtcttctttgggatctggaccaaagaggacctaagagatggtgagctcaaacggtggtatcttcggccagatgctactaccatattctatgatccaaagagagcagctctggcatctttctttcatttgttgacgtccttgatgctgtacagctacttcatacccatttctttgtatatatccatcgagatggtcaagatcttgcaagctctattcatcaaccaggatattcgaatgtatcatgaagaatcagataagccaactcatgctcgtacttcaaatctaaatgaagaactgggtatggttgatacaattctatcggataagactggaacattgacgtgcaacatgatggagttcatcaagtgttcaattgctggaactgcctatggtcaaggcgtcactgaagttgagagagctatggctatgaggaaaggtgctaggttagatgatgacattgaaaatggagaccacaaagacaaaaaaaatgacaacagtccccatgttaaagggttcaatttcaaggatcaacgaataatggatgggaaatgggttcatgagcctaacagagttatgataagagattttttccggctcctagccatctgccacacatgcattgctgaaatagatgaaaatgagaaggtttcatatgaagctgagtcccctgatgaagctgcatttgttattgcagcaagagaactagggtttgagttttacaagaggtcgctagcaactataattgttcgtgaacggaatccaagtcagaatgttgttgagaaaagaaagtatgaactcctaaatatgttggagttcagtagctcaaggagtcggatgtctgtgatagtgaaggaaccagagggaagaatattacttctcagcaagggtgcagacaggcttgcaccaattggaagaaaatttgaagaagaaacaagaagtcacataaatcagtattctgactctggtctaagaacctttgttctggcataccgtgtcttagatgagaaagagtacaaggaattcaatgaaaaattgaacgctgccaaagcatctgtaagtgctgataaagatgaaaaaattgagcaggttgctgatagcattgaacgggacttgattcttcttggtgctaccgcagttgaagataaacttcaacaaggggtgcctgaatgcatagacaagcttgcacaagccggaattaagatgtgggtcctgacaggcgataagctggagacagctatcaatattgggtttgcttgtagccttcttagacaaggcatgacacagataatcgtcacactggaacaacctgatatcatcgcattggagaaaaatggtgacaaaccaaaaattgctaaggcatcaaagcaacgggttatgggtcagatagaggatggaatcaaacaaattccaccttcaactcaaattagcactgcatcattcgcgctaatcattgatggtaaatcactaacttatgctttggaagatgatgttaagtttaagttcttggatcttgctctcaagtgtgcatcagtgatatgttgccgatcttcaccaaaacagaaggcactggttacaagacttgttaaagaagtaacacataaagtgactttagcaataggtgatggggcaaatgatgttggcatgcttcaagaagctgacataggggttggcatcagtggtgctgaaggaatgcaggctgtcatggctagtgatgttgctgttgcccaattccgcttcttggaacggctacttctggtgcatggacattggtgttaccggcgtatttcactgatgggcctaaggaggcccacggaggggctacgacagcagcagtcatggccctccaaggacgattag

SEQ ID NO: 12394 - DNA, 1128 bp, Zea mays
  Peptide Sequence Number=SeqID_55769
atggcccttatctctagaggtggttcctcctctaacccctcacttgctatgtttgctttgtcttctttgttgtttatcacagaggagcaggtggagagcctcgaggatgaggagatggccctggtggctagtcggttcacgtggttccacaacaactgccaaaaccgatggcgtggtgggtcaaaggatggatgcttcaactacagcgaccctgaacactttgttgccagttgccttgagaagtacaagtttgaggctggcccgtgcgactaccactctggccagtgcaagggcaagcgggagtacacctccgacaagtacaagtccaagggaggattcaacaaggaatcgctcaagaggaagtaccttcagaaggccaagatcaaggagagtgcctttcttgcctccctcaatgacctcgaccacaaccccaacgacgcattgtcttcctcgagcgatgaggagactgaaaggcgagttggggacaagctgaacagactatgctttctcgctgacaccataggtgatctctacaccatggcacttggtaatgatcaggtgggcggcgacgaccagtacattggctatgactctgcttttgagttagaggagctgacgactgctttggctagtcaggataagctacttaggcttgctgctcgtgagtggaaagagtttaaattcaagtatgagagcacgcttagggagcttgagtctgctagagcctcagttgtggtgtctaacgagactgaatgtgatgagtgtgctctacacatgtcgaacatcacaactttgcagaccaagtatgccaccttgctagatgagcgcgacgagttcaaatctaggtttagcctattaggtgtgtgtactacttgtcctggcttgcagactgagctagcagagagagatgctaggataaccttgcttgagaaggatagctcattcaagaggagaattggcagactaggatttgactttgctgctaaggatgggagtgttgcttgctttggaaagcctgttcagggacatcctgcgaggcctagaggtgctttgcctcttgctaataggcctcaggcagtgagatcacgtggtggtcgtgcccagcggggtgctggtcatgtgccatag

SEQ ID NO: 12395 - DNA, 798 bp, Zea mays
  Peptide Sequence Number=SeqID_55770
atggagcgagctcgaatgttgttcttccaccacgcggggaaggtgtcgtcgattccgccgccggcgggcgggttgtcggccgccattgtcgttgtcgcgcggcggtggaagaagtatgatgttgtagctgccgtcgaaggacatgaactcaagagtcccgaaacgaagcaccgccccgggccggagaggttgctggagactgcccatctggagcttgacggggagctgttcgtcagcacgcagcaggcccctacctggcgcgccaactgtcggcgtttcgagacaggggggtccctaagccgacgagcagggcggcgtgggggctcctccgaagccgaggtcgagtctgtcttccattgccgaggccgagcccgagcccctgggtcgggcgaggcggagatcgtttggccgaggccagggcggagtccgagccctggggtcgggcgaggcggagttttcgtcgtcttccggggtctagcccgagtccgagccctggggtcgggcggagcggatttcgccgtcttccgggtcttagcccgagtccgagccctggggtcgggcggagcggagttcgccgtcttcccgggtcttagcccgagtctgagccctggggtcggggcggagcggagttcgctatggcgcctttggcaaggcctgactgcctgtcagactcactctgttgagtggcactgcagtcggagtggcgcaggcggcgctgtccttctgtcagactggtcagtggagcggtggagtgacggcggtcacttcagctctgccggggggcgcgtgtcaggataa

SEQ ID NO: 12396 - DNA, 780 bp, Zea mays
  Peptide Sequence Number=SeqID_55771
atggcaccgcgttctctgctggcagtgctcgccgtcgccgccctcgcgttcttgcacgccgcctcggccaagtcgtcgtggcttgacaggaggttcaccacggacggcaccgtccgcacgggatacgacgattcgggccagcaggtggtgatgctccgcctcgaccagcactccggcgctgccggcttcaactccaaggagcagtacctttacggcgagttcagcgtcgagatgaagctcatccgggggaactccgccggcaccgtctcgtgcttctacctctcttccggcgacggcgacgggcgcgacgagatcgacatggagttcatgggcaactcgagcgggcagccggtggtgctgaacaccaacgtgtgggccagcggcgacggcaagaaggagcaccagttcgaacctctggtcgacgacctcttcatccgctccttcaagcgctacgccgacctgccgtacccgagctccaggcccatgacgctgcacgccacgctgtggaacggcagctactgggccaccgagaagggcagggtcggcatcgactggtccgacgcgcccttcgtcgtctcctaccgcagctactacgccagcgcctgcgtcagcggcggcgcgtgccgggccgccggcagcggcgggtggatgaacaggcagcttgacagcgccgagtggggcaccgtcaggtgggcggagcgcaacttcatgcgctacaactactgccaggatgggtggaggttcccgcaaggactccccgccgagtgcgcccgccactga

SEQ ID NO: 12397 - DNA, 246 bp, Zea mays
  Peptide Sequence Number=SeqID_55772
atggcaaaaagagggaggggtgttaaaattgtgatactacctattaggtgggaaagaaacttctgcgacgaagatctagccatcttctgcgacggaggcagacttgggattgagggtgtcaatggagatgcttgtggatttgaccagtttaatttgggcaaaaggggtagagatgaatatagcattcggcttgtactcgagccaggtgagggtttagcgtggaggttcatcgagaatgtggtgtaa

SEQ ID NO: 12398 - DNA, 207 bp, Zea mays
  Peptide Sequence Number=SeqID_55773
atgcaggcagcatgcaacctcgccacggggatgcaccctttcgacttcgacgcgtccagcatggagtcccaggcccacacaacatggaccgggaaaggggatactctgaaagggatccttctctgtgaaggaagcgggccccgagccctcctacttatcagaggttcgaaggctggccccttggaagggttcgacagccgcctttga

SEQ ID NO: 12399 - DNA, 450 bp, Zea mays
  Peptide Sequence Number=SeqID_55774
atgcctaagccttgtgtacatgccaacgtggctgtggggggagagcttgagccctgtacacgtgatagtgtggtcgtcggagaagcgcctgagccctgtagaagcacagttggcagcgcggcaaggatcctgctgacgtctccttgctgtcgtaaggggctgagagccaccggcgtcatggttgcacgcggggcaccatcattacccgtcgccggggtaagccagatgggacgccggtcttgttccttgtatcctgagctggctagggatagggtaatgatgtatcccctgttggcgcagttggtccgagcccaaggtcgggcgaggtggagacttctcttgaggccgaggccagggtcgagcgaggacgcgattcctcccgagaccgaggtcgaggccgagtccgggggtcgggcgaggcggagacctcctcccgaagccggagcctaa

SEQ ID NO: 12400 - DNA, 603 bp, Zea mays
  Peptide Sequence Number=SeqID_55775
atgacgggaaaacagcgccgcccgccccgctccgactgccgtgccaaccacccaggcgaagctgacaacaagtcacaatcaaccaccgagttcggcctcgggcgcaacaagaagctccgcctcgcccgacctcaggctccggcctcgggaggaggtctccgcctcgcacgacccccggactcggcctcgacctcggtctcgggaggaatcgcgtcctcgcccgaccccgacctctgccttaagagaagtctccgcctcgcccgaccttgggctcggaccgaccgcgcttacaggggatacatcattaccctatccctagccagctcaggctatacggaacaagaccggcgtcccatctggcttaccccggcgacgggtaatgatggtgcccccgcgtgcaaccatgacgccggtggctctcagccccttacggcagtaaggagacgtcagcaggatccttgccgcactaccatctgtgcttctatagggctcaggctcttctccgacggccacgctatcacgtgtacaggggctcaagctctccccccgacagccatgttggcatgtatacaaggcttaggcatttctctgccgacacgttag

SEQ ID NO: 12401 - DNA, 591 bp, Zea mays
  Peptide Sequence Number=SeqID_55776
atgggacagtcagccgcggggataggcacgacggttggcatggccaaaagtgggccggcagtaattgcagcggcagacgagcggaagcagcgggaccgagaaaggggacgttgtggagaggatccttctcggcgaaggaaacgggccccaagccctcctactgatcaggggttcgaaggctggcccctcgaaagggtttcgacagccaccccagagcactcgggcttcaagcccattactgatcaggggttcgaaggctggcccctcggaagggttcgacagccgccccaaagcgctcgggctccacgcccattactgatcaggggttcaaaggctggcccctcggaagggttcgacagtcgccctagagcacgcagagtgagggatgactctgggtacttttggagcgtgcctctaggccaccagccgacccctaacgaacggggcacgggcgtccactcggatcacccgttagcagctcactggaaacaccatgttcggcgccctccaagggcaacatggcgctttcccccatcctccttgcggaaaggcaacgcaggggcgtatgataaaagtcgggaaagtccttga

SEQ ID NO: 12402 - DNA, 888 bp, Zea mays
  Peptide Sequence Number=SeqID_55777
atgcattgcgcccttccacctttcgagccctcggatggggtgcaccagttcgccttcttcttgctatcgttggaggagcgcggcctcgtggaaatcggcgcccttcagccaccgctcggcttcaaggattttcgtcgtgcagcccggctgcattccctcaccaacgaagggcgttcacctcctgtggcgctgacagctgccgcgcgtctggctccctggcgcgagcggccccggcgctgcttccggtgtcgcccccaccactggtccttgctgcgccgccagctgttgggggtcgcccaacatgtcgtacgccacgagggcggcgttcgtgttctgggacggcctcgttctcgttcttgtggcgaggacgggagtaaggacctgccggtgcgctttggggcagacgccgtacgccggtggggtgttggtgggcagatggccgttggcgctgaggtggtggcagccagagagccacctggagtttgttgtcccgcaggccctctggaccctcggctgctctgcgatgagccggagccgaaggcagcggtgttggcacggatagaggcggagtcggcccgaaaagagacttcattggcccgggagctggcggcttcccaggccgaggaagatgtggcagcagcagctggagcttggccaagacatccgctggcgcggtgctggcgtcctcccttgggtggaggtcccttcgcctgggtcaccgtccgaggccaggccaggttccaccgagggtggaaacaacgccgaggaatcgtttatccaagcgagagttacttctcgcggaaggtgatgagtgaggattctgttattgatacagtcgagaaggcacgaaagtcgttttctacacgagtgtttggacttgctcggtag

SEQ ID NO: 12403 - DNA, 1170 bp, Zea mays
  Peptide Sequence Number=SeqID_55778
atgagatccgttgatcgccctccatctaatgcaaaaagactaacgattgagtcaagtcagggagatcagctgcaccttccccttcataaaaaccatgcaaagaagataaaagtcccttccccacaagtttcgattgtgtcaagcagatcaaagtttgatatagatgtcaagtcaaagatcattacgaaaacaagctcacccaaacagaggacacccagaaaatcccagaaattgaatatccgttgcatcccttatgatgtcattgtctcaacttggataatgagcgatcgacagcgggatgttgttgctaggttgggatttcaatgtatatttgatttgcgtactgatgcgttagagagcagatctctcataaggtggttgatggataagttggatccagacgacatgacaatatgcccagaggctagtaaagaactgaagataacaaaagagacggttcgtcttattttgggatcgccaagtgctggaggtggcagggagttcactgattgttgttggcacaagaggaacataacaaacattacagcaacagtatatggatgttcactcattgttcttatatactatcttgatcacttacaccaccctgcatcacctgagaacaagtatggtactccatgcattaagtgttttgataacgagacaataagagatttggcaaggggtgacagacgtgccccccgtcaaactggtgaaccatttggtcatgcagagtttcgtagtcgtacagagacatgttatgtcattgcaccagaacagccgatttctgacgtattcaacatatatgtgccacgcataaagcatttgattggcaacaagctgaaatgtctgccctcccagcatcgccccatgttcgaatcaatgtttgatgcgcatgacgaggtggataagtactgtgattctcttcagcagagccatcagatgcttgtttctaaacagattgaactatctgagacctttggtgaaatgatcgatgaagttctaagggctgccacgcagcgtgatactcagcaagaagatatcccacccactacctcaatgcccccgacaaatgatcctgtatccactcctcctgttcgaacccctgatcatcagcaacacgatcagaaaatacatgttcctactgatgataacaaagtatcggaacag

SEQ ID NO: 12404 - DNA, 243 bp, Zea mays
  Peptide Sequence Number=SeqID_55779
atggctcttcaatcggggctccaatgttcggagattgaaggagcgcagctggattggagtggcggaaatcgtctggcaagtcgcctcggccacagggaaagtcgcctcggccgcagggacggttttggaaaccgggaaacgggggagacgtgggacgctgacggagaaacaggggttaacggcgtcgtgactgtgtatatgctgaccaggatcgctgcaacagccatgcagctagactcgtaa

SEQ ID NO: 12405 - DNA, 1635 bp, Zea mays
  Peptide Sequence Number=SeqID_55780
atgaacagacaccggcactcaaggtgccattacaaacggaactccggttccatccccgcgggcggcgctgacggcctcgacggtggggaagcttcccccagctgccaccacgtcagcaccgacggcggcgtccgcctctccaccaacgccgcaccggcggacgcgggccgctccaaagcgcaccggcaggacgcctcctccgcagagctggaggatggtttccaccaccagaagctagaagaggaggtggccagccgacccgtgcgggaggtagagccccggctcacctcgctctccgccccagcaagaatgatgaagatccttgaagctgagggcgggaccaagatcgcagcccggcttgcttctccccacccaggggctggtgccatcgcgggctgcgtcttctccaacacgctccaaggtcctccccctatgacccgggcgctgggtcccatgcgtcatgcaagctggcccagggcagaagaagccaaaccgccgcgtgcggtgcgcgcaactgcccagcggttacaagcattcctccactttcgcccagaccagcgggtgaaagggcggaccgccatgcaggcggcatgcgaccgcgccaagtgggcgcaccccttcgactccaacacgcctcgcatggaggcccaggcccacacgtcatgcaaccggcgcgccggttgctacgtgcgagcaactgcaccgccactcgcgccactatcgcgcctcctcgattgcggaaccagtaccgcgactcgaggcaaccctgcatatgacccaacagtgccagccaggcgcatcggtcacgggtcagtcagctgcgggagaaggcgcgacggtcaatacggccaaaaatgggccggcagtaatggcggtggcaggcgcgcggaagcagcgggaacgggaaagggggataccccgaaagggatccttctccgcgaaggaaacgggccccaagcccccctactgatcagaggttcgaaggctggcccctcggaggggttcaacagccgcctcagagcgctcgggctccgcgcccactactggtcagaggttcgaaggccgacccctcagaagggttcaacggccgcctcaggccactcgggctccgcgcccactactgatcaaggggctcggtccactcaaggaacacgacctcgcctcgcccgagcccagcctcgggcaagggcagccgaccccggaggattcacgtctcgcccgaggtccccctcaagcaacggacacaccttcgactcgcccgaggcccagtcttcgccaagaagcaattttggcccgatcgccacgccgaccgaccgtatcgcaggagcatttaatgcaaagggctcggactcgggctcagccccggaagacgacgaactccgcctcgcccgaccccagggctcggactcgggctcagccccggaagacgacgaactccgcctcgcccgaccccagggctcggactcagccctggcctcagccgacggtcttcgcctcgcccgacccaggggctcggactcgacctcggcctcggaagacagactcgacctcgacctcggaggagcctccgccttgcctagcccagggctcggaccgaccacgtcacaggaggggccatcattaccctacccctag

SEQ ID NO: 12406 - DNA, 411 bp, Zea mays
  Peptide Sequence Number=SeqID_55781
atgctggtcggcagcgacgtgcgcaccggggccagctgtcaggccggcagcagcgcccgcgggcaaggccgcgacggcgactgcgccctggccggcagccacgccggcggtggtgtgcgagcccggggtcgcagaaaggaggccagcagcggtggcgtgcgtgatcaggcgcgcatctgcgccgacgtgggcagggacagccgcctccacggcaaggacggtcgcgccgtcggctgtgtgggcgccgacatcctggagggcggcgcaaagtgggtctttggccgccgccggcgtggggacaagggttcggcggctgtgagtggagggaggagggggaaagacgccggcggttgggggcgccgcagccgaagccgaagaggaggccggagacgacgaccaggatgtccttga

SEQ ID NO: 12407 - DNA, 411 bp, Zea mays
  Peptide Sequence Number=SeqID_55782
atggcgaggacgagctgggagagggaagccgctgctccatgctattggggaagaagggcgtcgctgtcctctgttggccgtcgagcaaggagcagggagctcgcgccaagaggagaacagggagggcgctcggctgcttgccatggacagcagagagagggaggaagagatgggcgccatgggagcagcttcagcgcgccgaggaagaggggcgtcctgctgcagggataccgagcgccaggagcagagggccggccaggggagagaggccagcgtcctgggaggagctcggcggcatgggggcttggagctcggctccctgcctgctaccgtgtaggaggaatgggggagctgctgcgtgagagaagaagacagggaggaagaatggctgtggcggctgggaaaaattga

SEQ ID NO: 12408 - DNA, 363 bp, Zea mays
  Peptide Sequence Number=SeqID_55783
atgagttgtcggaggatcggtggagacatcaaagcgactggatttgctggtggatttgggggaggagagatgagtgacgtctggcgcgccgctcgcagtcaatgcaaagcgaacgcgcttggaggagtgaaggacctgggcacgagttcgaggattgaagaacatcatttaatcaaagttctcaaggaatctttctccatgcctggtgtcgggtacccagaaacggggtacctaaggcaaggcccacaaacctcgatcaagtccccgctgggtgagaaggtggccaacccggaggcgggcatacgtagtcatggctcgcccgaggccatcgctgagcagaaacccgatgaggcaaagagctga

SEQ ID NO: 12409 - DNA, 597 bp, Zea mays
  Peptide Sequence Number=SeqID_55784
atggcctgcccgcaacccggcactcccctgacacgccggctccgcaggcaaccgccctcctggagcccactcgccagggagaaagccgcggaaaatcgggggcgagccgaggaagaagaggtcgccgccgccgccaccgcttccatgtctgggggaatcgcccgcggccgccttgccgaggagcgcaaggcctggcgcaagaaccacccgcacggtttcgtcgcaaagccggagtcgctgcccgacgggacggtgaaccttatgatttggcactgcaccatccccggcaagcaagggactgattgggaaggtggatacttcccactcacccttcatttcagtgaggattaccctagcaagcctcccaagtgcaagttccctcagggtttcttccacccaaatgtctatccttctggaacaggttggagaccagctattactgttaagcagattctcgtcgggatccaggacttgctagatcagccaaatcctgctgatcctgctcaaacggatggctatcacctttttatccaggatcctacagaatataagaggcgtgttaaactgcaggcgaagcagtatcccgcgttggtctga

SEQ ID NO: 12410 - DNA, 405 bp, Zea mays
  Peptide Sequence Number=SeqID_55785
atggccgagacagtgtgtgaggtggtgtacacttgcgaaagtgagaaaaaatcattcgaagctgcaagcagaatcccacctctagatccaattgcaggcagcacaacggtgttgtttaggaaattcggacccaagatacaccatgacgcattcaggacaaaagaacgaagatgtgctagacattgcaacagactaaaggcccctgcagagcgtgccagaccgcatgtcttaaacctgcgccgcaggcccctgtggtggaatgattccgcagaggtccatcagcgcttgcagcaccaaggacgacagtggacccttgaagaggttgatgcaggtctccagcgtggcacttgcagtagcctgatcagacggctggccttccttaggcagcaagcccaggcgctttag

SEQ ID NO: 12411 - DNA, 750 bp, Zea mays
  Peptide Sequence Number=SeqID_55786
atggtggggagaagcgagtcgggctgcgatcttggtcccgccctcagcttcaaggatcttcatcatcctggctggggcggaggccgggctgagccggagctctacctcccgcgcgggttcgtgggtcaccttctccctcagcattcaagggagagggcgctcatcggcctagcgggagggtcggacttcgacaacgcggggccggtcgacggcgagcgtcgtcagcttcagcgtgttgggctcgctggctcagttggctctggctcggctcccggtgccccctcctgccgcgggagcggtcgtcgcgccgtgcgcactggaggaccgcccaagacgccgcgcgctgctagggcggcgttcgtgttctggggctgtcctgcctttgccccggtacgtcgcctctgcgcttgtctgggaggatccgagtggggatctgccggtgggcggatggcttccgtcgtcggcgctgaggtggtggcggctgaagaagtcctcgtcgccgacgggatcaccgccaccatccgcgctccgggcctcctgctctttggctttgatagctggttcgcgtcccttgagtggggacacgaacgagagccttccggtggctgtgtccgttctgggaccatggctactgctgcgagaggccgccggcaggtcgcccggagcttgttgccccgcgggctccccggtgtggaggttgttcatacccgcggggacggaaccgaaattccgtttgtaatggcaccttga

SEQ ID NO: 12412 - DNA, 885 bp, Zea mays
  Peptide Sequence Number=SeqID_55787
atgcaggacccagcccccgagtcgcaggggagggccttggagcgtgttggagaagactcagctcgcggcgcctggggccgcacgaacgcaactccatgggagttggtacctctcagccatcgttcggcttcaaggattttcatcacgcagcccggtcgcgccccttcaccggcggtcacccgagagggcgacctccagcttgatggtgggggaaagcgagtcgggctgcggcctctgccccttcctcagcctcaaggattttcatcaccaaggctggggaggggagagtgccgagttggggtcggcccctacgtgggcggtggcccgctccttcactcagtgatggggggagaagcgggcattgcccgtggcgtccggcagctgcagcgtgcctggtcttcagtcgcgagtggcttcggggccatttgcggcgccggcgtctgccacggcagctggaaggggttcttccgccggcgcggcggccgggaccggccacgggctgacctccaacctctacggccttctgcccgtccttgcctcacgagttttggcatgggcgggggcctcctggcagcggcatccaccctgaggtcagcgttgccgctgttcggccccccggagcagaagtcgtcgtcgtcgccgctgctggagcaggtgacggcgcgccgttcgtcggccttccgttgctccgcaggccttcccccacggagtggggttgttcgcacctgcggagggggaaccggagttccgtttgtaatggcacttcgaatgccagtgttcttcgttcattgtggctgtcggggcctgaacgtgggtaaccggttgagccgcctgctcgggccggattcccggaggagtccctggaccgcggctgagagcacctag

SEQ ID NO: 12413 - DNA, 732 bp, Zea mays
  Peptide Sequence Number=SeqID_55788
atggcgctccgcaagctctgtgacgacagcggccctcggctctcttacggaagcaggacaacgctccgccgcacctccgacagccacgacatcacgccagcagggtgcctagatctctccggctgccacattggcatggccttctcagaggaggttggccgcgcgggaccgaggacgggacaggcgctctcttggggccgctcgcttccctcacccgcgtggacgcttgtaacccccctactgcaagcgcacccgacctgggcgcgggacggacacgaaggccgcgggacttacacctctctcacgctcgactccggccacctcgcctctccccccttcgcgctcgcccacgcgctcgacccatctgggctggggcacgcagcacactcactcgtcggcttagggaccccctatctcgaaacgccgacaagagaagaaaggaaagtgctactgggcattggctactggcctactgccaactacccgtggggtcccgtggaagagaagagagcatcgccggagttggggtcggcgcgccgacgaggaacaaaagaagacggcggtggggcggagatggggagtcctctgggcgggtggccgtcttacaacccgcacaacttcagccagctcgtcccggccgacccatccgcacagccctcggtcagcaacttgcccttcctggcgatctggcctctaatatcatgctgtgctgcttggctccgtacttcctga

SEQ ID NO: 12414 - DNA, 405 bp, Zea mays
  Peptide Sequence Number=SeqID_55789
atggcgcctcctgttggcgtggcggtctatgccctaggcagggcgacgtgggggttcctccgaagccaagtcggagtggcgcaggcggcgctgtccttctgtcagactggccagtggagcagtggagtgacggcggtcacttcggctctgccgggggcgcgtgtcaggatagaggtgtcaggccacctttgcgttgaatgcccccgcaatttggtcagtcggtgcggcgatttagtcaaggttgcttctgagcgaagccaaggcctcgggcaagccggtgatgtgtccgccataaaaagggggcctcgggcgagacggaagtctctcgagctttatgctgatgggggttaccagctgagaattaggcgtcttgagggtacccctaattatggtccccaacagtag

SEQ ID NO: 12415 - DNA, 354 bp, Zea mays
  Peptide Sequence Number=SeqID_55790
atgcacagaacaatttcgctgctatacagcagattactgtttgattttcatggagactgtttgattttcggtgctatacagcatggagggaacatttctaggggtagagatggcaatgggtacccgaaaccagaatacccgacgggtttaacccgatatgaaggcgggtacaggatgatttctctacccgcgggtatgctaatgggtaaaaacctctacccgttgggtagacagactttcctagcgggtacgggtatgagtaagattttatacccgcgagtatatatgggtaatgggtacgagtatggaatggtactacccgacgggcatgtacccgttgccatccctacttag

SEQ ID NO: 12416 - DNA, 248 bp, Zea mays
  Peptide Sequence Number=SeqID_55791
atgcatgtaggatataaatatgtgttcaagaacaagcttcggcttgatggtactattgagaagtataagggcggcggcggtgatcaaacaggagggagcctgggcatgggcgtgggcgtggggtacgccggcggcggcggcggcggcggcgccgagtgctcgtcgtcctcggtggcggccgcggctgccgccgccgcggcagcggcggaggcggaggagcggcagctgctcaaggggggaagatcgcg

SEQ ID NO: 12417 - DNA, 333 bp, Zea mays
  Peptide Sequence Number=SeqID_55792
atggccgcacgggaggaaagcagtggaagcagttgctgccgctcctccgaagtccgaacccgtctcgctgaccagtgcaacgctataaaggatggggctgatgctgtgatcgctgttggaggtgatggtacgcttcatgagctcattccacttggaactggctcagattttgcttggacatttggctggacaaatgatcctcgtgtcgcaattgatcgaattatcaaaggcattcacccagctttattagaaagctcaacaaagaccaatgatccagtgttggggaatccagcttacagatttcaagaagatcttagcaagcagcaagtctag

SEQ ID NO: 12418 - DNA, 528 bp, Zea mays
  Peptide Sequence Number=SeqID_55793
cccgctgccccgctgcgacgctgccccgagcggtcgagctacgcctgcgcggctgcgaccagcgaccgtcccaagctgcgatttgcatgcagatttatattttacagtaccatatccaccggatacccgatacccgacggatacccgtcagtctgcccctggatgctgctgccggtggtggacccgtcggtgcacgggcagcacggcccgcgctgcgtatgtgggttggaagccctgaacgcaaccgacgttgcgttcgccggcagtggagtgcggaggaacatcaatacttctaatcatagacggcttgcgtttccggcaccattgacgatcaaagctcatagtatggattacaagcaggcgagagagagggaggcgaggcttccaagtctcttattcgtgatggaggtggttacaaaagtgaacggaacggagcgtgactgtgagagcgggattggaacggagcggctccgtcccattgattttttggagcggaatggttccggatctgaggagaatattccctaa

SEQ ID NO: 12419 - DNA, 2109 bp, Zea mays
  Peptide Sequence Number=SeqID_55794
atggtggctctgtcgaagtatgtctgggcgacgacttcgtatggcggacaaccatcagtcgaagtctttgcgaagtactattgcctgcactggcagaaaaggatgatcggaaatgaggttgcccagtttgggtcctgtacgtttacgccgaagaccggcaagacctcgatggaggtagttgagttggttccttgcgcccgcaataagtggggcaactggcatgagttttggttctacgttgcggagggtgcagtcgaagaccatccggggctccccgtggccgagatgtgctcgcattattactcagcatacccgccgtttgaagtggcggaggaggatgcggacgaaggggcccttcggtgcgccgccggcctgagcagcgggcgcgatttggttgaggagtttgtggtgtacggggtgtggcctttggcgcatggctgggcattgggcgaagtatgccctcgccagatgccttcccatggtgggaagctggtgcgaagtcccgccttcgcgttggatttgcatagccgcgatccggccgcctttgtgcgtgagacggaggatgggcgggttttcgagttgaaccgtctgccttatggcggttgtcccggccaagacgatgtggatcgtcgcgggaagaagccggtggtagagactggagacgaccccgcgccggcggccgccccatcctctaagaagaggaaactaggtattgctatgggaggactgggggtttctgatggttttgctagggaattgatgaggacatgcgcagccccggggggaaggatgtcttcgcccgagctcctggagtcttcggcgcggatgctgagggttaccgggggttggtggcctaagaatgttcctatcccccgcgcggccggcgaagacttttttacatctcgcatggttcgtgattggagagtgtttccttacgggcggaatattgctgctgttgtgtcgctagtgatggacaaggatcgtcagggagctgcgcagaagtgccaggcggtcgtcaggcttcatgaggctaggccgaagaggccacgggggactacgaaggctgctgcccccggtggaagccagtcgccgctggcggcgaaatcggccgcccctgcatccagcagggcgccggaggctgcgaaggcggctgccgccggtggttccaagtctgcgaaggctgcccctgtgtccagcagggtgccagaggctgcgaaggcggcccgagagttgccgccgccgggcaagcgcgttgccgacttcgccaccgacattagtgtggaagattatcttgttgggtcagacgaaggccaacttgttgttgttccgcctgccgtggcgaccgcggcggctgccgtggtgcccaggacgaagggcagtgctcttagtgccggtggcgagattccggcactcactgccgtaagggacgaggcgggtgctgtgtcccaccggctgaaggagctgaagggggcattaaatcaggcggctgacttcgcagaccgcgcggcgtcgggggcccttacggcagttgtgtctgccgaagtcgagagacttcagacgcaacatgctgacgccgtccaggaaaagtcgaccgccgacagtaagtgccgcaagctggcggataaggtggccgcgctggagggtgagaggactgacctccggcgccagctggcggaggagaggaaggaggctaatgaggccctcgccaaggcgcagtctgcgcaggcggaggccaatttggcgcgggcggagggcagtcttgccaggcagcgcgctgagcagttggaggagcggctcaacgctctgcagacccgtgtggagagggtcgaggcctcgacacgctcggaggctgagcggacacgcaaacagcttatggattcaaaccatgagctgggcgcgcggaccactgacttcgaagtgccggaccgagagcccggacttcgctgcctcgagtggatacaggaggagttgctggcgctttccgccatcgtggaggggtttatgtcctatgcctccctggtcacctgcgagggggcgatgaacgtgctctctcgcaaagggtgccggcactatgaggtcttcgaccaagctgatgaggatttcgagtga

SEQ ID NO: 12420 - DNA, 354 bp, Zea mays
  Peptide Sequence Number=SeqID_55795
atgctggacgaggtagcaagatgggacgacctcgtcacaggtcttcgtccggtgacgtatggggcgaaggcgatgccgacctcttcttcttctgctgccgctacaccggcggccgacgcgtcatctaagaagacgctgagcactgtggcggcggaggagttgcgcgccggcgatacggtggatttcggtgtgtcgcggatgtcctcggtccgcgtgcaagatatgcagcagcttggctactttggcggcgaagtcgctcgtgtcccggggacggaggaggtcctcgagccggaaggcgagttggttgtgttcgaggcgttctttgccgctggtcttcgcctgcctgcgccctga

SEQ ID NO: 12421 - DNA, 435 bp, Zea mays
  Peptide Sequence Number=SeqID_55796
atgggcacgaggaattggagaatggctcaccggatagctcggcctacgcgcggtggcgggcgaccgaagtccagcgacagtgatcttgctgttccgatgaggcagggcttcgatccttggttggagaagcttcacggctcctcggggaagctgtccaagggctcggttgaggctgaggttctctggaaatggctggccacggtggccggcgctcgggtggctcgggcgggtagcgtagagctctccggagctaaggacggtgtctggacagtgaaggtggtatttcagctctgcattcccttaggaacaactttggagataagctctgcatcccctgaggaacgactttggagcttcttcaccttttacttaggtggtatcttagctctgcattcccttatgaacgactttggagcttcttcaccttttacttag

SEQ ID NO: 12422 - DNA, 492 bp, Zea mays
  Peptide Sequence Number=SeqID_55797
atggcggttggaggtggtcagagtcgctctggccacgcgctgtggcagaagagctcgtcggcggcgaggagtccggcctacacagggcggtttagttcgattggatggcttggggaggttcactggacgtcgtggaagctagagaattataatgaaggtgttgtagagagagaattacatagcgattgtccaatcctccaaaaagctcctgcaatgcttgacaaatatgttgctgaccaatggttagtctatgtgtttgaggaccttcggaagatgaaggccccaatatcttctaatgggggtttcctgggttatgcattacattctcatgcttatcatgttcttaaccaagagactaaccgcattatggagacttgtgaggttacattcgatgagactgcaccttgtccaccccctatctttgagcctgtaggtctagatcaggtgggacagaccatctttgtggaggaagagcacgacaacgtcgattag

SEQ ID NO: 12423 - DNA, 345 bp, Zea mays
  Peptide Sequence Number=SeqID_55798
atgctggacgaggtcgcaagatgggacgacctcgtcacaggtcttcgttcggtgacgtatggggcgaagggtgaacctgcccgttgtcttgtctccgtcggttcaacgattacggcgaaggcatcgagcgaagggtggcgtcttcgccttcgccccaacagacgccccgcgtgctccatgacgacggcggctctcggccccttacggaagcaaggagacgtcagcaaggactcaacagccccgacagctgtccttccattaggctccagcgctcctccgacggccacgacatctcatgaacagggtgccaaaacctctccggctgccacgacggcatgtacttag

SEQ ID NO: 12424 - DNA, 399 bp, Zea mays
  Peptide Sequence Number=SeqID_55799
atggggagcgcccgcgttgctttcgtcttgctgtcgttggaagagcacaacttcgcgaaagttgcttcaaggatcttcatcatccttgctggggaggagggcgaggcgagtcggggctctacctccctcacgggttcgtgggccaccttttccttcagcattcaggggagagggcgctcaccgggcctagcggaaggggcagactttgacaacgcggggccgatcgcccgcaagcgtcatcagctccagcatgcctggttcgctggctcagctggctctggcgcagcttccggtgccacctccccaccgctgggcggagtgcggctatctgccccgccgtacgggcggctgttgcgccgcgcgcaccgggggaccgctcaagacgtcgcgcgctgctag

SEQ ID NO: 12425 - DNA, 324 bp, Zea mays
  Peptide Sequence Number=SeqID_55800
atggaggaacagcttccagtgcctcttgtaccgatcatcggcaagggagtgctagaggaggaggttatggtgagttttgtcacgactaatggtgagcccacgactacgaccacgtcaaagctggtctggtggaacctcgtggatcagatgacgatgacgctgacatcctgcacctctgctgcgatgctgccgaccaggacacgggcatctccgtcgcgcgcgctctacaagtctggatccatcatcgtgctcggcaagactaacttccttaggccaggcatgattttgcttttgcagttaagatgtcttaaaagagaatcctag

SEQ ID NO: 12426 - DNA, 417 bp, Zea mays
  Peptide Sequence Number=SeqID_55801
atgattacaggtgatcaacatgctattgggaaggaaacaacacgtcgtttgggaatgagtactaaatgtacccttcctcttctttactctgaacaaaataaggatgagtcacttgcttccttgccaattgatgaattgaccgagaaggctgatggcttatctagagtctttccagaacacagagttgtgttgacgggtcgagcaattttccaaaagatgaaggattacacaatctatgttgtatcaattaccatccgtattgtgcttggttttatgcttcttgcactgatatggaagtttgacttcccaccatttatggtacagatcattgccatcctcaatgatgttcataatgcaagccgcatattaggtaacctaagagcaactccaagagaagtcgtataccaaccccaatag

SEQ ID NO: 12427 - DNA, 825 bp, Zea mays
  Peptide Sequence Number=SeqID_55802
atgtggaagaagaggagattcgccggttctacacccatctcaaccaaagaagacaaagtgctcttggttaagctgttgaggaggaacaaggaacaaggcgagacacttctcaggctagaggagactctcatcaaaaccaacgacagcctagagaagatgaccaaagaacatgaggagctaaagtgctctcatgataatttggtccaacaaaaattgcttgggaacaagaaacaaagaccattgaggagaagacgctatgctcgactttctcaagatatctacaaacgcgtggtgaagaagcttgaggaaggagaaaccgcagcaagggtcaaactccacgagaaagaagttcctaaggcaataagtgaagcaatcaacatgaaacaagaaaaaggtaaagattcaattagtcatgttgtttgcactgatcatctctctatgtcatccaagtgcaaaaagggaagaggaaaaaggaggtgcttcaagtgcaaggaattaggccacttcattgcgtcttgtccacacaaagacaaggatgaaggaatgaggagatgttttggatgcaacgataaggaccatatgatcacttcatgtccgctcatgaagaatcaaagacgtgcaccctccaagatgaccctcactaagaaaaaagacaaacaacaagtgtcatgtcaggttgagcgacacttcatctacatgtgtggtgagcatggtcatctacctaaggagacccaaatcagcacaactgctatttgggtgccaaaggcccttttagatgaacgttatggacccatctcgagatgggtaccaaaccgtgccaactag

SEQ ID NO: 12428 - DNA, 453 bp, Zea mays
  Peptide Sequence Number=SeqID_55803
atgaaggaaggattgtcccctcatataaggaccggtttgtcatccttcactacttgtactcatgataagtacaaccactcaagactgtatgggcagtcactcaatctgaactcgtacgatccaaaccccagggttatgatggttggggagcaccgggaggataaggagggggaatgttttgtccggtttggacatggcggtggcctgactccttctggtataaccgttaagggggatacaagcaagtcgagaaaagacagagtgaatcccaagtctttgagtatgattgaggcgagtgccaatatcaggagtgaggaggcccaggagtacaagggttgttatgttgttgttatggtcagaggaaatgtgtctgagccctgcaacatggtcggcgggatgaccctcgtccttgtgtcgtcctttagtcaggagaaggacgcccaatccctatag

SEQ ID NO: 12429 - DNA, 815 bp, Zea mays
  Peptide Sequence Number=SeqID_55804
gccgagcccgagctcctgggtcgggcgaggcggaggtcgttcggcagaggccagggcggagtccgagccctggggtcgggcgaagcggagttcgtcgtcttcaggggctgagcccgagttcgagccctgggtcgggcggagcggagttcgccgtcttccggggccttagcccgagtccgagcccctggtcgggcggagcggagttcgccgtcttctggggccttagcccgagtccgagccctgggtcgggcggagcggagttcgccgtcttccggggcctagcccgagtccgagccctgggtcgggcggagcggatttcgccgtcttccggggccttagcccgagtccgagccctgggtcgggcggagcggaggcttagcccgagtccgagccctggggtcgggcggagcggagttcgccgtcttccggggcttagcccgagtccgagccctgggtcgggcggagcggagttcgccgtcttccggggccttagcccgagtccgagccctgggtcgggcagagcggagcctctgcagctttatgctgatgggggttaccagctgagaattaggcgtctgagggggcaactccgctctaattcaccggactgtccggtgtacaccggacatgtccggtgctccaaggaagggtggcctccggaactcgccagcctcgggaattcacttcagctgctccgctataattcaccggactgtccgaggtcaggcacgcccatgctggtgcaccggacaatctacagtgcatgtccggtgcgccaccggacatccaggcgggcccagaagacagagctctaa

SEQ ID NO: 12430 - DNA, 150 bp, Zea mays
  Peptide Sequence Number=SeqID_55805
atggctgaaaggcggcacttctggcaggagaagcgggcgacgcttcgccttcgccgcaataaccgcgccaaaaaagggaccgggaaagggggataccccgaaaaaggatccttccctgtgaaggaaccgggctccgagcccccctactga

SEQ ID NO: 12431 - DNA, 327 bp, Zea mays
  Peptide Sequence Number=SeqID_55806
atggaggcaagaagaggttcgaggtaccgagtgcacgggagaaggtcaaggagaccaggaacccaaagccagggtgaagaagaagacttgcaaagtcaagagtccaacatcgacctcaaacaagccaaattgggtaaaacgatgaaaaaggttaagtatgtaagagaaagtaccattctgagctctactggaggagaaacagaaaagctaggagaagaacaagaaagattctcaggaaaatcctcccaaaagttgaagtcaaacggagaaagaacggaggaaaaagcacttagtgtgctgttggctggtgcacaggacagtgaatag

SEQ ID NO: 12432 - DNA, 402 bp, Zea mays
  Peptide Sequence Number=SeqID_55807
atgacgacgaagcagctgaggcgggtgcgcacgctgggccgcggcgcgtcgggcgccgtggtgtggctggcctccgacgaggcctcgggcgagctggtggcggtgaagtcggcgcgcgcagcgggtgccgcggcgcagctgcggcgcgagggccgcgtcctgcggggcctctcgtcgccgcacatcgtgccgtgcgtcggcgcccgcgcggcggcgggcggcgagtaccagctcctcctggagttcgcgcccggcgggtcgctcgccgacgcggccgccaggggagggggccggctggcggagcgcgacatccgcgcctacgcgggggacgtggcgcgcgcgctggcgtacctgcacgggcggtcgctggtgcacggggacgtcaaggcccggaacgtggtg

SEQ ID NO: 12433 - DNA, 444 bp, Zea mays
  Peptide Sequence Number=SeqID_55808
atgaatcagcttgattcgtgggaagggagttgtagcgtcaccaaggtgccagtgtcagaaagcctggtcccgaggttgagttgcgccaaaaccgtgtcaaatgaatttggtttgagttcaaactttcctagaatgtgttcaagagaaaccctaggtgacactggggtgtcacatcagccccagaagacgacgaactccgcttcgcccgaccctagggctcggactccgccctggcctctgccgaacaacctccgcctcgcccgacccaggggctcgggctcggcctcggccatggaagacagactcgacctcggcttcggaggaacctccacgtcgcccgacctagggcacaggccccgccacgtcaacaggaagcgccatcatcaccctacccccgagccgactcgggccgcagagaacaagaccggtgtcccatctggctag

SEQ ID NO: 12434 - DNA, 1075 bp, Zea mays
  Peptide Sequence Number=SeqID_55809
atggcgtccataataacaggagatttcgcggaggcctacgtacggaagaacgcctgcgaagaggagacgaggaaggcagaagcaagcaccgccggcggggtggcggcggcggcgacaccaggagacaagaaggccgacgctagtgcatcatccgagaagaaagtggccaaagaggctgcagctggtagcaacaagggagaaggaggcagtctcttcgggctgctgaagaagaaggatcctacaccagttcgccacaattggaaggtcctcacgacagagtctgcacttccatatattggcatccgattggcaaagcgagttgtttcgcgaggggagctctttgcggaaaacgacggcgttacggcctttccagagttgtcaacatcaaaggagaacgaaggtgctgaacaatttgggggaggtttgggggccctgcaggctggggaggacattttgttcatccgagtcgatcctcacacccagaaacgaagcggttcatttcacatcttagctctccctactgatgaaaacaacttcaatatttggccctacaaagtccaacatatttttcacgggtacgggtttgagacggcaaaacccagcgggtttgtacccgttgccatctctacgccttgtgctgaacccagaggcagcgagagcgagtgcgagacaccggatcccgtccgcccccggaccaagaatcccaacctcacagcgatggcagcatcccgcagcgaggaacgtgatcagaatcagccagtggtgcttgtgacggggtgctcggagggcggcatcggccacgcgatggcacgcgccttcgctgcggccgggtgcgccgtcgtggccacggcgcggtcacgcggttccatgcgcggtctcgacggcgacccgcggttcctgctgctggagctcgacgtgcgctccgacgagagcgcgcgcgccgccgtggcggatgcgctgcgggagcacggccgcatcgacgtgctcgtcaacaacgctggggttcacctcgtcgcaccactcgccgaggtgcccatggagtccttccaccaggttttcgacaccaatgtctatg

SEQ ID NO: 12435 - DNA, 438 bp, Zea mays
  Peptide Sequence Number=SeqID_55810
atgccccgtcgcaacacaaagatcccaatccaaagtgaaactggagccagagccatagcagtctccaacagtgcaaacaaccttgcagtctgcgtacaagctcttcgccagagtccgcataatctgaagatgcctcttgagaaggtggtgatacagacatttacaggtaataatctaaagttaaagagggagttacagggttctcatgtaataatctatatgaggggtcaggaaagagtgaaacttacagagaaaccatattcgctgggaagtgttgtatatcctcctggttctgacagcttgtgcatagggagaaacctattgctaaactatttctggaatggaaagtatacagtggatgaagtgaaagacttgctgtttaccagggagacattttggggccaaatctccgaaagattgatcaacagaatactatga

SEQ ID NO: 12436 - DNA, 1125 bp, Zea mays
  Peptide Sequence Number=SeqID_55811
atggttatgcagtttggtctgctaggtctccacttcattgagcttgttcgttgcagacaaaaccttgattttctttcgtcgggtcataattttgtgctggaacggaatgcccttaagtccatacagatagagctaatagaagagattgcgcctaacttgctgcagaacgatatggttatgcagtttggtctgctaggtctccacttcattgagcttgttcgttgcagacaaaaagaaggagggattgtgatatgtatctacggacaaaaccttgatttggtgttggtggatgttaatcttaacaatatggcaccagagactttggcaaactctaatttgttcaatcacatactgaatgaacttagagtccctcttatcgcccaaggaagtgcttatcctgaaagcaatggatatgaaaagccaaagaaacaaaaacgggtcacatggaccattgagctccatgaaaaagttcttggaggctatcgaatctcttgggggaacaagtctgctacacgtgagaggatcctgcacccgatgaatgtaaaggattcatcgtctgtcatactcaatgcttttccaagcttgctgcctaaaactgcagagatggttcttgatatttgtgtacttcgttgcatttatcgtgagtgtggcataggattcatcggcggtcatagtataaagaaggttggtgaccagtggtggtacagatgcaatcacaaatgcacaaagctccttaaaaaggtagtcagcttttctgagaacacaattaatactgggaatgtttgcttccatgtcaatgcagttgtaggcgaaatagagacactcccattccttcgtcacccatggggtcaaaataatcgtggcttgttctctcgcacgctagaagcagcagcgtcgaaaccactcctcaaacagctaccacctttgaattattgccgacatcgtcaatcgcaccttaaggagacgcgtccattgagatggacatggttcaattcaaggcagcaccggtgccgctccatagtagcaagtgactcctcatcgaccaaggaacagaagtatacttccaggaagcagcaagcaccactgactgaagtagggttccttcttacatctgctatgcagtga

SEQ ID NO: 12437 - DNA, 690 bp, Zea mays
  Peptide Sequence Number=SeqID_55812
atggccatttccaaggatcacaccaaggtctccaccaccaacatcatcaagccagccatagaggcactcccggctgataaccagcaaccctttgaggacctcgtaatgcgtgatgagaaggaggtgatgtgtcaatggaacgaacaacgcgacaaggaggagtccagatatactctcagactgttcggcccggtcgcggaccgtccgaccccttacgccgaaccgtccgggtatgcgtacgcagaaccgagagttgcacaatatacacagttcccacacccatcgcagcaacactatggtgccccactggtgacatgttataaccatgccagaccacctcatgaacatagagctgaatattcttcggccaccagagagcctgagagatgtaaagcaggaggtggtggcattaatatgacacctagcgcacatcttggacatccctgggaggaaagccgacaaaatgatgttaggcaacctgagatttccacccacaaacttaatggagggccaccagacatggtggaaagaatcagggatgaggtagttgggttgtttagagacaaactccgtgttagtgtgtcaggcatagggcagtcgtatcagaaaccttatagtcatcgatttgatgttgtgccatgcatatccgcaatgggtttggataccaaacttctccaaattttccggtga

SEQ ID NO: 12438 - DNA, 390 bp, Zea mays
  Peptide Sequence Number=SeqID_55813
atgtccggtggtgcaccggacactgtccggtggcacaccggacagtccggaactaggtgtaagcctaattccctttcacacacgctacaagacaatctgatcctgcaggctcgggtcttgatgctggaaggggccagcagcaccctcggcatcgacgacaacttcggcaaggttcgacctagcctcggacggcgacgcggtccgaagacctccactccgaaggacgacgtcatcaccacgctcgggccatcgccgccagggtcttctccgggaatccggaccgagcaggcggctcggccggtcacctctagggcctcggccgaccatcttccaagggcgccagcccgacccaaggcctcggctggtcaactccggcgtcggtcccgctaa

SEQ ID NO: 12439 - DNA, 993 bp, Zea mays
  Peptide Sequence Number=SeqID_55814
atgcaggcggcatgcaaccgcaccaagtggacgcgcttctccgactcccaacgcgcccggcctggaggcccaggcccacgcgtcactcaaccgcagggaccgggaaagggggataccccgaaaaggatccttccccgtgaaggaaccgggctccgagcctccctactgatcagaggttcgaaggctggcccccgaggggttcaacagccgcctcagatcgcgctggcccccgaagggttcacagccgcctcagacgccgagcgagggatgaccaggggggaccgggtccggcagatcacccgcatgtacttttgggcgtgcctctgggcccctagccgacccctaacgaacggggcacggacgtccactcggattacccgcttgcagctcaccggagacaccatgttcggcgcccatcgaggaggctcgggggctgctctcgcaaacccggctccggccaaaccgttgacagcgtcaacataccagcccgagaacttgggcctcgaccgtacacccgggctacggccagttcgcatgaggccctgccaaaggcaccataggaagctccgcccgaccccagggctcggactcgggctaagtcccggaagacggcgaactccgctccgcccgaccccagggctcggactcgggctaagtcccggaagacggcgaactccgctccgcccaacccagggctcggactcgggctcagccccagaagacgacgaactccgctccgcccgaccccagggctcggactcgggctcagccccagaagacgacgaactccgctccgcccgaccccagggctcggactccgccctggcctctgccgaacgacctccgcctcgcccgacccaggggctcggactcggcctcggccacggaagacagactcaacctcggcttcggaggagcctccacgtcgtccaacctagggcgcaagccagccacgtcaacaggaagcgccatcatcaccctaccctgagctaa

SEQ ID NO: 12440 - DNA, 552 bp, Zea mays
  Peptide Sequence Number=SeqID_55815
atgcaggaattcccttgcaggaccgccatcgcagcaaaatcctcccgagggcctccctacactgaccactcccctactgcccttgcccctttcggtttttcgagtttctggactgggcctcaaatccagagaaacccaggggtctcgagggtgggttatataccccgagacctgaacgcaacagagaaaaccatctccagctggcgtcccccggcgacccggaaatcgtggcggccaaggttggacggacttgcttccgttggcgagatctgcggggaagaagcgcccagtcgtgggtcccacctgtcggctaagacatccagtgcgccgcggaaagggtcgacacgcggtagccagacgcaagcggtcatccatgccgtgaagctcggcgttcgctgcgcgagttcggtgaagcagaggattccgaccggctgggcccacgcatcagtcggtcggcgtggattttggtttctgttgagcagagctgaccaacgcggaaggtggaggattggtctggcaaacgggcccgtgcgccagtgggaggaagaatag

SEQ ID NO: 12441 - DNA, 699 bp, Zea mays
  Peptide Sequence Number=SeqID_55816
atggagtcgatctccggcgaggatgctccgaagcacaacctgatcctgtccgcgctcgtctccaacctacagtgcatgctcgccgcccgccgcccgttcacggcagaggtcagcaccgccgccacagctagcgaggctgaggccttggctcaggaagcagaggcgtccgatgcccccacgggagatgggacgctggcgaggcccatcgtgctgctgacctgtgccggaggggaaccgaaaaccaaaccacagcgggaccggtgctcggatagggtccaacggcgatgcaagcaaggagtggcatgcggccggaggggcgcagatcggctcctgcacgtgcagcgcagccgcgtgacagtgaagcagggaggccgcgataggcggcacagggagggtgcgacggaggcaaagtgcaagcacctggggacttcagataaaatcttaagcaaaatgggagaaggtttgggttttctgcaatctgtcgtctcctcttctgctgggtatctccgttattattctaatgaagagggctatgagttggattttcgtagatcattcgtattgtatccttcctcggattgcttcttttgttctactacaaatatgcccaacatggcagggagaggtctcgaggtcaagcctggacccactgtcaagtgtgtgcttggacatgactttatcctgcactttccactgtaa

SEQ ID NO: 12442 - DNA, 1155 bp, Zea mays
  Peptide Sequence Number=SeqID_55817
atgcggctaccgtcggaacagtcggaaaggcagcagtcacatgcgggtcatgaagtcccgcatggcactggggttaccaagtccggagaaatcccaactaaagtcgggctcgtcatcttccctcggagccccgagggccccgtaggtcgagacggctgtcagcccggtccccaggcgtccaccgaagcgaagtcgcttggtgggtcgaggccgaatccaaaaggcacgagatgggaatcggtcggtacctcttggtcgacgggcggtgacgaaagtcacgtcgggggtagactgcaccgtcgtctcaggtacgagggtgacgcccggcaagtctttcacgagcgtgctggcgtcgtccgtccgcttggagttggcgtgttgcagggaaatggcgctcgtcttcgtctcagacgcgaagtcgatgcccgacgtgtctctcgttggggcgccggcgccgtcgactcgctcgacagccgacgaggtgccgcctcctacttggccttggttgccccgcctcctcctccgtcggcgggggaggggacgggacaagcccgaatgttgttcttccgccatgtggggaagacatcgtcgattccgacaccggcgggcgggttgtcggccgccattgtcgccgtcgcgcggcgggggaaggagtatcatgtcgtggctgccgtcgagggacatgaactcaagactcccgaaacggagcaccgttccgggatggaaaggtcgctggagactgcccatctggagcttgacgggaagctgttcgtcagattgcagcaggcccctacctggcgcgccaactgtcggcgtttcgaacccggggggtccctggacccacgagtaaattgtcgccacgtgccccagcccatatgggtcggcgcgagacggagcgcgaaggggggaagaagccggagggagacaggcgtaaaaggggaaacccgcggccttcgtgtttgtcccgcgcccaggtcgggtgcgcttgcagtagggggttacaagcgtccacgcgggagggagcgagaggcttacgcgagcgtcgtcccgtccttccccgcgcggccaaccctctgtaagagggccctggaccttccttttataggcgtaaggagagggtccaggtgtacaatgggaggtgtagtagtgtgctaa

SEQ ID NO: 12443 - DNA, 297 bp, Zea mays
  Peptide Sequence Number=SeqID_55818
atgtctgggcccgcccccgtcacggcgccaccgctcaccatcttctacgacggcagggtggtggtgttcgaggactttctagcggagaaggcggtcgaggtcatgcgcctcgcggccggtgacgacttgcccatcgcccggaaggcgacgctgcagcgattcctggccaagcgcaaggaccgcctcgtcaagcgcgtggccctacacccgcccatcgtcccccacggaggagctggagaagaagacgggcaagccggcctcggcctcggccacatgctcgacaaaatgactgtgtga

SEQ ID NO: 12444 - DNA, 666 bp, Zea mays
  Peptide Sequence Number=SeqID_55819
atgtggaagctcctccgaggccgaggtcgagtttgtcttccgtggtcgaggccgagtccgagccctgggtcaggcggagcggagttcgccgtcttccgggacttagcccgagtccgagccctgggtcgggcggagcggagttcgccgtcttctagggctgagcccaagtccgagccctgggtcgggcggagcggagttcgtcgtcttctggggctgagcccaagtccgagccctaagtcgggcggagcggagttcgtcgtcttctggggctgggcccgtgtccgagccctgggtcgggcggagcggagttcgccgtcttccggggctgagcccgtgtctgagccctgggtcgggcggagcttcctatggtgccttcgaaggggaagaaatgtggacggaaatctgcagctgtctacgttggagatgggaagaacattgtgcattcatggcttcactttgtatgttcttgtcccaatgaatttgaggcctgatgcaaacgtagtggaaatcgccagggttactggaatctgtaagatcgaaataaaaacagtcccagagaagcagttaagggagcatacgttgtgtacacagatgtttgggccagcatgggacaaaagaaagaagtttggttatagaaagcagaagtttcatggattcacgatttag

SEQ ID NO: 12445 - DNA, 456 bp, Zea mays
  Peptide Sequence Number=SeqID_55820
atggcgctcgtcttcgcctcagacgcgaggtcgacgcccgacgtgtcccccgctggggcgccggcgccaccgacgaggtgccacctcctgcttggccatgcctgccccacctcctcctccatcagcggggaaggtgacgggacagacccggatgttgctcttcagccacgaggggaagacgccgtcgattccgccgccggcattgtcgttgtcgcgcggcggaggaaggagtatcatgtcgtagctgccatcgagggacatgaactccagactcccgaaacgaagcatcgtcccgggttgaagaggttgctggagactacccatctggagcttgacgggaagctgttcgtcaacacgcagcaggcccctacctggcgcgccaactatcggcgtttcgaccccggggggtccctggaccgacgagtaaagtgtcgccacgtgtcccagcccagatag

SEQ ID NO: 12446 - DNA, 399 bp, Zea mays
  Peptide Sequence Number=SeqID_55821
atggctgaaaggtaccaactctcacggagttgcgttcctccaacgatgaagcggaaagacggcggcgcctctggcaggagaagcaggcgacgcttcgccttcgccataataaccgcctcaaaaaagggaccgggaaagggggataccccgaaaaggatccttccccgtgaaggaaccaggctccgagcctccctactgatgagaggttcgaaggctgcccccctggaagggttcgacagccgcctcagatcgcgtgggccctacccccaccactggtcagaggttcgaaggccggcccctcggaagggttccacggccgtctcaggctattcgggctccgcgcccattactgatcaggggttcgaaggctggcctgcaaagggttcacagccgccttag
